United States Patent Application Publication US 2005/0108791 A1 - sequence listing, part 2

SEQ ID NO: 3650 - protein, 192 aa, Zea mays
  unsure (1)..(192): unsure at all Xaa locations
MPAVSPHYLCALLSSLSAPPAPPDPSWTGIAMSDSEEHDFXSYADAGASDXTYPQHAVTVRKNAFIVIKNRPXXVAEASTSKTGKHGHAKCHFIAIDIVHGKKLEDMVPSSHNCDIPHGNRTDYQLMDISEDGSVRLLTSDGDTTDGLILPADETLVVQIKEGFXSAKDLVVTDHSAMGDEHICAMKDDDPK

SEQ ID NO: 3651 - protein, 161 aa, Zea mays
  unsure (1)..(161): unsure at all Xaa locations
MPHSDEHHFXESEADTGASETYPQDGVTVRKNGFVDMKNRPCKVGEDSTCETGKHGHSKCHFVDIHLFHGKRLEYIVTSSRKCDIPYVNRTEYHVIDISEDGFVNLLTSDGDTKDDLRLPTDETLVAHIREGFESGKDLVVTVQTAMTQEHICAMKDVGPK

SEQ ID NO: 3652 - protein, 145 aa, Zea mays
  unsure (1)..(145): unsure at all Xaa locations
MSDSEEHHFESKAXDAGASKTYPQQAGTERKNGFIDIKNRGGKGKNVFTSKTGKHGHAKCHFVAIDIFNGKKLKDIGTXSHNXDIPHENRTEXQLIDITEEGLESLLTSDGNTKDDLRLVAQIKEXFESGKDLGVTVQSAMGEEX

SEQ ID NO: 3653 - protein, 169 aa, Zea mays
  unsure (1)..(169): unsure at all Xaa locations
CIQDRNRHDRTTEEHHFESKVEAVLLKTYPHQVVTARKNGFVVIKNRPCKAVEVATTKTXGKHDLSKCHFVAIDIFNGKKLEYIVPSSHNCDIPHENRTEYQLIDISEDGFVSLLTSYVNTNDDLRLPADETLVAHIKEGFESGKDLVVTVQSAMGEEQICAVKDVDPK

SEQ ID NO: 3654 - protein, 162 aa, Zea mays
  unsure (1)..(162): unsure at all Xaa locations
MADSEEXHFQSKCXDALAPITYPQQAAIVRKNAFVFINNRPCQVAEGSTSKTGKHGHAKXHFVAIDIFNDKKLEDXXPSPHNCDIPHVNRTEYQLIDISKDGFVSLLXTSYGNTKDDLTVPTEETLVAQIKEGFESCKDLVVTVQSAMWDDHICALKDVGPK

SEQ ID NO: 3655 - protein, 216 aa, Zea mays
  unsure (1)..(216): unsure at all Xaa locations
CAGARWRPYLPSLIICASTFLLSLLLRLRRIHPRQESPCLDSEEHHFKSNDDAAAAETYPQQAGPARKNGFIAIENRPCKAVEVSTSQTGTHGHAKCHFVAIDIFNGKKLEDIVPSSLNCDIPHANRTEYHLIDISEDAFASLLTSDGNANGDLRLPTDETLAGQIKEGFESCXKDLVATVQSALMDEQICALXDVVPNQLPWLWRQNPTGSQLKS

SEQ ID NO: 3656 - protein, 194 aa, Zea mays
  unsure (1)..(194): unsure at all Xaa locations
MSDSEEHDFKSKDDAATSKTYPQQADTARKNGFIVIXNRPCKVEEVSTSKTGKYGHALCHFAAIHIFNARQLEDIGPSSHNCXDIPYANRTEYQLIDISEDGSVSLLTSDGSTKDDLRLPTDETLAAHIREGIXSVKDHVETVQTAMWEEQICAMKDVGPQELPWIWILNPTVSQLKSEKNVYTKGLLPRHSLA

SEQ ID NO: 3657 - protein, 157 aa, Zea mays
  unsure (1)..(157): unsure at all Xaa locations
XEEXHNETKADDGAAKTNPKEAGTERKNGIIVIKNRPCKGVEGTTSKTGKNGHAKGHWAAIDIVKGKKLEEIAPSSHNGDIPHVNRTEYQLRDISEDGFESRLTSEGNTKDERRLPTEETLEAQIKEGIERGKDLDVTDQSAMGEEQICALKDGGPX

SEQ ID NO: 3658 - protein, 162 aa, Zea mays
  unsure (1)..(162): unsure at all Xaa locations
MSDSEEHHFXSKADSAGCNTYPHDAGTVRKNGFISIKKRPCKDVEVSTSQTGKHDHARCHFGAVDIFNGKXKLEDIVPSSHKCVIPHVKRTEHLLIDISXEDGFVSLLTSHGNTKDDLRLPTDETLVAQINERFESGKDLGVTGQSAKGXEHICAVKDAGPK

SEQ ID NO: 3659 - protein, 168 aa, Zea mays
  unsure (1)..(168): unsure at all Xaa locations
MTGIAMSESEEHHFXSNVDAXGASNTYPQQDGTVRKNGFIDIKNRPCKVVXDTTSXTGTHXGHAASHFADIDIFKGKKVEDIVPSSHNCDIPHGKRSEYHLIDICEXDGFVSLLTSYGNTKDDLTLPTDETLVGQIKEGCESGKDLVVTDHAETGDDQICAVDDDGPA

SEQ ID NO: 3660 - protein, 160 aa, Zea mays
  unsure (1)..(160): unsure at all Xaa locations
MSDSEEHHFQSKGDAGGCKTYPQQGGTVRENGVIVIKNRACEGGGGSTSKTGEHGHAKCHFVAIDIFNGKKLEDIVPLSHNCDIPHVNRTEDQLSEISEEGGVRLLTSYGDTKEELILPTEETLVGQIKEGVESGKDLVVTVHSAMGEEEICAXKDVGPK

SEQ ID NO: 3661 - protein, 191 aa, Zea mays
  unsure (1)..(191): unsure at all Xaa locations
MSDSEEHDFESKDDAGPTNTYPQQVGTARKNGFIVIKNRPCKAAEGSTSNTVNHGHAKCHFVAVHIFNAKKLEDIGPSSHNCDIPHANRTEYQLIDISEDGFAILLTSHADSKEDLRLPTDETLVAQIMXGGQAVKDLDVTVQTAPYEEQICALKDVGPKPLPCLWTLYPTVSSTCIGKEVHLLKDWYRYI

SEQ ID NO: 3662 - protein, 127 aa, Zea mays
MSDSEEHHFESKDDAGAPMTYPQQAGNVRKNGFIVIKNRPCKDVEVSTSKTGQHGHAKCQFVAIDIFNGQKLEDIVPSSHDCDIPHVNRTDYQVIAIREDGFVSLLTSDGKTTADLTPANDETLGAQ

SEQ ID NO: 3663 - protein, 195 aa, Zea mays
  unsure (1)..(195): unsure at all Xaa locations
MSCSEEHLFQLNADARXAYETYPXQGGADGKNGFVSIRNRPCKVEEVSTSKTGDDGHGKCHFVDRDIFDGXKLEYIVPSSHNCVFLYANRTEYQLIDISEEGFVSLLTSHGNSKDDLILPTDETLVAQIKERFDSDKDLDVTVQSAMGEDHSCAVKDVHPHQLPWLCGRNPTVSQLRSENKRITTCIATETFTLT

SEQ ID NO: 3664 - protein, 162 aa, Zea mays
  unsure (1)..(162): unsure at all Xaa locations
MSDSEEHHFESKADAGASDTYPQHAATGRNNGFIFFKNRPCKGVQVSTSNXTGKHGXHAKCHFGAINIFSVKKLGDIAPSSHYCDIPYVNRTEYQLIDISEDVSASLLTSYGKTNDDLRLPTDDTLEVQINEWFXSAKDLVVTVPSAMGEEHICALNDVAPX

SEQ ID NO: 3665 - protein, 162 aa, Zea mays
  unsure (1)..(162): unsure at all Xaa locations
MSCSEEDDFQCEADAGAMNTYPEEDGTARNNGFLAIQNRPCKAVEGATSKTAKCGRATCRFADLDIFDGKKLEDIVPSSHNCDIPHVNRTEYQLIDIXEDGFVSLLTSHGNTKDDLRLPTDETLVCQIKEGIESGXDLAVTVHPAMAXEQIXLLKDGELLVT

SEQ ID NO: 3666 - protein, 164 aa, Zea mays
  unsure (1)..(164): unsure at all Xaa locations
MFYSEEHHSRSKADAGAPRTHPQQAGTVRNNGYIASKNRPCKVGEDSTTKTGKQGHAKRHVAAIDIFNGKKLEDIVPPAHNRDIFYATPPEHQVNDISEDGAVSQRTTXGNTKEDLRHPTEETLVTQIKEGFESGKELVETVQAAMGEEQNGAREDDGPKKLTC

SEQ ID NO: 3667 - protein, 186 aa, Zea mays
  unsure (1)..(186): unsure at all Xaa locations
MPDSHEHHFQSNADAVAINTYPHHAGTGRKNDFIFIENRPCKVVEVSTSNTVKHGHAKCHFDVIHIFNAKKLEHIVPSSHNCDIPHANRTEHQLIDITEDGFVSLLTSDGKTNDDLILPTDETLVAHIKEGVESGXKDLVETVHSAMAEDQICXAMNDAGPKQLPWLWRRNSTVSQLKSEKKCITI

SEQ ID NO: 3668 - protein, 175 aa, Zea mays
  unsure (1)..(175): unsure at all Xaa locations
MSDSEEHHFKSRPFLGXSKTYRRGGWTGPKNGVIFIKNRPCKGGGVSTSKTGKHGHPKCHFVAIDIFNGKRVEDIVPSSHNCDIPHVNRTEDQLIDISEEGFVSLLTSHGNTKEELRLPTDETLVAHIKEGFXSGKDLVVTVHSPMGGEQICPLKDVGPKKLPWFWGRNPTLSHL

SEQ ID NO: 3669 - protein, 121 aa, Zea mays
  unsure (1)..(121): unsure at all Xaa locations
MSDSEEHYFESKTDAGEFKTYPXQADTVRKNDFIVIKTRPCKAVQVSTSKTGKHGHDKCHFVAIYIFDGKKLEDSVPSSHNXEVPHANRTEHTVIDISEDGLLSLLTSDVHTKDDLTLASD

SEQ ID NO: 3670 - protein, 221 aa, Zea mays
  unsure (1)..(221): unsure at all Xaa locations
MPAVSTSLSLRSTFLLSLLLLLRLIHPRQESPCLDSEEHHFKSKADAGASNTYPQHAGTVRKNGFIDINNRPCKVXVEVXSTSNTGKHDHAKCHFVAIHIFDGKKLEDIDPSSHXDCDIPHVNRTEYQLIDISEDGFERLLTSDDSTKDDLILPTDETLVVHIKDTCSIADKDLVCTXVHSAMGEEHICTLNDVGPNELPWLYRLNPTVSQLISEHNCITE

SEQ ID NO: 3671 - protein, 146 aa, Zea mays
  unsure (1)..(146): unsure at all Xaa locations
GCPSTYPXHAGTVRKNGFIVVKNRPCKGVEVSTSKTGKDGRAQCHFVAIDIFYDXKKLEDSVPSSHNCGIPHGYRTEYQLIDISEDGFVMLLTSYGDTKDDRRLPSDDTLAAQMKEGFESAKDLVVTDQSAMIEEQICALRDVXPX

SEQ ID NO: 3672 - protein, 161 aa, Zea mays
  unsure (1)..(161): unsure at all Xaa locations
MSDSEEHDFESKADAGASKSYPQHDDTGRNNGFIVINNRPCKGVEVSTSXTAKHAHAECHFVPIQIFNVKKLEYIVPSSHHCDIPHVNRTDYQLIDISEDGFESLLTSDGNTNDDRRLPTDETLVDQIKEGVKSGQGXLAETAQSAMSQEHICALKDVGPK

SEQ ID NO: 3673 - protein, 163 aa, Zea mays
  unsure (1)..(163): unsure at all Xaa locations
MSDSEEHHLQIXKADTGAIKTYPQXGGTVRKNGFIGIKNRPCKXTAEVFTSKTGKDGHAKCHFDDIDIFNGKKLEDIVTSSHNCDISDENRTEYQLIDIXSEDGFESLITSNGNTKDDLRLPTDETPVAQIKEGLESGKDLVETAQTEMGKEHNCSKKDVMPK

SEQ ID NO: 3674 - protein, 166 aa, Zea mays
  unsure (1)..(166): unsure at all Xaa locations
MTQSKEKHCQLKADAGSXSKTYPHEASPVRKNGFIVITNRPXQVVQVPTSETGKHEHVKCHFVAIQIFLGNKLQHIAPSSHNXGIPHVKRNDYHLIDISXDAFVSLLTSDSNSNDDLILPTDETLAGQIQEGFXESDKDLAVTVSXSAMGEEHICALNDGAPKKLR

SEQ ID NO: 3675 - protein, 107 aa, Zea mays
  unsure (1)..(107): unsure at all Xaa locations
MWDSEEHHFESKADAATCKTYPQQAGTVRKNGFIVIKNRPCKVVEVSTSKTGKHGHAKCHFVAIDIFNGKKLEDIGPSXHNCDIPHVNRTECHLIDLSKDGLESLLT

SEQ ID NO: 3676 - protein, 160 aa, Zea mays
  unsure (1)..(160): unsure at all Xaa locations
MSDSEXYHFQSNDDDGAPNTYPYHVGTARKNVFIVIKNRPXNVVEVSTSKTGNIGHAXCHFVHIHIFNGKKLEYIDPSSHNXDIPHGNRTEYRLIDMSDDGFVILLTSDGNSKDDLRLPTDDTLACHINEGFESWNDLVVTAQSAMRDEDICAMNDDGPE

SEQ ID NO: 3677 - protein, 125 aa, Zea mays
  unsure (1)..(125): unsure at all Xaa locations
IAVSDXXEHHFXSKADSGASKTYPHQAGTVRNNCFIVIKNRPCKVVEVSTSNTVNHGHAKCHFVAIDIFNCKKLXDIVPSSHNCDIPHLNRTEYHLIDISXDGFVSLLTSDGNTNDHLILPTDEX

SEQ ID NO: 3678 - protein, 175 aa, Zea mays
  unsure (1)..(175): unsure at all Xaa locations
MPPKQPYLCRTQEDHNFKSLDCGVASQTYTIQCVTVLKNXLIRFKNRPCKVEEVSTSQTGNHEHALWHFVDIYIFHVKKIGHIAPSSNYCDIPHANRIEHQVIDISEDGFVSLLTSDGNTRDDLRLPTDETLVAHIKEGFESGKDLVVTVQSAMGDEQICPLKDGAPSHLPAVEY

SEQ ID NO: 3679 - protein, 185 aa, Zea mays
  unsure (1)..(185): unsure at all Xaa locations
ASPSAPLSISLXLRLLLDPAKPGIXRXDSEEHHFESKADAGXSKTXPQQAGTXRXNGFIVIKNRPPXXVEXSTSKTXKHGHAKXHCVXIXIFNGKKXEEIVPSSHNXXXPHXNRTEYQXSXKXXDGFXSLLTSEGNTKDDLRLXTXETLVAHIKEGFXSCKDXVVTFQSXIGEEQNXXPKDVGPX

SEQ ID NO: 3680 - protein, 162 aa, Zea mays
  unsure (1)..(162): unsure at all Xaa locations
MSDSEEHHFESKAEAAASITYPQNAGTVRNNDFIYIYNRPCKGVQVSTSPTGKHDXHAKYLFVAIHIFDGKKLEDIVPSSLNCDIPYVNRTDYQLIDISEDAFVSLLTSDDSTKDDLILPTDETLVVHIKDRFLXSDKDLAVTVLSAMKNEQICALKDVHPE

SEQ ID NO: 3681 - protein, 192 aa, Zea mays
  unsure (1)..(192): unsure at all Xaa locations
MADSEEHHFQSKADAEKYRTYPHEGGTDRNNGFIVIQNRPCKAVEASTSKTDKHAHAKCHFVAVYIFHGKKLENIVASSHHCXDIPHENRNDHHVIDISEDGFVSLLSSYGNTKDDLKLPTDETLAAHINEGFESAKDLVVTVQTAMREEQMCALNDAGPQXLPWLCTRNPTLSQLISEKNRITKGLLPRHS

SEQ ID NO: 3682 - protein, 225 aa, Zea mays
  unsure (1)..(225): unsure at all Xaa locations
MPVDQPALSLCLYFLLSLSPPAPPDPSYTGIVMSGSEEHHFKSKADAAASINYPQHAGTVRNNGFIDINNRXPCKVVPGSLLSNTGKHDHAKCHFVAIHIFDGKKLEDISLPSSHYCDIPYRERTDYQLVDISEDVFESLLTSDDSTKDDLILPTDETLVFHITERFYSRKDLVVTVXSAMGNEPICALKDVAPKKLPCLWRPNPTASQLKSANIWITKPLLPTH

SEQ ID NO: 3683 - protein, 115 aa, Zea mays
  unsure (1)..(115): unsure at all Xaa locations
MLDWGEHHFESNADAVAFKTYPQQAGTVRTNRFILIKNRPCKAEQVSTSQTGKHGHAXCHFVSIYIFNGKKLQDIVPSTQKCDIPDVNYTEYQLIDISQDGFVSLFTLDGNTKDD

SEQ ID NO: 3684 - protein, 162 aa, Zea mays
  unsure (1)..(162): unsure at all Xaa locations
MSDSEEHDFESYADAGASDTYPQHAVTVRKNAFIVIKNRPXXVAEASTSKTGNHVHLKCHLCXAIHIVHGKKIEDMVPSSHNCDIPHVXNRTDYQLIDISEEGFVRLLTSDGNTTDGLILPADETLVVQIKEGFXSSKDLVVTDHSAMKDDYICALXDDVPK

SEQ ID NO: 3685 - protein, 121 aa, Zea mays
  unsure (1)..(121): unsure at all Xaa locations
MGDXEEHHFESXAHPRASKTYPQQAGTGRKNGFIXIKNRPRRXXXVSTSKTGXHGHAKCHFGAIDIFNGKKLEDIGPSAHNCDIPDVNRTEYQVXGISXDGFGSLLTSNGNTKEDLKLPTX

SEQ ID NO: 3686 - protein, 103 aa, Zea mays
  unsure (1)..(103): unsure at all Xaa locations
MSGSGEHHFESKADTRAYKTYPQQAGTVRKNSFIVIKNRPCKVVXVSTSKTGKHGHAKCHFVTIYIFNGKKLEDIAPSSHNCYIPNVNRTEYQLIDISXDXFX

SEQ ID NO: 3687 - protein, 128 aa, Zea mays
  unsure (1)..(128): unsure at all Xaa locations
XSSMAQEKAHVPTQCSALRKGGFVMLKEHPCKIVDMSTSKTGKHGGAKVHLVGVDIFTEKKVEDICVSTHNMDVPVVERKDYQLIDIDGDDVTYLDETGSSFTNLKMPSLCESDLTLATDLREKFXEL

SEQ ID NO: 3688 - protein, 124 aa, Zea mays
  unsure (1)..(124): unsure at all Xaa locations
MSDSEEEHFESKADAGACKTYPEHADTVRKNGFIVIKNLPCKDVEVSTSKTGKHGLATCYFGAIYILNGKKLEDIESSSHNXDIPHVNRTEYXLIDISXDGFVSLLTAHGNTKXDDLRLLTDXX

SEQ ID NO: 3689 - protein, 161 aa, Zea mays
  unsure (1)..(161): unsure at all Xaa locations
MTDSGDDHFESKADAVASKTYPKXGGTGRKNGFFVINNRPCKVVEVXSTSKTANNEHDXCHFVAIDIFNGKWLEHIVPSSHNCDIPHANRTEYHMIDISDDGSVRLLTSHGDTXDDLRLPTDETLVAHIREGIXSVKDLVETVQTAMWEEQICAMKDGGPQ

SEQ ID NO: 3690 - protein, 193 aa, Zea mays
  unsure (1)..(193): unsure at all Xaa locations
MSDSDEXHHFQSNADAASSKTYPQNGGSVRKNXGFIVIKKRPCNVVXVSTSKTGKNVHSKWHFVVIHIFNVNXFGDIAPSSHXNCDIPHVNRTEDQLIDISEDGYDDLLXTSDXGITNDDLKLPTDETLVVHIKEDFXSGKDLVVTVHSAMLHAYICALNDVGPKQLSWIWRRNPTLSQLTSDKKCITRGLLP

SEQ ID NO: 3691 - protein, 190 aa, Zea mays
  unsure (1)..(190): unsure at all Xaa locations
LCTSTLLLSLILRLRLIHPRQGSTCSDSQEHHFESKADAAACKTYPQQAGTXIRKNGFIAIENRPXXKVDASDSXTSKTDRHDHAICHFVAIHIFHAKKLEDIVPXSSHNWDLPHVNRTEYQLIDISEDGFASHLTSDDNTKDDLRLPSDGDLLTCPKEGFESEKDLVVTVQSRDDXEEHICAWNDDGPQ

SEQ ID NO: 3692 - protein, 200 aa, Zea mays
  unsure (1)..(200): unsure at all Xaa locations
FILKFPPPSLISLLLRLLLSPVKTGICHVRTLEEHHLRTPSDAGASNIYPRQGGPVRKNGFIVFKNRPCQVVWVSTSETDEHGHAKCHFVAIDIFKGEKLEYTAASSHNCDIAHVNRTEDHLIDISHDGSVSLLXTSDVLTNDDLILPADDTLVGQIWEXGTRTVKDLVVTVQSVYAEECICALIDAGPKLLTCLEILYL

SEQ ID NO: 3693 - protein, 131 aa, Zea mays
  unsure (1)..(131): unsure at all Xaa locations
MPHLDDHQLESKVDTQASKTYSQNAGSARMNSLIVIKNRPCKVEEVSTSITGNHGHAKCHFAVIHIFNAKKIEYIVPSSHNXDITHVKRTQYRLIDISEDGFASLLTSDGNTKDDLRLPTDETLVAQIKEX

SEQ ID NO: 3694 - protein, 164 aa, Zea mays
  unsure (1)..(164): unsure at all Xaa locations
SIQERDRHVRTRQEHHFRSIADAGACKTYPXQGGTVRKNGSIVIKNRACEVTEGCTCKTGKHGXHAKXCQFVDIDIFDGKKLENIVPXSHTWDIPHVNRTEFKLIEISEDGYVSLLTSDGNTKDDLRLTTDETVVAQIKEGLKSGNDIDETVQPRTVEEQICTX

SEQ ID NO: 3695 - protein, 132 aa, Zea mays
  unsure (1)..(132): unsure at all Xaa locations
GRVGKHVDRNKKEHHYXEKKADTGANKTYQEXHAGTXVRKNGFIXVIKNRSCKGGEVFTYKTGKHGHAKCHFVAIDIFNGKXLEDIETXSHNCDIPHVNRTEYELIDIYEDGIVSLLTSDGNTKDDLRLPTD

SEQ ID NO: 3696 - protein, 128 aa, Zea mays
  unsure (1)..(128): unsure at all Xaa locations
MSDSDEHHFELDGRAGSSKTYPAHAGTVRMNCFIVIKNRPCTAVEVSTLKTDKHGHAKCYFVAIDISNGKKFEYIGPSXHILHITAVNRTEYHMIDISDYGLASFLTSDGNTNDDLKLPTDYTLVAQI

SEQ ID NO: 3697 - protein, 166 aa, Zea mays
  unsure (1)..(166): unsure at all Xaa locations
MADSEEHHFXSKADVGEYKIYPHEGGPDRKNGFLGIKNRPCKAVEASTSKTDKHAHAKCHFVVIYIYTGKKLENIVASSHNCXDIPHVNRTXDHQLXSDISEDGFVSLLTSDGNSMDDLTPPTDDTLVAHIIDTCERAKDLLVTVQSAMXHGHICALKDVRPXKLP

SEQ ID NO: 3698 - protein, 122 aa, Zea mays
  unsure (1)..(122): unsure at all Xaa locations
LPCKDAEDYTXLTVKHGHAKCHFAAIDIFNGKKLXQIVPSSHNCDIPHVNRTEYQLIDISEDGFASLLTSDGNTKDDLRLPTDETLVAQIKEGSESGKDLAVTAQSAMGEEQICALEDDGPK

SEQ ID NO: 3699 - protein, 102 aa, Zea mays
  unsure (1)..(102): unsure at all Xaa locations
XGLSVATSKTGEHGHAKCQGVAIDIYNGKKLEDIGPSSHNWDIPHVNRTEYQLIDISEDGFASLLTSDGNTKDDLRLPTDETLGAQIKGGYESGKDLCVTVQ

SEQ ID NO: 3700 - protein, 183 aa, Zea mays
  unsure (1)..(183): unsure at all Xaa locations
SSRTSDHHVRSRAEYHXFKSKGDAAACMRXPQNAGTARNNGFIVIKNRPXKGVEVSTSAXTGKNGHAKCHFVGIDIFNGQELEDIDPSSHNXDIPHAHRTEYQLXIDISHDGLDILLTSNGNTKEDLRLPTDDTLGCQIDERFASVHDPGENVQTAMEEEHICALNDEVPDQLPCLGILYLLT

SEQ ID NO: 3701 - protein, 166 aa, Zea mays
  unsure (1)..(166): unsure at all Xaa locations
MWDSEEHQFESKDDGAEGKTYSKNTGTARMNEFIIIINRTCKVEEGSTSKTGTNVHAXLCHFVCIDIYNGKNVEDMVPSSYNCEIPNANRTDDQMIDISEDVFVSLLTSDGKTNDDRKLPNDDTLVAQIMEGLESVXKDLGVTVQTAMXDEQICXAHKDDGPNKLP

SEQ ID NO: 3702 - protein, 164 aa, Zea mays
  unsure (1)..(164): unsure at all Xaa locations
MAMQDSEEHHFKSKAAAGYSKTYPKXRLAPDRKNGFIDYKNRPCTVGEVLTXKTANNAHAKCHFVAIDIFNGXKKLEDMXRLGNKXDIPYGNRTENQVIVIXEDGFVTLFTXDGDTKDDLRLPTDETLVAQIKEGSETRKDLAGTDQHAMGEEQIXALKDVDPQ

SEQ ID NO: 3703 - protein, 154 aa, Zea mays
  unsure (1)..(154): unsure at all Xaa locations
ESPXSDSEEHHFXSEXADAGASXTYPQQDETAHKNGFFIIKNRPCMDEXDTTSITAKHVHGQCHFXAFIHIFNGKKLEHSAPSSHNWDVPHVNRXTEYHLIDISDDASVSLLXTSNANTIDDLKLPTDETLEAHIKEGFXSRNDLDVTVHTAMX

SEQ ID NO: 3704 - protein, 191 aa, Zea mays
  unsure (1)..(191): unsure at all Xaa locations
SRILHVRLIHHLQGSPCSDSEEHRFXSKADSGTTETYPLQDVTVRIIDFVDLKNRPCTXVEVXTSKTGKDDRAKCHFVAIDIFHGKQLEDIVPSLHLCDIAHVNRTDYQMIHISEDAFGMLLASYGNTNDDLILPTDETLEVHIIERFESAKDLVIXTVQTDMDKDQSCSMKDVEPNILHCVFRRNPTVSR

SEQ ID NO: 3705 - protein, 115 aa, Zea mays
  unsure (1)..(115): unsure at all Xaa locations
MSXGDEHHFXSKADSGASKTYPHHAATARKNGFIAINNRPCMVVKVSTSKTANHAHTKCHFVAIYISIGNNLEDNDSLSHICDIPHVNLSAYHLIDISXDXFMSLLTSNGNTNDD

SEQ ID NO: 3706 - protein, 178 aa, Zea mays
  unsure (1)..(178): unsure at all Xaa locations
KDSIGPPVANARSRPPVACQAYYPLQAVTARKNGFIGIKNRPCKVVEGATXERTGHHGHAKCHFAAIDSXFNGXKSSTDIGPWXHNCNILHGNRTEYXSLNDISEDGLASLLTSDGNTNDDLTLPTDETVAAQIKEGVESGKDLVVTVQTAMAEEQIXALKDVGPKQLACLEILYLRN

SEQ ID NO: 3707 - protein, 167 aa, Zea mays
  unsure (1)..(167): unsure at all Xaa locations
SLLDRDRHVWTRLEHHFKSKADTGASDIYPQHAATGRNNGFIFFINRPCKGVPVSTSPTGKHGHATCPVRPLNIFSVKKLGDIAPSSPCCDFPYVHLTEYQMIAISEDVSASLLTSCGMTIDDLRLPTDDTLEFRIIESFYXSQKDLXVVTVPSALGEXAICALNDX

SEQ ID NO: 3708 - protein, 98 aa, Zea mays
  unsure (1)..(98): unsure at all Xaa locations
MLDLXEHDLESKADAGASKTYAHHAGTVRKNGFIGIKNRPXKVVVVPTSETVHHGHAKCHFAAIDIFNGKKLEDIAHXSHNCDITYVNRTEYQLIDLX

SEQ ID NO: 3709 - protein, 154 aa, Zea mays
  unsure (1)..(154): unsure at all Xaa locations
MADEEFEYQENTEGGLXXTPSTAGDIKKNQFMLIKGAPCKVMDKSTSKTGKHGHAKCNIVGICQLTGKKYQDVLPAHAAVMVPKITRTEYQLLDLTKSDDGGGFCSLLDEKNNTIELPLEGEEAEKLIADYDPNNTDEDILVAVLAVAGXDWVS

SEQ ID NO: 3710 - protein, 169 aa, Zea mays
  unsure (1)..(169): unsure at all Xaa locations
MTREEHHCLNQMPTPPPSKTYPHDAASARNNGFFGIKNRPCKAAKAPTSNSAXHGHAKCXALLSIDIFHVKKLEHIVPSSLNCDIPPENRTEHQLIDISXDGVVSLLTSDDNTKDDLMTPPCNTLVTLIXEGVESGQDLAATVQPAMTDQQICALKDVFPSNFPALEYC

SEQ ID NO: 3711 - protein, 163 aa, Zea mays
  unsure (1)..(163): unsure at all Xaa locations
ILPRDSQEHHTTHKADPRTRKTYPETTTTRRQNGLMVINNRTYTTVEGGTCTTAHHRHPKRHLHALDIFNEKKLEDTDHSTHITDTPYVNPTEYQTTEIADDGTVSHYTXDGNTNHDLRLPTDETFVAQIKEGLQSNKDLVVTVQYGMGXSEQISTLNDAAPX

SEQ ID NO: 3712 - protein, 130 aa, Zea mays
  unsure (1)..(130): unsure at all Xaa locations
MDPVKPGIDHDDSDEHRFESKAYARAVKSYPXQGCHTXQKNSCIVIKNRPCKGVQVYTXNTGXHGHAKCHFDXIDMFNRKKLADIGTWSHNCDISHVNRTEFQLIDISQDGFGRRFYSNGNTNDDLRLPT

SEQ ID NO: 3713 - protein, 190 aa, Zea mays
  unsure (1)..(190): unsure at all Xaa locations
MAGSEEHELESEGDAGGANSDPQEGGTVRKNGFIGXIDNRPCKGGEVSTSETGSGGHGRCHFVGIDIFKRRKLGHIVPSAHNWDIPHGDRTGDQVSGRSGDGFVERLTSDGNTKDELALPSERRLGGHIEEGVERGKDRAVSGEAXVWGEEQICALKDVGAQVTSLPWNSVSAKRWVRKKKGIKDCYGDV

SEQ ID NO: 3714 - protein, 95 aa, Zea mays
  unsure (1)..(95): unsure at all Xaa locations
TKTRNAXXDXHEHHXEXKADXGAXKTNPQQXGTXRKNGFIVXKTRPSKVVEVSKNKTGKHGHAKXHFVAIDIFNGKKLEDIVPSSHXCXXPHVXX

SEQ ID NO: 3715 - protein, 143 aa, Zea mays
  unsure (1)..(143): unsure at all Xaa locations
MSYSXDHHFXSKGDVGANNTYPKHDGTVRKKGFFAIRKRPCTAAEASSAXTAKYGHAXWHFVVVDVFNGKKLENIVASTHNCDVSLLTSDGNSKDDLRLPTDETLVRQIKEGVESGKGXLVVTVQSAMXXEEQICALKDDDLK

SEQ ID NO: 3716 - protein, 183 aa, Zea mays
  unsure (1)..(183): unsure at all Xaa locations
RTLEEHHFRIXKADAARGTTYPQNDGTARNNGFLDINNRPCQAVEGSTSPTATHGXHAKCHFALIDIFHGKERENIVPSSHXNCDXVPHANSVTEYQMIDIXSDDGFATLLTSNVNAKGDLKLPTDETLAGQINERSDQXVYDLVATAQTALIDEQIXPIXDGVPNQLPWICRHYPTGSPLTS

SEQ ID NO: 3717 - protein, 196 aa, Zea mays
  unsure (1)..(196): unsure at all Xaa locations
MILTSTIWRLPAPPPVFGERRKPATSMTYXDEDHFESTADLQETSTQRQRAGTASKNGFICVNNRHVQVTRVSTSKTGTNAKGTCHFDAIDVFTGRQIVDIATSPCNCAMPHVNRTEXPLIDISEDGFVRLLTSQGNTKDAVRLPTDETLVCQNDGGAESGKDLAVTDQPAMGDXQICAVNDGGPKELPWLGIMDL

SEQ ID NO: 3718 - protein, 162 aa, Zea mays
  unsure (1)..(162): unsure at all Xaa locations
MGMGDSEEHHLESEGRRSGANMNYLKKAGTGRMNGWIGIKNQSLADVEETTXRLRSXGHDKAVSRILHIERKKHEHIGPVRHICDIAHVNRTEHHLIDIXDDGFVSLVTXDGNTKEDLKLPTGETLVAQIKEGFESGKDLVVTVQSAMGEEQICALKDVGPK

SEQ ID NO: 3719 - protein, 184 aa, Zea mays
  unsure (1)..(184): unsure at all Xaa locations
PCEDSEDDHXXESKAXDSAWCKTYPWHCGTGRRNAFIVIKNRTXQGVKCSTSKSGXHGHRXMHTLAAXDIFNDKKVATIFAPSSHECYIPHGQRTDDHVIEISDDGFESLLTSQGNTKDDLRLPTDDDXLWTHITVRGSNSRXKDLVATVQXAAMWDEQICAIDDAGHQITSLYWKTEPYCIST

SEQ ID NO: 3720 - protein, 134 aa, Zea mays
  unsure (1)..(134): unsure at all Xaa locations
MSDSEEHHFESKADAGASKTYPQQAGTVRKNGFIVIKNRPCKVVEXXXXXXXXXXXXKWHFVXIXIFNGKKIEDIVPSSQKWDXFFLPPPPHQLIDTPDDVSVPLPNHNVSSNFHPRPPSSPPPPLPALPPPPX

SEQ ID NO: 3721 - protein, 103 aa, Zea mays
  unsure (1)..(103): unsure at all Xaa locations
TVVEANTSYTGNHFHAKCHFGAVDIFNRKKLXYIVPSSHNCDIPHVNRTDYQLIDISPNGFASLLTXDGTTKDDLTLPTDETFVAHIKEGFESGNDLLVTVHP

SEQ ID NO: 3722 - protein, 136 aa, Zea mays
  unsure (1)..(136): unsure at all Xaa locations
SILYRYRHVRTRVEHHFXRSRADGVPPLTYPQKAGTGRNNGFICLENRPXRDVQVSTSHTGEHGHAQMXQFVVIHXIFDWKKLEDIVCTSHYCKIPYVNCTEYQVIDISEDVSDDLLTSDGCTKDDLRLPSDESLX

SEQ ID NO: 3723 - protein, 160 aa, Zea mays
  unsure (1)..(160): unsure at all Xaa locations
MSDWEEHLVXAEADVGGPNTXPQRVGPARLNGFSVLQNRPCHDEDDATSETEKDGRDTCPLIXVDIFNGXKLEDIARSSCNXGVPHXNQSCYKLTAISEYGFVKLLTSDGHSKEDLRLPCSKRTLATLCGGFRSXKDVDQTVQSAKRQQPICSLNDVDPR

SEQ ID NO: 3724 - protein, 184 aa, Zea mays
  unsure (1)..(184): unsure at all Xaa locations
MSMLFRVLLDPNEKKICTSKSKDHLFESIADPRTLETYPEKAATARKNAFIIITNPPCQAAAAPTSKTAXHDXHAKCHFAGIPXSFHAIKLEDIVPSTHNCNIAHGDLTEYHLIDISEAGDETLLTVHDNTKDDLKLPADNTLGVQIKGGIEIEMNLVATAQTVMAQDLTSSMNHDGPTQLRCL

SEQ ID NO: 3725 - protein, 123 aa, Zea mays
  unsure (1)..(123): unsure at all Xaa locations
MSSLSVRAPPTDPSKTGIAMLYSQEHHLESKALAEASNTYPQLAGTIRYNGFIVIDSHPCSVAEASTSMTGTHGHSRCRISSIYILQWKXLDYIRPSSHNCYIPNVNWTEYQLIDISEDGLVS

SEQ ID NO: 3726 - protein, 146 aa, Zea mays
  unsure (1)..(146): unsure at all Xaa locations
MVDSEEHQFQSKEGPARPNSYPKKAGPGRKNRFIIINNRPCTVMLISTXKTAKYDHXARCHFEAIDIINGKEIEHIVPSXNNCDVILLTSDVNSTDDLRLPADDTLGAHIKEGFESSKDLVVTVQTAMGXEQICALHDRAPQKLPD

SEQ ID NO: 3727 - protein, 167 aa, Zea mays
  unsure (1)..(167): unsure at all Xaa locations
MADWEEHHLKLKATAGVVKTYPQEVGAARKNGNMGIKNGPCLGAEESTXEGGEHGHALCHVXGXIDMFSAKELEDIETYHHNCDMPDGIRPDILMDDRCQDVXMRPVTLNGNALDDATLPTDDILDDNIKEWKDSEADLVETAQDGIGEDTICALQEGGPTDVTSLA

SEQ ID NO: 3728 - protein, 116 aa, Zea mays
  unsure (1)..(116): unsure at all Xaa locations
SLSLIIRASTFLLSLLLRLRLRLIHPRQGSPCXDSEEXHFESKGDXXGASQNYPXXVAPVRKTGFIVIKNRPCXVEEVFTSKTGKYGAAKCHFAPIDIFHGKKLEDIVPSSDNCXH

SEQ ID NO: 3729 - protein, 102 aa, Zea mays
  unsure (1)..(102): unsure at all Xaa locations
SKTGIVLLDSAELHXWNSKADPXGSKTYPHQAGTGRKNGFLVINSRTCRXVRGPTSKTXKHGHAKCHFVSIYIXNGKKLEXIAASSHSCDIPHVXNRTCLVX

SEQ ID NO: 3730 - protein, 163 aa, Zea mays
  unsure (1)..(163): unsure at all Xaa locations
MADSEEHQFLWKGDVEKYRIYPHEGVTDRNNGFLVIQKRACKRXVAGLLPYKNGKRGLAKCQFVAVCIFPGKKLVNIVASSHHCDISHENRNDHHLIAISEDGILNRLSSYGNTKDGLKLPTDDTLCGPXFLNRFARSKDILVNVQNAMGEGXIWLLNGAGPH

SEQ ID NO: 3731 - protein, 88 aa, Zea mays
  unsure (1)..(88): unsure at all Xaa locations
XDLEPAGXNCDIPHVNRTEYQLIDISEDGFVSLLTSDGNTKDDLRLPTDETLVAQIKEGFESGKDLVVTVQSAMGEEQICALKDVGPK

SEQ ID NO: 3732 - protein, 188 aa, Zea mays
  unsure (1)..(188): unsure at all Xaa locations
IPYHHAPLRLLVCTAAPCPPVTSEIGSLLCYLVDPHFTANXDAEVHCTYAQPARTGRKXAFPAIKMLLLLDGEGTMSRWRRXAXQIGIGAPEIYNEDDLDNVAPSSHNCDVXPHENRTEDQVIDISEDGFVSLLTSDGNTNDDPRLPTDETLVAQIKEGFESAKDLVVTVQSAMGEEQICALKDACPX

SEQ ID NO: 3733 - protein, 96 aa, Zea mays
  unsure (1)..(96): unsure at all Xaa locations
MIFNVSRYXGTHMAMHNCDIPHVNRTEYQLIDISEDGFVSLLTSDGNTKDDLRLPTDETLVAQIKEGFESGKDLVVTVQSAMGEEHICALKDVGPK

SEQ ID NO: 3734 - protein, 193 aa, Zea mays
  unsure (1)..(193): unsure at all Xaa locations
DCLSSPIAYHLSVLPCFLRAPLLIHPNHFLALADYKEHHFQSKAHDPPYKTYPHXPGIQQKNCFICMKNPPCWVVPCPTSWTGKHGHGRRHFHLLYIFKGSRLDYIEPSSHCCHIPHGHRTELHLIDISEHECWILLTSDGCAKDDRRLPTXDQTLVRRISDCPFRGKDLEXATVQTALANENICALNDVGPK

SEQ ID NO: 3735 - protein, 182 aa, Zea mays
  unsure (1)..(182): unsure at all Xaa locations
LLLRLPLGTSNPWICLSDSLELHXLDWDADCGAGKTYPXNGGTAPENALLTLKNRPCDVGAVSSSXTAEHAHARRHFADIHIFMGMQLADIVPXTHSWDITHEIRTVHHTTDISHVGSVLLLLDSGXHKEDLRPPTLETVAVQMMVGSERVKDFGATXQYAMXEEQIXXAVEVGPRAELTWI

SEQ ID NO: 3736 - protein, 194 aa, Zea mays
  unsure (1)..(194): unsure at all Xaa locations
SGRPGWDFLSTATLHFFSLCSSVSICCSQTGIALTKSKDDIFXSYAYLAPIIIYQKLVATARKNGFIVLTEXRPCKDVXVSTSNMTKXVHCXXHFVAIHMFCVMKIGYIVPSSHNXDITILYRTDNLLIDITDDVCVSLLTSDEITIDDLRLPTDVTLAAQIYVGVKRVKDRVVTVSAXDGDDQICAWKDAGPW

SEQ ID NO: 3737 - protein, 104 aa, Zea mays
  unsure (1)..(104): unsure at all Xaa locations
SQARRAEEDXXAEYRADPDASNTYPHRAGXTIRNNGHVLTKERPCNVAQESTARTGKQAHAWRHACGRDGITGKKLQDSVPSSHRRDVPHGAHSDYQLRDTTDX

SEQ ID NO: 3738 - protein, 73 aa, Zea mays
VVEVSTSKTGKHGHAKCHFVGIDVFTGKKLEDIVPSSHNCDIKSGYDDGKDLLLTVMSSMGEVCAVKEIGGKN

SEQ ID NO: 3739 - protein, 187 aa, Zea mays
  unsure (1)..(187): unsure at all Xaa locations
MSDSEDHQYESIVHSAIPKTYPQEAGLDRNNRFLHIINLPCKVVQVPTXSNTGKYGHTTCNFGRIYIFNVKYLQDIDPSSPHCDLPYXCNRTDNHLCDIIDNAFVHLLTSDVHTTDDLKLPTDKTLCGPYQGMQSKPENIDETVHYAMGYDYILALNDVVPFNFLGFGDLILLYLNLHRATTDLPYR

SEQ ID NO: 3740 - protein, 145 aa, Zea mays
  unsure (1)..(145): unsure at all Xaa locations
MNNWVWHLFRSIADCAGLLTHPRQDDPGRDIGSIVMYKRHCXLGLVSTSXTLNYRHTKCHFVAVEVFNSSKLDGIVPASHSCDFPDECRTVYFLSDISEDGYXVSRPTPDGNAKDDPTLPTDYTLEDQIMESSXSGKDLATTAQX

SEQ ID NO: 3741 - protein, 88 aa, Zea mays
  unsure (1)..(88): unsure at all Xaa locations
MSDGEEHHFESKADAGASKTYPQQAGTXRKNGFIXIKNXXCKVGGGGTXKTGXYGHAKCRWGGVDVWGGKRLGGVGGGWHRGGVGDGG

SEQ ID NO: 3742 - protein, 171 aa, Zea mays
  unsure (1)..(171): unsure at all Xaa locations
DLYHLSSASAPLFVSLLPRLLLDADKPGIYLPDSFENHCQSYVETXVSQTYPQQSGPVRRNEFVVINIPPCTAVPLPTFETGQTVHDKLXHFGAVNIFTLEELERXVVPSSQDCDIPCVTRXEHQLIDFSEDSXFVSVLTFNAYTDDVLILPTDDPLVDAIDSTPEDVDDX

SEQ ID NO: 3743 - protein, 135 aa, Zea mays
  unsure (1)..(135): unsure at all Xaa locations
XEEHHXXEXKADXGAXKTXPQQXGTXXKNGXXXXKNXPXKGXEGGGGKXXKXGHAKGHXXAXDTXKGKKXEXXXXATHNXDXPQANXXEHQXXXXXEXGPASPXXXDGXXKDDXRPPTEEXPXAQTKEGGESGKX

SEQ ID NO: 3744 - protein, 128 aa, Zea mays
  unsure (1)..(128): unsure at all Xaa locations
MYLHMDRSIKDLCGNVRSDIIQQKGCSDRGLIYNEHDEPVHRNLFIMNMYQPCDVVDEYNLNNGEHGHADWHFEAVDVGDGKNLYDLVPXGHNCYIPHVSRTDYLVLGISNDGYGIVITLHGYSDGDL

SEQ ID NO: 3745 - protein, 116 aa, Zea mays
  unsure (1)..(116): unsure at all Xaa locations
IAYHPRLYISSLSAPAAPPPPDPSXTGIALSDSXEHHFESKARAGASKTYPQQAGAVRXNGFIVLKNRGGAVVAVSPSPTGPHGPALCPFAALDLFPGPKLVDSVASSPPXCAPPX

SEQ ID NO: 3746 - protein, 73 aa, Zea mays
  unsure (1)..(73): unsure at all Xaa locations
MSDSQEHHFYLKADTTLDNTYPHETGTVHKNDFIPIKNRPFKVVEFPTXSKTGKQCHAKCHFVDIDICNGKKL

SEQ ID NO: 3747 - protein, 75 aa, Zea mays
  unsure (1)..(75): unsure at all Xaa locations
MSDSEEHHFESKADAGASKTYPQQAGTVRKNGFIVIKNRPCKVYNNSSSDLTFWRPEKIHLRPVXFKKKKKKGPX

SEQ ID NO: 3748 - protein, 115 aa, Zea mays
  unsure (1)..(115): unsure at all Xaa locations
XKKPEDIVPLSHNCDIPHVNRTEYQPIDISEDGXASPLTSDGNTXDDLRLPTEXTFVAQNNECVGSGNDLDVTVQAWMGEEQICALKDIGPKKLLGFGDGPLLYLNLNRTRSVSP

SEQ ID NO: 3749 - protein, 104 aa, Zea mays
  unsure (1)..(104): unsure at all Xaa locations
MKDSKESHLLSNDDFVAALTXPYDAGTVLNNCFIIIKNLPCQAEEVSTSPXTAKDGHAECHFVDIDIFDANKLQDIVASPHXDCDIXPHAVTVESTLPDLANTX

SEQ ID NO: 3750 - protein, 67 aa, Zea mays
  unsure (1)..(67): unsure at all Xaa locations
MSDSEEHHFESKGDAGASKTYPQQAGTVRKNGFIVIXNCPCKAVQVSTSKTVHPRHSLCPYRCSSHX

SEQ ID NO: 3751 - protein, 59 aa, Zea mays
  unsure (1)..(59): unsure at all Xaa locations
MSDSAEHHXGSMVSAGAAKTYPQXAGTCRKNRFIVMKNRPXQVAEVSNSKTGKHGHAKX

SEQ ID NO: 3752 - protein, 121 aa, Zea mays
  unsure (1)..(121): unsure at all Xaa locations
FLFLLSLLLRLRTYPSKTKLPIPYSQNHHFESNTNASTFKTYPQHTSTIPNNPFIYIKNHSSIVLNNFTLNTFNHYHPIFHFFFIYIFNGKKLEDXSPSLHKFYIPHFNPTQYYPXLIFFX

SEQ ID NO: 3753 - protein, 157 aa, Schizosaccharomyces pombe
MAEEEHVDFEGGEAGASLTFPMQCSALRKNGHVVIKGRPCKIVDMSTSKTGKHGHAKVHIVALDIFNGRKYEDMSPSTHNMDVPVVKRDEYQLVNIDDGYLNLMTTDGTTKDDVRLPEGELGNEIEEGFDEGRDLIITVVSAMGEETALACRDAPSS

SEQ ID NO: 3754 - protein, 157 aa, Schizosaccharomyces pombe
MAEEEHVDFEGGEAGASLTFPMQCSALRKNGHVVIKGRPCKIVDMSTSKTGKHGHAKVHIVALDIFNGRKYEDMSPSTHNMDVPVVKRDEYQLVNIDDGYLNLMTTDGTTKDDVRLPEGELGNEIEEGFEEGKDLIITVVSAMGEEIALACRDAPSA

SEQ ID NO: 3755 - protein, 129 aa, Thermoplasma volcanium
MSWQEAEVRELKVGRYILIDDVPCKIVEITMSKPGKHGEAKGRIVAIGVFDNQKRSVVYPVKHKVKIPIIEKKNAQVLSVMNNEAQLMDSETFETFVLPLDPEIADKVKPGMEVPYWEAMGVRKIMLQN

SEQ ID NO: 3756 - protein, 163 aa, Neurospora crassa
MSAAHDDAQHEHTFDSVDAGRSATYPMQCSALRKGGHVVIKNRPCKIVDMSTSKTGKHGHAKVHLVAIDIFTGKKLEDLCPSTHNMDVPNVKRTDYQFSYIDEDFLVLIDSNGEEKRELKMPEGELAKRIEKLEEEGKDFFVGVQTAMGEEAAIDVKEASNKD

SEQ ID NO: 3757 - protein, 60 aa, Neurospora crassa
MQCSALRKGGHVVIKNRPCKIVDMSTSKTGKHGHAKVHLRTDYQFVRTIWTPPEIAGSGA

SEQ ID NO: 3758 - protein, 176 aa, Neurospora crassa
MGYYDDDAHGHVEADAAPRATTGTGTGSASQTVTIPCHHIRLGDILILQGRPCQVIRISTSAATGQHRYLGVDLFTKQLHEESSFVSNPAPSVVVQTMLGPVFKQYRVLDMQDGSIVAMTETGDVKQNLPVIDQSSLWNRLQKAFESGRGSVRVLVVSDHGREMAVDMKVVHGSRL

SEQ ID NO: 3759 - protein, 138 aa, Pyrococcus horikoshii
MGDKTKVQVSKLKPGRYIIIDDEPCRIVNITVSSPGKHGSAKARIEAVGIFDGKVRSIVKPTSAEVDVPIIDKKTAQVIAITPDTVQIMDMETYETFEVPIDTGVADEIRDQLKEGINVEYWETLGRIKIMRIKGEGE

SEQ ID NO: 3760 - protein, 157 aa, Candida albicans
MAEEDTFETADAGAALTFPMQCSALRKNGHVVIKNRPCKIVDMSTSKTGKHGHAKVHLVAIDIFTGKKLEDLSPSTHNMEVPNVSRQEFQLLDIDDGYLSLMTADGDTKDDVKVPEGELGDKLQSEFDEGKDLIVTIISAMGEEAAISYKEAPKGSA

SEQ ID NO: 3761 - protein, 158 aa, Guillardia theta
MDQEQYNIINDNGASETTPIKAGNCKKGGLLVIKGNPCKIIDISTSKTGKHGHAKAIITAVDIFTGKKYQESAPTSHNLDQPNLTKTEYQLIHIEEDGFVSLMDEDGNIREDLSLDLKNDEIHVKIKNEFDQSKEIVVTVMKCLQKEKIISFKENNKI

SEQ ID NO: 3762 - protein, 139 aa, Aeropyrum pernix
MSVNYATLGDLKKGSYIVIDGEPCRIVEMSRAKTGKHGSAKAHVVAICVFSGQKKSLVAPVDTRVQIPVIEKRLGQVLADMGDMVQIMDLETYDTFEVEKPGGNEEEEQLAAKLQPGVTVEYWLIMGKPKIIRIRSSSS

SEQ ID NO: 3763 - protein, 148 aa, Aeropyrum pernix
MPSSFGCSRMSVNYATLGDLKKGSYIVIDGEPCRIVEMSRAKTGKHGSAKAHVVAICVFSGQKKSLVAPVDTRVQIPVIEKRLGQVLADMGDMVQIMDLETYDTFEVEKPGGNEEEEQLAAKLQPGVTVEYWLIMGKPKIIRIRSSSS

SEQ ID NO: 3764 - protein, 166 aa, Leishmania infantum
MSDEDHDFSHQGGGDNASKTYPLPAGALKKGGYVCINGRPCKVIDLSVSKTGKHGHAKVSIVATDIFTGNRLEDQAPSTHNVEVPFVKTFTYSVLDIQPNEDPSLPSHLSLMDDEGESREDLDMPPDVALATQIKEQFDSGKEVLVVVVSAMGTEQVLQTKNAAEK

SEQ ID NO: 3765 - protein, 161 aa, Toxoplasma gondii
MSDAEDVTFETADAGASHTYPMQAGAIKKNGFVMLKGNPCKVVDYSTSKTGKHGHAKAHIVGLDIFTGKKYEDVCPTSHNMEVPNVKRSEFQLIDLSDDGFCTLLLENGETKDDLMLPKDSEGNLDEVATQVKNLFTDGKSVLVTVLQACGKEKIIASKEL

SEQ ID NO: 3766 - protein, 160 aa, Schistosoma japonicum
MSTFEDEEFATGESGASKTEPKQCSLLRKGGYVLMKERPCKIMEMSTSKTGKHGSAKVHLVGIDIFTGKKYEEICPSSQTMYVPIIARKEYQLIDVKDGFLSLMSDDFCVLENIPVPDNDVGKEIQEKWNSKGDMDNVIVTIVTTMDEQQAHAVRTSSDK

SEQ ID NO: 3767 - protein, 52 aa, Schistosoma mansoni
MGDFGASKTLPKQCSALRKGGHVVMKDRPCKIVEMSTSKTGKHGSAKVHLVG

SEQ ID NO: 3768 - protein, 161 aa, Caenorhabditis elegans
MSDDHHDDEHFHTGDSGAAATFPKQCSALRKNEHVMIKGRPCKIVEMSTSKTGKHGHAKVHMVAIDIFTSKKLEDICPSTHNMDVPVVKRREYLLMAIDDGYCSLMDPESCEQKDDLKLPDTELGQQIRDAYEKDEGSVLVQVVSAIGEEAILGWKVSTKE

SEQ ID NO: 3769 - protein, 161 aa, Caenorhabditis elegans
MSEDHHDEEQFDSAESGAAATFPKQCSALRKNEHVMIRGRPCKIVEMSTSKTGKHGHAKVHMVAIDIFTTKKLEDICPSTHNMDVPVVKRREYILMSIEDGFCSLMDPESCELKDDLKMPEGDLGNTIREALEKDEGSVLVQVVAACGEEAILGYKISTKE

SEQ ID NO: 3770 - protein, 160 aa, Spodoptera frugiperda
MADIEDTHFETGDSGASATFPMQCSALRKNGFVMLKGRPCKIVEMSTSKTGKHGHAKVHLVGIDIFNGKKYEDICPSTHNMDVPHVKREDYQLTDISDDGYLTLMADNGDLREDLKIPDGDLGTQLRSDFDSGKELLCTVLKSCGEECVIAVKANTALDK

SEQ ID NO: 3771 - protein, 159 aa, Drosophila melanogaster
MAELDDQFETTDSGASTTYPMQCSALRKNGFVMLKSRPCKIVEMSTSKTGKHGHAKVHMVGIDIFSNKKYEDICPSTHNMDVPNVKREDLQLIAISDDSFLTLMTESGDLREDLKVPEGELGEQLRLDFDSGKDLLCTVLKACGEECVIAIKTNTALDK

SEQ ID NO: 3772 - protein, 159 aa, Drosophila melanogaster
MAELDDHFETTDSGASTTYPMQCSALRKNGFVMLKSRPCKIVEMSTSKTGKHGHAKVHMVGIDIFSNKKYEDICPSTHNMDVPNVKREDLQLIAISDDSFLTLMTESGDLREDLKVPEGELGEQLRLDFDSGKDLLCTVLKACGEECVIAIKTNTALDK

SEQ ID NO: 3773 - protein, 159 aa, Drosophila melanogaster
MAELDDHFETTDSGASTTYPMQCSALRKNGFVMLKSRPCKIVEMSTSKTGKHGHAKVHMVGIDIFSNKKYEDICPSTHNMDVPNVKREDLQLIAISDDSFLTLMTDSGDLREDLKVPEGELGEQLRLDFDSGKDLLCTVLKACGEECVIAIKTNTALDK

SEQ ID NO: 3774 - protein, 161 aa, Plasmodium yoelii yoelii
MSDHETYDNIDAGASQTYPVQAGAIKKNGHVMLKEHPCKVVDYSTSKTGKHGHAKAHIVGIDIFTGKKYEDICPTSHNMDVPVVKRTELQLIDITEDGFVSLLFDNGDTKDDLSLPKDSEGNFDDVAKQIRNLFDSGKSVLVSVLSACGQEKIIAAKEMSS

SEQ ID NO: 3775 - protein, 155 aa, Danio rerio
MADLDTDFTSGDAGASLTFPMQCSALRKNGFVVLKGRPCKIVEMSTSKTGKHGHAKVHMVGIDIFTGKKNEDICPSTHNMDVPNIKRQDYQLVGIIDGYLSLMKDNGDLRDDLKLPEGDLGKEIESKFESGDEFLVSVLAAMGEECPIAIKPMSS

SEQ ID NO: 3776 - protein, 154 aa, Xenopus laevis
MADDIDFTSGDAGASSTFPMQCSALRKNGFVVLKGRPCKIVEMSTSKTGKHGHAKVHMVGIDIFSGKKYEDICPSTHNMDVPNIKRCDYQLIGIIDNYLSLLSDSGDVREDLKIPDGDLGKEILAKHEAGEEILVTVLNAMSEECAVALKAMTK

SEQ ID NO: 3777 - protein, 153 aa, Gallus gallus
MADELDFTTGDAGASSTYPMQCSALRKNGFVVLKGRPCKIVEMSTSKTGKHGHAKVHLVGIDIFNGKKYEDICPSTHNMDVPNIKRNDYQLIGIQDGYLSLLTESGEVREDLKLPEGDLGKEIEGKFNANEDVQISVISAMNEECAVAIKPCK

SEQ ID NO: 3778 - protein, 101 aa, Gallus gallus
  unsure (1)..(101): unsure at all Xaa locations
QCSALRKNGFVVLKGRPCKXXXXSTSKTGKHGHAKVHLVGIDIFTGKKYEDICPSTHNMDVPNIKRNDFQLIGIQDGFLSLLQDSGEVREDLRLPEGELGR

SEQ ID NO: 3779 - protein, 97 aa, Gallus gallus
  unsure (1)..(97): unsure at all Xaa locations
QXSALRKNGFVVLKGRPXKSTSKTGKHGHAKVHLVGIDIFTGKKYEDIXPSTHNMDVPNIKRNDFQLIGIQDGFLSLLQDSGEVREDLRLPEGELGR

SEQ ID NO: 3780 - protein, 79 aa, Gallus gallus
  unsure (1)..(79): unsure at all Xaa locations
FTTGDAGASSTYPMQXSALRKNGFVVLKGRPXKIVEMSTSKTGXHGHAKVHLVGIDIFNGKKYEDIXPSTHNMDVPNIK

SEQ ID NO: 3781 - protein, 78 aa, Gallus gallus
  unsure (1)..(78): unsure at all Xaa locations
STSKTGXHGHAKVHLVGIDIFTGKKYEDIXPSTHNMDVPNIKRNDFQLIGIQDGFLSLLQDSGEVREDLRLPEGELGR

SEQ ID NO: 3782 - protein, 159 aa, Senecio vernalis
MSDEEHQFESKADAGASKTYPQQAGTIRKGGHIVIKNRACKVVEVSTSKTGKHGHAKCHFVAIDIFNGKKLEDIVPSSHNCDVPHVNRTDYQLIDISEDGFVSLLTENGNTKDDLKLPTDDALLTQIKDGFGEGKDLVVSVMSAMGEEQICALKDIGPK

SEQ ID NO: 3783 - protein, 154 aa, Homo sapiens
MADDLDFETGDAGASATFPMQCSALRKNGFVVLKGRPCKIVEMSTSKTGKHGHAKVHLVGIDIFTGKKYEDICPSTHNMDVPNIKRNDFQLIGIQDGYLSLLQDSGEVREDLRLPEGDLGKEIEQKYDCGEEILITVLSAMTEEAAVAIKAMAK

SEQ ID NO: 3784 - protein, 153 aa, Homo sapiens
MADEIDFTTGDAGASSTYPMQCSALRKNGFVVLKGRPCKIVEMSTSKTGKHGHAKVHLVGIDIFTGKKYEDICPSTHNMDVPNIKRNDYQLICIQDGYLSLLTETGEVREDLKLPEGELGKEIEGKYNAGEDVQVSVMCAMSEEYAVAIKPCK

SEQ ID NO: 3785 - protein, 154 aa, Homo sapiens
MADDLDFETGDAGASATFPMQCSALRKNGFVVLKGWPCKIVEMSASKTGKHGHAKVHLVGIDIFTGKKYEDICPSTHNMDVPNIKRNDFQLIGIQDGYLSLLQDSGEVPEDLRLPEGDLGKEIEQKYDCGEEILITVLSAMTEEAAVAIKAMAK

SEQ ID NO: 3786 - protein, 154 aa, Homo sapiens [sequence omitted]

SEQ ID NO: 3787 - protein, 154 aa, Homo sapiens [sequence omitted]

SEQ ID NO: 3788 - protein, 154 aa, Homo sapiens [sequence omitted]

SEQ ID NO: 3789 - protein, 129 aa, Ferroplasma acidarmanus
MSWTEAEVRELKVGRYMLIDDSPCKIVDITMSKPGKHGEAKGRIVAIGVFDGQKHSVVYPVKHKIKVPIIVKKNAQILSIANNEAQMMDSESFETFILPIEPEDQDKLKPGMEVPYWEAMGKRKIMLQN

SEQ ID NO: 3790 - protein, 154 aa, Oryctolagus cuniculus
MADDLDFETGDAGASATFPMQCSALRKNGFVVLKGRPCKIVEMSTSKTGKHGHAKVHLVGIDIFTGKKYEDICPSTHNMDVPNIKRNDFQLIGIQDGYLSLLQDSGEVREDLRLPEGDLGKEIEQKYDSGEEILITVLSAMTEEAAVAIKAMAK

SEQ ID NO: 3791 - protein, 186 aa, Mus musculus
MPILDQMVLEQNTEGVKWTPSKMISRLGKEINNPDSVYYWAHKNHIPVLSPALTDGSLGDMIFFHSYKNPGLVLDIVEDLRLINTQAIFAKRSGMIILGGGVVKHHIANANLMRNGADYAVYINTAQEFDGSDSGARPDEAVSWGKIRMDAQPVKVYADASLVFPLLVAETFAQKADAFRAEKNED

SEQ ID NO: 3792 - protein, 246 aa, Rattus norvegicus
MVDVLVTTAGGVEEDLIKCLAPTYLGEFSLRGKELRENGINRIGNLLVPNDNYCKFEDWLMPILDQMVQEQNTEGVKWTPSKMISRLGKEINNPESVYYWAHKNHIPVLSPALTDGSLGDMIFFHSYKNPGLVLDIVEDLRLINMQAIFAKRTGMIILGGGVVKHHIANANLMRNGADYAVYINTAQEFDGSDSGARPDEAVSWGKIRMDAQPVKVYADASLVFPLLVAETFAQKADAFRAEKNED

SEQ ID NO: 3793 - protein, 128 aa, Rattus norvegicus
MEGTPSGAAPSSALAAVLKHSSALPPESAQVQGYDFNRGVDYHALLEAYGTTGFQATNFGRAVQQVNAMIEKKLEPLAVDEDHHEDLTQSRRPLTGCTIFLGYTSNLISSGIRETIRYLVQHNMVGPR

SEQ ID NO: 3794 - protein, 311 aa, Sulfolobus tokodaii
MKREELLVEEIKDLTLEELKGYADFYKILDKVYGFTAESVVRGVKILKDMIKEADLRFLSFTANLVSTGLRGLFADLIKQGYFNVIITTGGTIDHDIARSFGGKYYKGLFEYDDSMLRELEIHRLGNILVPMESYGKVIEDVVRKYMNEIVSIKKEWPVYELLWEFGKRISDENSILKAAYEKKVPIIVPGIIDGSFGTNLFIYSQFTQLKLNLFEDMKLIKDLIFSCKKSGALIIGGGISKHHTIWWNQFKDGLDYAIYITTAQEYDGSLSGAKPREAISWNKIKPTSENVVIYGDATIILPILSASLLG

SEQ ID NO: 3795 - protein, 292 aa, Pyrobaculum aerophilum str. IM2
MREIIELYRKVGGFQALHVAEAYDVLKEAVEAADVRFLSFTGNLVATGLREFIADAIRRRLFNVVVTTAGALDHDIAKSMGAVYAPGSFDLDDVDLAAKGYHRLGNVVIKKEEYGPLVEKFILAHCEKLWGKTLATYELAYLLGAELPEDSILGAAARAGAKVFVPGIVDGAVGTALMTCNDLARTKRGGSRAFIDVLKDEEELREIVHNSKKLAALIVGGGISKHHVIWWAQFKGGLDYVVYISTAVEYDGSLSGARPREAISWGKVKPSAKSVFIFADATLVLPVLLKAL

SEQ ID NO: 3796 - protein, 366 aa, Anopheles gambiae str. PEST
MDQSKEPTVAKEAVLQESSKLPENTPQIRGYDWNEGYSYEKLFSSYAHSGFQATNLGKAIEEVNKMIAARRVPLAEDKLDQYEEDEFIKRKNSCTIFLGYTSNMVSAGVRETIRFLVQHRMVDCIVTTAGGVEEDLIKCLAPTYLGSFELAGRELRERGINRIGNLLVPNENYCKFENWVIPILDEMLAEQKSNGTLWTPSKVIARLGEKINDETSIYYWAAKHRIPVFSPALTDGSLGDMMYFHSFRNPGLVVDIVSDLRRLNTMAVKAVQSGIIIVGGGVIKHHICNANLMRNGADFSVFVNTASEYDGSDSGARPDEAVSWGKIKKDATPVKVYAEASLVFPILVGETFVKDHYLENKTNAST

SEQ ID NO: 3797 - protein, 389 aa, Giardia lamblia ATCC 50803
MDGIQHASDNVIRASDASCIEEKLEIHGLDLNKPENQSLDAILSNYARIGFSSTGFSKLCTEVNRMYSWRLSDDPYDPNRSYPECPIARSKIRCKVFLGYTSNLVSSGLREYIRFLVQHSLVDVIVTSAGGVEEDIIKCLAPTYLGDWKTDGAMLRKNSINRIGNLLVPNDNYCLFEDWIIPIFDECVEQQRKGYHWTPSRLIWKLGKRINDERSIAYWAYRNKIPIFCPAITDGSLGDMLFFHSYKNPGLIIDVVGDIRAMNMQAINSPKNGCIILGSGTIKHHILNANLFAGDGADFAVYINTAQEYDGSDAGATCDEAVSWGKISPTARPVKLCADATLVFPLLLHETILKKYKEDPEYWDSKKGGDPHECYWTQMENEVRESKRS

SEQ ID NO: 3798 - protein, 329 aa, Pyrococcus furiosus DSM 3638
MLKKSEEIEGTKVEGPWLDDTKSLEEVVSLYTQIGFQATHLGKAIEIWRKIEEKREKGEEIRVFLGYTSNIVSSGLREIIAWLVKHRKVDVIVTTAGGVEEDFIKALKPFILGDWIVNDAELRKKGINRIGNIFVPNDRYIEFEKYMIPFFERILEIEREKGRPLTASEFIYELGRFMDEKLGKEKEKSIIYWAYRNEIPIFCPAITDGSIGDMLYFFKEERRDRELIIDIANDIVKLNNLAVTAKETASIILGGSLPKHAIINANLFRGGSDYAIYITTAVPWDGSLSGAPPSEGVSWGKIRAKADYVEIWADATLVFPILVWMVMKR

SEQ ID NO: 3799 - protein, 307 aa, Methanothermobacter thermautotrophicus str. Delta H
MLILNVNHMNITQGMGVAELIEEMGRSGVLGAGRVHRATKLLRGMIDDLEMAIFMSVAGPLVPGGMRRIIRDLIDDGTISALITSGANLTHDLLEAFGGAHYRDYGFDDEKLHQEGIGRIGDVYTRSEDFEVFESENQEIFSSIFSAKPHISIQELIHEIGGHLDDDMSIIRTAHLRGVPIYAPGLIDSMLGLQLWMYTQDNRICLDAVKDMHSLSDLVFSHERIGAIILGGGLPKHYTLASTLLRGGVDAAVQITMDRSETGSLSGAPLEEAKSWAKAQAGSNLVTVVGDATALFPVILAGALSEL

SEQ ID NO: 3800 - protein, 317 aa, Methanosarcina acetivorans C2A
MDFEASARDLTTPVKGAKIVPNMSVDELVREYAGCAFGAGRLAEAVDIYYEMLASEKTTKFFGLAGAMTPAGMRGIIADLIRDGHIDVLVTTGANMVHDTVEALGLHHYKGSDCANDIQLRHECIDRIYDVYLPDQHFTDLEEFLQSVYAGLPQEKLSIRQVLTEIGKNLDDDSSILKTAAEMGVPVYCPALQDSVIGLQAWLYKEGNLLHVDAFADMHEFMEICYEAESAGAMLLGGGVPKNYILQSMLVTPKSFDYAIQLTMDRPETGGLSGATLDEAQSWGKVGEDAKSVTVYADATITLPLIVSAVRTRLSKR

SEQ ID NO: 3801 - protein, 345 aa, Methanosarcina acetivorans C2A
MHHNVFTNNPTVPIDVKNRSVSELMDGMLKTGFQGRKLAESVQAWNNMLKEKNTTVFMGLSGAMVPAGMRRIISHMIRERMIDCLVSTGANLFHDCHEALGRKHYVGSHLANDEKLFEQGVDRIYDIFAVEEEFRTADNLIADFAQEIGEITCSSREFMYLLGKELGRRGAAEDSIVVSAYRHNVPIFVPALSDSSIGIGLTIARRRGLKLEIDQIKDVDEITQIVEKSERTGVVYVGGGVPKNFIQQTEVIASILGMDIGGHDYAIQYTSDSPHWGGLSGCTFDEAVSWGKIAPQAKKVQVFVDATIALPIVAHALHEKTHDLKRIAPVFFWDGPEGLAIDYKE

SEQ ID NO: 3802 - protein, 297 aa, Methanopyrus kandleri AV19
MKRETFRYRGDMDLDGFLREMERVGALGAGRLGRAARILEKMWSSDDVTVLLTVAGPAVAGGLGELFERLIREGLVDAVITSGANVVHDALDALGGIHVCLGERNVDGYGRVHDTHIPTEAFEKFEHFMREVLSDLSGRVSCRELLWEMGKRLESGFLRAAADEGVPIYSPGILDSMVGLHVWIHSQDHDFHLDLVDDMHHLADLVFEAEELGAIILGGSVPKHFAMGAAMLRGGLDYAVQITMDRPETGSLSGAPLEEGKSWEKVREDAEVATIVGDYLIIFPLLASGVMQRLGIV

SEQ ID NO: 3803 - protein, 367 aa, Caulobacter crescentus CB15
MKSLFQRRASKVRETEAMNAPVPNNQKAELLQKVVEHVDITSYDARPIIDSMRKMSFSSRDTARAADIFNMALADKGCSTWLILAGSTSAGGCMHVYRDMVKNGMIDAVVATGASIVDMDFFEALGFKHYQAAGPVDDNVLRDNYIDRIYDTYIDEEELQACDHTILEICNKLEPRGYSSREFIWEMGKWLAEGNAKKEGSLIQTAYEEGVPIFCPAFVDSSAGFGLVKHQKEKIAEKKPYLMIDAVADFRELTDVKIAAGTTGLFMVGGGVPKNFAQDTVVCAEILGVEADMHKYAIQITVADVRDGACSSSTLKEAASWGKVSTTYEQMVFAEATTVVPLIASDAYWRKAWEGREKPRWNKLFGK

SEQ ID NO: 3804 - protein, 317 aa, Methanosarcina mazei Goe1
MDFGASAKNLSTPVKGAKIVPNMTVDELVKEYAGCAFGAGRLAEAVDIYYEMLASGKTTKFFGLAGAMTPAGMRNIIADLIRDGYIDVLVTTGANMVHDTVEALGLHHYKGSDCANDIQLRHECIDRIYDVYLPDQHFTDLEEFLQGVYSGLPQENLSIRQVLTEIGKNLDDDSSILKTAAEMGVPVYCPALQDSVIGLQAWLYKEGNPLHVDAFADMHEFMDICYGAESAGTMLLGGGVPKNYILQSMLVTPRSFDYAIQLTMDRPETGGLSGATLDEAQSWGKVGEDAKSVTVYADSTITLPLIVSAVRTRLSKR

SEQ ID NO: 3805 - protein, 349 aa, Methanosarcina mazei Goe1
MENGMHHNVFTNTPTIPIDVKDRSVSELMDGMLRTGFQGRKLAESVQAWSNMLKEKDTTVLMGLSGAMVPAGMRRVISYLIRERMIDCLVSTGANLFHDSHEALGRKHYVGSHLANDEKLFEHGVDRIYDVFAVEEEFRNADNLIADFAEEIGEISCSSREFMYLLGKELVRRGAAEDSIVVSAYRHNVPIFVPALSDSSIGIGLTIARRRGLKLEIDQIKDVDEITQIVEKSGHTGVVYVGGGVPKNFIQQTEVIASILGMDVPGHEYAIQYTSDSPHWGGLSGCTFDEAVSWGKVAAQAKKVQVFVDATIALPIVAHALHEKTRGVKRTAPVFSWDGPEGLEIAYNE

SEQ ID NO: 3806 - protein, 350 aa, Chlorobium tepidum TLS
MEERSMQKAGFLKEPIKHIGITKHNVVPMVEEMADMAFQARNLARAAFIVDLMQKDKECAVILTLAGSLISAGLKQVIIDMLEHNMVDVIVSTGANIVDQDFFEALGFKHWKGSQFVDDSELRELAIDRIYDTYIDEDELRVCDDTIAIIANSMQPGAYSSREFIVEMGKYIEEKGLDKNSIVYKAYEKGVPIFCPAFSDCSAGFGLVHHQWHNPDQHVSIDSVKDFRELTKIKIENDKTGIFMIGGGVPKNFTQDIVVAAEVLGYENVSMHTYAVQITVADERDGALSGSTLKEASSWGKVDTVYEQMVFAEATVAMPLIAGYAYHKRNWEGRPARNFNAMLDAKPVNA

SEQ ID NO: 3807 - protein, 330 aa, Methanocaldococcus jannaschii
MLKESEDIEGIAIEGPWLEDDISLEEIIKKYYLKIGFQASHIGKAIKIWKHIEEKRKKGDEITVFFGYTSNIVSSGLREIIAYLVKHKKIDIIVTTAGGVEEDFIKCLKPFILGDWEVDGKMLREKGINRIGNIFVPNDRYIAFEEYMMEFFEEILNLQRETGKIITASEFCYKLGEFMDKKLKSKEKEKSILYWAYKNNIPIFCPAITDGSIGDMLYFFKKYNKDEELKIDVANDIVKLNDIAINSKETACIVLGGSLPKHSIINANLFREGTDYAIYVTTALPWDGSLSGAPPEEGVSWGKIGAKADYVEIWGDATIIFPLLVYCVMK

SEQ ID NO: 3808 - protein, 370 aa, Methanocaldococcus jannaschii
MRDIKDNPIRRGIAEQSEAMHPGYTNRAKPYGCKRDPKDIVLKESEDIEGIAIEGPWLEDDISLEEIIKKYYLKIGFQASHIGKAIKIWKHIEEKRKKGDEITVFFGYTSNIVSSGLREIIAYLVKHKKIDIIVTTAGGVEEDFIKCLKPFILGDWEVDGKMLREKGINRIGNIFVPNDRYIAFEEYMMEFFEEILNLQRETGKIITASEFCYKLGEFMDKKLKSKEKEKSILYWAYKNNIPIFCPAITDGSIGDMLYFFKKYNKDEELKIDVANDIVKLNDIAINSKETACIVLGGSLPKHSIINANLFREGTDYAIYVTTALPWDGSLSGAPPEEGVSWGKIGAKADYVEIWGDATIIFPLLVYCVMK

SEQ ID NO: 3809 - protein, 317 aa, Methanosarcina barkeri
MDCNTPNKKLSTPIKAAKINPNMSVDDLVREYRGCAFGAGRLAEAVEIYYEMLASKKTTKFFGLAGAMTPAGMRNVVADLIRDGYIDVLVTTGANMVHDTVEALGLHHYKGTDCTNDIQLRNECIDRIYDVYLPDQHFANLEEFLQGVYAGLPQEKLSIRQVLTEIGKNLDDDSSILKTAAEMGVPVYCPALQDSVIGLQAWLYKEGNPLHVDAFADMHEFIEICYAAESAGALLIGGGVPKNYILQSMLVTPKSFDYAIQLTMDHPETGGLSGATLDEAQSWGKVGENAKAVTVYADATITLPLMVAAVRTRLSKK

SEQ ID NO: 3810 - protein, 345 aa, Methanosarcina barkeri
MHLNVLTDNPTVPIDVKDRSISELMEGMLKTGFQGRKLAESVQAWHNMLKEKNVTVLMGLSGAMVPAGMRRVISYMIRERMIDCLVSTGANLFHDSHEALGKKHYVGSHLVDDEDLFEHGVDRIYDVFAVEEEFRTADNLIADFAEKIGEISCSSREFMYLLGKELERRGAAEDSIVVSAYRHNIPIFVPALSDSSIGIGLTIARRRGLKLDIDQIKDVDEVTQIVEKSGKTGVVYIGGGVPKNFIQQTEVIASILGIQTGGHDYAIQYTTDAPHWGGLSGCTFDEAVSWGKIAAQAKKVQVFVDATIALPIVAHALHEKCRELKRNAPIFNWEGPEGLDIDYRE

SEQ ID NO: 3811 - protein, 345 aa, Methanosarcina mazei
MHHNVFTNTPTIPIDVKDRSVSELMDGMLRTGFQGRKLAESVQAWSNMLKEKDTTVLMGLSGAMVPAGMRRVISYLIRERMIDCLVSTGANLFHDSHEALGRKHYVGSHLANDEKLFEHGVDRIYDVFAVEEEFRNADNLIADFAEEIGEISCSSREFMYLLGKELVRRGAAEDSIVVSAYRHNVPIFVPALSDSSIGIGLTIARRRGLKLEIDQIKDVDEITQIVEKSGHTGVVYVGGGVPKNFIQQTEVIASILGMDVPGHEYAIQYTSDSPHWGGLSGCTFDEAVSWGKVAAQAKKVQVFVDATIALPIVAHALHEKTRGVKRTAPVFSWDGPEGLEIAYNE

SEQ ID NO: 3812 - protein, 317 aa, Methanosarcina thermophila
MDFEASAKILTTPVKGAKIVSNMTVDELVREYAGCAFGAGRLAKAVDIYYEMLASEKTTKFFGLAGAMTPAGMRNIIADLIRDGYIDVLVTTGANMVHDTVEALGLHHYKGSDCTNDIQLRHECIDRIYDVYLPDQHFTDLEEFLQGVYAGLPQEKLSIRQVLTEIGKNLDDDSSILKTAAEMGVPVYCPALQDSVIGLQAWLYKEGNPLHVDAFADMHEFMEICFETESAGAMLLGGGVPKNYILQSMLVTPRSFDYAIQLTMDHPETGGLSGATLDEAQSWGKVGENAKSVTVYADSTITLPLIVSAVRTRLSKR

SEQ ID NO: 3813 - protein, 295 aa, Methanosarcina thermophila
MTVDELVREYAGCAFGAGRLAKAVDIYYEMLASEKTTKFFGLAGAMTPAGMRNIIADLIRDGYIDVLVTTGANMVHDTVEALGLHHYKGSDCTNDIQLRHECIDRIYDVYLPDQHFTDLEEFLQGVYAGLPQEKLSIRQVLTEIGKNLDDDSSILKTAAEMGVPVYCPALQDSVIGLQAWLYKEGNPLHVDAFADMHEFMEICFETESAGAMLLGGGVPKNYILQSMLVTPRSFDYAIQLTMDHPETGGLSGATLDEAQSWGKVGENAKSVTVYADSTITLPLIVSAVRTRLSKR

SEQ ID NO: 3814 - protein, 301 aa, Archaeoglobus fulgidus DSM 4304
MRVTSPEIQRGIKVSELLDMFGSTAFNARRLGEAAKICEEMVKSDSFVFLTLAGAMIPAGMRKIVAGMMQNGFISSLVTTGANIVHEIVESLGIGHEIGSCYVDDTALAEESINRIYDVFVGQEAFERVEEFLSGIIEGLDGIYTTYEFLWEVGKRIPDERSFLRIAAEREIPVFCPTLHDSIAGLHMTIYRKNLQIDFFRDVSRIIDFCFQKRKMGVIVVGGGVPKNFTLQAMLLAEGFDYAVQITTDSPQWGGLSGATLEEAKSWCKLKPDAKAVTVYCDATIALPMLYAYLLDRCGES

SEQ ID NO: 3815 - protein, 298 aa, Archaeoglobus fulgidus DSM 4304
MARTGFQGRKLGEAFEIWTEMLREENITILMGLSGAMVPAGMRKIIAWLIRNRYIDVLVSTGANLFHDIHEAMGFRHFMGSEHVNDCKLFEEGIDRIHDVFAYEKEFNVIDYTLAEIISEMSGVMSSREFLEEIAGRLNVKDRNSIVIAAYESKVPIFSPAIADSSIGIAAALAKREVVIDTIRDVEELTEIVVNSEKTGVIYVGGGVPKNFIQQTEVVARLKGYDVRGHEYAIQITTDVPQFGGLSGCTFEEGVSWGKISGKAKKVQVNCDATIALPVLAHGLIGIRRQKYPIFNGL

SEQ ID NO: 3816 - protein, 336 aa, Pyrococcus furiosus
MPKPKEYVLKKSEEIEGTKVEGPWLDDTKSLEEVVSLYTQIGFQATHLGKAIEIWRKIEEKREKGEEIRVFLGYTSNIVSSGLREIIAWLVKHRKVDVIVTTAGGVEEDFIKALKPFILGDWIVNDAELRKKGINRIGNIFVPNDRYIEFEKYMIPFFERILEIEREKGRPLTASEFIYELGRFMDEKLGKEKEKSIIYWAYRNEIPIFCPAITDGSIGDMLYFFKEERRDRELIIDIANDIVKLNNLAVTAKETASIILGGSLPKHAIINANLFRGGSDYAIYITTAVPWDGSLSGAPPSEGVSWGKIRAKADYVEIWADATLVFPILVWMVMKR

SEQ ID NO: 3817 - protein, 352 aa, Coxiella burnetii RSA 493
MKNKNLSMPSLKEKLLQETVEHIDITRFDARPIIDAMDHMSFTSRDLARATQIFNRMLQDEQCSIILSLAGSTSAGGCMKLYADLVKYNMVDAIVATGASIVDMDFFEALGFRHYQGSPAVEDRQLRDLYIDRIYDTYIDEEDLQRCDHTIYEIANSLEPRPYSSREFIHHMGAYLAQGKAKKEESLVQLAYEHDVPIFCPAFTDSSAGFGLVLHQVKNPDRHLTIDSIRDFRELTDIKIKAGTTGLLMIGGGVPKNFVQDTVVCAEVIGKTVDMHKYAIQITVADVRDGACSSSTLKEACSWGKVDTAYEQMVYAEATSGLPLLASDAYHRGYWKDRSPRQYANLFKSESK

SEQ ID NO: 3818 - protein, 312 aa, Sulfolobus solfataricus
MINREDLLKNPVEDITLSDLKKYNDIVSVFDKIYGFSSEGIVNGSKILKEMIKNADLRFLSFTANLVSTGLRGLFADLIKKGYFNIVVTTGGTIDHDLARSFGGVYYKGSFDIDDTMLKDLEIHRLGNVLVPFESYGKVIEDVVRKFLPEITKDRKEISAYELLWEFGKRITDSNSILRAAYDKNVPIIVPGILDGSFGTNLFIQSQFLNFRINLFEDMRLIKDLIFSSKKSGALIIGGGISKHHTIWWNQFKDGLNYAIYITTAQEYDGSLSGAKPREAISWNKIRPDAKHVTIYGDATIIVPILAASLLS

SEQ ID NO: 3819 - protein, 333 aa, Thermoplasma acidophilum
MRSMGSRCEGECRKLKSAKQYTGMDRKELLSRPVRDLSITADTRLGDLMDQFSSIGGFTAAKIHEAYEIIKDMFSEDNTTFLSFPADIISTGLRGLINEVVKRKLVDVIITTSGTLDHDIARTYRNYYCGSFSYSDIELRDLGINRLGNVLVPDESYGEIIEEKVMESLEKLYAKKKEWATVDLIHEVGLDINSESSIIYNAAKNNIPVFVPGITDGSFGSQLWSFYEQHHDFKINLLEDEHRLSDIIFDAKKTGAIMIGGGISKHHTIWWNQFRDGLDYAVYVTTAQEYDGSLSGAKLEEAISWKKVRPDARYVNVYGDATVIMPVLLAPFL

SEQ ID NO: 3820 - protein, 310 aa, Thermoplasma acidophilum
MDRKELLSRPVRDLSITADTRLGDLMDQFSSIGGFTAAKIHEAYEIIKDMFSEDNTTFLSFPADIISTGLRGLINEVVKRKLVDVIITTSGTLDHDIARTYRNYYCGSFSYSDIELRDLGINRLGNVLVPDESYGEIIEEKVMESLEKLYAKKKEWATVDLIHEVGLDINSESSIIYNAAKNNIPVFVPGITDGSFGSQLWSFYEQHHDFKINLLEDEHRLSDIIFDAKKTGAIMIGGGISKHHTIWWNQFRDGLDYAVYVTTAQEYDGSLSGAKLEEAISWKKVRPDARYVNVYGDATVIMPVLLAPFL

SEQ ID NO: 3821 - protein, 335 aa, Pyrococcus abyssi
MKAKDIVLKKSEEIEGLAIEGPWLDEVESLEGVISYYEKIGFQATHLGKAVKIWRKVEEKRKGGEEVRVFLGYTSNIVSSGLREIIAWLVKERKVDVIVTTAGGIEEDFIKTLKPFILGDWEVNDAELREKGINRIGNIFVPNDRYIEFEKYMVPFFERILDIERKLKRPLTASEFIYEMGRYMDEVLGKEKEKSIIYWAYKRDVPIFCPAITDGSIGDMLYFFKEERHDSKLVIDIANDIVKLNNLAITAKETASIILGGSLPKHAIINANLFRGGTDYAIYISTAVPWDGSLSGAPPSEGVSWGKIKAKADYVEIWADATLVFPILVWMVMKA

SEQ ID NO: 3822 - protein, 373 aa, Dianthus caryophyllus
MEDANHDSVASAHSAAFKKSENLEGKSVKIEGYDFNQGVNYSKLLQSFASNGFQASNLGDAIEVVNHMLDWSLADEAPVDDCSEEERDPKFRESVKCKVFLGFTSNLISSGVRDTIRYLVQHHMVDVIVTTTGGIEEDLIKGRSIKCLAPTFKGDFALPGAQLRSKGLNRIGNLLVPNDNYCKFEDWIIPILDKMLEEQISEKILWTPSKLIGRLGREINDESSYLYWAFKNNIPVFCPGLTDGSLGDMLYFHSFRNPGLIVDVVQDIRAVNGEAVHAAPRKTGMIILGGGLPKHHICNANMMRNGADYAVFINTAEEFDGSDSGARPDEAISWGKISGSAKTVKVHCDATIAFPLLVAETFAAKREKERKSC

SEQ ID NO: 3823 - protein, 496 aa, Plasmodium falciparum 3D7
MVDHVSFKEVNKIRSDDECDADSHNEGDNIEDAKASVFVKSSLIPEKTDVVKGLNFDKEVDLHEFINNYKYMGFQATNLGISIDEINKMIYYKYKDENIKSEPNNENNLNCNNVSEDLNKDQENHLYHYEKKKKSCIIWLSFTSNMISSGLREIFVYLAKNKFIDVVVTTAGGIEEDIIKCFSNTYIGDFNLNGKKLRKKGWNRIGNLIVPNDNYCKFEDWLQPILNKMLHEQNEKNEQMFLKKLEKRKKKYNNNKNKNDNNNDNDNVWGNEKNDQNQNQYNQGQESFKKDSNIYTNDVSNKKNHINNYINNYDSDSDDQCDMYYLSPSEFINTLGKEINDESSLIYWCYKNDIPIFCPGLTDGSLGDNLFFHNYGKKIKNNLILDIVKDIKKINSLAMNCEKSGIIILGGGLPKHHVCNANLMRNGADFAVYVNTASEYDGSDSGANTTEALSWGKIKYGQTNNHVKVFGDATILFPLMVLNSFYLYDQKRKKDM

SEQ ID NO: 3824 - protein, 368 aa, Arabidopsis thaliana
MEDDRVFSSVHSTVFKESESLEGKCDKIEGYDFNQGVDYPKLMRSMLTTGFQASNLGEAIDVVNQMLDWRLADETTVAEDCSEEEKNPSFRESVKCKIFLGFTSNLVSSGVRDTIRYLVQHHMVDVIVTTTGGVEEDLIKCLAPTFKGDFSLPGAYLRSKGLNRIGNLLVPNDNYCKFEDWIIPIFDEMLKEQKEENVLWTPSKLLARLGKEINNESSYLYWAYKMNIPVFCPGLTDGSLGDMLYFHSFRTSGLIIDVVQDIRAMNGEAVHANPKKTGMIILGGGLPKHHICNANMMRNGADYAVFINTGQEFDGSDSGARPDEAVSWGKIRGSAKTVKVYCDATIAFPLLVAETFATKRDQTCESKT

SEQ ID NO: 3825 - protein, 368 aa, Arabidopsis thaliana
MEDDRVFSSVHSTVFKESESLEGKCDKIQGYDFNQGVDYPKLMRSMLTTGFQASNLGEAIDVVNQMLDWRLADETTVAEDCSEEEKNPSFRESVKCKIFLGFTSNLVSSGVRDTIRYLVQHHMVDVIVTTTGGVEEDLIKCLAPTFKGDFSLPGAYLRSKGLNRIGNLLVPNDNYCKFEDWIIPIFDEMLKEQKEENVLWTPSKLLARLGKEINNESSYLYWAYKMNIPVFCPGLTDGSLGDMLYFHSFRTSGLIIDVVQDIRAMNGEAVHANPKKTGMIILGGGLPKHHICNANMMRNGADYAVFINPGQEFDGSDSGARPDEAVSWGKIRGSAKTVKVYCDATIAFPLLVAETFATKRDQTCESKT

SEQ ID NO: 3826 - protein, 246 aa, Arabidopsis thaliana
MVDVIVTTTGGVEEDLIKCLAPTFKGDFSLPGAYLRSKGLNRIGNLLVPNDNYCKFEDWIIPIFDEMLKEQKEENVLWTPSKLLARLGKEINNESSYLYWAYKMNIPVFCPGLTDGSLGDMLYFHSFRTSGLIIDVVQDIRAMNGEAVHANPKKTGMIILGGGLPKHHICNANMMRNGADYAVFINTGQEFDGSDSGARPDEAVSWGKIRGSAKTVKVYCDATIAFPLLVAETFATKRDQTCESKT

SEQ ID NO: 3827 - protein, 387 aa, Glycine max
  unsure (1)..(387): unsure at all Xaa locations
MGEAKGKEEEVLAPVHSTVFKESESLDGKCVKIEGYDFNRGVNYPLLLSSMVTTGFQASNLGDAIQVVNQMLDWRLVDEXXVAEDCSDQERDLEYRKSVTCKVFLGFTSNLISSGVRDTVRFLLQHRMVDVVVTTTGGIEEDLIKCLAPTYKGDFSLPGAYLRSKGLNRIGNLLVPNDNYCKFEDWIIPIFDQMLGEQNNENVLWTPSKLIARLGKEIKNESSYLYWAYKNNIPVFCPGLTDGSLGDMLYFHSFRNPGLIVDIVQDIRAMNGEAVHASPRKTGMIILGGGLPKHHICNANMMRNGADYAVFINTAQEYDGSDSGARPDEAVSWGKIRDSAQTVKVHCDATIAFPLLVAETFAXKSETSPLMKVKDEFTLKFILIVCV

SEQ ID NO: 3828 - protein, 381 aa, Lycopersicon esculentum
MGEALKYSIMDSVRSVVFKESENLEGSCTKIEGYDFNKGVNYAELIKSMVSTGFQASNLGDAIAIVNQMLDWRLSHELPTEDCSEEERDVAYRESVTCKIFLGFTSNLVSSGVRDTVRYLVQHRMVDVVVTTAGGIEEDLIKCLAPTYKGDFSLPGASLRSKGLNRIGNLLVPNDNYCKFENWIIPVFDQMYEEQINEKVLWTPSKVIARLGKEINDETSYLYWAYKNRIPVFCPGLTDGSLGDMLYFHSFKKGDPDNPDLNPGLVIDIVGDIRAMNGEAVHAGLRKTGMIILGGGLPKHHVCNANMMRNGADFAVFINTAQEFDGSDSGARPDEAVSWGKIRGGAKTVKVHCDATIAFPILVAETFAAKSKEFSQIRCQV

SEQ ID NO: 3829 - protein, 379 aa, Nicotiana tabacum
MGEALNVMESVRSIVFKESENLEGSATKIEGYDFNKGVNYAELFKSMASTGFQAANLGDAIQIVNQMLDWRLSHEQPMEDCSEEERDVAYRESVTCKIFLGFTSNLVSSGVRDTIRYLVQHRMVDVVVTTAGGIEEDLIKCLAPTYKGDFSLPGAVLRSKGLNRIGNLLVPNDNYCKFENWIIPIFDQMYEEQIKEKVLWTPSKVIARLAKEINDETSYLYWAYKNRIPVFCPGLTDGSLGDMLYFHSFKKGDPDNPDLNPGLIIDIVGDIRAMNSEAVHAGSRKTGMIILGGGLPKHHVCNANMMRNGADFAVYINTAQEFDGSDSGARPDEAVSWGKIRGGAKTVKVHCDATIAFPILVAETFAAKRKELSHIRCQV

SEQ ID NO: 3830 - protein, 375 aa, Oryza sativa
  unsure (1)..(375): unsure at all Xaa locations
XGGVRDMDALEGVRSIVLKPSESLDEGRFTRIAGADFNDAGLGLPGLLASLATTGFQASNLGDAVDVVNQMLDWRLSHEKPREDCDEAELDPTYRESVKCKIFLGFTSNLVSSGIRDVVRFLVQHHMVDVIVTTAGGIEEDLIKCLAPTYRGEFSLPGTLLRSKGLNRIGNLLVPNDNYCKFENWIMPLFDQMLQEQSTEVLVWTPSKVIACLGKEINDESSYLYWAYKNNIPVYCPALTDGSLGDMLFCHAVRNPGLIIDIVADIRLMNGEAIHATPRKTGIIVLGGGLPKHHICNANMFRNGADYAVYINTAQEFDGSDSGAQPDEAVSWGKIKGSAKPVKVHCDATIAFPLIVAATFARKFQVRNKRTEFLG

SEQ ID NO: 3831 - protein, 384 aa, Oryza sativa
  unsure (1)..(384): unsure at all Xaa locations
MAWEGGSGGSGGGGARDMDALQGVRSIVLKPSESLDEGRFTRIAGADFNDAGLGLSGMLASLATTGFQASNLGDAVDVVNQMLEWRLSHEKPREDCDEPELDPTYRESVKCKIFLGFTSNLVSSGIRDVVRFLVQHHMVDVIVTTAGGIEEDLIKCLAPTYRGDFSLPGTLLRSKGLNRIGNLLVPNDNYCKFENWIMPIFXYQMLQEQSREQNVWTPSKVIGRLGKEINDESSYLYWAYKNNIPVYCPALTDGSLGDMLFCHAVRNPGLIIDIVQDIRLMNGEAIHATPRKTGIIVLGGGLPKHHICNANMFRNGADFAVYINTAQEFDGSDSGAQPDEAVSWGKIKGSAKPVKVHCDATIAFPLLVAATFARKLHERNKPTX

SEQ ID NO: 3832 - protein, 183 aa, Oryza sativa
  unsure (1)..(183): unsure at all Xaa locations
XTRASTENVWTPSKVIARLGKEIGDESSYLYWAYKNNIPVYCPALTDGSLGDMLFCHAVRNPGLIIDIVQDIRLMNGEAIHATPRKTGIIVLGGGLPKHHICNANMFRNGADYAVYINTAQEFDGSDSGAQPDEAVSWGKIKGSAKPVKVHCDATIAFPLIVAATFARKFQVRNKRTEFLGLS

SEQ ID NO: 3833 - protein, 202 aa, Oryza sativa
  unsure (1)..(202): unsure at all Xaa locations
XMRTPTMNFCSFTXXVPLFSNYQLSDTSFLNVWTPSKVIACLGKEINDESSYLYWAYKNNIPVYCPALTDGSLGDMLFCHAVRNPGLIIDIVQDIRLMNGEAIHATPRKTGIIVLGGGLPKHHICNANMFRNGADYAVYINTAQEFDGSDSGAQPDEAVSWGKIKGSAKPVKVYFCTLSNFHMIIXLIFDVRLASXKCLLLN

SEQ ID NO: 3834 - protein, 111 aa, Oryza sativa
  unsure (1)..(111): unsure at all Xaa locations
XATLPTTFVLSLLFMKYXXQFYLPAECLDTIEDIRLMNGEAIHATPRKTGIIVLGGGLPKHHICNANMFRNGADYAVYINTAQEFDGSDSGAQPDEAVSWGKIKGSAKPVK

SEQ ID NO: 3835 - protein, 107 aa, Oryza sativa
  unsure (1)..(107): unsure at all Xaa locations
XFLVSDLEVIQMKLDWRLSHEKPREDCDEAELDPTYRESVKCKIFLGFTSNLVSSGIRDVVRFLVQHHMVDVIVTTAAGIEKDLIKCLAPTYRGVFSLPGTLLRSKX

SEQ ID NO: 3836 - protein, 222 aa, Triticum aestivum
  unsure (1)..(222): unsure at all Xaa locations
MAGEGGSGGERGKDPLEGVRAIVLKPSESLDESRFTKIAGADFNDAGLGLDGLLGSLASTGFQASNLGDAIDVVNQMLDWRLSHEKPXXEDCDEAELDPKYRESVKCKIFLGFTSNLVSSGIRDVIRFLAQHHMVDVIVTTAGGIEEDLIKCLAPTYRGEFSLPGALLRSKGLNRIGNLLVPNDXYCKFENWIMPLFDQMLQEQSAENVWTPSKVIARLGKX

SEQ ID NO: 3837 - protein, 180 aa, Triticum aestivum
  unsure (1)..(180): unsure at all Xaa locations
MGSNGGADGAGFNTDALEGVRAILLKPSESLDESXXRIAGPDFNDAGLGLAGMLGSLASTGFQASHLGDAIDVVNQMLDWRLSHEKPSEDCDGAELEPKYRESVKCKIFLGFTSNLVSSGIRDVIRFLVQHHMVDVIVTSAGGIEEDLIKCLGPTYRGDFSLPGALLRSKGLNRIGNLLX

SEQ ID NO: 3838 - protein, 153 aa, Triticum aestivum
  unsure (1)..(153): unsure at all Xaa locations
LFCHAVRNPGLIIDIVQDIRLINGEAIHASPRKTGAIILGGGLPKHHICNANMFRNGADYAVYINTAQEFDGSDSGAQPDEAVSWGKIKGSXAKPVKVHCDATIALPLLVAATFARRSHGANSTNXISGCELRASNLFFIDLQSFDWALWRIT

SEQ ID NO: 3839 - protein, 383 aa, Zea mays
MGAELGEAGVPARDMVDALEGVRSILLKPSERLDDKRFTRIAGADFDDAGLGLAGLLGSLASTGFQASNLGDAIDVVNQMLDWRLSHEKPSDDCAEAELDPAYRESVKCKIFLGFTSNLVSSGVREIIRFLVQHRMVDVIVTTAGGIEEDLIKCLAPTYRGDFTLPGALLRSRGLNRIGNLLVPNDNYCKFEHWIMPILDKMLLEQSTQNVWTPSKVIARLGKEINDESSYLYWAYKNNIPVFCPALTDGSIGDMLFCHSVHSPGLVVDIVQDVRLMNAETIHASPRKTGIILLGGGLPKHHICNANMLRDGADYAVYVNTAQEFDGSDSGARPDEAVSWGKIKSSARTVKVHCDATIAFPLLVAATFARKVHGTNNKLNRRQ

SEQ ID NO: 3840 - protein, 385 aa, Zea mays
MAAGAGGGELEALEGVRSIVLKPSESLDESRFTRIAGADFNEAIGLQGLLASLASTGFQASNLGDAIDVVNQMLDWRLSHEKPSEDCDEAELDPKYRASVKCKIFLGFTSNLVSSGIRDIIRFLAQHHMVDVIVTSAGGIEEDLIKCLAPTYRGDFSLPGALLRSKGLNRIGNLLVPNDNYCKFENWIMPLFDQMLQEQSTENVWTPSKVIARLGKEINDESSYLYWAYKNNIPVYCPALTDGSLGDMLFCHAVRNPGLIIDIVQDIRLMNGEAIHATPRKTGIIVLGGGLPKHHICNANMFRNGADYAVYINTAQEFDGSDSGAHPDEAVSWGKIKGSAKPVKVHCDASIAFPLLVAATFARKVQLQMNRLNGIRWSEWATEFC

SEQ ID NO: 3841 - protein, 385 aa, Zea mays
MAAGAGGGELEALEGVRSIVLKPSESLDESRFTRIAGADFNEAVGLEGLLASLASTGFQASNLGDAIDVVNQMLDWRLSHEKPSEDCDEAELDPKYRASVKCKIFLGFTSNLVSSGIRDIIRFLAQHHMVDVIVTSAGGIEEDLIKCLAPTYRGDFSLPGALLRSKGLNRIGNLLVPNDNYCKFENWIMPLFDQMLQEQSTENVWTPSKVIARLGKEINDESSYLYWAYKNNIPVYCPALTDGSLGDMLFCHAVRNPGLIIDIVQDIRLMNGEAIHATPRKTGIIVLGGGLPKHHICNANMFRNGADYAVYINTAQEFDGSDSGAHPDEAVSWGKIKGSAKPVKVHCDASIAFPLLVAATFARKVQLQMNRLNGIQWSEWATEFC

SEQ ID NO: 3842 - protein, 406 aa, Zea mays
MVQIRKVSRLRRFGLLLQTREMAAGAGGGELEALEGVRSIVLKPSESLDESRFTRIAGADFNEAVGLEGLLASLASTGFQASNLGDAIDVVNQMLDWRLSHEKPSEDCDEAELDPKYRASVKCKIFLGFTSNLVSSGIRDIIRFLAQHHMVDVIVTSAGGIEEDLIKCLAPTYRGDFSLPGALLRSKGLNRIGNLLVPNDNYCKFENWIMPLFDQMLQEQSTENVWTPSKVIARLGKEINDESSYLYWAYKNNIPVYCPALTDGSLGDMLFCHAVRNPGLIIDIVQDIRLMNGEAIHATPRKTGIIVLGGGLPKHHICNANMFRNGADYAVYINTAQEFDGSDSGAHPDEAVSWGKIKGSAKPVKVHCDASIAFPLLVAATFARKVQLQMNRLNGIRWSEWATEFC

SEQ ID NO: 3843 - protein, 202 aa, Zea mays
  unsure (1)..(202): unsure at all Xaa locations
MPPPPPRRFRPRAHPRDAHSAMASTSSAPAGATDAVLKPSEPAPEGVQQVQGIDFNQHAARPITVDELVSGYATMGFQATSVGAAVRIINDMRAWRDPETGDRTTIFLGYTSNLISSGLRETLRYLVQHKHVSAIVTTAGGVEEDFIKCLAPTYLGSFSTPGAGLRKKGMNRIGNLVVPNXNYCAFEEWVVPILEKQLQEQX

SEQ ID NO: 3844 - protein, 376 aa, Musa acuminata
MEGGAAGGQRDRETLDAVRSVVFKPSVSLEEKRFPRVQGYDFNRGCDLIGLLDSISSTGFQASNLGDAIDVINQMIDWRLSHDAPTEDCSEEERNLAYRQSVTCKIFLGFTSNLVSSGIREIIRFLVQHRMVEVLVTTAGGIEEDLIKCLAPTYKGDFSLPGSYLRSKGLNRIGNLLVPNDNYCKFEDWIMPILDQMLLEQTTENVVWTPSKVIARLGKEINDESSYLYWAYKNNVSVYCPALTDGSLGDMLYCHSVRNPGLLIDIVQDIRAMNGEAVHVGLRKTGVIILGGGLPKHHICNANMFRNGADYAVYVNTAQEFDGSDSGAEPDEAISWGKIKGSAKTIKVHCDATIAFPLLVAATFARKFQERNNKLA

SEQ ID NO: 3845 - protein, 350 aa, Schizosaccharomyces pombe
MDESLAKDAVFVASSKPSDLTTEVVGPDFNKYDERKKAGGPGITVEELVESYGKIGFQATNLHDAVTIINEMRNWRDPNPPEEKSDRATIFLGYTSNLISSGVREVLRYLVQHKCVDVIVTTAGGVEEDIIKCLGPTYVGDFHLDGKNLRAKGLNRIGNLIVPNDNYCRFEEWIFPILNKMVEEQETLGTHWTPSSFIRRLGKEINDESSVLYWAYKNNIPIYSPALTDGSIGDMLYFHTYKATPRPLVLDIVADIRNMNTHAVRANKSGIIILGGGVVKHHICNANLMRNGAEWSVYINSANEFDGSDAGARPDEAVSWGKIRGDAKKVKVYGEVSLLFPLIVAATFAK

SEQ ID NO: 3846 - protein, 356 aa, Schizosaccharomyces pombe
MDESLAKDAVFVASSKPSDLTTEVVGPDFNKYDERKKAGGPGITVEELVESYGKIGFQATNLHDAVTIINEMRNWRDPNPPEEKSDRATIFLGYTSNLISSGVREVLRYLVQHKCVDVIVTTAGGVEEDIIKCLGPTYVGDFHLDGKNLRAKGLNRIGNLIVPNDNYCRFEEWIFPILNKMVEEQETLGTHWTPSSFIRRLGKEINDESSVLYWAYKNNIPIYSPALTDGSIGDMLYFHTYKATPRPLVLDIVADIRNMNTHAVRANKSGIIILGGGVVKHHICNANLMRNGAEWSVYINSANEFDGSDAGARPDEAVSWGKIRGDAKKVKVCDAILVYGEVSLLFPLIVAATFAK

SEQ ID NO: 3847 - protein, 310 aa, Thermoplasma volcanium
MDRKELLSKPVQDLRIDGNTTLSNLMAQFSNIGGFTAAKLYEAHSIISDMFLEDNTTFLSFPADIISTGLRGLINDVVKRKLVDVIITTSGTLDHDIARTFGKYYCGSFNYSDVELREININRLGNVLVPDESYGELIEEKVMEQLEKLYSIKKEWATVDLIKEIGLSINNESSILYNAAKNDIPIFVPGITDGSFGSQLWSFYEQHHDFKINLLEDEHRLSDIIFDAKKTGAIMVGGGISKHHTIWWNQFRDGLDYAVYITTAQEYDGSLSGAKLEEAISWKKVRPNARFVNIYGDATVIMPILMAPFL

SEQ ID NO: 3848 - protein, 353 aa, Neurospora crassa
MADNQIPSSVADAVLVKSIEMPEGSQKVEELDFNKFKGRPITVDDLLQGMKHMGFQASSMCEAVRIINEMRAYRDPTTSEKTTIFLGYTSNLISSGLRGTLRYLVQHKHVSAIVTTAGGIEEDFIKCLGDTYMSSFSAVGADLRSKGLNRIGNLVVPNSNYCAFEDWVVPILDKMLEEQEASRGTENEINWTPSKVIHRLGKEINDERSVYYWAWKNDIPVFCPALTDGSLGDMLYFHTFKASPKQLRIDIVEDIRKINTIAVRAKRAGMIILGGGIVKHHIANACLMRNGAESAVYINTAQEFDGSDAGARPDEAVSWGKIKVGADAVKVYMEATAAFPFIVANTFAKEDGL

SEQ ID NO: 3849 - protein, 353 aa, Neurospora crassa
MADNQIPSSVADAVLVKSIEMPEGSQKVEELDFNKFKGRPITVDDLLQGMKHMGFQASSMCEAVRIINEMRAYRDPTTSEKTTIFLGYTSNLISSGLRGTLRYLVQHKHVSAIVTTAGGIEEDFIKCLGDTYMSSFSAVGADLRSKGLNRIGNLVVPNSNYCAFEDWVVPILDKMLEEQEASRGTENEINWTPSKVIHRLGKEINDERSVYYWAWKNDIPVFCPALTDGSLGDMLYFHTFKASPEQLRIDIVEDIRKINTIAVRAKRAGMIILGGGIVKHHIANACLMRNGAESAVYINTAQEFDGSDAGSRPDEAVSWGKIKVGADAVKVYMEATAAFPFIVANTFAKEDGL

SEQ ID NO: 3850 - protein, 342 aa, Pyrococcus horikoshii
MKAKDIVLKKSEKIEGVEVKGPWLDDAQSLEEVVSYYYRIGFQATHLGRAIEIWRKVEEKRERGEEIRVFLGYTSNIISSGLREIIAWLVKEKKVDVIVTTAGGVEEDFIKSLKPFILGDWEVDDAELRKKGVNRIGNIFVPNDRYIEFEKYMIPFFERVLKIEEKLSRPLTASEFIYEMGRYMDEKLGKEKEKSVIYWAYKNNIPIFCPAITDGSIGDMLYFFKEERRDSRLIIDIANDIVKLNNLAITAKETASIILGGSLPKHAIINANLFRGGTDYAIYISTAVPWDGSLSGAPPREGVSWGKIKAKADYVEVWGDATLIFPILVWMVMKARGQGYAQ

SEQ ID NO: 3851 - protein, 292 aa, Aeropyrum pernix
MECYRDIHGFMAGHLAEAVEVLREGLEASSVRVLTFTGNLVATGLRGVLAQLIDGGLFNVVFTTAGALDHDIARFMGGKYLKGRFEADDTELHRRGVHRLGNVFIPVESYGPLVERFVRTLAEQAAGVRGEWGVYELLRLAGSLMEGDRDSILAAAARRGVDVFVPGWPDGAFGTSLFMERQRGTSITVDYFRDMARLADIFFPQEGEAAALIVGGGISKHHAIWWSQFRGGLDYAVYVTTAVEYDGSLSGAHPREAVSWGKIKESSRRVVVYGDATITLPVIAYCLLHGCG

SEQ ID NO: 3852 - protein, 342 aa, Trypanosoma brucei
MSGVPFPSRVIGDLDYSNLLNIGQEEAIRCVLNAYPNIGLEATNLGRARRIVQRALNDNGMDGNKVMLAYTSNLISSGLRDTFACLARENRIGAVVTTAGGVEEDVIKCLGDTLVGDFALNDHALRNNGLNRVGNLLVPNDNYRNFEDFFVPLLRRLHEQQRDSRWTTKTTPSQIIAEIGAALESVRPNDCGSSLIYWCYRNDIPVFSPAFTDGSMGDMIYFYNYSRKGLVVDPVPDVRRLRQLGCKSTNVGRITCIVLGAGLPKHHLLRNVQADAVVYVTTGSDADGCESSCNVMADRANGLLSPNCDVVRVHGDATIISPLLLLRSSDGKEKVGVREDGN

SEQ ID NO: 3853 - protein, 496 aa, Plasmodium falciparum
MVDHVSFIEVNKIRSDDECDADSHNEGDNIEDAKASVFVKSSLIPEKTDVVKGLNFDKEVDLHEFINNYKYMGFQATNLGISIDEINKMIYYKYKDENIKSEPNNENNLNCNNVSEDLNKDQENHLYHYEKKKKSCIIWLSFTSNMISSGLREIFVYLAKNKFIDVVVTTAGGIEEDIIKCFSNTYIGDFNLNGKKLRKKGWNRIGNLIVPNDNYCKFEDWLQPILNKMLHEQNEKNEQMFLKKLEKRKKKYNNNKNKNDNNNDNDNVWGNEKNDQNENQYNQGQESFKKDSNIYTNDVSNKKNHINNYINNYDSDSDDQCDMYYLSPSEFINTLGKEINDESSLIYWCYKNDIPIFCPGLTDGSLGDNLFLHNYGKKIKNNLILDIVKDIKKINSLAMNCEKSGIIILGGGLPKHHVCNANLMRNGADFAVYVNTASEYDGSDSGANTTEALSWGKIKYGQTNNHVKVFGDATILFPLMVLNSFYLYDQKRKKDM

SEQ ID NO: 3854 - protein, 362 aa, Encephalitozoon cuniculi
MARAGQISVTQEAWVCTGDGKKSFPQLPMDRPQNVKDLARKVKDNLSFSREVRGMDFEKEWDFMAIMRSFETMGFQGSNLYRAVEEIERMKNSKIFFGCTSNIISSGLRDVIATLVKRRHVHVLVITGGGIEEDIIKAFKPTFCADFRLDGAELRDNGLNRIGNLVIPSENYEHLESWLNNIVNDITEGYTAERPRILTPSSFIRILGERIDDESSILYWAAKNDIPVYSPAVVDGSLGDILSFHPRRKMLKLDIVEDVYRINCETIFCGETAAIILGCGVVKHHILNANLFKNGLEHCVLINNAQEFDGSDAGASLDEAVSWGKVKPGTRGVKVFGDATILFPLLVGATFMRKDKDVPKGE

SEQ ID NO: 3855 - protein, 221 aa, Taenia solium
MSNAEASKEADKALPVDIARSLPPGFGDAVLRPSQALPEGVSVEVRGYDFNKGVDYEALLASYASTGFQATHFARAVDVLNSVIERRSVIPSDEDEKSKEVLESLGLGIARRSGCTVFLAYTSNMISAGVREVIRFLVQHNLVDVLVTSAGGVEEDFVKCMANFYVGDFSRWTGAELRKLGINRTGNLLVPNNNYVILEEWLNPIFDRMLEEQNTNNVNWT

SEQ ID NO: 3856 - protein, 371 aa, Caenorhabditis elegans
MSTNEAAASQEDIALAQGAVLVKSCQVPDGSIPIRGFDFSTASGPDFSLSAILSSYMSTGFQATHLAQAIQQVNQMLSLRDTPLTCDDDEKLFPYPEGRQKRSCTIFLGYTSNLVTSGLREVLRYCVQRNLVDCIVTSAGGIEEDLIKCLKPSYLGTFTMDGAKLRSNGMNRAGNVLIPNDNYCAFEDWLMPILDECLVEQEEKHLNWTPSKLIQRLGERIGDESSILYWAAKHRIPVFCPALTDGSLGDMLYFHSVKSSPGLRVDIVEDVRHINTIAVKSFKTGSIILGGGVVKHHINNANLMRNGADHTVYINTGQEFDGSDSGAQPDEAVSWGKVKPSAGAVKVHAEATLVFPLLVAETFAKHEGHKD

SEQ ID NO: 3857 - protein, 330 aa, Halobacterium sp. NRC-1
MTGDDADETHENVVPGSDEDLDTPDVRGYDFSGEFDFFELLDSYATTGFQASHLADAVDITREMREDDATIYLTLTSNIVSSGLREVVAHLVRENYVDVIITTSGSLTEDIIKTAKPFKMGEWDVDEAALREEGINRLGNIFVPSDRYVWLEEYLYDFFEEFFADQKVRTPTAFARELGATLDDEDSILKNAADNDIPVFCPALTDAEIGNFLYYYRQGYDSEVGIEILDDYDALIEEGLLADTTGLICVGAGVPKHHAIMTNLFRGGADYAVYISTGMEGDGSLSGAPPEEAVSWGKIKDEDAEPNYALIEAEATLVFPLLVAGAFENP

SEQ ID NO: 3858 - protein, 411 aa, Drosophila melanogaster
MSTEPSVAKDAVLKRSEALAENTPQVSGYDFNEGLDYSKLFESYVNTGFQATNLGLAIREINRMLDCRDQPLEADQIDSHETDDFIRRRSKCTVFLGYTSNLVSSGLRETIRFLAEHRMIDCIVTTAGGVEEDFIKCLAPTFMGSFELSGRDLRERGINRIGNLLVPNDNYCKFEDWVMPLLDEMLEEQKSQGTIWSPSKIIHRLGERIGDPSSIYYWAAKNQIPVFCPALTDGSLGDMMYFHSFRQPGLVVDILSDLRRLNTMAVKAVNSGMIIVGGGVIKHHICNANLMRNGADYSVFINTASEFDGSDSGARPDEAISWGKIRKDATPVKVYAEASLVFPLIVGETFAKRHHCAGKELPRETNQVCKLSGQEAIKRRRSCWLQVINTTGNSSNSIALRHLQWAMHIPP

SEQ ID NO: 3859 - protein, 428 aa, Plasmodium yoelii yoelii
MDGVFKEVNKIKNESETEDNDDNNGGINDAKSSVFVKSTKIPEKTDVVKGINFEKKVNLHEFINQYKYMGFQATNLGIGIDEINKMIHYKFFDNKEDIKNDSITYDNKKKCMIWLSFTSNMISSGLREIFVYLAKNNYIDVVVTTAGGIEEDLIKCFSKTYLGDFNLNGSKLRKKGWNRIGNLIVPNDNYCMFEDWVQPLLDKILREQNEKNEELFLRKLEKRKKKMEMEKESQGLNKSNQQYLSFDEEEDDMFYLSPSELINRLGKEINDETSLLYWCYKNNIPVFCPGLTDGSLGDNLFFHNYGKKMKNNLILDIVKDIKKINSLALKCHKSGIIVLGGGLPKHHVCNANLMRNGADFAVYVNTANEYDGSDSGANTTEALSWGKLKSGNNISHVKVFGDATILFPLMVLNSFYLHNHGEKEKKSD

SEQ ID NO: 3860 - protein, 370 aa, Senecio vulgaris
MAESNKEAIDSARSNVFKESESLEGTCAKIGGYDFNNGIDHSKLLKSMVSTGFQASNLGDAMIITNQMLEWRLSHDEVPENCSEEEKKNRESVKCKIFLGFTSNLISSGVRETICYLTQHRMVDVLVTTTGGIEEDFIKCLASTYKGKFSLPGADLRSKGLNRIGNLIVPNDNYIKFEDWIIPIFDQMLIEQKTQNVLWTPSRMIARLGKEINNETSYLYWAYKNNIPVFCPSITDGSIGDMLYFHSVSNPGPGLVVDIVQDVIAMDNEAVHASPQKTGIIILGGGLPKHHICNANMMRNGADFAVFINTAQEYDGSDSGARPDEAVSWGKISSTGKAVKVHCDATIAFPLLVAETFAVKKEKASKVNGF

SEQ ID NO: 3861 - protein, 384 aa, Senecio vulgaris
MHNNSSNSRELIKKWPRSNKEAIDSARSNVFKESESLEGTCAKIGGYDFNNGIDHSKLLKSMVSTGFQASNLGDAMIITNQMLDWRLSHDEVPENCSEEERKNRESVKCKIFLGFTSNLISSGVRETICYLTQHRMVDVLVTTTGGIEEDFIKCLASTYKGEFSLPGADLRSKGLNRIGNLIVPNDNYIKFEDWIIPIFDQMLIEQKTQNVLWTPSKMIARLGKEINNETSYLYWAYKNNIPVFCPSITDGSVGDMLYFHSVSNPGAGLVVDIVQDVIAMDNEAVHASPQKTGIIILGGGLPKHHICNANMMRNGADFAVFINTAQEYDGSDSGARPDEAVSWGKISSTGKAVEVHCDATIAFPLLVAETFAVKKEKASKVNGF

SEQ ID NO: 3862 - protein, 361 aa, Danio rerio
MAGQAPPVARAAVLKESTPLPDDLPQIRGYDFNQGLNHRALLQSFITTGFQASSFGLAVQEINKMIEKRLEPVQEECEDSDSRQSALGCTIFLGYTSNLISSGVRESIRYLTQHKMVDVIVTTAGGIEEDLIKCLAPTFLGEFSLKGKELRQQGINRIGNLLVPNENYCKFADWLMPILDQMVLEQKTEGTHWTPSKMIHRLGKEINNPDSVYYWAYKNDIPVFSPALTDGSLGDMIYFHSYKNPGLVLDIVEDIRRLNSKAVFAKSTGMIILGGGLVKHHIANANLMRNGADFAAFVNTGQEFDGSDSGARPDEAISWGKIRMDASPVKVYADASLVFPLLVAETFAHNASRLIQEKKSD

SEQ ID NO: 3863 - protein, 371 aa, Senecio vernalis
MEESMKQASVMENLRSVVFKESESLEGTCAKIRGYDFNNGIDYSQILKSMVSTGFQASNLGDAIETVNQMLDWRLSHEQVTEDCSQEEKNPTYRESIKCKIFLGFTSNLISSGVRDIIRYLVQHHMVDVIVTTTGGIEEDLIKCLADTFKGEFSLPGAELRSKGLNRIGNLLVPNDNYCKFEDWIIPIFDQMLEEQKAKNVLWTPSKLIMRLGKEINNESSYLYWAYKNDIPVFCPGLTDGSLGDMLYFHTFRNPGLIVDVVQDIRAINSEAVHANPRKTGMIILGGGLPKHHICNANMMRNGADYAVFINTAQEFDGSDSGARPDEAVSWGKIRGSAKSVKVHCDATIAFPLLVAETFAAKREQSAEPSS

SEQ ID NO: 3864 - protein, 370 aa, Senecio vernalis
MAESNKEAIDSARSNVFKESESLEGTCAKIGGYDFNNGIDHSKLLKSMVSTGFQASNLGDAMIITNQMLDWRLSHDEVPENCSEEEKKNRESVKCKIFLGFTSNLISSGVRETICYLTQHRMVDVLVTTTGGIEEDFIKCLASTYKGKFSLPGADLRSKGLNRIGNLIVPNDNYIKFEDWIIPIFDQMLIEQKTQNVLWTPSRMIARLGKEINNETSYLYWAYKNNIPVFCPSITDGSIGDMLYFHSVSNPGPGLVVDIVQDVIAMDNEAVHASPQKTGIIILGGGLPKHHICNANMMRNGADFAVFINTAQEYDGSDSGARPDEAVSWGKISSTGKAVKVHCDATIAFPLLVAETFAVKKEKASKVNGF

SEQ ID NO: 3865 - protein, 369 aa, Homo sapiens
MEGSLEREAPAGALAAVLKHSSTLPPESTQVRGYDFNRGVNYRALLEAFGTTGFQATNFGRAVQQVNAMIEKKLEPLSQDEDQHADLTQSRRPLTSCTIFLGYTSNLISSGIRETIRYLVQHNMVDVLVTTAGGVEEDLIKCLAPTYLGEFSLRGKELRENGINRIGNLLVPNENYCKFEDWLMPILDQMVMEQNTEGVKWTPSKMIARLGKEINNPESVYYWAQKNHIPVFSPALTDGSLGDMIFFHSYKNPGLVLDIVEDLRLINTQAIFAKCTGMIILGGGVVKHHIANANLMRNGADYAVYINTAQEFDGSDSGARPDEAVSWGKIRVDAQPVKVYADASLVFPLLVAETFAQKMDAFMHEKNED

SEQ ID NO: 3866 - protein, 369 aa, Homo sapiens [sequence omitted]

SEQ ID NO: 3867 - protein, 344 aa, Homo sapiens
APAGALAAVLKHSSTLPPESTQVRGYDFNRGVNYRALLEAFGTTGFQATNFGRAVQQVNAMIEKKLEPLTSCTIFLGYTSNLISSGIRETIRYLVQHNMVDVLVTTAGGVEEDLIKCLAPTYLGEFSLRGKELRENGINRIGNLLVPNENYCKFEDWLMPILDQMVMEQNTEGVKWTPSKMIARLGKEINNPESVYYWAQKNHIPVFSPALTDGSLGDMIFFHSYKNPGLVLDIVEDLRLINTQAIFAKCTGMIILGGGVVKHHIANANLMRNGADYAVYINTAQEFDGSDSGARPDEAVSWGKIRVDAQPVKVYADASLVFPLLVAETFAQKMDAFMHEKNED

SEQ ID NO: 3868 - protein, 369 aa, Homo sapiens [sequence omitted]

SEQ ID NO: 3869 - protein, 322 aa, Homo sapiens
MEGSLEREAPAGALAAVLKHSSTLPPESTQVRGYDFNRGVNYRALLEAFGTTGFQATNFGRAVQQVNAMIEKKLEPLSQDEDQHADLTQSRRPLTSCTIFLGYTSNLISSGIRETIRYLVQHNMVDVLVTTAGGVEEDLIKCLAPTYLGEFSLRGKELRENGINRIGNLLVPNENYCKFEDWLMPILDQMVMEQNTEGVKWTPSKMIARLGKEINNPESVYYWAQKNHIPVFSPALTDGSLGDMIFFHSYKNPGLVLDIVEAQEFDGSDSGARPDEAVSWGKIRVDAQPVKVYADASLVFPLLVAETFAQKMDAFMHEKNED

SEQ ID NO: 3870 - protein, 321 aa, Homo sapiens [sequence omitted]

SEQ ID NO: 3871 - protein, 313 aa, Homo sapiens
MEGSLEREAPAGALAAVLKHSSTLPPESTQVRGYDFNRGVNYRALLEAFGTTGFQATNFGRAVQQVNAMIEKKLEPLSQDEDQHADLTQSRRPLTSCTIFLGYTSNLISSGIRETIRYLVQHNMVDVLVTTAGGVEEDLIKCLAPTYLGEFSLRGKELRENGINRIGNLLVPNENYCKFEDWLMPILDQMVMEQNTEGVKWTPSKMIARLGKEINNPESVYYWAQKNHIPVFSPALTDGSLGDMIFFHSYKNPGLVLDIVEGARPDEAVSWGKIRVDAQPVKVYADASLVFPLLVAETFAQKMDAFMHEKNED

SEQ ID NO: 3872 - protein, 312 aa, Ferroplasma acidarmanus
MEIKREDLLKNPVKDMKINKNTTLMQLMEMFGTSGGFTSKKIYEGYQILKEEFTSDETTFLSFPADIISTGTRGIINQLVKNKLVDVIITTNGTLDHDIARVYTDYYAGTFNFGDEKLKDMNINRLGNVFVPDESYGVIIEEKLMPMIEELYSKKKEWAPVDLIREVGLKLNNENSILYNAAKNGIPVFVPGITDGSFGSQLWSFYEMHHDFRINLLEDEHRLSDIVFDAKKTGALMIGGGISKHHTIWWNQFRDGLNEAVYITTAQEYDGSLSGAKLEEAITWKKVRKDAKFVNIYGDATAILPIMVAPFL

SEQ ID NO: 3873 - protein, 297 aa, Mus musculus
MGFVKVVKNKAYFKRYQVRFRRRREGKTDYYARKRLVIQDKNKYNTPKYRMIVRVTNRDIICQIAYARIEGDMIVCAAYAHELPKYGVKVGLTNYAAAYCTGLLLARRLLNRFGMDKIYEGQVEVNGGEYNVESIDGQPGAFTCYLDAGLARTTTGNKVFGALKGAVDGGLSIPHSTKRFPGYDSESKEFNAEVHRKHIMGQNVADYMRYLMEEDEDAYKKQFSQYIKNNVTPDMMEEMYKKAHAAIRENPVYEKKPKREVKKKRWNRPKMSLAQKKDRVAQKKASFLRAQERAAES

SEQ ID NO: 3874 - protein, 128 aa, Mus musculus
MVVRVTNRYIICQIAYARIEGDMIICAAYAHELPKYGLKVGLTNYAATYCTGLLLVPRLLNRFGMDKIYGGQVEVNGGEYNVESIDGQPGAFTCYLDAGLARTTTGNKVLGALKGTVDGDLSIPHSTK

SEQ ID NO: 3875 - protein, 143 aa, Mus musculus
MGFVKIVKNKAYFKRYFVRFRMRQEGKTYYYARKRLVILDKNKYNIPKYRMIIPVTNRDIICQIAYSGIEGEMIVCGASAYKLPNYGVKVGLTNYAAAYCTGLLLAHRLLNRFGTDKIYEGQVVVQEWHWFLLVIFLHLTLPI

SEQ ID NO: 3876 - protein, 137 aa, Mus musculus
MDIRTPFCANDLCLEENNILRSEEDMIVCSVYAHELPNYGVKVGLTNYAEAYCTGLLLVHRLLNRFGVDKIYEGQVEVTGEEYNVESTDGQPGAFTYYLNASLAQTTTGNKVFGTLKGAMDGGLSISHSTKRFPSYD

SEQ ID NO: 3877 - protein, 164 aa, Mus musculus
MGFMKVVKNKAYFKRYQVRFRRRQKLLNRFGTDKIYEGQVVVNGGEHNVESIDGQPGAFTCFLDAGLAQTTTGNKVFEALKGAMDGGLSVPHRTERFPSYDFESQEFNAEVHRKHIMGQNVAGNMCYLMEEDEDVYKKQFSQSIKNNVTPNMMEEMYKKAHTAI

SEQ ID NO: 3878 - protein, 144 aa, Mus musculus
MAYAHIEEDMIVCSVYAHELPNYGVKVGLTNYAEAYCTGLLLVHRLLNRFGVDKIYEGQVEVTGEEYNVESTDGQPGAFTYYLNASLAQTTTGNKVFGTLKGAMDGGLSISHKKDACKKQFSWYRENNVTPDMERIYKKAQATI

SEQ ID NO: 3879 - protein, 110 aa, Mus musculus
ALKGAVDGGLSIPHSTKRDYMRYLMEEDEDAYKKQFSQYIKNNVTPDMMEEMYKKAHAAIRENPVYEKKPKREVKKKRWNRPKMSLAQKKDRVAQKKASFLRAQERAAES

SEQ ID NO: 3880 - protein, 297 aa, Rattus norvegicus
MGFVKVVKNKAYFKRYQVRFRRRREGKTDYYARKRLVIQDKNKYNTPKYRMIVRVTNRDIICQIAYARIEGDMIVCAAYAHELPKYGVKVGLTNYAAAYCTGLLLARRLLNRFGMDKIYEGQVEVNGDEYNVESIDGQPGAFTCYLDAGLARTTTGNKVFGALKGAVDGGLSIPHSTKRFPGYDSESKEFNAEVHRKHIMGQNVADYMRYLMEEDEDAYKKQFSQYIKNNVTPDMMEEMYKKAHAAIRENPVYEKKPKREVKKKRWNRPKMSLAQKKDRVAQKKASFLRAQERAAES

SEQ ID NO: 3881 - protein, 296 aa, Rattus norvegicus
MGFVKVVKNKAYFKRYQVRFRRRREGKTDYYARKRLVIQDKNKYNTPKYRMIVRVTNRDIICQIAYARIEGDMIVCAAYAHELPKYGVKVGLTNYAAAYCTGLLLARRLLNRFGMDKIYEGQVEVNGDEYNVESIDGQPGAFTCYLDAGLARTTTGNKVFGALKGAVDGGLSIPHSTKRFPGYDSESKEFNAEVHRKHIMGQNVADYMRYLMEEDEDAYKKQFSQYIKNNVTPDMEEMYKKAHAAIRENPVYEKKPKREVKKKRWNRPKMSLAQKKDRVAQKKASFLRAQERAAES

SEQ ID NO: 3882 - protein, 208 aa, Rattus norvegicus
MGFVKVVKNKAYFKRYQVRFRRQREGKTDYHAQKRLVIQDKRHTHELPKHGVKVGLTNYASAYCTGLLLVRRLLNRFGMDRIYEDQVEVNGDEYNVESINSQPGAFTCYLDAGLARTTTGNKVFGTLKVAVDGGLSIPHSTKRFPGYDSKSKEFNAEVHLKHTMGQNVADYMSYLMEEDEDVYKKQFFQYIKNNITPDRMEEKAHAAI

SEQ ID NO: 3883 - protein, 128 aa, Rattus norvegicus
MGFVKVVKNKAYFKRYQVRFRRRQEGKSDYYARKRLVIQDKNKYNTPKYRMIVRVTNRDIICQIAYARIEGDMIVCAAYAHELPKYGAKVGLTNYAAAYCTGLLLARRLLNRFGMDKIYEGQVEVNGD

SEQ ID NO: 3884 - protein, 355 aa, Rattus norvegicus
MLGHHFESGDFHIQEGCYAMQVSGQAVHRIQKQGPEYTNHDGSEAGQRQIPGDSQQNTRKELTDNSILVILVIFRMQLVYTRSDRMQERRALRLVIGSGNVLVITRTSYRSSFSFALSVLLSCRRLRRQYVNIGRRAAGLKENMYTGHPFSASATKALLRSLYIPEAKAVEKQQGSSQPGGICPVQSSAVLMHESHSAAETLEDGRRNVPQPRSQRLARTTTGNKAFGALKGAVDGGLSIPHGTKRFPGYDSEGKEFSAEVHRKHIMGQNVADYMRYLMEEGKDVYKKQFSQNIKNVSPDLMEELYKKAHAALRENPGYEKKPKREVKKKRWNQERSGCSKEGSFLRAQEWAAES

SEQ ID NO: 3885 - protein, 174 aa, Rattus norvegicus
MGFMEFVKNKAYLKDNKAYANELPKHSAKVGLTNYSAAYCPGLLLACMFLNRFGMDKIYEGQVEVNRDKYNMESTEGRYGTFICYLDAGLAGTTTGNKVFRPLNEGMDGGLSIPFSSKQFPGYDSERKDFNAEKPKREVKKSWNHLKMSHAQKKDRASQKKAKFLRAQGWAAES

SEQ ID NO: 3886 - protein, 233 aa, Rattus norvegicus
MGFVKVVKNKAYFKRHQGRFGRLREGQTDYYVQKRLVRQDRNKYSTPEYRVIVCVANRRDDCVLYCQIVYAHIEICAAHAHELPKYGEKVVLTNYAAAYCTSGFSVGLAWTISMKAEWRRLEMNTMNVMESINCQPGVFTFMENVINQKHLNFFISSVETSDPTPEELISWDDRRQRLFAMFSRTRLNFGEHTSHHILYGQHIWNPFWYVNTCHSPGNRERTHDGEKLKNKKF

SEQ ID NO: 3887 - protein, 137 aa, Rattus norvegicus
MELVKVVKNKAYFKRYLEIYKAARGLLNRFGMDKIYEGKMEVNVDDNVESTDGQSGPFLCYLGAGLVRTTTGNKVFGVLKGAVDGGSSIPHSTKRFPGYDAKSKEFNAKVRQKQNMAQNVAAYVCYLMEEDEDAYKK

SEQ ID NO: 3888 - protein, 196 aa, Sulfolobus tokodaii
MAHGPNYRVKYRRRREGKTNYYKRYTYVINNTTRLVVRLTNKYIIAQIAKFNPKGDVIVVAAHSMELAKKFGWKGDLNNTPAAYLTGYLLGVRALKAGIKEAVADIGLFVPVKGSRIFTAIKGAIDAGLSIPVGDLGIKEDRIKGVHIASYAQKLEAENPELFKRLFSKYLERGLHPKDLPSHFEEILNKIKSGGA

SEQ ID NO: 3889 - protein, 207 aa, Branchiostoma belcheri tsingtaunese
MGFVKVVKNKAYFKRFQVKFRRRREGVTDYYARKRLVIQEKNKYNTPKYRLIVRFTNKDIICQVAYARIEGDVIVCAAYAHELPRYGIKVGLTNYAAAYCTGLLLARRILKKFSLDTIYEGCTEIDGDEYNVEEVDGQPRPFRCFLDVGLVRTSTGARVFGAMKELSTAVLTSRIARSASQDTMPSPRISTPRFTEATSSGSTWQST

SEQ ID NO: 3890 - protein, 205 aa, Pyrobaculum aerophilum str. IM2
MARSGRYKVPFRRRREGLTNYRKRRKLLLSKKPRLVVRKTNKHIIAQIVVAKPQGDVTIVGADTRILAKFGWRGDENNVAAAYLLGLVVGYKARARRVEEAILDIGLHRPAPGARVFAVLKGALDAGLKIPHGEEVLPDEDRIKGKHVAEYAEKLKEENPEAYKARFSRYLQRGLEPEKLPEHFEEVKKKIVEYYEKKLAKVAAQ

SEQ ID NO: 3891 - protein, 324 aa, Anopheles gambiae str. PEST
QGFVKVVKNKQYFKRYQVRFRRRREGKTDYYARKRLIFQDKNKYNTPKFRLIVRLSNRDITCQIAYARIEGDRIVCAAYSHELPRYGVKVGLTNYAAAYCTGLLVARRILQKLRLDTLYAGCTDVTGEEYLVEPVDEGPAAFRCYLDVGLARTTTGARVFGAMKGAVDGGLNIPHSVKRFPGYSAENKSFNAEMHRDHIFGLHVANYMRTLEEEDEEAFKRQFSKYISLGIKADDIENIYKNAHASIRKPPSRRNPRRRSPRSGGRWPSCRSPPARRRSRSTRPTSWPRSRPTSKPKRPRRRRPFFFSSWWCIILVLPCSSPVR

SEQ ID NO: 3892 - protein, 297 aa, Giardia lamblia ATCC 50803
MGWVKVQKTRSYFKRFQVQFRRRREGKTDYQARKALIIQDKNKYATPRYRFVVRRTNKDIICQVTAAELTKDRVVCAAYSHELPRYGIPVGLTNYAAAYATGLLCGRRLLEKLSVGIKENALAQLYPGLDKATGEEYHPDENENEEVHAFKAFLDIGLARASTGARVFAAMKGAVDAGLNIPHSMKRFPGYSKDGFDSSALRDRIMGKHVGDYMAELKAEDEETYRKRFSKYIAAKVEPLRLEAMYTKAHAAIRANPQAVKAKFEIKKPVRQARLTLKERKERIDAKKLEALKQLTK

SEQ ID NO: 3893 - protein, 203 aa, Pyrococcus furiosus DSM 3638
MAHGPRYRVPFRRRREGKTNYRKRLKLLKSGKPRLVVRKSLNHHIAQIIVYDPKGDRTLVSAHTRELIRDFGWKGHCGNTPSAYLLGLLIGYKAKQAGIEEAILDIGLHPPVRGSSVFAVLKGAVDAGLNVPHSPEIFPDEYRIRGEHIAEYAKMLKEQDEEKFRRQFGGYLVKGLDPEKLPEHFEEVKARIIEKFEGEGARE

SEQ ID NO: 3894 - protein, 192 aa, Methanothermobacter thermautotrophicus str. Delta H
MAHGPRYKLAFRRRREGKTDYRARYKMVETGKSRLVVRITTYHVIAQIINVGMNGDETLVSAHSKQLQKMGWLGGTSNTAAAYLTGYLCGKRALKEGIEEAVLDIGLRPAIRGSKVFAALKGAVDAGLNVPHGESVLPDESRIRGEHIMEYAESLDEEELRKRFSKYLERGLSPVDLPEHFDEIKKRIDEEV

SEQ ID NO: 3895 - protein, 174 aa, Methanosarcina acetivorans C2A
MATGPRYKVPFRRRREGRTNYHLRLKLLLSRQDRVVVRKSSRNVQIQLIAPTPDGDITYSSAVSNELAKYGYTGATGNTTAAYLTGLLFGLKSLQKGYEGGILDIGLQASSAGSRVYAALKGVVDSGFEIPCSPEVFPPDERIRGEHIAGYREESSDLPEQFEATKEKIFAEFS

SEQ ID NO: 3896 - protein, 202 aa, Methanopyrus kandleri AV19
MIALATGPRYRVPFRRRREGKTNYYKRRELIKADAPRLVARKTLNHNIAQIVDFAPHGDVTLASAHSIELRNKFGWKGHCGNTPAAYLTGYLCGLRALERGIERAVIDIGLHRPVRGSRVFAMLKGALDAGMDIPHGEEVLPPEDRIRGEHIANLARQIKEEDPEEYERRFSKYLERGLKPEELPEHFEEVKSKIEEEFGGA

SEQ ID NO: 3897 - protein, 189 aa, Methanosarcina mazei Goe1
MSPKNCYRNNLEELKMATGPRYKVPFRRRREGRTNYHLRLKLLLSGQDRVVVRKSARNVQIQLLAPTPEGDITYSSAVSSELAKYGYTGATGNTTAAYLTGLLFGLKSLQKGYEGGILDIGLQASSAGSRVYAALKGIVDSGFEIPCSSDVFPSDERIRGEHIAEYREESSDLPEQFEATKEKIFAEFS

SEQ ID NO: 3898 - protein, 195 aa, Methanococcus vannielii
MIMAQNAKHRVPFRRRREGKTDFRQRLGLLLSGKPRLVARKSLNNIIAQLMAYDEKGDIVLVSAHSRELVKMGYKGHCGNLPAAYLTGLLLGKKAVEEGLEEAILDKGLHRATKGAAIFAVLKGALDAGMDIPCGEEIIADEERLNGTHIKQYAELLKEDEEAYKKQFSKYLEKGLNPEDLPEHFEELKGKILNL

SEQ ID NO: 3899 - protein, 195 aa, Methanocaldococcus jannaschii
MATGPTYRVKFRRRREAKTDYRKRLKLLLSRKPRLVARRTLNHCIAQIVLYDEKGDKTVVSAHSRELIKLGYKGHTGNLPSAYLTGYLLGKKALAKGYTEAVLDIGLHRATKGNAIFAILKGALDAGMEIPHGEEILPSEERIRGEHIKAYAEMLKEQDEERYKKQFSKYLEKGLEPEKLPEHFEEIKAKIDSMF

SEQ ID NO: 3900 - protein, 174 aa, Methanosarcina barkeri
MATGPRYKVPFRRRREGRTNYHLRLKLLISKQDRVVVRKSARNVQIQLIAPTPEGDITYSSAVSSELAKYGYTGVTGNTTAAYLTGLLFGLKSLKKGYEGGILDIGLQASSAGSRVYAALKGIVDSGFEVPCSPEVFPSDERIRGEHIAEYREESSDLPEQFEATKEKIFAEFS

SEQ ID NO: 3901 - protein, 187 aa, Haloarcula marismortui
MATGPRYKVPMRRRREARTDYHQRLRLLKSGKPRLVARKSNKHVRAQLVTLGPNGDDTLASAHSSDLAEYGWEAPTGNMPSAYLTGLLAGLRAQEAGVEEAVLDIGLNSPTPGSKVFAIQEGAIDAGLDIPHNDDVLADWQRTRGAHIAEYDEQLEEPLYSGDFDAADLPEHFDELRETLLDGDIEL

SEQ ID NO: 3902 - protein, 186 aa, Haloarcula marismortui
ATGPRYKVPMRRRREARTDYHQRLRLLKSGKPRLVARKSNKHVRAQLVTLGPNGDDTLASAHSSDLAEYGWEAPTGNMPSAYLTGLLAGLRAQEAGVEEAVLDIGLNSPTPGSKVFAIQEGAIDAGLDIPHNDDVLADWQRTRGAHIAEYDEQLEEPLYSGDFDAADLPEHFDELRETLLDGDIEL

SEQ ID NO: 3903 - protein, 189 aa, Archaeoglobus fulgidus DSM 4304
MKLARGPRYKVPLRRRREGKTNYRKRLKLLLSRKPRLVVRITNRRVIAQIVEYAPEGDRVVVGVDSAMLREFGWKGDLNNTPAAYLTGILIAKKALQKGIGEAVLDIGLHTPTRGSRVFAVLRGAVEGGLEVPHSDEVLPDDSRIRGEHIAAYYEMNPERFGEYEKRGLKPSDLPAHVDEIKEKLMVIS

SEQ ID NO: 3904 - protein, 197 aa, Sulfolobus acidocaldarius
MTQGPNYRIKFRRRREGKTDYYTRYTYVINNAIRFVPRLTNKYVIVSVSKFDQKGDIMIAYAHSIELVKKYGWKGDTNNTPAAYLTGYLAGLRAVKSGVKAAVSDIGLFVPVKGGRIFAVIKGAIDAGLKVPVGDLGKLKDRVNGSHISAYAQKLKNENQELYNKLFSSYIQRGLDPVLLPQHFEEVLNKIKENGGK

SEQ ID NO: 3905 - protein, 199 aa, Sulfolobus solfataricus
MNKLANGPNYKVKPRRRREGKTNYYKRYVYVISKQTRFIVRITNKYVIVQIAKIDPKGDIMIASAHSAELAKKFGWKGDENNTPAAYLTGYLAGLRAIKRGVTECVADIGLHVPSKGNRVFYVIKGAIDAGLKIPIGDISIENDRIKGEHIAKYAEKLKSENSDLYSKLFSRYLQRGLNPENLPSHFEEILNKIKSSGG

SEQ ID NO: 3906 - protein, 160 aa, Thermoplasma acidophilum
MVFKRKEAGITDYSKRLKLLKSREKRFIVRITGKGVIAQVAEYSDIGDRILFTVTDKTLAKYGVDLRGNNIQVCYLVGYIAGIESEKNGVESAVLDTGRRKFRKGGRIAACLKGFTDAGIEVPHGEDVFPDKKRIDGKHLKSPVKISEIVKNFKKMEEKA

SEQ ID NO: 3907 - protein, 163 aa, Thermoplasma acidophilum
MISMVFKRKEAGITDYSKRLKLLKSREKRFIVRITGKGVIAQVAEYSDIGDRILFTVTDKTLAKYGVDLRGNNIQVCYLVGYIAGIESEKNGVESAVLDTGRRKFRKGGRIAACLKGFTDAGIEVPHGEDVFPDKKRIDGKHLKSPVKISEIVKNFKKMEEKA

SEQ ID NO: 3908 - protein, 203 aa, Pyrococcus abyssi
MAHGPRYRVPFRRRREGKTNYRKRLKLLKSGKPRLVVRKSLNHHIAQIIVYDPKGDRTLVSAHTRELIRDFGWKGHCGNTPSAYLLGLLIGYKAKKAGIEEAILDIGLHPPVRGSSVFAVLKGAVDAGLNVPHSPEIFPEDYRIRGEHIAEYARMLKEQDEEKFRRQFGGYLEKGLDPEKLPEHFDEVKARIIEKFESEGARE

SEQ ID NO: 3909 - protein, 271 aa, Dunaliella salina
MGYVKVVKTSPYFSRYQVKYRRRRQGKTDYRARLRLVRQDKNKYNTHKYRLVVRFSNKNVTCQIVYSTIQGDVVMAAAYSKELPNYGLKVGLTNYSAAYCVGLLVARRILTKLNLADTYKGQEEPDGEDYNVEPVEDGPKPFYCLLDTGLKRTSTGSKVFAAMKGALDGGLDIPHNEKRFVGYADKKLDTEVLQKYIYGGHVAEYQETMQEEEPEKYQAHFSSYVENEIEPDGIEDMYKEVHAKIRENPCPPKKERTKPADAKRWSPQAHL

SEQ ID NO: 3910 - protein, 269 aa, Argopecten irradians
MGFVKVVKNKAYFKRFQVKFRRRREGKTDFYARKRLVIQEKNKYNTPKYRLIVRFTNKDIICQIAYARIEGDHIICSAYAHELPRYGVKVGLTNYSAAYCTGLLLARRLLKQFKLDSVYAGQEEVDGDEYYVEDVDGEAGAFRCYLDAGLVRTSTGARVFGALKGAVDGGLDIPHSTKRFPGYDGESNEFNAEVHRNHIFGKHVAGYMAHLQEEDEEAYKRQFSRFIKNGLNSENLEEMYKKGHAAIRANPERATKTKKAPAGKVKRWN

SEQ ID NO: 3911 - protein, 294 aa, Plasmodium falciparum 3D7
MAYVKVVKNKAYFKRYQVKYRRRREGKTDYRARKALILQDKNKYNAQKLRFVVRKTNSQVICQIACAHIEGDKILAEAKSKELIRYGIPVGLKNYAAAYATGLLCARRFLKSLNLDTQFLGVEKVTGEIENNEDKEDEEGRKPIKAFLDVGITRTTTGNRVFAALKGACDGGLNIPHGNNRFPGSKNEFNPEQLRKNILGIHVAEYMKTLQEEDNDKYKTHFNDYLKNNIGADDIEQMYLNAHEKIRQNPEKESKDTKNVKKFVSKHEKPKKLNAKLRKKRVKEKLALYVEKLQ

SEQ ID NO: 3912 - protein, 301 aa, Arabidopsis thaliana
MVFVKSSKSNAYFKRYQVKFRRRRDGKTDYRARIRLINQDKNKYNTPKYRFVVRFTNKDIVAQIVSASIAGDIVKASAYAHELPQYGLTVGLTNYAAAYCTGLLLARRVLKMLEMDDEYEGNVEATGEDFSVEPTDSRRPFRALLDVGLIRTTTGNRVFGALKGALDGGLDIPHSDKRFAGFHKENKQLDAEIHRNYIYGGHVSNYMKLLGEDEPEKLQTHFSAYIKKGVEAESIEEMYKKVHAAIRAEPNHKKTEKSAPKEHKRYNLKKLTYEERKNKLIERVKALNGAGGDDDDEDDEE

SEQ ID NO: 3913 - protein, 301 aa, Arabidopsis thaliana [sequence omitted]

SEQ ID NO: 3914 - protein, 301 aa, Arabidopsis thaliana
  unsure (1)..(301): unsure at all Xaa locations
MVFVKSTKSNAYFKRYQVKFRRRRDGKTDYRARIRLINQDKNKYNTPKYRFVVRFTNKDIVAQIVSASIAGDIVKASAYAHELPQYGLTVGLTNYAAAYCTGLLLARRVLKMLEMDDEYEGNVEATGEDFSVEPTDSRRPFRALLDVGLIRTTTGNRVFGALKGALDGGLDIPHSDKRFAGFHKENKQLDAEIHRNYIYGGHVSNYMKLLGEDEPEKLQTHFSAYIKKGVEAESIEELYKKVHAAIRAXPNXRKTVKPAPKQHKRYNLKKLTYEERKNKLIERVKALNGAGGDDDDEDDEZ

SEQ ID NO: 3915 - protein, 88 aa, Arabidopsis thaliana
MKLLGEYEPEKLQTLFSAYIKKGVEAESIEEMYKKVHAAIRAEPNHKKTEKPATKEHKRYDLKKLTYEERKNKLIERVKALNGASGDW

SEQ ID NO: 3916 - protein, 307 aa, Glycine max
  unsure (1)..(307): unsure at all Xaa locations
MVYVKAQKSKAYFKRYQVKFKRRREGKTDYRARIRLINQDKNKYNTPKYRFVVHFSNKDIVAQIISASIAGDIVLAAAYAHELPRYGLEVGLTNYAAAYCTGLLLARRVLKTLDMDEEYEGNVEATGEDYSVEPAESRRPFRALLDVGLVRTTTGNRVFGALKGALDGGLDIPHSDKRFAGFDKEKKELDAEVHRKYVFGGHVAAYMKILAEDEPEKYQSHFSEYIKRGIEADGIEALYKKVHAAIRADPTLKKSDKQPPKEHKRYNMKKLTYEERKAKLVARVAAINSAADNDEDDEXKFIADAVS

SEQ ID NO: 3917 - protein, 327 aa, Glycine max
  unsure (1)..(327): unsure at all Xaa locations
PTRPPTRPRTRPVSGEEIQQQWCTSRLRNQKPTSRDIKSSSREEEREKPITVPGFXVDXSGQDKYNTPKYLVVRFSNKDIVAQIISASIAGDLVLATAYSHELPRYGLEVGLTNYAAAYCTGLLLARRVLKTLEMDEEYEGNVEATGEDYSVEPAESRRPFRALLDVGLVRTTTGNRVFGALKGALDGGLDIPHSDKRFAGFDKEKKELDAEVHRKYVFGGHVAAYMKILAEDEPEKYQSHFSEYIKRGIEADGIEALYKKVHAAIRADPTLRKSDKEPPKEHKRYNMKKLTYEERKAKLIARVAAINSAADSDEDDEXKFIADAVP

SEQ ID NO: 3918 - protein, 348 aa, Glycine max
  unsure (1)..(348): unsure at all Xaa locations
MVYVKGSEIKSLLSRDIKSSSREEEREKPITVPGFXVDXSGQDKYNTPKYLVVRFSNKDIVAQIISASIAGDLVLATAYSHELPRYGLEVGLTNYAAAYCTGLLLARRVLKTLEMDEEYEGNVEATGEDYSVEPAESRRPFRALLDVGLVRTTTGNRVFGALKGALDGGLDIPHSDKRFAGFDKEKKEXLDAEVHRKYVFGGHVAAYMKILAEDEPEKYQSHFSEYIKRGIEADGIEALYKKVHAAIRADPTLRKSDKQPPKEHKRYNMKKLTYEERKAKLVARVAAINSAADNDEDDEXKFIAGCCLIAAQVETMLFACTVYFLCPKFGYFLELRALFLVNFVLSLN

SEQ ID NO: 3919 - protein, 290 aa, Glycine max
  unsure (1)..(290): unsure at all Xaa locations
XFIILFMXXWYGIXMIKYAFPVSVNLDLFTXSNKDIVAQIISASIAGDIVLAAAYAHELPRYGLEVGLTNYAAAYCTGLLLARRVLKTLEMDEEYEGNVEATGEDYSVEPAESRRXPFRALLDVGLIRTTTGNXRVFGAXLKGALDGGLDIPHSDKRFAGFDKEKKELDAEVHRKYVFGGHVAAYMKILAEDEPEKYQSHFSEYIKRGIEADGIEALYKKVHAAIRADPTLKKSDKQLPKEHKRYNLKKLTYEERKAKLIARVASLNSAADNDEDDEXKFIEDSVSSLHN

SEQ ID NO: 3920 - protein, 183 aa, Glycine max
MGFIKIVKNKAYFKRYQVQFRRRRECKTDYYARKRLIIQDKNKYKTPKYRLVVRVTNRDIITQIVAADINHDVVLASAYAHELPRYGIKLGLTNYAAAYATGLLLARRVNDKFKLKYEGNTEVNGEDYNVEADEEGAKPFKALLDVGLARTTSGARVFGALKGATDGGLDVPHNDHRFPGSKR

SEQ ID NO: 3921 - protein, 178 aa, Glycine max
  unsure (1)..(178): unsure at all Xaa locations
MAFVKVYKTRAYFKRYQTRFRRRREGKTDYHARKALIIQDKNKYNTPKYRLVARVTCSRVIAQVIYATIQGDRIVAAADFRELKRYGLEAGLTNYAACYATGLLVARRLLNKTGLDKVYTGAKKTDGEDYDVVNDHKGTEKRPFKAVXDAGLIRTTTGNRVFGVLKGACDGGLNVPHS

SEQ ID NO: 3922 - protein, 133 aa, Glycine max
MVFVKPSKSNAYFKRYQVKFRRRRDGKTDYRARIRLINQDKNKYNTPKYRFVVRFTNKDIVAQIVSASIAGDIVKASAYAHELPQYGLTVGLTNYAAAYCTGLLLARRVLKMLEMDEEYEGNLEATGEDFSVE

SEQ ID NO: 3923 - protein, 161 aa, Glycine max
  unsure (1)..(161): unsure at all Xaa locations
IIPCPSARPPAPAAAAASFRRSSLPAGAMVYIKNQKTRAYSKRFQVKFKRRRQGKTDYRARLRLTNQDKNKYNTPKYRFVVRFTNKDVTAQIVYATIAGDIVMAAAYSHELPRYGLEVGLTNYAAAYCTGLLLARRVLKNRDLDEEYEGXVEATGEDFSVX

SEQ ID NO: 3924 - protein, 160 aa, Glycine max
  unsure (1)..(160): unsure at all Xaa locations
AVLNPPLSHFSTPLPPQEKPPPPPPQQQQASEMVFVKNQKTRAYSKRFQVKFKRRRQGKTDYRARLRLTNQDKNKYNTPKYRFVVRFTNKDVTAQIVYATIAGDIVMAAAYSHELPRYGLEVGLTNYAAAYCTGLLLARRVLKCRDLDQEYEGNDVEATX

SEQ ID NO: 3925 - protein, 193 aa, Glycine max
  unsure (1)..(193): unsure at all Xaa locations
XEGNVEATGEDYSVEPAESRRPFRALLDVGLIRTTTGNRVFGALKGALDGGLDIPHSDKRFAGFDKEKKELDAEVHRKYVFGGHVAAYMKILAEDEPEKYQSHFSEYIKRGIEADGIEALYKKVHAAIRADPSLKKSEKQPPKEHKRYNLKKLTYEERKAKLIARVAAINSAADNDEDDEXKFIADSMSSLHN

SEQ ID NO: 3926 - protein, 126 aa, Glycine max
  unsure (1)..(126): unsure at all Xaa locations
MPFVKVLKNKAYFKRYQVKYRRRREGKTDYRARKRLITQDKNKYNSPKYRLVVRITNTKVICQIAYAEIDGDKILAQATSAELPRYGLTVGLKNYAAAYATGLLVGRRVLQKLGLDEDYEXNTEVD

SEQ ID NO: 3927 - protein, 149 aa, Glycine max
  unsure (1)..(149): unsure at all Xaa locations
XVKTHKTKAYXKRYQVKVKRRREGKTDYRAKIRLLTXDKNRYNTPKYRSVGRFSDKDIAAHIITASIAGDIVPAAAXAHELPRYGLEVRLTNDAAAYCTGLLLARRVLTTLETDEDDEANVEATGEDYSEEPAESRTTFRAILDVGLIR

SEQ ID NO: 3928 - protein, 155 aa, Glycine max
  unsure (1)..(155): unsure at all Xaa locations
RVFGALKGALDGGLDIPHSDKRFAGFDKEKKELDAEVHRKYVFGGHVAAYMKILAEDEPEKYQSHFSEYIKRGIEADGIEALYKKVHAAIRADPTLKKSDKQLPKEHKRYNLKKLTYEERKAKLIARVASLNSAADNDEDDEXKFIEDSVSSLHN

SEQ ID NO: 3929 - protein, 125 aa, Glycine max
  unsure (1)..(125): unsure at all Xaa locations
XHASDQVKFKRRREGKTDYRARIRLINQDKNKYNTPKYRFVVRFSNKDIVAQIISASIAXLTNYAAAYCTGLLLARRVLKTLEMDEEYEGNVEATGEDYSVEPAESRRPFRALLDVGLVRTTTGX

SEQ ID NO: 3930 - protein, 142 aa, Glycine max
  unsure (1)..(142): unsure at all Xaa locations
TRFGALKGALDGGLDIPHNDKRFAGFDKEKKELDVEVHRKYVFGGHVAAYMKILAEDEPEKYQSHFSEYIKRGIEXGIEALYKKVHAAIRADPTLKKSDKQPPKEHKRYNLKKLTYEDRKAKFISRVAALNSSVADNDEDDK

SEQ ID NO: 3931 - protein, 117 aa, Glycine max
  unsure (1)..(117): unsure at all Xaa locations
MVYVKAQKSKAYFKRYQVKFKRRREGKTDYRARIRLINQDMNKYNTPKYRFVVRFSNTDIYAQIIFASIAGDLVFATAYSHVLPRYGFEVSXLQNFAIAXYCTCFPLARMCLKTLXX

SEQ ID NO: 3932 - protein, 89 aa, Glycine max
  unsure (1)..(89): unsure at all Xaa locations
MVYVKAQKSKACFKRYRVKFKRRRQGKTDYRARIRLINQDKNEYNTPKYRFVVRFSNKDVVAQMISASVAGDIVLAAAYAHELPQYGLX

SEQ ID NO: 3933 - protein, 157 aa, Glycine max
  unsure (1)..(157): unsure at all Xaa locations
GNVEATGEDYSVEPAESRRPFRALLDVGLVRTTTGNRVFGALKGALDVFGGHVAAYMKILAEDEPEKYQSHFSEYIKRGIEADGIEALYKKVHAAIRADPTLRKSDKEPPKEHKRYNMKKLTYEERKAKLIARVAAINSAADSDEDDEXKFIADAVP

SEQ ID NO: 3934 - protein, 91 aa, Glycine max
  unsure (1)..(91): unsure at all Xaa locations
XVLAAAYAHELPRYGITLGLTNYAAAYATGLLLARRVLTKLNLADKYKGXSVNVTGEDYNVEEIDDAPRPFLALLDVGLRRTPPGCRVFAA

SEQ ID NO: 3935 - protein, 114 aa, Glycine max
  unsure (1)..(114): unsure at all Xaa locations
PTRPRASAIVYFNVHKSKAYFSIXQVLFKTIREGKTDYRARIRLINHDMNKYNTPKYRFVVRFNNNDIVAQIISAIIASYLLLATSYSHELSRYGLELXLTNYASSYCTCLLMA

SEQ ID NO: 3936 - protein, 106 aa, Glycine max
  unsure (1)..(106): unsure at all Xaa locations
MAYVMAQKSXAFFMRSQVKFKRRREGKTYYPPTIRLIHQDKNIYNTPQYRFVDRSINMDIVAQIISASIAGDLDVAASYAHELAHYGLDSWLTNYAADHCTGLLLA

SEQ ID NO: 3937 - protein, 92 aa, Glycine max
  unsure (1)..(92): unsure at all Xaa locations
MVYVKAQKSKAYFKRYQVKFKRRREGKTDYRARIRLINQDKNKYNTPKYRFVVRFSNKDIVAQIISASIAGDIVLAAALNSAAPXDNDEDDE

SEQ ID NO: 3938 - protein, 92 aa, Glycine max
  unsure (1)..(92): unsure at all Xaa locations
SFLVLVLAXXSSDXFKIYLVKFTXRRREGKTDYRARIRLINQEKNKYNPPKYRFVVRFSNKDIVAQIISASIAGDIVLAAAYAHELPRYGLX

SEQ ID NO: 3939 - protein, 92 aa, Glycine max
  unsure (1)..(92): unsure at all Xaa locations
MVYDKAQTSEAYLKSYQVXLQIRREGKTDYRAKIRLINQDKNKYNTPKYRFVVRFSNKDIVAQIISASIAGDLVHATAXSHELSRYGLEVGX

SEQ ID NO: 3940 - protein, 83 aa, Glycine max
  unsure (1)..(83): unsure at all Xaa locations
MVYVKGQRSKAXFKRYQVKFERRREGKTDYRARTRVINQDKNKYNTPEYRFVVRFSYKDIVARIISASIAGDLVLATAYAHEL

SEQ ID NO: 3941 - protein, 111 aa, Glycine max
ASARPTTASSMAYVKAHKSKSYGKIYEVIITIRRQVKTDYPAKIRLINHDNNTYNTPKYRFVVRFNNNDIDAQIISASIASDLVLATSYSHELPRYCLQLRLTNYATTYCT

SEQ ID NO: 3942 - protein, 88 aa, Glycine max
  unsure (1)..(88): unsure at all Xaa locations
MVYVKAQKSKAYFKRYRVKFKRRREGKTDYRARIRLXNQDKNRYNTPKYRFVGXXSNEXIVAQXISXSLAGDXSLATXYSHEXPRYXX

SEQ ID NO: 3943 - protein, 81 aa, Glycine max
  unsure (1)..(81): unsure at all Xaa locations
MVYVKAQKSKAYFKRYQVKFKRRREGKTDYRARIRLINHDKNIYNTSKYRFVVRFSNKDIVAQILFSSIACDIVLCXAYAH

SEQ ID NO: 3944 - protein, 140 aa, Glycine max
  unsure (1)..(140): unsure at all Xaa locations
SPFLALGSVKAQKSKAYVMRYQVNSRRSRSGKTNYRALIRSINLVKNKDFTPKDRYVVRLXSSRTMLQQIISASIDGDIWLATAYLHEPSRYGLVLGLTYYAITYCSALLFARRVLNSLAMDVEYLGNVADSVEDYFIEP

SEQ ID NO: 3945 - protein, 122 aa, Glycine max
  unsure (1)..(122): unsure at all Xaa locations
RRYVGYDDEANKLNADVLRKYIFGGHVADYMKLLAEQDNEKFSKVFSRYVKAGVKAEGLEALYKKAHAAIRADPSIKKAERKPPKHSSKKAQRLNNKQRKNAVKVRVPRANKASAQEXAKVI

SEQ ID NO: 3946 - protein, 81 aa, Glycine max
  unsure (1)..(81): unsure at all Xaa locations
MSSFTAAMVYVKEKXSKAYFKRYQVKFNRRREGKTDYRARIRLINQDKNRYRTPKYRFVVRFSNKDIVAPIMSASIAGDIX

SEQ ID NO: 3947 - protein, 105 aa, Glycine max
  unsure (1)..(105): unsure at all Xaa locations
EEIQQQWCTSRLQKSKXYFKSYQVKFKRXREGKXGYRARXIRLINQXKNKYNXXPKYRFXVRFSNKDIVAQIXSASIAGDLVLATAYSXHELPXRXGLAVGXTDX

SEQ ID NO: 3948 - protein, 71 aa, Glycine max
  unsure (1)..(71): unsure at all Xaa locations
MVYVKAHKSKAYVKRYQVEFKRRXDGXTDYRARMRLINQDKFKYNTPKYRFVVRFSNKDIVALILSASIAG

SEQ ID NO: 3949 - protein, 81 aa, Glycine max
  unsure (1)..(81): unsure at all Xaa locations
MVYVXKAQKSKAYFKRYQVXKFKRRREGKTDYRARIRLINQDKNKYNTPKYRFVVRXSNKDLLTQIISAXXXGDLFCCSXX

SEQ ID NO: 3950 - protein, 80 aa, Glycine max
  unsure (1)..(80): unsure at all Xaa locations
RASAIVYDKAQKSTXAYFKRYQVKFKSRREGXTDYRARTRLXINQDKNKYNTPKYRFAVRFSNKDIDAQIISASIAGDLV

SEQ ID NO: 3951 - protein, 62 aa, Glycine max
MVYVKAQKSKAYFKRYQVKFKRRREGKTDYRARIRLINQDKNKYNTPKYRFVVRFFNKNNFV

SEQ ID NO: 3952 - protein, 126 aa, Glycine max
  unsure (1)..(126): unsure at all Xaa locations
ASSHDLARHGFEGXLTDFATASCSGLLFALRVLTTLETDDAYERNVEASAQVYSMVPALSKMPFRSLLDVGLSQTTTRTRFFTALKGAPGGSLDISYTDHWFARSDLDPKGLAAKGKLICFFFRHV

SEQ ID NO: 3953 - protein, 123 aa, Glycine max
  unsure (1)..(123): unsure at all Xaa locations
NKRFAGFDKKKKELHAEVHRKYVCGAHVAAYMKISAQDDPEQYQSHFREYITRGIXDDGVQALAQEVHDTIRDDRTLRKFDNEPPKEHKRYNMKQLTYQESKPQXIARVAAIDFVVDSDEDDX

SEQ ID NO: 3954 - protein, 70 aa, Glycine max
AQKSEAYFMRYRGQFHIRREGWTDYRARIGLINLDKNKYGTPIYRFVGGFSNKDIVAQKISANIAGDLDL

SEQ ID NO: 3955 - protein, 77 aa, Glycine max
  unsure (1)..(77): unsure at all Xaa locations
XKWGRTIEGXTDYRARIXSLINQDMNKCITPKFRFVVRFSNKDIDVQLISANIARHLDLATAYSHELSRYCLEVRLX

SEQ ID NO: 3956 - protein, 279 aa, Pisum sativum
MSRREEEVRLITEPGFVDSTGQDKYNFPSIVCCRFTNKDIVAQIVSASIAGDIVLCAAYAHELPHYGLEVGLTNYAAAYCTGLLLARRVLKTLEMDEEYEGNVEASGEDYSVEPADSRRPFRALLDVGLVKTTTGNRVFGALKGALDGGLDIPHSDKRFAGFDKEKKELDAEVHRKYIFGGHVTAYMKTLIEDEPEKYQTHFSQYIKKGIEADGIEELYKKVHAAIRADPANKKAEKQPPKEHKRYNLKKLTYDERRTKLIARLEALNSAVDEDEDDDE

SEQ ID NO: 3957 - protein, 301 aa, Oryza sativa (japonica cultivar-group)
MGGFVKTQKTNAYHKRFQVKFKRRRQGKTDYRARIRLTNQDKNKYNTPKYRFVTNKDITAQIVYATIAGDIVMAAAYSHELPRYGLEVGLTNYAAAYCTGLLLARRVLKLRGLDQEYEGNIEATGEDYYVEPADERRPFRALLDVGLIRTTTGNRVFGALKGALDGGLDIPHSDKRFAGFKKDEKQLDSDIHRKYIYGGHVADYMRSMAEEEPEKFQAHFSEYLKKGIDADGMEALYKKVHAAIRADPTMAKSTKKEPATHKRYNLKKLTYEQRKASLVERLNALNSSAGADDDDEEEDDE

SEQ ID NO: 3958 - protein, 304 aa, Oryza sativa (japonica cultivar-group)
MSLQGGFVKTQKTHAYFKRFQVKFKRRRQGKTDYRARIRLTNQDKNKYNTPKYRFVTNKDITAQIVYATIAGDIVMAAAYSHELPRYGLEVGLTNYAAAYCTGLLLARRVLTLRGLDQEYEGNVEATGEDYYVEPADERRPFRALLDVGLIRTTTGNRVFGALKGALDGGLDIPHSDKRFAGFKKDEKQLDSDIHRKYIYGGHVADYMRSMAEEEPEKFQAHFSEYLKKGIDADGMESLYKKVHAAIRADPTMAKSTKKEPATHKRYNLKKLTYEQRKASLVERLNALNSSAGADDDDEEEDDE

SEQ ID NO: 3959 - protein, 121 aa, Solanum melongena
SSKDSKQLDAEVHRKYIYGGHVAAYMNILMEDEPEKYQSHFSSYIKADLAPDNIEEMYKKVHAAIRPDPSPKKSQKQPPKTHKRYNLKKLTYEERKAKLIERLNALNAAGGNDDDDEEDDE

SEQ ID NO: 3960 - protein, 297 aa, Helianthus annuus
MGFVKVVKNKQYFKRYQVKFKRRREGKTDYFARKRLIAQDKNKYNTPKYRLVVRFSNRDITCQVAYSRIEGDKILCAAYAHELPQYGVKVGLTNYAAAYCTGLLLARKLLSQLGLDKLYIGSTEVTGEEFNVKPVEDGPGAFRCYLDVGLMRTTTGARVFGAMKGAVDGGLNILHSTKRFPGFDSESKEFNADVHRQHIFGQHVAEYMRQLAEEDDEAYKRQFSQYIKLGLNADAIEGLYKKAHEAIRANPARKTVAKKAHPKKRWTEKKLTREQRQGKVAAAKAEWLKKIEAGEVE

SEQ ID NO: 3961 - protein, 304 aa, Oryza sativa
MGGFVKTQKTHAYFKRFQVKFKRRRQGKTDYRARIRLTNQDKNKYNTPKYRFVVRFTNKDITAQIVYATIAGDIVMAAAYSHELPRYGLEVGLTNYAAAYCTGLLLARRVLTLRGLDQEYEGNVEATGEDYYVEPADERRPFRALLDVGLIRTTTGNRVFGALKGALDGGLDIPHSDKRFAGFKKDEKQLDSDIHRKYIYGGHVADYMRSMAEEEPEKFQAHFSEYLKKGIDADGMESLYKKVHAAIRADPTMAKSTKKEPATHKRYNLKKLTYEQRKASLVERLNALNSSAGADDDDEEEDDE

SEQ ID NO: 3962 - protein, 304 aa, Oryza sativa; identical to SEQ ID NO: 3961

SEQ ID NO: 3963 - protein, 304 aa, Oryza sativa
MGGFVKTQKTNAYYKRFQVKFKRRRQGKTDYRARIRLTNQDKNKYNTPKYRFVVRFTNKDITAQIVYATIAGDIVMAAAYSHELPRYGLEVGLTNYAAAYCTGLLLARRVLKLRGLDQEYEGNIEATGEDYYVEPADERRPFRALLDVGLIRTTTGNRVFGALKGALDGGLDIPHSDKRFAGFKKDEKQLDSDIHRKYIYGGHVADYMRSMAEEEPEKFQAHFSEYLKKGIDADGMEALYKKVHAAIRADPYHAKSTKKEPATHKRYNLKKLTYEQRKASLVERLNALNSSAGADDDDEEEDDE

SEQ ID NO: 3964 - protein, 294 aa, Oryza sativa
MGGFVKTQKTNAYYKRFQVKFKRRRQGKTDYRARIRLTNQDKNKYNTPKYRFVVRFTNKDITAQIVYATIAGDIVMAAAYSHELPRYGLEVGLTNYAAAYCTGLLLARRVLKLRGLDQEYEGNIEATGEDYYVEPADERRPFRALLDVGLIRTTTGNRVFGALKGALDGGLDIPHSDKRFAGFKKDEKQLDSDIHRKYIYGGHVADYMRSMAEEEPEKFQAHFSEYLKKGIDADGMEALYKKVHAAIRADPYHGQINQEGTGDPQEIQPQEANLRTEEGQSCRKIECSQLLCWC

SEQ ID NO: 3965 - protein, 294 aa, Oryza sativa; identical to SEQ ID NO: 3964

SEQ ID NO: 3966 - protein, 233 aa, Oryza sativa
  unsure (1)..(233): unsure at all Xaa locations
DLSPLLVPLRAAAAEGEQPRQANDTGGXDKTQRTNAYHKRYRAQLKRRRHGKTDYRTSTKLTIRDNIIVNTPRFRFAVRFTHQDITAHMGYATIAGDMGMAGAYFHELSRXYGLEAGLTNYAAAYCTGLALARRVLKLLGXDQEFKGYMDAAGEDYXVEPADERRTFRALLDGGLIKTATGHRVFGALTGATDGGLDISHSDKRDAGFKMDEKQLDVCFHRMNIYSGHVADYX

SEQ ID NO: 3967 - protein, 152 aa, Oryza sativa
  unsure (1)..(152): unsure at all Xaa locations
MTFVKVIENEAFFKRYQVKFRRRREGKTDYRARKRLIAQDKNKYNSPKYRLVVRLTNKFVICQIAYAEIDGDKILASAYSSELPRYGLNVGLKNYAAAYCTGLLVGRRLLQKLGLDQDYEGNTEINGEVVKTEXSMVAHTSSMKLLMINVHS

SEQ ID NO: 3968 - protein, 121 aa, Oryza sativa
  unsure (1)..(121): unsure at all Xaa locations
XLIFQDKNKYNTXGGLFVVRCTIKDITGQIISASIAGDMDLASAYSHELPRYGLEAGLTNYAAAYCTGLLLARRVLKIRGSDQEYKGNVEATGEDFFVEPAYERRPFRALLDVGLIRTTTX

SEQ ID NO: 3969 - protein, 104 aa, Oryza sativa
  unsure (1)..(104): unsure at all Xaa locations
MGRFATTXKTHAYFKRLHSKFKRXRRQGTTDYRAXRIRLSNQDKNKANTPAYRFVARCTHKDLTFEIVYATIEDDIVMAAAYCHEQPRYGLEVGLTNYARAYCT

SEQ ID NO: 3970 - protein, 118 aa, Oryza sativa
  unsure (1)..(118): unsure at all Xaa locations
MDGGLDIPHSDKRFAGFKKDEKQLDSDIHRKYIYGGHVADYMRGIDADGMESLYKKVHAAIRADPTMGQSTKKEPATHRRYNLQKLTYEQRKASLVERLNALNSSACADDDDXEEDDX

SEQ ID NO: 3971 - protein, 210 aa, Oryza sativa
  unsure (1)..(210): unsure at all Xaa locations
GXXWVPPRXAGRDNPNSFLVTPSSFYSLLPLRRRRSGVSTYCERHGSGAERHSMTTAYFMRWQFIAEERGMAPTDYXRPAVWLTNXHDKNNRRSSKDRFFARFTDLAYPSEIVYATIAADIEXMTDGYSYELALYGLEVLLTIYADTYCTDLLVARRELTLSASNHYDEGSAEATGEDYYAAPADERMTLRALLHGSLTMTTTVNRVFGX

SEQ ID NO: 3972 - protein, 165 aa, Oryza sativa
  unsure (1)..(165): unsure at all Xaa locations
MTRACLTRFTHAYFKRLQGKIDNRTRIMIAYRGRIRLTNQDNSLDDTPTYRYVXERFTDYAITAHVVYAAVAYVLELAGAYSHELPTYCAEADRTDYASXAYCAVSLLARHQLSLRGVDHNCEDYDDAPADDYYAVPAVXRRALRATSTVGLVFTATENPVFGAL

SEQ ID NO: 3973 - protein, 85 aa, Oryza sativa
MGGFVKTQKTHAYFKRFQVKFKRRRQGKTDYRARIRLPNQDKNKYNTPKYRFDGRSESRTLTSNQGLQESALGREGGGRPPRQEP

SEQ ID NO: 3974 - protein, 306 aa, Triticum aestivum
ANTVKMPFKLVKNSAYYSRYQTKYKRRQQGKTDYYARKRLITQAKNKYNAPKYRLVVRFTNKDIICQIVTSEISGDKVFISAYAHELKAYGIEHGLTNWAAAYATGLLVARRALKKLGLDEDFAGVEEADGEYKLTEAAETDDGERRPFKVFLDVGLKRTSTGARVFGAMKGASDGGILVPHSEKRFPGYDMETKELDADTLRNYIFGGHVAEYMETLADDDEERFRSQFQKYVDDDVEAEGLEDLYTEAHAAIREDPFKKVESDAPKKTKEEWKEISQKYKSKKLTKEEKEKRVQERIQEIMQRD

SEQ ID NO: 3975 - protein, 318 aa, Triticum aestivum
  unsure (1)..(318): unsure at all Xaa locations
ANTVKMPFKLVKNSAYYSRYQTKYKRRQQGKTDYYARKRLITQAKNKYNAPKYRLVVRFTNKDIICQIVTSEISGDKVFISAYAHELKAYGIEHGLTNWAAAYATGLLVARRALKKLGLDEDFAGVEEADGEYKLTEAAETDDGERRPFKVFLDVGLKRTSTGARVFGAMKGASDGGILVPHSEKRFPGYDMETKELDADTLRNYIFGGHVAEYMETLADDDEERFRSQFQKYVDDDVEAEGLEDLYTEAHAAIREDPFXKVESDAPRRXRVQERIQEIMQRDXKVALSHWVTGIXGLLAFALGLEFRGKGRSIKRAI

SEQ ID NO: 3976 - protein, 317 aa, Triticum aestivum
  unsure (1)..(317): unsure at all Xaa locations
KPPPPPQQQQQASEMVFVKNQKTRAYSKRFQVKFKRRRQGKTDYRARLRLTNQDKNKYNTPKYRFVVRFTNKDVTAQIVYATIAGDIVMAAAYSHELPRYGLEVGLTNYAAAYCTGLLLARRVLKCRDLDQEYEGNVEATGEDFSVEPADERRPFRALLDVGLIRTTTGNRVFGALKGALDGGLDIPHSDKRFAGFKKDEKQLDAEIHRKYIYGGHVADYMKSLADEEPEKYQSHFSEYIKKGIEADNMESLYKKVHAAIRADPTMAKSTKEPPKTHKRYNPKKLTYEQRKANLVERLNALNSSAGADDDEDDDEXV

SEQ ID NO: 3977 - protein, 357 aa, Triticum aestivum
  unsure (1)..(357): unsure at all Xaa locations
THVPQQTLAATPKSSRGLCPDAVLNPPLSHFSTPLPPQEKPPPPPPQQQQQASEMVFVKNQKTRAYSKRFQVKFKRRRQGKTDYRARLRLTNQDKNKYNTPKYRFVVRFTNKDVTAQIVYATIAGDIVMAAAYSHELPRYGLEVGLTNYAAAYCTGLLLARRVLKCRDLDQEYEGNVEATGEDFSVEPADERRPFRALLDVGLIRTTTGNRVFGALKGALDGGLDIPHSDKRFAGFKKDEKQLDAEIHRKYIYGGHVADYMKSLADEEPEKYQSHFSEYIKKGIEADNMEALYKKVHAAIRADPTMAKSTKEPPKTHKRYNPKKLTYEQRKASLVERLNALNSSAGADVDEDDDEXV

SEQ ID NO: 3978 - protein, 355 aa, Triticum aestivum
  unsure (1)..(355): unsure at all Xaa locations
WIPRAAGIRHEARAAAASSIRRSSLLAGAMVYIKNQKTRAYSKRFQVKFKRRRQGKTDYRARLRLTNQDKNKYNTPKYRFVVRFTNKDVTAQIVYATIAGDIVMAAAYSHELPRYGLEVGLTNYAAAYCTGLLLARRVLKNRDLDEEYEGNVEATGEDFSVEPSDERRPFRALLDVGLIRTTTGNRVFGALKGALDGGLDIPHSDKRFAGFKKDEKSLDAEIHRKYIFGGHVADYMRSLADEEPEKFQTHFSEYIKRGISADDMEAVYKKVHAAIRADPTMAKSTKAPPKTHKRYNPKKLTYEQRKASLVERLNALNNSAGAADDDEDDDEXRALCPPQCSLATCVFVKVRHSAQ

SEQ ID NO: 3979 - protein, 387 aa, Triticum aestivum
  unsure (1)..(387): unsure at all Xaa locations
RNSARGPPARAAAASFRRSSLPAGAMVYIKNQKTRAYSKRFQVKFKRRRQGKTDYRARLRLTNQDKNKYNTPKYRFVVRFTNKDVTAQIVYATIAGDIVMAAAYSHELPRYGLEVGLTNYAAAYCTGLLLARRVLKNRDLDEEYEGNVEATGEDFSVEPSDERRPFRALLDVGLIRTTTGNRVFGALKGALDGGLDIPHSDKRFAGFKKDEKSLDAEIHRKYIFGGHVADYMRSLADEEPEKFQTHFSEYIKRGISADDMEAVYKKVHAAIRADPTMAKSTKAPPKTHKRYNPKKLTYEQRKASLVERLNALNNSAGAADDDEDDDEXNALLLVSGTLHNGPVPLSFGYYLAGVIDCVIWIMCRAGIWILILIRSSAKKKKKKKKQK

SEQ ID NO: 3980 - protein, 413 aa, Triticum aestivum
  unsure (1)..(413): unsure at all Xaa locations
SSSDRSPARAAAAASFRRSSLPAGAMVYIKNQKTRAYSKRFQVKFKRRRQGKTDYRARLRLTNQDKNKYNTPKYRFVVRFTNKDVTAQIVYATIAGDIVMAAAYSHELPRYGLEVGLTNYAAAYCTGLLLARRVLKNRDLDEEYEGNVEATGEDFSVEPSDERRPFRALLDVGLIRTTTGNRVFGALKGALDGGLDIPHSDKRFAGFKKDEKSLDAEIHRKYIFGGHVADYMRSLADEEPEKFQTHFSEYIKRGISADDMEAVYKKVHAAIRADPTMAKSTKAPPKTHKRYNPKKLTYEQRKASLVERLNALNNSAGAADDDEDDDEXNAFLLKSGTLHNGPVPLSFGYYLAGVIDCVIGIMCRAGIWILILIRSSGTLVLFLWLCRAGVGPWVMALKLLSFHRIPNQCRNRF

SEQ ID NO: 3981 - protein, 339 aa, Triticum aestivum
  unsure (1)..(339): unsure at all Xaa locations
RAAGTRRAPEGPWTLHQRGEHLRRRSQPGSLLAGEMVYIKNQKTRAYSKRFQVKFKRRRQGKTDYRARLRLTNQDKNKYNTPKYRFVVRFTNKDVTAQIVYATIAGDIVMAAAYSHELPRYGLEVGLTNYAAAYCTGLLLARRVLKNRDLDEEYEGNVEATGEDFSVEPSDERRPFRALLDVGLIRTTTGNRVFGALKGALDGGLDIPHSDKRFAGFKKDEKSLDAEIHRKYIFGGHVADYMRSLADEEPEKFQTHFSEYIKKGXISADDMEAVYKKVHAAIRADPTMAKSTKAPPKTHKRYNPKKLTYEQRKASLVERLNALNNSAGARXDDDEEDDE

SEQ ID NO: 3982 - protein, 338 aa, Triticum aestivum
  unsure (1)..(338): unsure at all Xaa locations
PAGSGALPPAPPPPPPSAGSSLLAGAMVYIKNQKTRAYSKRFQVKFKRRRQGKTDYRARLRLTNQDKNKYNTPKYRFVVRFTNKDVTAQIVYATIAGDIVMAXAAYSHELPRYGLEVGLTNYAAAYCTGLLLARRVLKNRDLDEEYEGNVEATGEDFSVEPSDERRPFRALLDVGLIRTTTGNRVFGALKGALDGGLDIPHSDKRFAGFKKDEKSLDAEIHRKYIFGGHVADYMRSLADEEPEKFQTHFSEYIKRGISADDMEAVYKKVHAAIRADPTMAKSTKAPPKTHKRYNPKKLTYEQRKASLVERLNALNNSAGAADDDEDDDEXRALLSTPV

SEQ ID NO: 3983 - protein, 326 aa, Triticum aestivum
  unsure (1)..(326): unsure at all Xaa locations
PLLPPLPRQEKPPPPHPQQASEMVFVKNQKTRAYSKRFQVKFKRRRQGKTDYRARLRLTNQDKNKYNTPKYRFVVRFTNKDVTAQIVYATIAGDIVMAAAYSHELPRYGLEVGLTNYAAAYCTGLLLARRVLKCRDLDQEYEGNVEATGEDFSVEPADERRPFRALLDVGLIRTTTGNRVFGAXLKGALDGGLDIPHSDKRFAGFKKDEKQLDAEIHRKYIYGGHVADYMKSLADEEPEKYQSHFSEYIKKGIEIDDMEALYKKVHAAIRADPTVAKSTKEPPKTHKRYNPKKLTYEQRKASLVERLNALNSSAGADVDEDDDEXV

SEQ ID NO: 3984 - protein, 350 aa, Triticum aestivum
  unsure (1)..(350): unsure at all Xaa locations
VRRNSKSLRNDAVLNPPFSHFSTPLPRQEKPPPPHPQQPHPQQASEMVFVKNQKTRAYSKRFQVKFKRRRQGKTDYRARLRLTNQDKNKYNTPKYRFVVRFTNKDVTAQIVYATIAGDIVMAAAYSHELPRYGLEVGLTNYAAAYCTGLLLARRVLKCRDLDQEYEGNVEATGEDFSVEPADERRPFRALLDVGLIRTTTGNRVFGSLRGALDGGLDIPHSDKRFAGFKKDEKQLDAEIHRKYIYGGXHVADYMKSLADEEPEKYQSHFSEYIKKGIEADNMEALYKKVHAAIRADPTMAKSTKEPPKTHKRYNPKKLTYEQRKASLVERLNALNSSAGADVDEDDDEXV

SEQ ID NO: 3985 - protein, 274 aa, Triticum aestivum
  unsure (1)..(274): unsure at all Xaa locations
PAPAAAAASFRRSSLLAGEMVYIKNQKTRAYSKRFQVKFKRRRQGKTDYRARLRLTNQDKNKYNTPKYRFVVRFTNKDVTAQIVYATIAGDIVMAAAYSHELPRYGLEVGLTNYAAAYCTGLLLARRVLKNRDLDEEYEGNVEATGEDFSVEPSDERRPFRALLDVGLIRTTLXKRXVGALKGALDGGLDIPHSDKRFAGFKKDEKALDAEIHRKYIFGGHVADYMKSLAEEETEKIQTHFKENIKKGNFGDDLEQVTRKVMAASXADPPGANX

SEQ ID NO: 3986 - protein, 216 aa, Triticum aestivum
MAGGFVKTQKTNAYFKRFQVKFKRRRAGKTDYRARIRLINQDKNKYNTPKYRFVVRFTNKDITAQIVSASIAGDMVLAAAYSHELPRYGLEVGLTNYAAAYCTGLLLARRVLKIRDLDQEYEGNVEATGEDFSVEPAEGRRPFRALLDVGLIRTTTGNRVFGALKGALDGGLDIPHSDKRFAGFKKDDKQLDADIHRKYIYGLHVAEYMKNLADEE

SEQ ID NO: 3987 - protein, 196 aa, Triticum aestivum
  unsure (1)..(196): unsure at all Xaa locations
SKTHFSTPLPRQEKPPPPHPQQASEMVFVKNQKTRAYSKRFQVKFKRRRQGKTDYRARLRLTNQDKNKYNTPKYRFVVRFTNKDVTAQIVYATIAGDIVMAAAYSHELPRYGLEVGLTNYAAAYCTGLLLARRVLKCRDLDQEYEGNVEATGEDFSVEPADERRPFRALLDVGLIRTTTGNRVFGSSRGALDGGLX

SEQ ID NO: 3988 - protein, 213 aa, Triticum aestivum
  unsure (1)..(213): unsure at all Xaa locations
XXXXLXXXXASSKLTLTKGNKSWSSTAVAAALELVDPPGCRNSARGLTNQDKNKYNTPKYRFVVRFTNKDVTAQIVYATIAGDIVMAAAYSHELPRYGLEVGLTNYAAAYCTGLLLARRVLKNRDLDEEYEGNVEATGEDFSVEPSDERRPFRALLDVGLIRTTTGNRVFGALKGALDGGLDIPHSDKRFAGFKKDEKSLDAEIHRKYIFGGX

SEQ ID NO: 3989 - protein, 185 aa, Triticum aestivum
  unsure (1)..(185): unsure at all Xaa locations
ANTVKMPFKLVKNSAYYSRYQTKYKRRQQGKTDYYARKRLITQAKNKYNAPKYRLVVRFTNKDIICQIVISEISGDKVFISAYAHELKAYGIEHGLTNWAAAYATGLLVARRALKKLGLDEDFAGVEEADGEYKLTEAAETDDGERRDHAAGLKXVALSHWVTGIXRIVGLCIGLAVSRKGTVHK

SEQ ID NO: 3990 - protein, 185 aa, Triticum aestivum
  unsure (1)..(185): unsure at all Xaa locations
VKFITLREGKTDYEARKRLVIQDKNKYYTPKYRMIVRVTDRHIICQIAYARIEGDIIVCAAYAHELPKYGVKVGLTNYAAAYCTGLLLARRLINRFGMDNIYEGQVEVTGDEYNVESIDGQPGAFTCYLDAGLAITTTGNKVFGALNGAEDGCLSIPHSTKRFRGYDSESKEFNAKVHLKHIMGX

SEQ ID NO: 3991 - protein, 143 aa, Triticum aestivum
MVFVKPSKSNAYFKRYQVKFRRRRDGKTDYRARIRLINQDKNKYNTPKYRFVVRFTNKDIVAQIVSASIAGDIVKASAYAHELPQYGLTVGLTNYAAAYCTGLLLARRVLKMLEMDEEYEGNLEATGEDFSVEPTESRRPFCA

SEQ ID NO: 3992 - protein, 113 aa, Triticum aestivum
KPPPPPQQQQQASEMVFVKNQKTRAYSKRFQVKFKRRRQGKTDYRARLRLTNQDKNKYNTPKYRFVVRFTNKDVTAQIVYATIAGDIVMAAAYSHELPRYGLEVGLTNYAAAY

SEQ ID NO: 3993 - protein, 233 aa, Triticum aestivum
  unsure (1)..(233): unsure at all Xaa locations
RLRSTPCLLPFSPLSLAKKSRRRRISTRRARWRCVNNHNTRDYSKRVQAEPQKRRQGNTDYRDRVKLTNQXXQRQNTPKHRHVTNTDVTAEIVHPTIAADIEMAXADYSHELPRXMGLSDGLTNYAXVEYCTDSLLSRRAVPCPEIYPEYEGKAEATAEDFSAEPTDETTTIRALLYASLIRTTTVNRACVALKGDVNVVHDIPQSRYRLAGFKKDEKQLHSDIPAEXIYGWH

SEQ ID NO: 3994 - protein, 142 aa, Triticum aestivum
  unsure (1)..(142): unsure at all Xaa locations
XNKVFGALKGAVDGGLFIPPRTKRFPGYDFESKEFNAEVHRKPIMGQNVADYMGYLMEEDEDVSKKQFFQYIKNRVTPDMMEEMYKKAHVAIRENPVYEKKPKKEVKKKRWTRPKMSLGQKKDGVGQKKARFLRGQEGGVES

SEQ ID NO: 3995 - protein, 108 aa, Triticum aestivum
  unsure (1)..(108): unsure at all Xaa locations
RPPTRSRPPARAVDAFSIRRSYLLAGAMVYIKNQKTRAYSKRFQVKFKRRRQGMTDYRARLRLTNQDKNKYNAPKYRFVVRFTNMDGTAQIVYATIAGDIVKAACLLX

SEQ ID NO: 3996 - protein, 99 aa, Triticum aestivum
  unsure (1)..(99): unsure at all Xaa locations
KNLLVAGAMVYIKNQKTRAFFKRFQIKFKRKRQGNTPXYTATVWLSNPGKNTYTTPKYRFFVRYTNKDVTVQQLYATISADILIGAVYSHELPLYFLEX

SEQ ID NO: 3997 - protein, 99 aa, Triticum aestivum
  unsure (1)..(99): unsure at all Xaa locations
SGPPARAVVVSFRRSSLPAGAMVYIKNHNTRAYSKRFQVKFKRRRQGKTDYRARLMLTNHYTNRYNTSKYRLGVRFSNYAVTAHCVYATIAGDTTMAGX

SEQ ID NO: 3998 - protein, 230 aa, Zea mays
  unsure (1)..(230): unsure at all Xaa locations
ANTVKMPFKLVKNSAYYSRYQTKYKRRQQGKTDYYARKRLITQAKNKYNAPKYRLVVRFTNKDIXLPIVTSEISGDKVFISAYAHELKAYGIEHGLTNWAAAYATGLLVARRALKKLGLDEDFAGVEEADGEYKLTEAAETDDGERRPFKVFLDVGLKRTSTGARXVFGAMKGASDGGILVPHSEKRFPGYDMETKELDADTLRNYIFGGHVAEYMETLADDDEERFRSQ

SEQ ID NO: 3999 - protein, 304 aa, Zea mays
  unsure (1)..(304): unsure at all Xaa locations
MGFVKLIKTKAYFKRYQVKFRRRREGKTDYRQRTRLITQDKNKYNTPKYRLVVRKTNKNIIAQIIYATVQGDRVVNAAYSSELPKFGIKLGLTNYASAYATGLLVARRHLTKIGLASKYQGKVEADGNDYTVEPAXXGPRPFKALLDIGLARTSTGARIFAVAKGALDGGINIPHSVKRFAGYNAETKKHNPEVLKKYIYGQHVAEYMKKLQKEEPQAYEKQFSRFVKAGVKAGDIEGIYKNAHKAIRADPTKKANEKKAVEHKRYNPKRLTHAQRAERVAKKKAILGLXMSFLNLQYKTYEQK

SEQ ID NO: 4000 - protein, 329 aa, Zea mays
  unsure (1)..(329): unsure at all Xaa locations
MGGFVKTQKTNAYFKRFQVKFKRRRAGKTDYRARIRLINQDKNKYNTPKYRFVVRFTNKDIIAQIVSASITGDIILAAAYSRELPRYGLEVGLTNYAAAYCTGLLLARRVLKIRDLDQEYEGNVEATGEDFSVEPAEERRPFRALLDVGLIRTTTGNRVFGALKGALDGGLDIPHSDKRFAGFKKDDKQLDADIHRKYIYGLHVAEYMKNLADEEPEKYQAHFSEYIKKGIEADDMEALYKKVHAAIRADPSMAKSTKAQPKEHKRYNPKKLTYEQRKARLVERLNALNSSGGVDDDEDDEXSAILFGDQNLRNGICCSLYSCNRHFFV

SEQ ID NO: 4001 - protein, 309 aa, Zea mays
  unsure (1)..(309): unsure at all Xaa locations
MGGFVKTHKSNAYFKRFQVKFKRRRAGKTDYRARIRLINQDKNKYNTPKYRFVVRFTNKDITAQIISASIAGDMVLASAYSHELPRYGLEVGLTNYAAAYCTGLLLARRVLKTRGLDKEYEGNVEATGEDFSVEPADERRPFRALLDVGLIRTTTGNRVFGALKGALDGGLDIPHSEKRFAGFKKDDKQLDADIHRKYIYGGHVADYMRNLAEEEPEKYQSHFSEYIKKGIEADDMEALYKKVHAAIRADPSVVKSTKQPPKEHKRYNPKKLTYEQRKASLIERLNQLNSSGGADDDDEDDEXSFVPSK

SEQ ID NO: 4002 - protein, 309 aa, Zea mays
  unsure (1)..(309): unsure at all Xaa locations
MGGFVKTHKSNAYFKRFQVKFKRRRAGKTDYRARIRLINQDKNKYNTPKYRFVVRFTNKDITAQIISASIAGDMVLASAYSHELPRYGLEVGLTNYAAAYCTGLLLARRVLKTRGLDKEYEGNVEATGEDFSVEPADERRPFRALLDVGLIRTTTGNRVFGALKGALDGGLDIPHSEKRFAGFKKDDKQLDADIHRKYIYGGHVADYMRNLAEEEPEKYQSHFSEYIKKGIEADDMEALYKKVHAAIRADPSVVKSTKQPPKEHKRYNPKKLTYEQRKASLIERLNQLNSSGGADDDDEDDEXSLVPSK

SEQ ID NO: 4003 - protein, 309 aa, Zea mays; identical to SEQ ID NO: 4001
  unsure (1)..(309): unsure at all Xaa locations

SEQ ID NO: 4004 - protein, 309 aa, Zea mays; identical to SEQ ID NO: 4002
  unsure (1)..(309): unsure at all Xaa locations

SEQ ID NO: 4005 - protein, 304 aa, Zea mays
  unsure (1)..(304): unsure at all Xaa locations
MGGFVKTHKTNAYFKRFQVKFKRRRAGKTDYRARIRLINQDKNKYNTPKYRFVVRFTNKDITAQIISASIAGDMVLASAYSHELPRYGLEVGLTNYAAAYCTGLLLARRVLKIRGLDQEYEGNVEATGEDFSVEPADERRPFRALLDVGLIRTTTGNRVFGALKGALDGGLDIPHSEKRFAGFKKDDKQLDADTHRRYIYGGHVADYMKNLAEEDPEKYQSHFSAYIKKGVEADEIEALYKKVHAAIRADPSIVKSTKQPPKEHKRYNPKKLTYEQRKASLIERLNQLNSSGGADDDDEDDEXS

SEQ ID NO: 4006 - protein, 310 aa, Zea mays
  unsure (1)..(310): unsure at all Xaa locations
PPQETEIVGFVKTHKSNAYFKRFQVKFKRRRAGKTDYRARIRLINQDXXKYNTPKYRFVVRFTNKDITAQIISASIAGDMVLASAYSHELPRYGLEVGLTNYAAAYCTGLLLARRVLKTRGLDKEYEGNVEATGEDFSVEPADERRPFRALLDVGLIRTTTGNRVFGALKGALDGGLDIPHSEKRFAGFKKDDKQLDADIHRKYIYGGHVADYMRNLAEEEPEKYQSHFSEYIKKGIEADDMEALYKKVHAAIRADPSIVKSTKQPPKEHKRYNPKKLTYEQRKASLIERLNQLNSSGGADDDDEDDEXS

SEQ ID NO: 4007 - protein, 336 aa, Zea mays
  unsure (1)..(336): unsure at all Xaa locations
MGGFVKTHKTNAYFKRFQVKFKRRRAGKTDYRARIRLINQDKNKYNTPKYRFVVRFTNKDITAQIISASIAGDMVLASAYSHELPRYGLEVGLTNYAAAYCTGLLLARRVLKIRGLDQEYEGNVEATGEDFSVEPADERRPFRALLDVGLIRTTTGNRVFGALKGALDGGLDIPHSEKRFAGFKKDDKQLDADTHRRYIYGGHVADYMKNLAEEEPEKYQSHFSAYIKKGVEADEIEALYKKVHAAIRADPSIVKSTKQPPKEHKRYNPKKLTYEQRKASLIERLNQLNSSGGADDDDEDDEXSLVPSKWCYLNPAISNCVLSYAGTCSTAIGIFV

SEQ ID NO: 4008 - protein, 309 aa, Zea mays
  unsure (1)..(309): unsure at all Xaa locations
MGGFVKTHKSNAYFKRFQVKFKRRRAGKTDYRARIRLINQDKNKYNTPKYRFVVRFTNKDITAQIISASIAGDMVLASAYSHELPRYGLEVGLTNYAAAYCTGLLLARRVLKIRGLDQEYEGNVEATGEDFSVEPADERRPFRALLDVGLIRTTTGNRVFGALKGALDGGLDIPHSEKRFAGFKKDDKQLDADTHRRYIYGGHVADYMKNLAEEEPEKYQSHFSEYIKKGVEAEEIEALYKKVHAAIRADPSVVKSTKQPPKEHKRYNPKKLTYEQRKASLIERLNQLNSSGGADDDDEDDEXSLVPSK

SEQ ID NO: 4009 - protein, 338 aa, Zea mays
  unsure (1)..(338): unsure at all Xaa locations
MGGFVKTQKTNAYFKRFQVKFKRRRAGKTDYRARIRLINQDKNKYNTPKYRFVVRFTNKDIIAQIVSASITGDIILAAAYSRELPRYGLEVGLTNYAAAYCTGLLLARRVLKIRDLDQEYEGNVEATGEDFSVEPAEERRPFRALLDVGLIRTTTGNRVFGALKGALDGGLDIPHSDKRFAGFKKDDKQLDADIHRKYIYGLHVAEYMKNLADEEPEKYQAHFSEYIKKGIEADDMEALYKKVHAAIXRADPSMAKSTKAQPKEHKRYNPKKLTYEQRKARLVERLNALNSSGGVDDDEDDEXSASRAQHSSAILFGDQNLRNGICCSLYSCNRHFFV

SEQ ID NO: 4010 - protein, 336 aa, Zea mays
  unsure (1)..(336): unsure at all Xaa locations
MGGFVKTHKTNAYFKRFQVKFKRRRAGKTDYRARIRLINQDKNKYNTPKYRFVVRFTNKDITAQIISASIAGDMVLASAYSHELPRYGLEVGLTNYAAAYCTGLLLARRVLKIRGLDKEYEGNVEATGEDFSVEPADERRPFRALLDVGLIRTTTGNRVFGALKGALDGGLDIPHSEKRFAGFKKDDKQLDADTHRRYIYGGHVADYMKNLAEEEPEKYQSHFSAYIKKGVEAEEIEALYKKVHAAIRADPSVVKSTKQPPKEHKRYNPKKLTYEQRKASLIERLNQLNSSGGADDDDEDDEXSLVPSKWCYLNPAISNCVLSYAGTCSTAIGIFV

SEQ ID NO: 4011 - protein, 309 aa, Zea mays
  unsure (1)..(309): unsure at all Xaa locations
MGGFVKTHKTNAYFKRFQVKFKRRRAGKTDYRARIRLINQDKNKYNTPKYRFVVRFTNKDITAQIISASIAGDMVLASAYSHELPRYGLEVGLTNYAAAYCTGLLLARRVLKIRGLDKEYEGNVEATGEDFSVEPADERRPFRALLDVGLIRTTTGNRVFGALKGALDGGLDIPHSEKRFAGFKKDDKQLDADTHRRYIYGGHVADYMKNLAEEEPEKYQSHFSAYIKKGVEAEEIEALYKKVHAAIRADPSVVKSTKQPPKEHKRYNPKKLTYEQRKASLIERLNQLNSSGGADDDDEDDEXSLVPSK

SEQ ID NO: 4012 - protein, 317 aa, Zea mays
  unsure (1)..(317): unsure at all Xaa locations
RRWACRSLSSSGRRSLFRRSGFVKVVKNKAYFKRYQVKFRRRREGKTDYYARKRLVIQDKNKYNTPKYRMIVRVTNRDIICQIAYARIEGDMIVCAAYAHELPKYGVKVGLTNYAAAYCTGLLLARRLLNRFGMDKIYEGQVEVTGDEYNVESIDGQPGAFTCYLDAGLARTTTGNKVFXGALKGAVDGGLSIPHSTKRFPGYDSESKEFNAEVHRKHIMGQNVADYMRYLMEEDEDAYKKQFSQYIKNSVTPDMMEEMYKEAHAAIRENPVYEKKPKKEVKKKRWNRPKMSLAQKKDRVAQKKASFLRAQERAAES

SEQ ID NO: 4013 - protein, 282 aa, Zea mays
  unsure (1)..(282): unsure at all Xaa locations
SPFARPPARAAAASSFRRSSLLAGAMVYIKNQKTRAYSKRFQVKFKRRRQGKTDYRARLRLTNQDKNKYNTPKYRFVVRFTNKDVTAQIVYATIAGDIVMAAAYSHELPRYGLEVGLTNYAAAYCTGLLLARRVLKNRDLDEEYEGNVEATGEDFSVEPSDERRPFRALLDVGLIRTTTGNRVFGALKGALDGGLDIPHSDKRFAGFKKDEKSLDAEIHRKYIFGGHVADYMRSLADEEPEKFQTHFSEYIKRGISAEDMEAVYKKVHAAIRADPXHGQITK

SEQ ID NO: 4014 - protein, 306 aa, Zea mays
  unsure (1)..(306): unsure at all Xaa locations
MGGFVKTHKTNAYFKRFQVKFKRRRAGKTDYRARIRLINQDKNKYNTPKYRFVTNKDITAQIISASIAGDMVLASAYSHELPRYGLEVGLTNYAAAYCTGLLLARRVLKTRGLDKEYEGNVEATGEDFSVEPADERRPFRALLDVGLIRTTTGNRVFGALKGALDGGLDIPHSEKRFAGFKKDDKQLDADIHRKYIYGGHVADYMRNLAEEEPEKYQSHFSEYIKKGIEADDMEALYKKVHAAIRADPSVVKSTKQPPKEHKRYNPKKLTYEQRKASLIERLNQLNSSGGADDDDEDDEXSLVPSK

SEQ ID NO: 4015 - protein, 309 aa, Zea mays
  unsure (1)..(309): unsure at all Xaa locations
MGGHERTHRSNAYFKRFQVKFKRRRAVRTHYRARIRLINQDRNKYNTPKYRFVVRSTNKDITAQIISASIAGDMVLASDYSHELPRYGLEVGLTNYAAAYCTGLLLARRVLKIRGLDQEYEGNVEATGEDFSVEPADERRPFRALLDVGLIRTTTGNRVFGALKGALDGGLDIPHSEKRFAGFKKDDKQLDADTHRRYIYGGHVADYMKNLAEEEPEKYQSHFSAYIKKGVEAEEIEALYKKVHAAIRADPSVVKSTKQPPKEHKRYNPKKLTYEQRKASLIERLNQLNSSGGADDDDEDDEXSLVPSK

SEQ ID NO: 4016 - protein, 308 aa, Zea mays
  unsure (1)..(308): unsure at all Xaa locations
MGGFVKTHKTNAYFKRFQVKFKRRRAGKTDYRARIRLINQDKNKYNTPKYRFVVRFTNKDITAQIISASIAGDMVLASAYSHELPRYGLEVGLTNYAAAYCTGLLLARRVLKIRGLDQEYEGNVEATGEDFSVEPADERRPFRALLDVGLIRTTTGNXRVFGAXLKGALDGGLDIPHSEKRFAGFKKDDKQLDADTHRRYIYGGHVAXDYMXKNLAEEEPEKYQSHFSAYIKKGVEADEIEALYKKVHAAIRADPSIVKSTKQPPKEHKRYNPKKLTYEQRKASLIERLNQLNSSGGADDDDEDDEXS

SEQ ID NO: 4017 - protein, 330 aa, Zea mays
  unsure (1)..(330): unsure at all Xaa locations
QNSCSTLPVRLTICVPFGYLPRGGFVKTHKTNAYFKRFQVKFKRRRAGKTDYRARIRLINQDKNKYNTPKYRFVTNKDITAQIISASIAGDMVLASAYSHELPRYGLEVGLTNYAAAYCTGLLLARRVLKTRGLDKEYEGNVEATGEDFSVEPADERRPFRALLDVGLIRTTTGNRVFGALKGALDGGLDIPHSEKRFAGFKKDDKQLDADIHRKYIYGGHVADYMRNLAEEXEPEKYQSHFSEYIKKGIEADDMEALYKKVHAAIRADPSVVKSTKQPPKEHKRYNPQEXLTYEQRKASLIERLNQLNSSXAGADDDDEDDEXSLVPSK

SEQ ID NO: 4018 - protein, 266 aa, Zea mays
  unsure (1)..(266): unsure at all Xaa locations
XGREKHYNTPKYRFVVRFTNKDITAQIISASIAGDMVLASAYSHELPRYGLEVGLTNYAAAYRTGLLLARRVLKIRGLDQEYEGNVEATGEDFSVEPADERRPFRALLDVGLIRTTTGNRVFGALKGALDGGLDIPHSEKRFAGFKKDDKQLDADTHRRYIYGGHVADYMKNLAEEEPEKYQSHFSAYIKKGVEADEIEALYKKVHAAIRADPSIVKSTKQPPKEHKRYNPKKLTYEQRKASLIERLNQLNSSGGADDDDEDDEXS

SEQ ID NO: 4019 - protein, 223 aa, Zea mays
KSRRRRILQQPHPQQASEMVFVKNQKTRAYSKRFQVKFKRRRQGKTDYRARLRLTNQDKNKYNTPKYRFVVRFTNKDVTAQIVYATIAGDIVMAAAYSHELPRYGLEVGLTNYAAAYCTGLLLARRVLKCRDLDQEYEGNVEATGEDFSVEPADERRPFRALLDVGLIRTTTGNRVFGALKGALDGGLDIPHSDKRFAGFKKDEKQLDAEIHRKYIYGGHVAD

SEQ ID NO: 4020 - protein, 216 aa, Zea mays
  unsure (1)..(216): unsure at all Xaa locations
MGGFVKTHKSNAYFKRFQXEFKRRCAGKTDYRARIRLINQDKNKNNTPKYRFVVRFTNKDITAQIISASIAGDMALASAYSHEYAXRYGLEVGLTNYAXAAYCTGLLLDRTXSLKTRGLDKEYEGNVEATXGEDFSAEPTDERRAFRALLDVVLITTTTGKRVFGALXVALDGGLYIPHSEKRFADLKKDDQQLDADIHRKYIYGGHGADYMRNLA

SEQ ID NO: 4021 - protein, 237 aa, Zea mays
  unsure (1)..(237): unsure at all Xaa locations
XSQKKQANFNRRFARQTXDYRTRXRLVNQEKIXCKTPKYRSVVLYASKDILLQIISVSLAGDVGLGTVYSHEPPLSGFDVGLTNYAADYLTGLXMVACRVLKTRGXDXESEGHVDATGEDWSWAPADERRALRALLDVGLIRTTSGNRIFGALKGALHGGLDIPHSEKRFAGFKKDDTQLDADIHRTYIYGGHAADYMRNLAEEEPEKYQSHLSEYIKQGIDADDMEALTKKVHAAX

SEQ ID NO: 4022 - protein, 210 aa, Zea mays
  unsure (1)..(210): unsure at all Xaa locations
MGGFGKTHKSTAYLKRFQIKINRRRAAKTDYTARIRLFNHDTDMYNTPKYRFGGRFTNKDITAHMIFDSIAGDMVLACAYSHELPRYGLEGGLTNYASAYCTGLMMHPRVLKTRCLHTEYQGNVXAIGEDFSVEPTDEMTPSQALLDVSLIRTTTWNRAFCALKGSLDGGLNIPHSEKRFAGFKNDDKQLXDADIHRKYIYGGQCDDYMX

SEQ ID NO: 4023 - protein, 278 aa, Zea mays
  unsure (1)..(278): unsure at all Xaa locations
GGFVKTQKTNAYFKRFQVKFKRRRAAYCTGLLLARRVLKIRDLDQEYEGNVEATGEDFSVEPAEERRPFRALLDVGLIRTTTGNRVFGALKGALDGGLDIPHSDKRFAGFKKDDKQLDADIHRKYIYGLHVAEYMKNLADEEPEKYQAHFSEYIKKGIEADDMEALYKKVHAAIRADPSMAKSTKAQPKEHKRHNPKKLTYEQRKARLVERLNALNSSGGVDDDEDDEXSASRGTVVLSYLAIRTCAMAFVVPFTPVTGIFFCLSLELDIWSSRCAAG

SEQ ID NO: 4024 - protein, 156 aa, Zea mays
  unsure (1)..(156): unsure at all Xaa locations
MGGFVKTHKSNAYFKRFQVKFKRRRAGKTDYRARIRLINQDKNKYNTPKYRFVVRFTNKDITAQIISASIAGDMVLASAYSHELPRYGLEVGLTNYAAAYCTGLLLARRVLKTRGLDKEYEGNVEATGEDFSVEPADERRPFRCRRQPRRVRCSDX

SEQ ID NO: 4025 - protein, 156 aa, Zea mays
  unsure (1)..(156): unsure at all Xaa locations
MGGMVKTHKSNAYFKRXQVKFKRRRAGKTDYRARIRLINQDRNKCNTPKYRFVERFTNKDITAQIISASIAGDMVLASAYSHEVPRYGLEVGLTNYAAAYCTGLLLARRELKIRGLDQEYEGHVEATGEDFCVEPTDERRAFRALSGCXLIRTTTX

SEQ ID NO: 4026 - protein, 173 aa, Zea mays
  unsure (1)..(173): unsure at all Xaa locations
MRSFGKTHKSNGYFKXFQEKFTRRRAGKTDYRFRIRLINLDKNKYNTPXYGFVPDKDITAQIISASIARDMALASAYSHEVPRYGLEVGLTNYAAAYCTGLLMARRVLETRGLDKEYERYVEDTGEDFSVEPTDERMPFRALLNDDLIRTTTDKRDFVALKGCLDGGLGICHX

SEQ ID NO: 4027 - protein, 208 aa, Zea mays
  unsure (1)..(208): unsure at all Xaa locations
PPPAAYCIFALTHYSRCYCTGVMLDSRVLNTRGLNKEHEGPAEATGEDCSDDPPDERRPFRALWDDGLIRTTTGNRAFGALTGAMDGGLDIAHSEKRIAGLNKDDKQLDADIHRKYIYGGHVADYMTNLADHEPDKNQSHFSEYINKGIEADDMEAMNKKVHAGIRADPSVVKATKHPPKEHKRYHPKKLSYQQRKAXTLIERLNQLN

SEQ ID NO: 4028 - protein, 101 aa, Zea mays
  unsure (1)..(101): unsure at all Xaa locations
MGFVKVVKNKAYFKRYQVRFRRRREGKTDYYARKRLVIQDKNKYNTPKYRMIVRVTNRDIICQIAYARIEGDMIVCAAYAHELPKYGVKVGLTNYAAAYCX

SEQ ID NO: 4029 - protein, 177 aa, Zea mays
  unsure (1)..(177): unsure at all Xaa locations
HLQYAHHXCLLVESLQGPVXQTDYGAXHRRLITQDYYNSHTPKYGIGGRSTNKDITAHIISASITGDMALAAADSHDWPRYGLETGTTNYAAAYXTALLMARRVLKTRGLHKEYVCHADATGEDFSVEPADERRPFRALLDVGLIRTTTANRVXLGDINGALDGGPNIPHREKRLAX

SEQ ID NO: 4030 - protein, 223 aa, Zea mays
  unsure (1)..(223): unsure at all Xaa locations
LTPANRSIALSCNNGRSVLLPAFERDARHGSVAAASLTARIGTMTPDKNXHKRDKYRVAVPLTHNDNTGAILSAMIQRDMLSPSRYSPEVPRYATCNCLTNIAAAYCTGLLLARPAINTRSVDPPYEGQADPTGHDLYVETDDAIRPFRPLLDVXLIRTTTGYRVFGDLNGPFNGGLDIPLSMNKFDEFHKDDKQLDIDTHRXKYIYGXHVADYTKSLAEDDX

SEQ ID NO: 4031 - protein, 132 aa, Zea mays
  unsure (1)..(132): unsure at all Xaa locations
PPQETERXGFVKTHKSNAYFKPFQVKFTXRKRACKTYYRARIKLINQDKYKYNTPKFRFVVRLTTNAFTTHIISASLAGDMVLASAYSHDLPRYGLXEVGLTNYATAYCTGLLLARRVLKTPGLDKEYXGNX

SEQ ID NO: 4032 - protein, 137 aa, Zea mays
  unsure (1)..(137): unsure at all Xaa locations
LSTAQIISARGACEMGLASAHSDEWPRPGLQVGLTNDAAAYCTGLLLGRRVLKTRGLDKEYEGNVEATGEDFCVEPADERRPFRALLDVGLIRTTTGNRVYGALKGALDGGLHIPDTEKRHAGFKHDDKQVDADIHX

SEQ ID NO: 4033 - protein, 138 aa, Zea mays
  unsure (1)..(138): unsure at all Xaa locations
AGAAALCIGPKETERGGFCQTRRSNAYLKAIFRXKFQDRRAGQTDYRASIMLINQDINKHNTPKYRFVVRFTNKDITAQIISASIACDMVLASAYSHELPRYGLEVGLTNYAAAYCTGLXLMARXRVLKTLXGSDKEX

SEQ ID NO: 4034 - protein, 110 aa, Zea mays
  unsure (1)..(110): unsure at all Xaa locations
RFQKGGFVKTHKTNAXYFKRYQCKFKRRRAGQTHYMARIRLVNQDKNKSNTPKYRFVVRFTNKDIIGPIIYGSIAGDMVLASAYXDEVPRHGLEDGLTNYSDAYCTGLLX

SEQ ID NO: 4035 - protein, 177 aa, Zea mays
  unsure (1)..(177): unsure at all Xaa locations
MGSSHXTHQSHAYFEXFQGNVKRXPAANTDYRRIIRMIRPEYDMXDTPRYRCAGRFTNDDIARSNIISCXVYHGDTVLASAYSPELPRHALEIDLTFYAAAYCTGLLLARRVLKTRALDNEYEVYVEATGEDFSVEPADERRPFRALLDAALIMTTTGKPGFGAPPATLHAGLDIPX

SEQ ID NO: 4036 - protein, 173 aa, Zea mays
  unsure (1)..(173): unsure at all Xaa locations
PPHETVIGGFAKTHTTNAYLKSFQPKTQNSAAGKTNYRGSIKMINQDKNTYNTPKSRFAARFTNPDITPQIISARMTRDMEXLASAYSHEXPRYALEAGMTNYAPVYCTGLMLTGRVLKTRVLNSEXEVNAEGPERDFFGDHCDEKTPFRALLDVGHNKTSTVNPAFGGLTGS

SEQ ID NO: 4037 - protein, 182 aa, Zea mays
  unsure (1)..(182): unsure at all Xaa locations
MRGGFVKTHKXNAYLSXFQVTFKRRRAXGKTDFRARTRLVYQDQNKHNSPKXYRIVXVRFTXQDYTXTNLSPSISGDMVPASAYSHQLARYGXLELVLTHYAAAYCTGPLSASRALKTXGPDKEYEGXNVEATGEGFXFFEPLDEKEALSVLSLDVGXLLGTSTWETVVXFGAPQGKLLDGX

SEQ ID NO: 4038 - protein, 123 aa, Zea mays
  unsure (1)..(123): unsure at all Xaa locations
SKRVAMXKSKRRPSWSDYKSRIRLVNLDKTKTNTPKYRLQVRFTNKDITVQIISDNIQCDMAKAYAYSYELPRYALEDGLTNYPSIYWTGLLLYRRVLKIRLLYYEYEGIVDVTAEDSSGEPA

SEQ ID NO: 4039 - protein, 135 aa, Zea mays
  unsure (1)..(135): unsure at all Xaa locations
MGGLTRTHRTNASFIRSLGKFKEKRGSGXHMTHRARVSTRDKGTXTTARYKLVVRFTNKDITAQMISAXLVDDQALASAYLNELPRYGLVAGLTNYADGYCTGLLVARRVLKIRELDEDYXGSADATGDDLCVRA

SEQ ID NO: 4040 - protein, 136 aa, Zea mays
  unsure (1)..(136): unsure at all Xaa locations
XARVRPRXRRFVVRFTNKDITAHISCAIIGGGMGLASAYXHELPRYELEIGPTNYAAAYCTGLLFARRVLKTHCLDKEYDGNVEATVXFFSXXSSYHKKTFRALLDVGLIMTTTWNQRFDALNGAXLDGGLDLPHX

SEQ ID NO: 4041 - protein, 118 aa, Zea mays
  unsure (1)..(118): unsure at all Xaa locations
PPQETEXGXXXKTHRSXAYFKXXQXKXKRRRAGKTDYRARIRLINQDKNKSNTPNCGGVVRFTNLDITAXIISASLAGDMVLASACSHELPRCGLAVGLSCFAAXAFCAVLLLARRVX

SEQ ID NO: 4042 - protein, 154 aa, Zea mays
  unsure (1)..(154): unsure at all Xaa locations
MGGCVRTHMSVAYYLRDHVNFRTGLPAPTNYRVRVRLIIHYPSRYFTPHYRFVERFTIVDVTSHIISASISSDMVFASAYSYELTQYGLEGGMTNYAGDCCTDLLLARPVLKTGGSYKECEGIVDATGDDVCGAPCDERRPCPALLDGGLSRTX

SEQ ID NO: 4043 - protein, 74 aa, Zea mays
  unsure (1)..(74): unsure at all Xaa locations
MVYVKAQKSKAYFKRYQVKFKRRRXGKTDYRARIRLINQDKNKYNTPKYRFVVRFSNKDIVAQIISASIAGDIV

SEQ ID NO: 4044 - protein, 204 aa, Zea mays
  unsure (1)..(204): unsure at all Xaa locations
RSGRRCCFLSLLSRRFLITLNRTECFRRVKXRLERTRIGMMDYGGSIVVTSLQKHTYLTPQYRFVXVRSTLDDITAQIMFAKIAADSVLASAYSPEMTLYGLERGLTNYAAVYCTGLLSSRLVLEXRMRVIKMYYGQXPTSLWEDFSVEPGDDMRLFRXALLHGGLITTTXLIRGSAVLTVILQGGLYIPHSDMRLAGFDTXQX

SEQ ID NO: 4045 - protein, 219 aa, Zea mays
  unsure (1)..(219): unsure at all Xaa locations
RLSKTHVPDLQTGSLEAXYRRREEALGNDTTTREQDRGMIXAKQNNHSSTCTPRYSGMCDLHHQDITAQIISATIAXNDMVLASAYSHALPPYALEFGLMIYVDVYCIGLLLPHPELKISALDLEYKGNGHATGDDFSVETAAAEDGYRALLDACXLIMTTKANRDFXSALSVALDASLAIPHGKKRFAGLNKVDICLNDETQRRHIYGGHDAEYLKNL

SEQ ID NO: 4046 - protein, 123 aa, Zea mays
  unsure (1)..(123): unsure at all Xaa locations
SRRRCSAHKHRSRLTWGDLCKTHKSNAYFLRFQLKLQRRXRAGKTDYRRSIRLISQDLNQYKTPSYRXVDVRFTNKVLSPQIISASITCEMVTASAXYSHELARYGPEVGLINYAYVYCTGLX

SEQ ID NO: 4047 - protein, 108 aa, Zea mays
  unsure (1)..(108): unsure at all Xaa locations
DSQAGFLNTDQSNAYFKPFHVNFIXQRSXSKTYYTATIMLINQDKNXYNTPKYKFLVPFTNNDITTQIISTNITSHILLASAYSHXFPRYYLXTCLTNYATYYYTGLL

SEQ ID NO: 4048 - protein, 102 aa, Zea mays
  unsure (1)..(102): unsure at all Xaa locations
MAGSVITHNTIAHLNLFQMTFKRKPPGITHYRAKIRLTSQHTFMYSTPIXIFVVRFITNDITSHIISASTAXDMVLASAYSHELPQYGLEFGLTNYTAAYCX

SEQ ID NO: 4049 - protein, 87 aa, Zea mays
  unsure (1)..(87): unsure at all Xaa locations
MSGVQKTPKTXAYFHXFSEKFKRTRAVCTHYRGRIMLINLDMNKYNTPIYRFVVRFTNDDITAQIISASIAGDMGLASAYSHELPRY

SEQ ID NO: 4050 - protein, 90 aa, Zea mays
  unsure (1)..(90): unsure at all Xaa locations
RVQNAEVQGFVAAHKSSAYFSRFHVNVRMNRDGKTDYMAMIRMITLDSYKYNADIYRVVVRYTAKDISAQVISASIAGDMVLASAYSHEX

SEQ ID NO: 4051 - protein, 119 aa, Zea mays
  unsure (1)..(119): unsure at all Xaa locations
XHRKYVFGGHVAAYMKXLRXDEPEKYQSHFXEYIKRGIEADGIEALYKKVHAAIRADPSLKKSEKQPPKEHKRYNLKKLTYEERKAKLIARVAAINSAADNDEDDEXKFIADSMSSLHN

SEQ ID NO: 4052 - protein, 191 aa, Zea mays
  unsure (1)..(191): unsure at all Xaa locations
NKKKKKKKILPQRGNPPPLKGPYPPKKIERGGFVKTQKTKGYLKGFQGNLKKRGVGKKNNGARKGLFTQKKNRSNPPKNNFFFFFPNRDFTEKIFFVKKKGERVLVSVNPNECPQNGFKVGLTNYEVANXIGLLWAPRGLKTRVLKKKYEGNVKAPGENFSVNPFKKRRPFRALWNVALIRTTTGNRVFGA

SEQ ID NO: 4053 - protein, 91 aa, Zea mays
  unsure (1)..(91): unsure at all Xaa locations
MESTMNMSYGTPXYRFVEEFTTXDVTAQIICASIACDTVLACCYTHEPPQSGLEVGLTNYATAYCTGLLLARRVLKTRGLYNEYEGNVEAX

SEQ ID NO: 4054 - protein, 106 aa, Zea mays
  unsure (1)..(106): unsure at all Xaa locations
MGGYVKTHKSYADSTRLPVKPTRRRPGKTDYRTRIRLINQXYKNRYSTPKYILAVRVTNKAISVHIISASIAVHMVLASAXYYEIPRHGLAXVGLPNYVRCYWTGX

SEQ ID NO: 4055 - protein, 163 aa, Zea mays
  unsure (1)..(163): unsure at all Xaa locations
MGGRAKTXKTGALVRGGPGKLPRPRSDETDYGGRIRLINHDKTXYNTPEYRLAVRVTTEVITGHIICARIAXSDMALAYAFSVEVSRXYGLEAVMTNYADAYCTVLLLPGRELKTRGEDIVYDGNVDDAGEDFFDGPADERRSSRALWDGGLIRTXTAGNRWX

SEQ ID NO: 4056 - protein, 113 aa, Zea mays
  unsure (1)..(113): unsure at all Xaa locations
IQGGCSSFILILGGGFQWQFMTVRPGWVVWVAHGSAEXKKRLACKTDSLASIRVINQNKCTSNTPKYRFVVRFTNKDITGQIISAIIVGDMGFASAYSHELAPYGLEDCLTNY

SEQ ID NO: 4057 - protein, 73 aa, Zea mays
  unsure (1)..(73): unsure at all Xaa locations
MGGFVKTHKTNAYFKRFQVKFKRRRAGKTDYRATITLINQDXNKYNTPXYRFVVRFTNKDITAAIISASIAGX

SEQ ID NO: 4058 - protein, 169 aa, Zea mays
  unsure (1)..(169): unsure at all Xaa locations
MXGMWPTHRILTXVQRYLLFFXEGAVYQTDYKRRIPLINQHRPXSSTPKYRSRAPLTNEDMLYTNLSAVYPSDXGDMMLASAYSHELPLSVPERRLTNYVAAXCTGLLLALRCAXKPELLDQGYECLVYHTACYFSDEPCDDNRTFMALLDVEHIMTTTANHVIRALNG

SEQ ID NO: 4059 - protein, 112 aa, Zea mays
  unsure (1)..(112): unsure at all Xaa locations
MPGLVKTNNTNASSKRXQVKVIRMRTAKTDYRATIRLINHDRNTVITPKYRFCAQSTNWDIPAQIICASLADDMVLASAYXHDLPRXLGLEDTMTNYSNAYCTGLLKLRLVX

SEQ ID NO: 4060 - protein, 183 aa, Zea mays
  unsure (1)..(183): unsure at all Xaa locations
TPLNHPLYPPARLGFCHHGRRRGRRPEAPLPPRLLELALRVPPPRRCPGAVAAAPGRRRGGLPPRLPARNGAATWRGRITRRGTTAQAHADSIAADRVLAMHYSIEMEKYGLEVAPTNYTTDYCIGLLSSRRELKIRAMDHEYEGTDEVTGEDFSVEPXDERRPFPALMDDGLIRTTTGNRVF

SEQ ID NO: 4061 - protein, 148 aa, Zea mays
  unsure (1)..(148): unsure at all Xaa locations
XPRVRLAGFNKDDKQLDADIHRKYIYGGHVANYMKNLAEXEPDKYQSHFREYIKKGIEADDMEALFKKVHAAIRADPSVDKXTKQPPKELKMLKLQKLTYEXQRKARLIERLXPINSSDGAYDDDEDDESGLDLSKKCYLMRRSLFEL

SEQ ID NO: 4062 - protein, 81 aa, Zea mays
  unsure (1)..(81): unsure at all Xaa locations
MGGFVGTHKTKAEFKRFQVKFNRRLSVKTDYRASIRLINQDKNKYNTPKYIFVSRFTNKDITSQIIFASIAFDMDLASVYX

SEQ ID NO: 4063 - protein, 122 aa, Zea mays
  unsure (1)..(122): unsure at all Xaa locations
NQNKNNGNVPKYTLPFQFTNNDITPQIISTNITPDIVLASSYSHXLPLYNLEIHLTNYTPSYYTLLLFSLHILKTHSLYNEYYFNYNTTFXDFSSYPSYYNNPYPTLFNFNLITTTTFNPIX

SEQ ID NO: 4064 - protein, 119 aa, Zea mays
  unsure (1)..(119): unsure at all Xaa locations
IGGCARTDISTAYFMPVYFHLTSKFLGYTDYRLLLRLVFQDKDNSNTSTYRFVDRFTNMVITALIIYDRIPSXDMHLTSDYSHQLPRYALEVGLTNYSAVYWTDLLLAGHVLTNRNLYY

SEQ ID NO: 4065 - protein, 116 aa, Zea mays
  unsure (1)..(116): unsure at all Xaa locations
XRHAYYKRTGGGQERRRAEDTGPERKNNQDKNKNKTPKCRCAERRTNKDTTAQIRSASITRDMGRAQAYSHDLTRYGLKTGRTNXAAAYNKSRLXTRRGHNTGGVHKEQQGQGEAX

SEQ ID NO: 4066 - protein, 111 aa, Zea mays
  unsure (1)..(111): unsure at all Xaa locations
PPEETGIGGFVKTHKTNAYFKRSQVYAKRRRAGXTDYCATIRLINQDKNSCITPTIDSAVRFTNXKDITAXQIMCARIERDLELALTYWTEQSLNRGEVGLTNYAAAYSTX

SEQ ID NO: 4067 - protein, 78 aa, Zea mays
  unsure (1)..(78): unsure at all Xaa locations
MGGCVKTHKTNAYFKRFQVKFXKKRSLGRTTYRSXIRLINQDKNKYNTPKFRFGGRFTNQDLTGQIIFGRLAGELGLG

SEQ ID NO: 4068 - protein, 70 aa, Zea mays
MGGFVMTHMTSAYFKRILVIFKRMRAVKTDYRARIRLINQDKNKYNILIYRFVVRFTNKDITARIISGSI

SEQ ID NO: 4069 - protein, 294 aa, Schizosaccharomyces pombe
MPFIKAVKSSPYFSRYQTKYRRRREGKTDYYARKRLIAQAKNKYNAPKYRLVVRFSNRFVTCQIVSSRVNGDYVLAHAHSSELPRYGIKWGLANWTAAYATGLLVARRALAKVGLADKYEGVTEPEGEFELTEAIEDGPRPFKVFLDVGLKRTSTGSRVFGAMKGASDGGLFIPHSPNRFPGFDIETEELDDETLRKYIYGGHVAEYMEMLIDDDEERYQKQFSGLIADGIESDQLEDIYAEAYAKIREDPSFQKSGKDAAAFKAESLKYTQRKLTAEERKERFNAKVIEAGRA

SEQ ID NO: 4070 - protein, 294 aa, Schizosaccharomyces pombe
MPFIKAVKSSPYFSRYQTKYRRRREGKTDYYARKRLIAQAKNKYNAPKYRLVVRFSNRFVTCQIVSSRVNGDYVLAHAHSSELPRYGIKWGLANWTAAYATGLLVARRALAKVGLADKYEGVTEPEGEFELTEAIEDGPRPFKVFLDVGLKRTSTGSRVFGAMKGASDGGLFIPHSPNRFPGFDIETEELDDETLRKYIYGGHVAEYMEMLIDDDEERYQKQFSGLIADGIESDQLEDIYAEAYAKIREDPSFQKSGKDAAAFKAESLKHTQRKLTAEERKERFNAKVIEAGRA

SEQ ID NO: 4071 - protein, 293 aa, Schizosaccharomyces pombe
MPFIKAVKSSPYFSRYQTKYRRREGKIDYYARKRLIAQAKNKYNAPKYRLVVRFSNRFVTCQIVSSRVNGDYVLAHAHSSELPRYGIKWGLANWTAAYATGLLVARRALAKVGLADKYEGVTEPEGEFELTEAIEDGPRPFKVFLDVGLKRTSTGSRVFGAMKGASDGGLFIPHSPNRFPGFDIETEELDDETLRKYIYGGHVAEYMEMLIDDDEERYQKQSSGLIADGIESDQLEDIYAEAYAKIREDPSFQKSGKDAAAFKAESLKHTQRKLTAEERKERFNAKVIEAGRA

SEQ ID NO: 4072 - protein, 248 aa, Schizosaccharomyces pombe
PKYRLVVRFSNRFVTCQIVSSRVNGDYVLAHAHSSELPRYGIKWGLANWTAAYATGLLVARRALAKVGLADKYEGVTEPEGEFELTEAIEDGPRPFKVFLDVGLKRTSTGSRVFGAMKGASDGGLFIPHSPNRFPGFDIETEELDDETLRKYIYGGHVAEYMEMLIDDDEERYQKQFSGLIADGIESDQLEDIYAEAYAKIREDPSFQKSGKDAAAFKAESLKYTQRKLTAEERKERFNAKVIEAGRA

SEQ ID NO: 4073 - protein, 160 aa, Thermoplasma volcanium
MAFKRKVLGKTDYGRRLRLLKSKDRRFIVRITNKGIIAQIAEYSVNGDRILATITDKALSKYGIELRGNNLQICYLVGYAAGVEAQKAGVETAVLDIGRKKFRKGGRIAACLKGITDSGVDIPHGEDVFPDKKRLNGSHLKNPVKLNEAVKNFKKLEEKA

SEQ ID NO: 4074 - protein, 300 aa, Aspergillus fumigatus
MPFHKLVKNSAYYSRYQTKYRRRREGKTDYYARKRLITQAKNKYNAPKYRLVVRFTNRDIITQIVYSEITGDKVFASAYSHELKRYGITQGLTNWAAAYATGLLLARRTLKKLGLDEQFTGVEEPDGEYKLTEAVETDDGTRRPFKAFLDVGLVRTSTGARVFGAMKGASDGGIFIPHSENRFPGYDIESEELDAETLRNYIFGGHVSEYMETLADDDEERYRSQFAKYIENEIDAGDLEEIYAEAHKAIREDPFKKDEDEKPKKSKEEWKAESKKYKKAKLSREEKKARVEQKIRELAA

SEQ ID NO: 4075 - protein, 301 aa, Neurospora crassa
MAFHKLVKNSAYYSRFQTKYKRRREGKTDYYARKRLITQAKNKYNAPKYRLVVRFTNRDIILQIVSSEITGDKVFASAYSHELKAYGIEHGLTNWAAAYATGLLLARRVLKKLGLDETFKGVEEADGEYKLTEAAETDDGERRPFKAFLDVGLARTSTGARVFGAMKGASDGGIFIPHSENRFPGYDMESEELDAETLKKYIFGGHVAEYMETLADDDEERYKSQFNRYIEDDLEADGLEDLYAEAHAAIREDPFKKAESEAPKKTKEEWKAESLKYKKSKLTREQRAAGVQERIAALRSE

SEQ ID NO: 4076 - protein, 206 aa, Pyrococcus horikoshii
MRKMAHGPRYRVPFRRRREGKTNYRKRLKLLKSGKPRLVVRKSLNHHIAQIIVYDPKGDRTLVSAHTRELIRDFGWKGHCGNTPSAYLLGLLIGYKAKKAGIEEAILDIGLHPPVRGSSIFAVLKGAIDAGLNVPHSPEIFPEDYRIRGEHIAEYARMLKEQDEDRFRRQFGGYLEKGLDPEKLPEHFEEVKARIIEKFESEGARE

SEQ ID NO: 4077 - protein, 203 aa, Pyrococcus horikoshii
MAHGPRYRVPFRRRREGKTNYRKRLKLLKSGKPRLVVRKSLNHHIAQIIVYDPKGDRTLVSAHTRELIRDFGWKGHCGNTPSAYLLGLLIGYKAKKAGIEEAILDIGLHPPVRGSSIFAVLKGAIDAGLNVPHSPEIFPEDYRIRGEHIAEYARMLKEQDEDRFRRQFGGYLEKGLDPEKLPEHFEEVKARIIEKFESEGARE

SEQ ID NO: 4078 - protein, 232 aa, Guillardia theta
MIQYALKSNASYHSRFKLKKRRRRIGKTDYKKRMKLIRQDKKKFENKKKRIIIRFSKRNLSLQMVNSNVDGDFILLSSYLKNLSKLEYKNLTNNYPFSYLLGYYFGKDLIEKVKQSETYNKKNYSSKITAIIDIGLKRATIGNKSFASMKGSVDSGINIPHNYNKIFKVKNNEIDSKELFNERSKGIHIIKYIDLLKNEDEEKLKKQFSNIFLSRDSLSTIKKNYLIKNKNK

SEQ ID NO: 4079 - protein, 214 aa, Aeropyrum pernix
MGRGPRYRVPLRRRREGKTNYYRRFRLVKSGKPRMAVRISNEYLWVQFLEARIEGDRVIAAAHSRELIKKFGWKGDGNNTCAAYLTGYLAGLRALEKGVREAVLDVGLHKPVKGSRVFAALKGALDAGVEIPHSEEILPGDERVRCEHIAQWAEALKEENAELYQRQFSRYLDRGLNPEELPGHVEEVKKAIEEAYKHVAEETAAEGEEVEVKA

SEQ ID NO: 4080 - protein, 167 aa, Entamoeba histolytica
LKVIKNRAYFKKYQTQFRRRREGKTDYYARRKMIFQDKDKFKTPKYRVVVRITNKTVIAQIAYSEIIGDKILCAAYSHELPRYGVKLGLTNYAAAYCTGLLLARRLLQKLGMDKQFVGVSDAAKLGEDYTPEEVDERRPFTCILDVGLARTTTGSKVFGGPKGMCDG

SEQ ID NO: 4081 - protein, 167 aa, Entamoeba histolytica
LKVIKNRAYFKKYQTQFRRRREGKTDYYARRKMIFQDKDKFKTPKYRVVVRITNKTVIAQIAYSEIIGDKILWAAYSHELPRYGVKLGLTNYAADYCTGLLLARRLLQKLGMDKQFGGVSDAAKLGEDYTPEEVDERRPFKCILDVGLGRTTTGSLVFGVPKGMCDG

SEQ ID NO: 4082 - protein, 283 aa, Encephalitozoon cuniculi
MGTRNYHKNFQVKRRRRREGKTDYKHRTNMIRQDSNSCGSVKHRLVVRITGSRVICQIVAAYMDGDRVMVYADSRELERYGINFGATNYSAAYATGFLIGRRALTAMSLDEVYRPKEIDGTYSVTKDIDGEKKAPRVFLDIGLARSTRGARVFGALKGASDAGLNVPHSAAKFYGHKPDGSFDAKELHDRIFGYNISEYMKQLRDGDPEKYKTQFSSYIKKGIDPEEIPRIYKSAFDKIAEDPTRKKKETKDYSGFKKYKQARLTYEERAKRVQAKLSAAEGE

SEQ ID NO: 4083 - protein, 299 aa, Schistosoma japonicum
MAIVKLVKNKAYFKRFQVKFKRRREGKTDYYARKRLIWQDKNKYNTPKYRLVVRFTNKDIICQIIYARIDGDRVLCSAYAHELPRYGVKVGLTNYAAAYCTGLLCARRVLKQLGLDGLYAGAEKVDGQEYHVESVGGNKSPFRCHLDVGLARTSSGANIFGALKGAVDGGLDIPYSPSRFPGYNQESKEYKPEVHRARILGHHVAEYMKQLQEENESDYQRQFSKYIKHGITADKIEEMYLSAHAAIRSDPSHIAHEKKEIQPKRFNRKKMSYKQKKERVRQKKALYLSQLKKEIAAVE

SEQ ID NO: 4084 - protein, 293 aa, Caenorhabditis elegans
MGLVKVIKNKAYFKRYQVKLRRRREGKTDYYARKRLTVQDKNKYNTPKYRLIVRITNKDVVAQLAYSKIEGDVVVASAYSHELPRYGLKVGLTNYAAAYATGLLLARRHLKTIGLDSTYKGHEELTGEDYNVEEEGDRAPFKAVLDIGLARTTTGSKIFAVMKGVADGGINVPHSESRFFGFDQESKEYNAEAHRDRILGKHVADYMTYLKEEDEDRYKRQFSKFLAAGLNADNLVATYQKVHSAIRADASPAAKKAAKPSKRHTAKRLTYDERKQRVADKKALLLQLKEQQE

SEQ ID NO: 4085 - protein, 183 aa, Halobacterium sp. NRC-1
MATGPRYKVPMRRRREVRTDYHQRLRLLKSGKPRLVARKSNKHVTAQLVTTGPDGDETVASAHSSDLDAYGWAAPTGNLPAAYLTGLLAGQRAVDAGVEEAVLDIGLNTATPGSKVFAIQEGAIDAGLDVPHNDSVLADWSRTRGEHIAEYAESLDEPLYSGDFDATALPAHFDETREAIMED

SEQ ID NO: 4086 - protein, 132 aa, Euprymna scolopes
MKGAVDGGMEVPHNIKRFPGYDAENGEFNAEVHRDHIFGKHVSDYMVSLKEENEEAYRRQFSRYIKLGICADVIEKMYKKAHAAIRADPEHKPVPKKTVTKKRHNAKKIGNKQRKIRIAKEKADFMKSLGKQ

SEQ ID NO: 4087 - protein, 299 aa, Bombyx mori
MGFVKVVKNKQYFKRYQVKFKRRREGKTDYYARKRLVVQDKNKYNTPKYRLIVRLSNKDVTCQVAYSRIEGDHIVCAAYSHELPRYGVKVGLTNYAAAYSTGLLLARRLLQRLGLDTLYTGTTDVTGDEYNVEPVDNGPGAFRCYLDVGLARTTTGRRVFGAMKGAVDGGLNVPHSIKRFPGYDAESKKFNAEVHRAHIFGLHVAEYMRSLEQDDEDSFKRQFSKYIKLGVTADAIEAIYKKAHEAIRADPSHKKKELKKDSVKQKRWNKRKLTLAERKNRIKQKKASFIKRLQAQAEA

SEQ ID NO: 4088 - protein, 327 aa, Anopheles gambiae
MGFVKVVKNKQYFKRYQVRFRRRREGKTDYYARKRLIFQDKNKYNTPKFRLIVRLSNRDITCQIAYRRIEGDRIVCAAYSHELPRYGVKVGLTNYAAAYCTGLLVARRILQKLRLDTLYAGCTDVTGEEYLVEPVDEGPAAFRCYLDVGLARTTTGSRVFGAMKGAVDGGLNIPHSVKRFPGYSAENKSFNAEMHRDHIFGLHVANYMRTLEEEDEEAFKRQFSKYISLGIKADDIENIYKNAHASIRKIPPSRRNPRRRSPRSGGRWPSCRSPPARRRSRSTRPTSWPRSRPTSKPKRLPRRRRPFFFSSWWCIILVLPCSSPVQG

SEQ ID NO: 4089 - protein, 299 aa, Drosophila melanogaster
MGFVKVVKNKQYFKRYQVKFRRRREGKTDYYARKRLTFQDKNKYNTPKYRLIVRLSNKDITVQIAYARIEGDRVVCAAYSHELPKYGIQVGLTNYAAAYCTGLLVARRVLNKLGLDSLYAGCTEVTGEEFNVEPVDDGPGAFRCFLDVGLARTTTGARVFGAMKGAVDGGLNIPHSVKRFPGYSAETKSFNADVHRAHIFGQHVADYMRSLEEEDEESFKRQFSRYIKLGIRADDLEDIYKKAHQAIRNDPTHKVTAKKSSAVTKKRWNAKKLTNEQRKTKIAAHKAAYVAKLQSETEA

SEQ ID NO: 4090 - protein, 177 aa, Drosophila melanogaster
  unsure (1)..(177): unsure at all Xaa locations
DSLYAGCTEVTGEEFNVEPVDDGPGAFRCFLDVGLARTTTGARVFGAMKGAVDGGLNIPHSVXLFPGYSAETKSFNADVHRAHIFGQHVADYMRSLEEEDEESFKRQFSRYIKLGIRADDLEDIYKKAHQAIRNDPTHKVTAKNLLPLRXKXGMLRNSXTNNXRLRLQLIRHIFCQX

SEQ ID NO: 4091 - protein, 294 aa, Plasmodium yoelii yoelii
MAYVKVVKNKAYFKRYQVKYRRRREGKTDYRARKALILQDKNKYNAQKLRFIVRKTNSQIICQIASAHIEGDKILSEAKSKELVRYGIPVGLKNYAAAYATGLLCARRFLKHLNLDSQFIGVEKVTAESVADDGDKEEEGERKPIKAFLDVGITRTTTGNRVFAALKGACDGGINIPHGNNRFPGSKNEFNPEQLRKNILGIHVAEYMASMKEEDMDKYKAHFNDYLKHKIDENNIENMYLTAHEKIRKNPEKKPKKATKKFIAKHQKPTKLNAKLRKQRVKEKVSEYILSLFM

SEQ ID NO: 4092 - protein, 295 aa, Styela clava
MGFVKVVKNKAYFKRYQVKYKRRRQGKTDYFARKRLVVQDKNKYNTPKYRMIVRFTNKDIVCQIAYARIEGDVVICAAYAHELPRYGVKVGLTNYAAAYCTGLLLSRRLLNKFGLDEIYEGQTEIDGDEFYVEDVDGKPGAFRAFLDVGLARTTTGAKVFGAMKGAADGGLDIPHSTKRFPGYDDESGDFSAEVHRSHIFGGHVSNYMKELEEEDEEAFKRQFSQYIKHGVTADTVEEMYTKAHAAIREDPTPKKKTDFAGKTKRWNRKKMTFSQRRDRVKQKKASFLRAKQQEG

SEQ ID NO: 4093 - protein, 271 aa, Branchiostoma lanceolatum
AYFKRFQVKFRRRREGVTDYYARKRLVIQEKNKYNTPKYRLIVRFTNKDIICQVAYARIEGDIIVSAAYAHELPRYGIKVGLTNYAAAYCTGLLLARRILKKFSLDTIYEGCTEIDGDEYNVEEVDGQPRPFRCFLDVGLVRTSTGARVFGAMKGAVDGGLDIPHSTKRFPGYDAESKDFNAEVHRGHIFGQHVAEYMRKLEEEDEEAYKSQFGSYIKLGITADSVEEMYTKAHAAIREDPEHKPKDKKEVTVKRWNRAKLSLAQRKDRIK

SEQ ID NO: 4094 - protein, 176 aa, Petromyzon marinus
  unsure (1)..(176): unsure at all Xaa locations
GFIKTVKSKAYFKRYQVKFKRRREGKTDYFARKRLIVQDKNKYNTPKYRLFVRLTNRDVICQVAYAKIEGDVMVCAAYSHELSKYGITVGLTNYAAAFTCYLDAGLTRTTTGNKVFGALKGAVDGGLSIPHSTKRFPGYDSESKEFNADVHRKHXLGVNVADYMRSLMENDXDAYK

SEQ ID NO: 4095 - protein, 296 aa, Myxine glutinosa
MGFVKVVKNRAYFRRYQVKFKRRREGKTDYYARKRLVIQDKNKYNTPKYRLIVRITNKDIICQLAYAKIEGDVIVCASYSHELPKYGIPVGLTNYAAAYCSGLLVARRVLRKFGIDRVYEGQPEVTGDEFNVESVERGPGAFTCYLDTGLARTTTGNKVFGVLKGAVDGGLSIPHSTRRFPGYDSESKEFNPDIHRQHIFGTNISNYMKQLLEDDEDLYKKQFSRYIKHAITPDMLESMYENAHARIRKNPIRKKKPKWTGKCKRWNRAKLSLAQRNDRVAQKKASYLRAKQQQAT

SEQ ID NO: 4096 - protein, 271 aa, Scyliorhinus canicula
AYFKRYQVKFRRRREGKTDYFARKRLVVQDKNKYNTPKYRMIVRFTNRDIICQIAYAKIEGDIIVCAAYGHELPKYGIKVGLTNYAASYCTGLLLARRLLRKFGLDTIYEGQVEVTGDEYNVESIDGKPSAFTCYLDAGLARTTTGNKVFGALKGAVDGGLSIPHSTKRFPGYDSESKEFNPEVHRKHIFGVNIAEYMRYLMEEDEDAFKKQFSQYVKHGVTADMIEDLFKKAHATIRENPIHEKKPKREVKKKRWNRPKMSLQQRQDRIA

SEQ ID NO: 4097 - protein, 297 aa, Danio rerio
MGFVKVVKNKSYFRRYQVKFRRRREGKTDYFARKRLVIQDKNKYNTPKYRMIIRFSNRDIVCQIAYAKIEGDAIVCAAYSHELPKYGIACGLTNYAAAYCTGLLCARRLLNKFGLDKVYEGQVEVTGDEFNVESIDGQPGAFSCYLDAGLTRTTTGNKVFGALKGAVDGGLSIPHSTKRFPGYDSESKEFNAEVHRKHILGLNVSEYMSLLMEEDEELYKKQFSRFIKNGVTPESIEEMYKKAHASIRENPVHERKPKREVKKKRWNRAKLTLAQRKDRVAQKKASFLRAQEAAADD

SEQ ID NO: 4098 - protein, 299 aa, Ictalurus punctatus
MGFVKVVKNKAYFKRYQVKFRRRREGKTDYFARKRLVIQDKNKYNTPKYRMIVRFSNRDIVCQIAYAKIEGDAIVCAAYSHELPRYGVSVGLTNYAAAYCTGLLLARRLLNKFNLDKVYEGQVEVTGEEFNVESVDGQPGAFTCYLDAGLTRTTTGNKVFGALKGAVDGGLSIPHSTKRFPGYDSESKEFSGEVHRKHILGLNVSEYMSSLIEEDEDAYKKQFSRFIKNGVTPDSVEEMYKKAHAAIRENPAHQKKPKKELKKKKRWNRAKLTLGQRKDRVAQKKASFLRAQEAAADDE

SEQ ID NO: 4099 - protein, 296 aa, Ictalurus punctatus
MGFVKVVKNKAYFKRYQVKFRRRREGKTDYFARKRLVIQDKNKYNTPKYRMIVRFSNRDIVCQIAYAKIEGDMIVCAAYSHELPKYGVTVGLTNYAAAYCTGLLLARQLLNKFGLDKVYEGQVEITGDEFNVESIDDKPSAFTCYLDAGLARTTTGNKVFGALKGAVDGGLSIPHSTKRFPGYDSESKEFNAEVHRKHILGLNVAEYMRLLIEEDEEAYKKQFSRFIKNGVTPDSIEEMYKKAHAAIRENPVHEKKPKREVKKKRWNRAKLTLAQRKDPVAQKKASFLRAQAAEED

SEQ ID NO: 4100 - protein, 226 aa, Ictalurus punctatus
MGFVKVVKNKAYFKRYQVKFRRRREGKTDYFARKRLVIQDKNKYNTPKYRMIVRFSNRDIVCQIAYAKIEGDAIVCAAYSHELPRYGVSVGLTNYAAAYCTGLLLARRLLNKFNLDKVYEGQVEVTGEEFNVESVDGQPGAFTCYLDAGLTRTTTGNKVFGALKGAVDGGLSSHTALSGSRATTPRAKSSAVRSTGSTSGLERVEYMSSLIEEDEDAYKKQFSRFI

SEQ ID NO: 4101 - protein, 296 aa, Xenopus laevis
MGFVKVVKNKAYFKRYQVKFRRRREGKTDYYARKRLVIQDKNKYNTPKYRMIVRVTNRDIICQIAYARIEGDMIVCAAYAHELPKYGVKVGLTNYAAAYCTGLLLARRLLNKFGLDKVYEGQVEVTGDEYNVESVDGEPGAFTCYLDAGLTRTTTGNKVFGALKGAVDGGLSIPHSTKRFPGYDSESKEFNPEVHRKHIFAQNIAEYMRLLMEEDEDAYKKQFSQYIKNGVAADQLEDIYKKAHAGIRENPVHEKKPKKEVKKKRWNRAKLSLEQKKDRVAQKKASFLRAQEKADS

SEQ ID NO: 4102 - protein, 296 aa, Xenopus laevis
MGFVKVVKNKAYFKRYQVKFRRRREGKTDYYARKRLVIQDKNKYNTPKYRMIVRVTNRDIICQIAYARIEGDMIVCAAYAHELPKYGIKVGLTNYAAAYCTGLLLARRLLNKFGLDKVYEGQVEVTGDEYNVESIDGEPGAFTCYLDAGLTRTTTGNKVFGALKGAVDGGLSIPHSTKRFPGYDSESKEFNPEVHRKHIFAQNVAEYMRLLMEEDEDAYKKQFSQYIKNGVTADQVEDLYKKAHAGIRENPVHEKKPKKEVKKKRWNRAKLSLEQKKDRVAQKKASFLRAQEKADS

SEQ ID NO: 4103 - protein, 296 aa, Xenopus laevis
MGFVKVVKNKAYFKRYQVKFRRRREGKTDYYARKRLVIQDKNKYNTPKYRMIVRVTNRDIICQIAYARIEGDMIVCAAYAHELPKYGVKVGLTNYAAAYCTGLLLARRLLNKFGLDKVYEGQVEVTGDEYNVESVDGEPGAFTCYLDAGLTRTTTGNKVFGALKGAVDGGLSIPHSTKRFPGYDSESKEFNAEVHRKHIFGLNIAEYMRLLIEEDEDAYKKQFSQYIKNGVAADQLEDIYKKAHAGIRENPVHEKKPKKEVKKKRWNRAKLSLEQKKDRVAQKKASFLRAQQKADS

SEQ ID NO: 4104 - protein, 296 aa, Xenopus laevis
MGFVKVVKNKAYFKRYQVKFRRRREGKTDYYARKRLVIQDKNKYNTPKYRMIVRVTNRDIICQIAYARIEGDMIVCAAYSHELPKYGIKVGLTNYASAYCTGLLLARRLLNKFGLDKVYEGQVEVTGDEYNVESIDGEPGAFTCYLDAGLTRTTTGNKVFGALKGAVDGGLSIPHSTKRFPGYDSESKEFNAEVHRKHIFAQNVAEYMRLLMEEDEDAYKKQFSQYIKNGVTADQVEDLYKKAHAGIRENPVHEKKPKKEVKKKRWNRAKLSLEQKKDRVAQKKASFLRAQEKADS

SEQ ID NO: 4105 - protein, 297 aa, Gallus gallus
MGFVKVVKNKAYFKRYQVKFRRRREGKTDYYARKRLVIQDKNKYNTPKYRMIVRVTNRDIICQIAYARIEGDMIVCAAYAHELPKYGVKVGLTNYAAAYCTGLLLARRLLNKFGLDKIYEGQVEVTGDEYNVESVDGKPGAFTCYLDAGLARTTTGNKVFGALKGAVDGGLSIPHSTKRFPGYDSESKEFNAEVHRKHIMGQNVADYMRYLMEEDEDAYKKQFSQYIKNNITPDGMEEMYKKAHAAIRDNPVHEKKPKREVKKKRVNSTKMSLAQKKDRVAQKKASFLRAQERAADS

SEQ ID NO: 4106 - protein, 297 aa, Homo sapiens [sequence omitted]

SEQ ID NO: 4107 - protein, 297 aa, Homo sapiens [sequence omitted]

SEQ ID NO: 4108 - protein, 178 aa, Homo sapiens [sequence omitted]

SEQ ID NO: 4109 - protein, 196 aa, Homo sapiens
MIVHVTKRRIICQIAYVRIEGDMIVCAAYAHKLPKYGVNVGLTNYAAAYCTGLLLARRLLNRFEVDKIYESQVEKTGDEYNVESIDGQPGAFTYYLDASLARTTTGNQVFGALKGTVDEGLSIPHSTKRFPGYDSESKEFNAEVHQKYIMGQKVADYMHYLMEGDEDPNKKQFFQYVKNSITPDMMEIYKKTHAAI

SEQ ID NO: 4110 - protein, 170 aa, Homo sapiens
MIVHVTTAYAHELPKYGVKVGLSNYAAAYCTGLLLARRLFNMFGMDKIYEAQVEVTGDEYNVESINGQPGAFTCYLDAGLARTTSGNKVFGALKGAVDGGLSIPHGTKRFPGYDSESKEFNAEVHWKHIMGQNVADYTCYLMQEDEDAYKKQFSQYIKNSITPDMMEEMC

SEQ ID NO: 4111 - protein, 965 aa, Homo sapiens
MWVRCALLVARDCGCAERVCPSVVRDRVCVVGAGKIHTKEKNIAHLLEMKYFKFNISLANAEFISQDSWLAWVGFVKVVKYKAYCKRYQVTFRRQCEGKTDYYAWKHLVVQDKNKSNTHKYRMIICVINTDTICEMAYAHIEWDMIVCAAYAHELPKYGVKVGLTNDAAACCTGLLLACRLLSRFGMDKIYKGQVEVTRDEYNVGSTDGQPGAFTCCLDAGLARTTTDNKVFGALRVLWMEVSLSLTVPNDSLSKGKPGPRKEQLPARGSLSRGVLGAFEVGSQGVEAAASPNGQYGPSWGLAAEGTEGARPQAPKRDLSYSRTDSHRDCSPVCHNMSLRGHLVPKKPSKEKQGQQKLDSKFYESWATALLTAIFPVLGILVLVESLLMNDPMRECILSTSGFSGPRARLLGVLALGGLPLHLGAPVIVMAWIVLALLFTRSRTRADPADVLPPGAFEKTRMHALPPPLGLTLDDGEVITTRLLTDASVQKVVVRISESSSCLHNGLLSGNGCEVHYRRARLFQDAQMPAQSPAYRGDLRAPVNALRIQNRSQLSPGGKIKWRQHRQLEGTHRKKSSTMFRKIHSIFNSSPQRKTAAESPFYEGASPAVKLIRSSSMYVVGDHGEKFSESLKKYKSTSSMDTSLYYLRQEEDRAWMYSRTQDCLQYLQELLALRKKYLSSFSDLKPHRTQGISSTSSKSSKGGKKTPVRSTPKEIKKATPKKYSQFSADVAEAIAFFDSIIAELDTERRPRAAEASLPNEDVDFDVATSSREHSLHSNWILRAPRRHSEDIAAHTVHTVDGQFRRSTEHRTVGTQRRLERHPIYLPKAVEGAFNTWKFKPKACKKDLGSSRQILFNFSGEDMEWDAELFALEPQLSPGEDYYETENPKGQWLLRERLWERTTGSLRSCPLSAQHEVFGRVENANCNTVNPLSTLPAGAVPVPNRPVASQGTGLRTLSELEFLCVG

SEQ ID NO: 4112 - protein, 336 aa, Homo sapiens
MRNILTVLTQETKTMLWPNCSVVRNRITASKRCLTFRGYPQRTGFMRTLQGEAMFLSPPPPPQPARHVGQEPALVQRWMLGFRDPDTPAKAKPVNIKNGQLLQLLVPDATKQWLMENTKDWPPWSRTGQSHSFSILAHVIDTEFMQDLDEEHLKKSREKIERQNLEPDGLSSLSCASEGEIIVCAAYAHELPKYDVKVGLTNYAAAYCTGLLLACSLLNRFGMDNIYDGQMEVTGDEYNVENIDGQPGAFTCYLDAGLARTITGNKVFGTLKGTVDRSLSIPHSTKRFPGYDSESNAEVHQKRIMGQNVADYMRYLMEQDEDAYKKQFSQYIKKTA

SEQ ID NO: 4113 - protein, 212 aa, Homo sapiens
MIVHVINRYIICQIAYGCIEGNVIVRAAHAHELPKYGVKVGLTNYAAAYCTCLLLACRLLNRFGMDKIYEGQVEATSDEYNVESIDGQPGAFTCYLGAGLARTTTGNKVFGTLKEAAVGGLSIPHSTKQFPDYDSESKGFNAENSITPDMMEETYKKAHAAIGENPVYEKKPKTEVMKKRQNHPRMSLAQKKDWVARKKASFLRAQEQDAES

SEQ ID NO: 4114 - protein, 101 aa, Homo sapiens
MGFVKVVKNKAYFKRYQVKFRRRREGKTDYYARKRLVIQDKNKYNTPKYRMIVRVTNRDIICQIAYARIEGDMIVCAAYAHELPKYGVKVGLTNYAAAKWR

SEQ ID NO: 4115 - protein, 230 aa, Homo sapiens
MGFVKVIKNKAYFKRYQVKFRRRREGKTDYYAQKHLDDSSWNKQSIICQIAYARTEGDMIVCTAYVHELPKYGVKVDLTNYAAAYCTGLLLDRRLLNRFDMDKIYEGQVEATGDDYNVVSIDGQPEVHRKHIMGHNVADYMCYLMEEDEDGYKKQFSQYMKNSVTPDMMEEMCKKAHAAIRESPVCEKKPKKEVKKKKWNRPKMSLAQKKDWVAQKKASFLRAQERAAES

SEQ ID NO: 4116 - protein, 145 aa, Homo sapiens
TTTGNKVFGALKGAVDGGLSIPHSTKRFPGYDSESKEFNAEVHRKHIMGQNVADYMRYLMEEDEDAYKKQFSQYIKNSVTPDMMEEMYKKAHAAIRENPVYEKKPKKEVKKKRWNRPKMSLAQKKDRVAQKKASFLRAQERAAES

SEQ ID NO: 4117 - protein, 146 aa, Homo sapiens
MDKIYEGQVEVTGNEYNVESIDGQPGAFTCYLVADLARTTTGNKVFGAPKGAVDGGLSNPHSSKRFLGLSIPHKVHRKHIMGQKFADDLRYLIEEDENASKKQFSQYTKNSVTPDLMEEMYKKAHAAVRENPVYEKKPKKEIKKKR

SEQ ID NO: 4118 - protein, 127 aa, Homo sapiens
MNYNVESIDGQPGAFTCYLDAGFARTTIGNKVFGALKGAVDGGLSIPHSKEFNEEVHQKYIIGQNVADWMHHLMEENKDAYKKELSQYIKNSVTTDVVEEMWEIVGPKHVSPLVKVSSTHSSYCGYI

SEQ ID NO: 4119 - protein, 455 aa, Homo sapiens
MAFAKAAHCCACRVTWVPLDICTLLQLHGRHTSPCGSSFQRLPVLHGRTVDFADRKRLIAPSFHTICLTWTHSKHYGFAGRMVFLLQKFCNLLIDRAPSLISSKRHSPPYWSAKSWVQCELTIGPLSILFCGVASGGSSYATIICTGFRKEPPGWALWWRGGGPTFTDAVRHASACGPVETSGTSLRTRLKEDAKGLLKDISETTKNLLLYIRTSCSGCHRKPPFLPHDPEPHPWIKVDEMTWGKSSGLRSSTAKWRCCVKLKKKMTEALGLAYGNLTGRMIVHVTPNRVIICQIAYACMQGDMNVRAPYAHKEGQEEVTGDEYDVESIDGQPDAFTYYLDAGLARTTTDSKVFGAMEAVDGGLSIPQSTKQFPGYDSESKEFNAQETVLTIHKELHNSRLGGGAHAAVGETSLSEKPKKEAKKKRWDLSPRLSPAQKNDQVAQKQAGFLRAQEL

SEQ ID NO: 4120 - protein, 247 aa, Equus caballus
MIVRVTNRDIICQIAYARIEGDMIVCAAYAHELPKYGVKVGLTNYAAAYCTGLLLARRLLNRFGMDKIYEGQVEVTGDEYNVESIDGQPGAFTCYLDAGLARTTTGNKVFGALKGAVDGGLSIPHSTKRFPGYDSESKEFNAEVHRKHIMGQNVADYMRYLMEEDEDAYKKQFSQYIKNNVTPDMMEEMYKKAHSAIRENPVYEKKPKKEVKKKRWNRPKMSLAQKKDRVAQKKASFLRAQERAAES

SEQ ID NO: 4121 - protein, 125 aa, Sus scrofa
  unsure (1)..(125): unsure at all Xaa locations
MGFVKVVKNKAYFKRYQVKFRRRREGKTDYYARKRLVIQDKNKYNTPKYRMIVRVTNRDIICQIAYARIEGDMIVCAAYAHELPKYGVKVGLTNYAAAYCTGLLLARRLLNRFGMXKIYGGQVEV

SEQ ID NO: 4122 - protein, 46 aa, Oryctolagus cuniculus
GFVKVVKNKAYFKRYQVKFRRRREGKTDYYARKRLVIQDKNKYNTP

SEQ ID NO: 4123 - protein, 402 aa, Streptomyces coelicolor A3(2)
MSPLTAADLGAPLAAALAAATEDRLVYDLAGIERRHDTLRNELPGVHVRFAMKACPVDEVLAALAGRGAGADAASPGEVEQALRAGVPAGRVHYGNTVKSDRNIAEAHRLGVRTFATDSLQDVAALAVHAPGARVFCRVATGGAGALWGLSNKFGCPPGDAVRVLVAARDAGLVPAGLSVHVGSQQMTSEAWHGAVDDLGDVLRALGRHGIRVDHVNLGGGLPALGYRDRHGAPLDPPLDKIFAVIREGMDELRRIHGGHLDFVVEPGRHLVADHGAIRAHVVRLTERRAADGERQHWLYLSCGKFNGLYEMDALQYRLVFPGHPDGPCVPAVVAGPTCDSDDAYSHEEGLVPVPAALASGDPVWVLSCGAYATSYTTRGFNGFAPLPYAFAGRPERTGADD

SEQ ID NO: 4124 - protein, 463 aa, Streptomyces coelicolor A3(2)
MSRSAHPAGPRHADVLPEGHYTAPADDLNALDPKVWARTVGRDADGVVTVGGIPVTQLAEEYGTPAYLLDEADFRERARAWRTAFGDDADVFYAGKAFLSRAVVRWLDEEGLNLDVCSGGELATALSAGMPAERIAFHGNNKSPEEIERAVRAGVGRIVLDSFQEIVRVAHIAQSLGKRQRVQIRITVGVEAHTHEFIATAHEDQKFGIPLAGGQAAEAVRRALKLDGLEVIGIHSHIGSQIFDMSGFEVAAHRVVGLLKDIRDEHGVELPEIDLGGGLGIAYTSDDDPREPHEIAKALTEIVTRECEAARLATPRISVEPGRAIVGPTAFTLYEVGTVKPLEGLRTYVSVDGGMSDNIRTALYDAEYSVALASRTSDAEPMLVRVVGKHCESGDIVVKDAFLPGDLAPGDLIAVPATGAYCRSMASNYNHALRPPVVAVRDGAARVVVRRETEEDLLRLDVG

SEQ ID NO: 4125 - protein, 455 aa, Cricetulus griseus
MNSFNKDEFDCHILDEGFTAKDILDQKINEVSSDDKDAFYVADLGDVLKKHLRWLKALPVTPFYAVKCNDSRALVNTLAAITVDCASKTEIQLVQGLGVPPERVIYANPCKQVSQIKYAASNGVQMMTFDSEIELMKVARAHPKVTKLVLRIATDDSKAVCRLSVKFGATLRTSRLLLERAKELNIDVIGVSFHVGSGCTDPETFVQALSDARCVFDMGTEVGFSMYLLDIGGGFPGSEDTKLKFEEITSVINPALDKYFPPDSGVRVIAEPGRYYVASAFTLAVNIIAKKIVSKGSDDEDESSEQTFMYYVNDGVYGSFNCILYDHAHVKPLLPKRPKPDEKYYSSSIWGPTCDGLDRIVERCNLPEMHVGDWMLFENMGAYTVAAASTFNGFQRPSIYYVMSRPMWQLMKQIQNHGFPPEVEEQDVGTLPISCAQESGMDRHPAACASASINV

SEQ ID NO: 4126 - protein, 293 aa, Cricetus cricetus
LSVKFGATLRTSRLLLERAKELNIDVIGVSFHVGSGCTDPETFVQALSDARCVFDMGTEVGFSMYLLDIGGGFPGSEDTKLKFEEITSVINPALDKYFPPDSGVRVIAEPGRYYVASAFTLAVNIIAKKIVSKGSDDEDESSEQTFMYYVNDGVYGSFNCILYDHAHVKPLLPKRPKPDEKYYSSSIWGPTCDGLDRIVERCNLPEMHVGDWMLFENMGAYTVAAASTFNGFQRPSIYYVMSRPMWQLMKQIQNHGFPPEVEEQDVGTLPISCAQESGMDRHPAACASASINV

SEQ ID NO: 4127 - protein, 424 aa, Mus musculus
MSSFTKDEFDCHILDEGFTAKDILDQKINEVSSSDDKDAFYVADLGDILKKHLRWLKALPRVTPFYAVKCNDSRAIVSTLAAIGTGFDCASKTEIQLVQGLGVPAERVIYANPCKQVSQIKYAASNGVQMMTFDSEIELMKVARAHPKAKLVLRIATDDSKAVCRLSVKFGATLKTSRLLLERAKELNIDVIGVSFHVGSGCTDPDTFVQAVSDARCVFDMATEVGFSMHLLDIGGGFPGSEDTKLKFEEITSVINPALDKYFPSDSGVRIIAEPGRYYVASAFTLAVNIIAKKTVWKEQPGSDDEDESNEQTFMYYVNDGVYGSFNCILYDHAHVKALLQKRPKPDEKYYSSSIWGPTCDGLDRIVERCNLPEMHVGDWMLFENMGAYTVAAASTFNGFQRPNIYYVMSRPMWQLMKQIQSHG

SEQ ID NO: 4128 - protein, 456 aa, Mus musculus
MSSFTKDEFDCHILDEGFTAKDILDQKINEVSSSDDKDAFYVADLGDILKKHLRWLKALPRVTPFYAVKCNDSRAIVSTLAAIGTGFDCASKTEIQLVQGLGVPAERVIYANPCKQVSQIKYAASNGVQMMTFDSEIELMKVARAHPKAKLVLRIATDDSKAVCRLSVKFGATLKTSRLLLERAKELNIDVIGVSFHVGSGCTDPETFVQAVSDARCVFDMATEVGFSMHLLDIGGGFPGSEDTKLKFEEITSVINPALDKYFPSDSGVRIIAEPGRYYVASAFTLAVNIIAKKTVWKEQPGSDDEDESNEQTFMYYVNDGVYGSFNCILYDHAHVKALLQKRPKPDEKYYSSSIWGPTCDGLDRIVERCNLPEMHVGDWMLFENMGAYTVAAASTFNGFQRPNIYYVMSRPMWQLMKQIQSHGFPPEVEEQDDGTLPMSCAQESGMDRHPAACFC

SEQ ID NO: 4129 - protein, 461 aa, Mus musculus
MSSFTKDEFDCHILDEGFTAKDILDQKINEVSSSDDKDAFYVADLGDILKKHLRWLKALPRVTPFYAVKCNDSRAIVSTLAAIGTGFDCASKTEIQLVQGLGVPAERVIYANPCKQVSQIKYAASNGVQMMTFDSEIELMKVARAHPKAKLVLRIATDDSKAVCRLSVKFGATLKTSRLLLERAKELNIDVIGVSFHVGSGCTDPDTFVQAVSDARCVFDMATEVGFSMHLLDIGGGFPGSEDTKLKFEEITSVINPALDKYFPSDSGVRIIAEPGRYYVASAFTLAVNIIAKKTVWKEQPGSDDEDESNEQTFMYYVNDGVYGSFNCILYDHAHVKALLQKRPKPDEKYYSSSIWGPTCDGLDRIVERCNLPEMHVGDWMLFENMGAYTVAAASTFNGFQRPNIYYVMSRPMWQLMKQIQSHGFPPEVEEQDDGTLPMSCAQESGMDRHPAACASARINV

SEQ ID NO: 4130 - protein, 355 aa, Mus musculus
MKSLPTDDKDAFYVADLGDILKKQQRWLKALPRVTPVYAVKRNDSRAIVSTLAAIGTGFDCASKTEIQLVQGLGVPPERIIYANPCKQVSQIKYAASNGVQMMTFDSEIELMKVARAHPKAKLVLRIATDDSKAVCRLSVKFGATLKTSRLLLERAKELNIDVIGVSFHVGSGCTDPETFVQAVLDARCVFDMATEVGFSMYLLDIGGGFPGSEDTKLKFEEITSVINPALDKYFPSDSGVRIIAETGRYYVASAFMLAVNIIVKKTVWKEQPGSDDEDESNEQTFMYYVNDGVYGSFNCILYDHAHVKALLQKRPKPDEKYYSPSIWGQHVMALIGSWSAVTCLKCMWVIRMLV

SEQ ID NO: 4131 - protein, 306 aa, Mus musculus
MSSFTKDEFDCHILDEGFTAKDILDQKINEVSSSDDKDAFYVADLGDILKKQQRWLKALPRFTPFYAVKCNDSRAIVSTLAAIGTGFDCASKTEKQLVQGPGVPPERIIYANPCKQVSQIKYAASNGVQMMTFDSEIELMKVARAHPKAKLVLRIATDDSKAVCRLSVKFGATLKTSRLLLERAKELNIDVIGVSFHVGSGCTDPDTFVQAVSDARCVFDMATEVGFSMHLLDIGGGFPRSEDTKLKFEEITSVITPALDKYFPSDSGVRIRAEPGKYYVASAFTLAVNIIAKKKKKKHVEGAARL

SEQ ID NO: 4132 - protein, 459 aa, Mus musculus
MAGYLSESDFVMVEEGFSTRDLLEELTLGASQATSGKVAAFFVADLGAVVRKHFCFLKHLPRVRPFYAVGCNSSLGVLKVLAELGLGFSCANKAEMELVQHIGVPASKIICANPCKQVAQIKYAAKHGVRLLSFDNEVELAKVVKSHPSAKMVLCIATQDSHSLNHLSLRFGASLKSCRHLLENAKKSHVEVVGVSFHIGSGCPDPQAYAQSIADARLVFQMGEELGHTMNILDLGGGFPGLEGAKVRFEEMASVINSALDLYFPEGCGVDILAELGRYYVTSAFTVAVSIVAKREVLDQASREEQTGAAPKSIVYYLDEGVYGVFNSVLFDNTCPTPALQKKPSADQPLYSSSLWGPAVEGCDCVAEGLWLPQLQVGDWLVFDNMGAYTVDTKSLLGGTQARRVTYAMSRLAWEALRGQLLPAEEDQDAEGVCKPLSCGWEITDTLCVGPVFTPASIM

SEQ ID NO: 4133 - protein, 448 aa, Mus musculus
MKGFIDDANYSVGLLDEGTNLGNVIDNYVYEHTLTEKNAFFVGDLGKIVKKHSQWQTVVAQIKPFYTVKCNSTPAVLEILAALGTGFACSSKNEMALVQELGVSPENIIFTSPCKQVSQIKYAAKVGVNIMTCDNEIELKKIARNHPNAKVLLHIATEDNIGGEDGNMKFGTTLKNCRHLLECAKELDVQIIGVKFHVSSACKEYQVYVHALSDARCVFDMAGEFGFTMNMLDIGGGFTGTEIQLEEVNHVISPLLDIYFPEGSGIQIISEPGSYYVSSAFTLAVNIIAKKVVENDKFSSGVEKNGSDEPAFVYYMNDGVYGSFASKLSEDLNTIPEVHKKYKEDEPLFTSSLWGPSCDELDQIVESCLLPELNVGDWLIFDNMGADSFHEPSAFNDFQRPAIYFMMSFSDWYEMQDAGITSDAMMKNFFFAPSCIQLSQEDSFSTEA

SEQ ID NO: 4134 - protein, 448 aa, Mus musculus
MKGFIDDANYSVGLLDEGTNLGNVIDNYVYEHTLTGKNAFFVGDLGKIVKKHSQWQTVVAQIKPFYTVKCNSTPAVLEILAALGTGFACSSKNEMALVQELGVSPENIIFTSPCKQVSQIKYAAKVGVNIMTCDNEIELKKIARNHPNAKVLLHIATEDNIGGEDGNMKFGTTLKNCRHLLECAKELDVQIIGVKFHVSSACKEYQVYVHALSDARCVFDMAGEFGFTMNMLDIGGGFTGTEIQLEEVNHVISPLLDIYFPEGSGIQIISEPGSYYVSSAFTLAVNIIAKKVVENDKFSSGVEKNGSDEPAFVYYMNDGVYGSFASKLSEDLNTIPEVHKKYKEDEPLFTSSLWGPSCDELDQIVESCLLPELNVGDWLIFDNMGADSFHEPSAFNDFQRPAIYFMMSFSDWYEMQDAGITSDAMMKNFFFAPSCIQLSQEDSFSTEA

SEQ ID NO: 4135 - protein, 448 aa, Mus musculus
MKGFIDDANYSVGLLDEGTNLGNVIDNYVYEHTLTGKNAFFVGDLGKIVKKHSQWQTVVAQIKPFYTVKCNSTPAVLEILAALGTGFACSSKNEMALVQELGVSPENIIFTSPCKQVSQIKYAAKVGVNIMTCDNEIELKKIARNHPNAKVLLHIATEDNIGGEDGNMKFGTTLKNCRHLLECAKELDVQIIGVKFHVSSACKEYQVYVHALSDARCVFDMAGEFGFTMNMLDIGGGFTGTEIQLEEVNHVISPLLDIYFPEGSGIQIISEPGSYYVSSAFTLAVNIIAKKVVENDKFSSGVEKNGSDEPAFVYYMNDGVYGSFASKLSEDLNTIPEVHKKYKEDEPLFTSSLWGPSCDELDQIVEGCLLPELNVGDWLIFDNMGADSFHEPSAFNDFQRPAIYFMMSFSDWYEMQDAGITSDAMMKNFFFAPSCIQLSQEDSFSTEA

SEQ ID NO: 4136 - protein, 191 aa, Mus musculus
MKALLLRTFWNKKINEVSSSDDKDAFYVADLGDILKKHLRWLKALPRVTPVYAVKCNDSRAIVSTLAAFGIGFDCASKTEIQLVQGPGVPPETIIYANPCKQVSQIKYAASSGVQMMTFDSEIELMKVARAHPKAKLVLRIATDDSKAVCRLSVKFGATLKTSRLLLERAKELNIDVIGVSFHVGSGCTDP

SEQ ID NO: 4137 - protein, 284 aa, Mus musculus
WLLLERAKELNIDVIGVSFHVGSGCTDPETFVQAVSDARCVFDMATEVGFSMHLLDIGGGFPGSEDTKLKFEEITSVINPALDKYFPSDSGVRIIAEPGRYYVASAFTLAVNIIAKKTVWKEQPGSDDEDESNEQTFMYYVNDGVYGSFNCILYDHAHVKALLQKRPKPDEKYYSSSIWGPTCDGLDRIVERCNLPEMHVGDWMLFENMGAYTVAAASTFNGFQRPNIYYVMSRPMWQLMKQIQSHGFPPEVEEQDDGTLPMSCAQESGMDRHPAACASARINV

SEQ ID NO: 4138 - protein, 356 aa, Mus musculus
MSSFTKDEFDCHILDEGAKDILDQKINEVFSSDDKDAFYVADLGDILKKQQRWLKALPRVTPFYAIKCNDSRAIDKTEKQLVQGPGVSPERIIYANPCKQVSQIEYAASNRVQMTFDSEIELMKVARAHPKAKLVLHIATDDPKAVCRLSVKFGATLKTSRLHLERAKELNIDVIGVSFHVGSGCTDPETFVQAVSDARCVFDMGTEVGFSMYLLDIGGGFPGSEDTKLKSEEITSVINPALDKYFPSDSGGPTCDGLDRIVELCNLPEMHVGDWMPFENMGAYTIAAASTFNGFQRPNICYVMSRPMWQLMKQIQSHGFPLEVEEQDDGTLPMSCAQESGMDRHPAAYASARINV

SEQ ID NO: 4139 - protein, 234 aa, Mus musculus
MSSYTKEEFDCCIIDVKCKDNRAIVNTLAAIGTGFDCASKTEIQLEQGLLVPPERIAYAHFCKQASQIKYAASNGVQMMTFDNDSKAVCRLGVKSGATLKTSRLLLKWAKELNIDVIDVSFHVCSGVSDARCVFDLGTKVSFSMYLLDIGGSFRRSEDTKLKFEEITSVINPALDKRQTSSTMWQLMKQIQIHGFLREEQDVDSLPVSCTQESGMDHHPAACVSASINVYMPFL

SEQ ID NO: 4140 - protein, 249 aa, Mus musculus
MSSFTKEEFDCCILDEGLSQIKYAASNGVQMMTFDSEIELMKVLRAHRKTKLVLWIVTDDSKASGTTLKTSRILLKWAKELNTDVIGVSFHVCSGCIDPETFMQAVSDARCVFDMGREVGFSMYLLDIGCGFSGSKNTKLNIEEVISVINPALEKFFPSNSVERIIAEPGRYDTQFSHSQSTSLAPTQKGQTSWPIWQLMKQIQSHGFLREEEEQDVGTLPVSCAQERGMDRHPAACVSVSINVFMPFL

SEQ ID NO: 4141 - protein, 142 aa, Mus musculus
DGVYGSFNCILYDHAHVKALLQKRPKPDEKHYSSSIWGPTCDGLDRIVERCNLPEMHVGDWMLFENMGAYTVAAASTFNGFQRPNIYYVMSRPMWQLMKQIQSHGFPPEVEEQDDGTLPMSCAQESGMDRHPAACASARINV

SEQ ID NO: 4142 - protein, 176 aa, Mus musculus
MLAVNIIAKKNVWKEQPGSDNEDESNEQTFMYYVNDGVYGSFNRILYDHAHVKALVQKRPKPDEKYYSSSIWGPTSDGLDQIVESCNLPEMHVGDWMLIENMGAYTVAASTFNGFQRPNIYYVMSRPMWQLMKQIQSHGFPPEVEEQDDGTLPMPCAQESGMDRHPAACASARINV

SEQ ID NO: 4143 - protein, 461 aa, Mus pahari
MSSFTKEEFDCHILDEGFTAKDILDQKINEVSSSDDKDAFYVADLGDILKKHLRWLKALPRVTPFYAVKCNDSRAIVSTLAATGTGFDCASKTEIQLVQGLGVPPERIIYANPCKQVSQIKYAASSGVQMMTFDSEIELMKVARAHPKAKLVLRIATDDSKAVCRLSVKFGATLKTSRLLLERAKELNIDVIGVSFHVGSGCTDPETFVQAVSDARCVFDMGTEVGFSMYLLDIGGGFPGSEDTKLKFEEITSVINPALDKYFPSDSGVRIIAEPGRYYVASAFTLAVNIIAKKTVWKEQPGSDDEDESNEQTFMYYVNDGVYGSFNCILYDHAHVKALLQKRPKPDEKYYSSSIWGPTCDGLDRIVERCNLPEMHVGDWMLFENMGAYTVAAASTFNGFQRPNIYYVMSRPMWQLMKRIQSHGFPPEVEEQDDGTLPMSCAQESGMDHHSAACASARINV

SEQ ID NO: 4144 - protein, 461 aa, Rattus norvegicus
MGSFTKEEFDCHILDEGFTAKDILDQKINEVSSSDDKDAFYVADLGDVLKKHLRWLKALPRVTPFYAVKCNDSRAIVSTLAAIGTGFDCASKTEIQLVQGLGVPPERIIYANPCKQVSQIKYAASNGVQMMTFDSEIELMKVARAHPKAKLVLRIATDDSKAVCRLSVKFGATLKTSRLLLERAKELNIDVIGVSFHVGSGCTDPETFVQAVSDARCVFDMGTEVGFSMYLLDIGGGFPGSEDTKLKFEEITSVINPALDKYFPSDSGVRIIAEPGRYYVASAFTLAVNIIAKKTVWKEQTGSDDEDESNEQTLMYYVNDGVYGSFNCILYDHAHVKALLQKRPKPDEKYYSSSIWGPTCDGLDRIVERCSLPEMHVGDWMLFENMGAYTVAAASTFNGFQRPNIYYVMSRSMWQLMKQIQSHGFPPEVEEQDVGTLPMSCAQESGMDRHPAACASASINV

SEQ ID NO: 4145 - protein, 461 aa, Rattus norvegicus
MGSFTKEEFDCHILDEGFTAKDILDQKINEVSSCDDKDAFYVADLGDVLKKHLRWLKALPRVTPFYAVKCNDSRAIVSTLAAIGTGFDCASKTEIQLVQGLGVPPERIIYANPCKQVSQIKYAASNGVQMMTFDSEIELMKVARAHPKAKLVLRIATDDSKAVCRLSVKFGATLKTSRLLLERAKELNIDVIGVSFHVGSGCTDPETFVQAVSDARCVFDMGTEVGFSMYLLDIGGGFPGSEDTKLKFEEITSVINPALDKYFPSDSGVRIIAEPGRYYVASAFTLAVNIIAKKTVWKEQTGSDDEDESNEQTLMYYVNDGVYGSFNCILYDHAHVKALLQKRPKPDEKYYSSSIWGPTCDGLDRIVERCSLPEMHVGDWMLFENMGAYTVAAASTFNGFQRPNIYYVMSRSMWQLMKQIQSHGFPPEVEEQDVGTLPMSCAQESGMDRHPAACASASINV

SEQ ID NO: 4146 - protein, 448 aa, Rattus norvegicus
MKGFIDDANYSVGLLDEGTNLGNVIDNYVYEHTLTGKNAFFVGDLGKIVKKHSQWQNVVAQIKPFYMVKCNSTPAVLEILAALGTGFACSTKNEMALVQELGVSPENIIYTSPCKQASQIKYAAKVGVNIMTCDNEVELKKIARNHPNAKVLLHIATEDNIGGEDGNMKFGTTLKNCRHLLECAKELDVQIIGVKFHISSACKEYQVYVHALSDARCVFDMAGEFGFTMNMLDIGGGFTGTEIQLEEVNHVISPLLDIYFPEGSGIQIISEPGSYYVSSAFTLAVNIIAKKVVENDKLSSGVEKNGSDEPAFVYYMNDGVYGSFASKLSEDLNTVPEVHKKYKEDEPLFTSSLWGPSCDELDQIVESCLLPELSVGDWLIFDNMGADSLHGPSAFSDTQRPAIYFMMSLSDWYEMQDAGITSDAMMKNFFFAPSCIQLSQEDNFSTEA

SEQ ID NO: 4147 - protein, 527 aa, Rattus norvegicus
MTTPSEGRREPLGVTESLWPSEPITLGPETSARQLVLKKIQDLSISGHQDPFMVADLDVLASRHQTFLQALPRVWPFYAVKCNNRPSLLLVLAALGTGFDCASQGELEQVLGLGVAPSRIIFANPCKAVSHIQYAARCGVQLLTFDSEEELTKLARHHPGARLILRIQTLGGRSTFPLHTKFGARLLACGRLLQVARELGLAVVGASGPVSSWHWLAQVWKPVGGWVFLGVSPLTLTSVFTCVSSTPMATLSFHVGSDCHTPQSYRQAIADCHRVFEMGCKAGHQMSLLDLGGGFPGIEGSEAKFEEMARVVNAALAQYFPEGTGVEVIAEPGRFYAESVCTAAVNIIAKKASLEPGGHRKLAYYLNEGHYGAFRIFLRDPVPRIPIVVKELPSDPHLFPCTLYGPTCDAFDRLFSTEVQLPELDVGDWLVFPDMGAYRSTMSSTFNGFPITTVYDAMSPQLSSGTKGISSRQRREGRSVVSMAAEVRRDEVGKRELRGCQWALVHVSKKPCGDLETFLDPLYLLRV

SEQ ID NO: 4148 - protein, 269 aa, Rattus norvegicus
MTFDSEIELTKVTRAHPEAKLVLRIATDGSKAVCHLRVKFGATLKTSRLLMGQAKELNIDVIGICFHVDNRCTDPETFPQAVSDACCVFVGVSIYLLDNGDPGVRIIAEPGRYYFMSAFTLAVNIIAKSTLWQERPSSDNEDESMSKPSCIREKYEKYYSSSIWGPTCDGLHQIIEPCNLPEMHVGDWMLFENMGAYTVAAASIFNGFQRPNIYYVMSRWQLMKQIQSQGFPTEVEEQDVGTLPMLVPRRMFVSVPIRRKNSPKDSGKI

SEQ ID NO: 4149 - protein, 335 aa, Rattus norvegicus
MASEQKTKLSTNLMRMKFMQRGLDSENQKQLEEEEQKMIRDEHWYLDSPGLKEESFIIEEQSFSLCEDLLYRRMPFRGFNPEVEKLMLRMNSKNRAAAAEVEETIEGHVSGEEMARRYETLDLTVQARLKYNWCTGLGWLQSITYANPCKQVSQIKYATSNGVHIRTFDSEIELMQVNRAQTKAKLVLQLDIDTSKAFCPLNVKFGVSLKTSRLLMEKAKQIKSDIIGISFHAGSGCTAPETFLQALTDASCVVPMGTKVVVSMYLLDIGGGSPVSEDTTCNFKHYKILRTWEIQSHGFPPEVDEQDVGSFPISCLQESRKDPHPTACASATLNV

SEQ ID NO: 4150 - protein, 238 aa, Rattus norvegicus
MPKDKNPDNPRAAELFHQLSQALEDLTVQARLKYNWCTGLGWLQSITYANPCKQVSQIKYATSNGVHIRTCDSEIELMQVTRAQTKAKLVLQLDIDTSKAFCPLNVKFGISLKTSRLLMEKAKEIKSDILGLSFHAGSGCTSRETFLQALTDASCVVAMGTKVVVSMYLLDIGGGSPVSEDTTCNFKHYEILRTWEIQSHGFPPEVDEQDVGSFPISCLQESRKDPHPTACASATLNV

SEQ ID NO: 4151 - protein, 186 aa, Rattus norvegicus
MGEAKEKLAAYQLPSPFACIPAILDTGSDDEEESNEQTLMYYVNDGVYGSFNCILYDHAHVKALLQKRPKPDEKYYSSSIWRPTCDGLDRIVERCSLPEMHVGDWMLFENMGAYTVAAASTFNGFQRPNIYYVMSRSMWQLMKQIQSHGFPPEVEEQDVGTLPMSCAQERGMDRHPAACASASINV

SEQ ID NO: 4152 - protein, 372 aa, Paramecium bursaria Chlorella virus 1
MNSVVNNILKAHPHQTKSFYVSSPKIVEDLIDQWTILFPRVTPHYAVKCNNDEVLLKTMCDKNVNFDCASSSEIKKVIQIGVSPSRIIFAHTMKTIDDLIFAKDQGVDIATFDSSFELDKIHTYHPNCKMILRIRCDDPNATVQLGNKFGANEDEIRHLLEYAKQLDIEVIGISFHVGSGSRNPEAYYRAIKSSKEAFNEAISVGHKPYILDIGGGLHADIDEGELSTYMSDYINDAIKDFFPEDTVTIVAEPGRFFAEHYSVLATQVIGKRVRDGLYEYFFNESTYGGFSNVIFEKSVPTPQLLRDVPDDEEYVPSVLYGCTCDGVDVINHNVALPELHIGDWVYFPSWGAYTNVLTTSFNGFGEYDVYYI

SEQ ID NO: 4153 - protein, 404 aa, Rhodobacter sphaeroides
MPPNFPPCNAGRGLASCWPKGTPMGLSKTIWTNPAEYLRALSPEAPVLFFSPSTLQATARRFIDGFPGMVTYAVKSNPEEVVIENLAAAGIRGYDVASPHEIRMIRRIAPDAALHYNNPVRSRSEIGVGVEMGVKSWSVDSASELAKLIELVPAEGCEIAVRFKLAVSGAAYNFGAKFGATVELAVELLRRVAEAGFIPSMTFHPGTQCTDPAAWETYIRTAAEIARDAGVTIARLNVGGGFPSHRLNGVEPELEAIFHLIDRVTDEAFGADRPLLVCEPGRGICADAFTLAARIKAVRDDAHVFLNDGVYGSLTELPMIGVIDRVAVLTPEGRRRDGETRDRIIFGPTCDSVDRLPGELPLAADVEEGDFLVFQGMGAYSAATNTRFNGFGELSMATVLSLKL

SEQ ID NO: 4154 - protein, 458 aa, Rhodobacter sphaeroides
MARAPIPRPAPRPGPRSSAPAGASAPSRAPDLQADQTMDHFLYRNGSLHAEEVPLSDIAATVGTPFYCYSAATLERHYRLFTEALTPLPHLVCFAIKSLSNLAVLKLLGDLGAGMDVVSAGEYLRARAAGVPGDRIVFSGVGKTREEMRIALEGGIRQFNVESEPEMRALSEVASSMGLRAPIAVRVNPDVDARTHEKIATGKKENKFGIPIERASEVYAEAAALPGLEVMGIDVHIGSQLTELEPFEQAYLKVAELTGRLRAEGHEIRRLDLGGGLGIPYTRSNEAPPLPTDYGALIKRTVGHLGCEIEIEPGRLISGNSGVLVSRVIYVKNGEGRDFLILDAAMNDLVRPSMYGAHHDIVPLAEAAPGTESQPYDVVGPVCETGDTFAKARALPPMAEGDLVAFRSAGAYGAVMASEYNSRPLVPEVLVRGDHFAVIRARPTFDEMLGRDSIPEWL

SEQ ID NO: 4155 - protein, 380 aa, Rhodopseudomonas palustris
MTERIREFLRDRRAKGLDVEPCLVVDLEVVRDNFMHFAKALPDSRVFYAIKANPAPEVLSLLASLGSCFDCASVQEIQMALAAGATPDRISFGNTIKKERDIARAYELGIRLFSVDCTPEVEKVARAAPGSKVFCRILYDCAGAEWPLSRKFGCDPEMAVDVLDNAKRLGLEAYGISFHVGSQQRKVKAWDRALAMAAQVFRDCAERGISLSMVNMGGGFPTKYLKEVPPVVQYGRSIFRALRKHFGNQIPETIIEPGRGMVGNAGVIETEVVLISKKSDEDDVRWVYLDIGKFGGLAETMDESIRYAIKSRHDGAEMTPCVLAGPTCDSADVLYEKMPYPLPVTLEIGDKLLIEGTGAYTSTYSSVAFNGFPPLATYHI

SEQ ID NO: 4156 - protein, 421 aa, Rhodopseudomonas palustris
MRHFDYRDGVLHAEGVSLASIAQDVGTPFYCYSSATLERHYRVFTEAFAGLDALVCYAMKANSNQSVLRTLAKLGAGADVVSGGELQRALAAGIPPSKIVFSGVGKTEAELRAALDHDIKCLNVESEPELEQLSRIAVETGRTARISLRVNPDVDSGTHAKISTGKSENKFGIPIRHAREVYARAAKLPGIQVTGVDVHIGSQIIDLAPMEAAFRKVAEFIHVLRGDGHTVNHVDFGGGLGIPYYEDRDAPPEPFAYAEMVKRVTHNLGCTLLFEPGRMIVGNAGILVAKVIYVKHGDGKTFVIIDAAMNDLIRPTLYEAYHEILPVAAPAPGVATMVADVVGPVCETGDYLALDRKLPELKAGDLIAIMTAGAYGAVQACTYNTRALVPEVLVKDDQVAVVRPRIEVEQLIAMDKPAPWL

SEQ ID NO: 4157 - protein, 425 aa, Rhodospirillum rubrum
MEKLMHNQAIRANQPEEPPDAFIAAESRPPGGAPTLALVAEPPRWVATGITEKMAAFLAEEPETPCLVVDLDVVEGNYRALRGALPQAEVYYAVKSNPAPPLVARLIALGSSFDTASLPEIDLCLGLGADPAKLSFGNTIKKSKDIAAAYERGVRLFAFDAEEELEKLAEHAPGSQVFCRLFVDNVGAEWPLSRKFGCSVAMAGDLLIKAQALGLEAHGVSFHVGSQQKDLGQWDVALEKAAELFRDLAAVGITLKMVNLGGGLPTSYGNRLPYGVDEYGAHVLGAVDRLFDGPRPRLIVEPGRYMGGNAGVLETEVVLVSRKDAADDRRWVYIDAGRFNGLAETEGEAIRYPIISDKDDGETGPVIIAGPTCDSVDILYDKAGYTLPLSLKAGDRLRLLSTGAYTTSYASVGFNGFLPLKAHYL

SEQ ID NO: 4158 - protein, 445 aa, Thermoanaerobacter tengcongensis
MLHGTMRINSKGHLEIGGCDTVALAKKFGTPLYVIDEELLRQNCRAFYNGFKRDYPGNEVIYASKAFMTMAICKIIEEENLGLDVVSGGELYTALKAGFPPEKIYFHGNNKSREELIMALENDIGKIIVDNWHELNMLNELARKMNKVPNIYIRVSPGIEAHTHQYVKTGQIDSKFGFPLFNGDAMRAIEYALTLKNVNLVGLHSHIGSQIFDSYSYKAEIEIMMNFIKLIKEFLGWEVEELDLGGGFGIAYTEEDDPQPIEKIAHEMMQSVKEYSVSLNVKMPKIIVEPGRSIIGNAGTTLYTVGAIKEIPGIRKYVAVDGGMSDNIRTALYGAKYEAIVANKARLPRVEKVSIAGKLCESGDMLIWDILLPEIEEGDILAVLSTGAYNYSMASNYNRLPRPAAVLVSNGQADVIVERETYEDLVRKDVIPERLLSVKRKIVNY

SEQ ID NO: 4159 - protein, 506 aa, Ralstonia metallidurans
MLRLYRRLPPHSRCPWPDVAFAARCTCRPCRPLRRRQPWPIPDWANLMRPEPSSPRAPCRSRRPPRPCPWNRLVTVPPPQHVECRLNMTDFFSRRDGILAVEQVPLTRIADQFGSPTFVYSRAALTAAYNAYAAACKGRNAHVQYAVKANSNLAVLQVFAQLGAGFDIVSGGELLRVIAAGGDPRKVVFSGVAKNVADMELALSHDVRGFNVESIPELDRLNAVAGRLGKRARVSLRINPDVDAKTHPYISTGLKANKFGVAFEDVLPTYRAAAALPNIEVTGIDCHIGSQITEVAPYLEALDKVLDVVEALEAEGIKLEHIDVGGGLGITYNDETPPDITKFATTLIDRVAARGHGHREVLFEPGRSLVGNAGVLLTRVEFLKPGAAKNFCIVDAAMNDLARPAMYEAFHRIEPVAPRNDAGVMYDVVGPVCESGDWLGRDRTLAVQAGDLLAVMSAGAYGFVMSSNYNTRGRAAEVMVDGDTVHLVRERELPADLFRNERLLKV

SEQ ID NO: 4160 - protein, 447 aa, Paracoccidioides brasiliensis
MAPFVFAPHDIYVTRNYPDDSSNYKSSTHHGGFDLFQARDASKDLIFDILKKKVSEIDVHNCHPGEEDPFYVADLGQVYRQHIRWKKNLGRVKPFYAVKCNPDPQILRLMVQLGNGFDCASKAEIDYALDVGVDPSRIIYAQPCKTKSFLRYASQVGVKQMTFDNSDELYKIKEMCPDAELYLRILTDDSASLCRLSMKFGASLSVARSLLELAKELKLNVIGVSFHVGSGAEDPKSFVKAVEDSRFVFDQAAEVGFDLKVLDVGGGFSEDTFERFAATLSDALDEYFPPHIRIIAEPGRYYVASAFTLAANVIARRDVSLEMSDSDSTAGATEAYMIYLNDGVYGNFSNIIFDHQHPVPQILTMESRVCAPIEYSIWGPTCDGIDLICERIALPELDVGNWLYFENMGAYTKCSATRFNGFTDKHEVIYISTEPSATALLELSNEL

SEQ ID NO: 4161 - protein, 79 aa, Paracoccidioides brasiliensis
GVSFHVGSGAEDPKSFVKAVEDSRFVFDQAAEVGFDLKVLDVGGGFSEDTFERFAATLSDALDEYFPPHIRIIAEPGRI

SEQ ID NO: 4162 - protein, 414 aa, Neisseria meningitidis MC58
MTLFCEQVPYPRLAEAFGTPLYVYSQSALTEAFEHYQTAFAALNPLVCYAVKANGNLSIIKHFASLGSGFDIVSGGELARVLAAGGDAAKTIFSGVGKSEAEIEFALNAGVKCFNMESIPEIDRIQKVAARLGKTAPVSLRINPDVDAKTHPYISTGLKANKFGIAYADALEAYHYAAQQPNLKIIGIDCHIGSQLTDLSPLVEACERILILVDALAAEGIVLEHLDLGGGVGIVYQDENVPDLGAYAQAVQKLIGTRRLKLILEPGRSLVGNAGSLLTRVEFVKYGEEKNFVMVDAAMNDLMRPALYDAYHHIEAVETKDIATLTANIVGPICETGDFLGKDRTIACEEGDLLLIRSAGAYGASMASNYNARNRAAEVLVDGNEYRLIRRRETLEQQMANELACLQAEHQNAV

SEQ ID NO: 4163 - protein, 406 aa, Neisseria meningitidis Z2491
MTLFCEQVPYPRLAEAFGTPLYVYSQSALTEAFEHYQTAFAELSPLVCYAVKANGNLSIIKHFASLGSGFDIVSGGELARVLAAGGDAAKTIFSGVGKSEAEIEFALNAGVKCFNMESIPEIDRIQKVAARLGKTASVSLRVNPDVDAKTHPYISTGLKANKFGIAYADALEAYRHAAQQPNLKIIGIDCHIGSQLTDLSPLVEACERILILVDALAAEGIVLEHLDLGGGVGIVYQDEDVPDLGAYAQAVQKLIGTRRLKLILEPGRSLVGNAGALLTRVEFVKYGEEKNFVMVDAAMNDLMRPALYDAYHHIEAVEPKNIAPLTANIVGPICETGDFLGKDRTIACEEGDLLLIRSAGAYGASMASNYNARNRAAEVLVDGNEYRLIRRRETLEQQMANELACL

SEQ ID NO: 4164 - protein, 398 aa, Staphylococcus aureus
SFGTPTIVYDELQIREQMRRYHRAFKDSGLKYNISYASKAFTCIQMVKLVAEEDLQLDVVSEGELYTALEAGFEPSRIHFHGNNKTKHEIRYALENNIGYFVIDSLEEIELIDRYANDTVQVVLRVNPGVEAHTHEFIQTGQEDSKFGLSIQYGLAKKAIDKVQQSKHLKLKGVHCHIGSQIEGTEAFIETAKIVLRWLKEQGIQVELLNLGGGFGIKYVEGDESFPIESGIKDITDAIKSEIKVLGIDAPEIGIEPGRSIVGEAGVTLYEVGTIKEIPEINKYVSIDGGMSDHIRTALYDAKYQALLVNRNEEADDSVTIAGKLCESGDIIIKDAKLPSSVKRGDYLAILSTGAYHYSMASNYNQMQKPSVFFLKDGKAREVIKRQSLRQLIINDTK

SEQ ID NO: 4165 - protein, 379 aa, Deinococcus radiodurans
MSLSRHALQDAAQRFGTPLYLYDAEELDAALWRVQRAFGDARIFYAMKANPNLNLLRRYAAAGVGFECVSLGELLRAEAAGAGGERMILNGPAKSDAEYAAAARLGATIVVDREEEVVLLPPGSRVLVRVNPAMTVSTHEHLATGTARSKFGLTPEQVPGTLAELRDAGHEVLGLHMHIGSAIEQAEDFTAAFARVTELRAHIGGLSVLNVGGGWSLNADLEGIAYEAHEAARVFGAELWVEPGRYLVASAGWLLTRVVGTKRTGRNFCLVDAGMTEFLRPMLYGASHPLYPMWDALATEVWDVAGPACESGDLIARGVPLPTPQRGHLLLIGEAGAYGASMSSTYLSRPRPAEVLWTGHDWQLLRRRETPQDIWAAEV

SEQ ID NO: 4166 - protein, 402 aa, Burkholderia fungorum
MTLTFVRRPPGLQFGGLDVRQLADRAGRTPFFAYDRSAIDIRVRELRNLLPAGMHLHYSIKANPMPAVIHHLAQRVDGFDVASAQEMALALDAGTAPDAIGFAGPGKSHDDLRRAVASGINVHVESETQLRLVTALGWELGVQPSVAIRVNPDFQVGHSGMRMGGGAAPFGVDVDQVPALLRELEAREVALAGFHVFWGSQCLHAATIIKAQRQSADLILRLASGVPRPLRFVNLGGGFGIPYFPGETPLDVKAVCEAMQDWLPPLCERLPGTTPILELGRYLVGEAGIYVCRVIDRKVSRGRTFVVTDGGLHHHLAASGNFGQVLRRNFPVVIGNRPDGVPRERCHVVGCLCTPLDRLADEVELPEAHIGDFVVIMQSGAYGRSASPVRFLSHPEPVEMLV

SEQ ID NO: 4167 - protein, 420 aa, Burkholderia fungorum
MTRSAFDYVDGVLHAEGVSAVSLAEQFGTPLYVYSRAALTAAWNAYAGACAGRRASVHVAVKANSNLAVLNVFARLGAGFDIVSGGELARVLAAGGKAENTVFSGVGKNANEMREALAAGVKCFNVESIPELDRLNAVAAEMGKKAPVSLRVNPDVDAKTHPYISTGLKSNKFGVAFEDARATYQAAAGMANLEVVGIDCHIGSQITEAAPYLDAVDKVLELVEQIEQDGLKIRHIDVGGGLGITYDDETPPEIGEFVRTVLDRIEARGHGHREVYFEPGRSLVGNAGVLLTRVEFLKPGAEKNFAIVDAAMNDLARPAMYEAYHAIDPVVKRDVPAHVYDVVGPVCESGDWLGRERLLAVEPGDLLAIRSAGAYGFVMSSNYNTRPRAAEVMVDGTQVHVARAREEVRQLFVGETILPA

SEQ ID NO: 4168 - protein, 445 aa, Phaeosphaeria nodorum
MAPSAITTTEEYQTLKDSLQSLNSQTLGSVENHGAWKSKQLIGSALKSRVEAIDHDSCDVGDEDAFFIADLGEVYRQHLRWKKNLARVKPHYAVKCNPDTQVLRLMSELGMGFDCASKNEIETVLKLGVDPARIIYAQPCKTKSYVRYAANSGVKQMTFDNADELYKTKQLFPDAELYLRILTDDSGSLCRLSQKFGASLDTTAELLELAHKLELNVVGVAFHVGSGASDPKAFIKAVQDARFVFDQAAAFGFDMHTLDVGGGFTGDITFEPMAAVLSASLDEYFPPHIRVIGEPGRYYVSTAFTIACHVIARRTVADATLGTTSYMLYLNDGVYGNFSSIIFDHQHPVPRVLKSGNDVLYDVRTSGYDTPSQVEYSIWGPTCDGIDIISSSCSFPELLDVGDWLYFEDMGAYTKCSATKFNGFTDSHDVVYVCSEPGAKALMGM

SEQ ID NO: 4169 - protein, 428 aa, Bacillus circulans
MNLDQAEITALTKRFETPFYLYDGDFIEAHYRQLRSRTNPAIQFYLSLKANNNIHLAKLFRQWGLGVEVASAGELALARHAGFSAENIIFSGPGKKRSELEIAVQSGIYCIIAESVEELFYIEELAEKENKTARVAIRINPDKSFGSTAIKMGGVPRQFGMDESMLDAVMDAVRSLQFTKFIGIHVYTGTQNLNTDSIIESMKYTVDLGRNIYERYGIVCECINLGGGFGVPYFSHEKALDIGKITRTVSDYVQEARDTRFPQTTFIIESGRYLLAQAAVYVTEVLYRKASKGEVFVIVDGGMHHHAASTFRGRSMRSNYPMEYIPVREDSGRRELEKVTIAGPLCTPEDCLGKDVHVPALYPGDLVCVLNSGAYGLSFSPVHFLGHPTPIEILKRNGSYELIRRKGTADDIVATQLQTESNLLFVDK

SEQ ID NO: 4170 - protein, 434 aa, Magnetococcus sp. MC-1
MCHDTRDFSPRWGVMMDYFHYQDDQLFCEEVALEQIAQAVGTPFYCYSERTLLHHLQVFQQAFASQDSLICYSVKANSNLAVLDALAKQGAGFDIVSGGELERVRRVGCPGERVVFSGVGKSRAEIQAALAYGVRMFNVESIPELQRIQEVALAMDVAAPVTLRINPDVDPKTHPYISTGLKRNKFGIPFGEAVAVYQQAAQMSHVQVVGLDCHIGSQLTQLSPFVDALKRVMVLIQALKGHGIEIKNLDLGGGLGIPYEDGDTPPSPAELAAALLEQLDGMPVTVILEPGRAIVGNAGVLVTRVEYVKKGEQRHFVITDAGMNDLLRPAIYNAYHGVIPLQRKFDREEQVVDVVGPICETGDFFARDRYLSEVYQGELLAVRSAGAYGFVMSSNYNTRPRVAEVLVRGDRYAVVRKRESVAQLLENESLFEDA

SEQ ID NO: 4171 - protein, 421 aa, Staphylococcus aureus subsp. aureus Mu50
MTVKYNQNGELTMDGISLKTIAQSFGTPTIVYDELQIREQMRRYHRAFKDSGLKYNISYASKAFTCIQMVKLVAEEDLQLDVVSEGELYTALEAGFEPSRIHFHGNNKTKHEIRYALENNIGYFVIDSLEEIELIDRYANDTVQVVLRVNPGVEAHTHEFIQTGQEDSKFGLSIQYGLAKKAIDKVQQSKHLKLKGVHCHIGSQIEGTEAFIETAKIVLRWLKEQGIQVELLNLGGGFGIKYVEGDESFPIESGIKDITDAIKSEIKVLGIDAPEIGIEPGRSIVGEAGVTLYEVGTIKEIPEINKYVSIDGGMSDHIRTALYDAKYQALLVNRNEEADDSVTIAGKLCESGDIIIKDAKLPSSVKRGDYLAILSTGAYHYSMASNYNQMQKPSVFFLKDGKAREVIKRQSLRQLIINDTK

SEQ ID NO: 4172 - protein, 371 aa, Pseudomonas putida KT2440
MKAFADKQETPFVLIDTQMISQAYDDLRAGFEFAKVYYAVKANPAVEIIDLLKEKGSSFDIASIYELDKVMGRGVSADRISYGNTIKKSKDIRYFYEKGVRLYATDSEADLRNIAKAAPGSKVYVRILTEGSTTADWPLSRKFGCQTDMAMDLLILARDLGLVPYGISFHVGSQQRDISVWDAAIAKVKVIFERLKEEDGIELKLINMGGGFPANYITRTNSLETYAEEIIRFLKEDFGDELPEIILEPGRSLIANAGILVSEVVLVARKSRTAVERWIYTDVGKFSGLIETMDEAIKFPIWTEKKGEAEEVVIAGPTCDSADIMYENYKYGLPLNLAIGDRLYWLSTGAYTTSYSAVEFNGFPPLKAYYL

SEQ ID NO: 4173 - protein, 415 aa, Pseudomonas putida KT2440
MNAFNYRDGELFAEGVALSAIAERYGTPTYVYSRAHIEAQYRSYADALQGTEHLVCFAVKANSNLGVLNVLARLGAGFDIVSGGELERVLAAGGRADRVVFSGVGKTREDMRRALEVGVHCFNVESTDELERLQVVAAEMGKVAPVSLRVNPDVDAGTHPYISTGLKENKFGIAIADAEAIYVRAAQLPNLEVVGVDCHIGSQLTTVEPFLDALDRLLVLVDRLAECGIHLRHLDLGGGVGVRYRDEQPPRVADYIKAIRERVGERDLALVFEPGRYIVANAGVLLTRVEYLKHTEHKDFAIIDAAMNDLIRPALYQAWMGVSAVKPRAGEGRAYDLVGPICETGDFLGKDRVLNLAEGDLLAVESAGAYGFVMSSNYNTRGRCAEILVDGDQAFEVRRRETVAELYAGESLLPE

SEQ ID NO: 4174 - protein, 410 aa, Pseudomonas putida KT2440
MTAPFTLLAEAVRQHGSPLWAYDTRTIADRVEQLNVFDTVRFAQKANPNLHVLRLMRAHGLVLDAVSLGEMERAFAAGASVDGDPAGVVLTCDALDRPTLERVVASKIEVNAGSIDMLHQLGERSPGHRVWIRINPGFGHGHSRKTNTGGENSKHGIWHEELDEALACIKAHGLHLVGVHMHIGSGVDYQHLEQVARSMIELIGRLGVDIEAFSIGGGLSTPYRSTDKPVDLQRYAQTWAVARKEIEAMLGHPVRMEIEPGRFLVAESGYLVAEVRAVKQVGRNTFVIIDAGFNDLMRPAMYGAYHGMTLLDADGQAVDRPRQPTVVAGPLCESGDVFTQDDQALTPQDLPQAQVGDLLVIHDAGAYGASMSSNYNSRPLLPEFLIENGALRMIRRRQTVQDLLSLEADF

SEQ ID NO: 4175 - protein, 453 aa, Anopheles gambiae str. PEST
NSAYHIPKSHTQTVRSKAPCSKMKFLENESDKIEIVDGEVEVPAIIDQLAEQLPTDNPFYVMDIGDIVRKHQQWIEKMPRVVPHYAVKCNDTDLVCATLAALGASFDCASKGEIAKILSLGVAPERIIFANPMKPASHVRYAASNAVKTMTYDSDTELHKIKQYCPDAKLVIRIRCEAEKAQCPLGKKFGCDPVEEAPRLIKIARSLGLEVIGVSFHVGSGCADFPIYYKAISYARDLFDYAAQLGYSFSLLDIGGGFPGDTGTSIDEVAMIVNAALDTFFPDKAVRVISEPGRYYVSSAFTLVTNVQSKRVCLNARTGTIDRMMYYLNDGVYASFNSILYDHQVPQPKLIGGQAGKQYKSTLWGPTCDALDQLIETIALPELQIDDWVVFENMGAYTIPVASPFNGFELPKVYCYISRKHWEMLETLFPLQNECSLIAASRLPASYEPVACA

SEQ ID NO: 4176 - protein, 390 aa, Anopheles gambiae str. PEST
LEEEISRIIEDEPREHPLHLLDLDDLVGKHLVWLRSMPRVTPFYAVKCNDDPAILATLAALGTGFDCASEAEMRTILALGVTPDRIIFAHPIKSVQALAFAKAHGIRRMTFDNECELEKVAREYPEAELVLRIRHDSDRVLIALGKKFGCDARGDGRVLLARAQALGVAVIGVSFHVGCGSLDADCFYHAIASARSVFDYAKDELGMRLWLLDVGGGFPGDNDKPIDQYAEAVSRALQEFFPPEQDEEVYVLGEPGRFYVGSAATLLTTVQGKKIVRDDAGQIQQMMYYINDGVFGTLFDWLSLREIKDLKRAVPLVRREREHEPAFPTTIWGPTCDSTDIVCEDVPYPEHHIGDYIVFENLGAYGMTFATNFNGFPKPTVQVYVKEHTW

SEQ ID NO: 4177 - protein, 374 aa, Anopheles gambiae str. PEST
VRMGPHEEPLHVLDLDDVVRKHYGWCAQMPRVKPYYAVKCNDDPRILQTLMTLGTGFDCASKGEMERMLGYGVKPESIIFAQPAKSIPSLLYARSKQVSVMTFDGAVELEKIHQYYPEARLVLRMRHDSLKVRCSLGKKFGCDPIAEAPELLRYAATLRMNVIGISFHVGSDCDEHEVYYEAVKIAKGLFEYAKTIGYEFSLLDIGGGFPGDNDKPIDRYVQAVNVAIDQFFPAESDIRIIAEPGRYYVSSAVTLVSFVDSKRVMKEKQPDGTEKTRMYYYLNDGIFGTFYCTALEGQQVVPIVRSKLTKRYDTTLWGPTCHVVDKIAEARLPELDVGDSVVFENVGAYGMVLANQFNGFPLPKVRAYLREGTW

SEQ ID NO: 4178 - protein, 299 aa, Anopheles gambiae str. PEST
VLNLDDIVAKHRNWQAKLPTVAPFYAVKCNSHPTILRLLAALGCGFDCASRAELDSVLELGVTPDRIVYAHPNKSIGSIVHAKKLGVKRMTFDGSDELEKLARHYPEAELILRVRHDAAAAQLSLGRKFGCDQVRDARPLLERARELGLSVIGVSFHVGSGSMDAECFYGGIRKAIEIFRVGSTLGMKMELLDVGGGYPGANGALFDRCAYYINKALKELVPTPVAVIAEPGKYYVESAVTALVNVVSKSYEKDVDGAVVRVRYYVDDGLYDTFDWCDDQGSGPLLQEDKRGAPCVRSV

SEQ ID NO: 4179 - protein, 307 aa, Anopheles gambiae str. PEST
EEPLHVLDLDDVVRKHYGWCAQMPRVKPYYAVKCNDDPRILQTLMTLGTGFDCASKGEMERMLGYGVKPESIIFAQPAKSIPSLLYARSKQVSVMTFDGAVELEKIHQYYPEARLVAHAPRLTEAKGLFEYAKTIGYEFSLLDIGGGFPGDNDKPIDRYVQAVNVAIDQFFPAESDIRIIAEPGRYYVSSAVTLVSFVDSKRVMKEKQPDGTEKTRMYYYLNDGIFGTFYCTALEGQQVVPIVRSKLTKRYDTTLWGPTCHVVDKIAEARLPELDVGDSVVFENVGAYGMVLANQFNGFPLPKVRAY

SEQ ID NO: 4180 - protein, 408 aa, Anopheles gambiae str. PEST
CPPRMESSPEPLSVFATTKALLLKRFVAQGHTETSLNILDLDEIVHSHHRAMARFGSFATPYYPPGVNNHPAALTILSKLGLGFSCASIAEMGAVLGTGVPPQRIILAHPVKSPDTILYAKQQDIQRIVCDSVQEITKVQRLYPMAKIILRLRMCVTQKFGCCPYNDVEEILHYIKSAQTVTIEGIHIALLQTPSAPSLLGETLQKAIHIAQDVFNLAHALGCPDIPELILSGMDNVPPAELQQIPTAFYHDPTLRIIIETDRQLVESAVTLLASVQSKRVIRLGGTDGPVLEIMYFINDGRYGSFEWWNAVDKRPAVIRSDGTVLHAGLTYPSSLWGQSCDSADIICERIELPELEIGDYLVFSGMGAYGVTLASRFNGFPIPETVVCAGQSTTKALIESTGTRWLS

SEQ ID NO: 4181 - protein, 465 aa, Agrobacterium tumefaciens str. C58 (U. Washington)
MRAFLVLCRLSISRGTEEAHHHCLKCGRVIPSNRWQTKPNDALAGHRSHSRLERMLSILRLHRLIRMHISSVLCPPDSAGVGFIGNISMTTARILDFIKTRRPEGPCLVVDLDVVRDNFNAFRHSLPNSAIYYAVKANPAPEILKLLASLGSNFDCASVAEIQMALDAGATSDRISFGNTIKKERDVARAHALGIDLFAVDSHEEVEKVARAAPGARVFCRVLTDGEGAEWPLSRKFGCVPQMAVDVLVYAHQMGLESYGVSFHVGSQMMNLDAWDAALADAKRVFASLAKQGIHLQMVNMGGGFPTKYLRDVPAAEEYGQAIDTALRKHFGNQIPKTIIEPGRGMVGNAGVIKAEVVLVSKKSDNDNHRWVFLDIGKFGGLAETMDEAIRYPIRTERDQDEMQPCVLAGPTCDSADVLYEKNMYPLPVSLTIGDEVLIEGTGAYTTTYSAVAFNGFEPLKAYVI

SEQ ID NO: 4182 - protein, 393 aa, Agrobacterium tumefaciens str. C58 (U. Washington)
MRDIVAETGTPCFLYDNSAMRQAYRDLETALSGFADIYYSVKANPLPAIISLFREEGAGAEIASVGEYRAAVKAGVAPDNIIFAGPGKSMAELREVIEGGIGEIHIESAEEIARIEAINRPVKASIRINPVPDAQAGAMRMGGKATAFGFDEEELENVLKLFANVRHIDLVGIHIYGGTQILDADMLVSQWRHAIALAGRMAQMLGKPLETIDLGGGLGIPYFAGETSLDLAKVAAAIPDLKALLKAHPLIADAHVIVEPGRFLAGPGGLYVVEVNSVKTSRGTTFVVTDGGMHHHLAASGNLGQIVKRNYPIVAPAMMQAAHDETATIVGPLCTPLDTLARNATLPKLNAGDLLAILQSGAYGASASPGGFLSHTVAKEVLVEDGAFEVIGR

SEQ ID NO: 4183 - protein, 512 aa, Agrobacterium tumefaciens str. C58 (Cereon)
MLPKVARAHVCPPSPRCGEDLGKVPGTNPSSRYSGQPGNARTYEATTVRAFLVLCRLSISRGTEEAHHHCLKCGRVIPSNRWQTKPNDALAGHRSHSRLERMLSILRLHRLIRMHISSVLCPPDSAGVGFIGNISMTTARILDFIKTRRPEGPCLVVDLDVVRDNFNAFRHSLPNSAIYYAVKANPAPEILKLLASLGSNFDCASVAEIQMALDAGATSDRISFGNTIKKERDVARAHALGIDLFAVDSHEEVEKVARAAPGARVFCRVLTDGEGAEWPLSRKFGCVPQMAVDVLVYAHQMGLESYGVSFHVGSQMMNLDAWDAALADAKRVFASLAKQGIHLQMVNMGGGFPTKYLRDVPAAEEYGQAIDTALRKHFGNQIPKTIIEPGRGMVGNAGVIKAEVVLVSKKSDNDNHRWVFLDIGKFGGLAETMDEAIRYPIRTERDQDEMQPCVLAGPTCDSADVLYEKNMYPLPVSLTIGDEVLIEGTGAYTTTYSAVAFNGFEPLKAYVI

SEQ ID NO: 4184 - protein, 440 aa, Agrobacterium tumefaciens str. C58 (Cereon)
MARWITARWCANGRTMAPTDKSQNHGPALAAGLFDISENDLLIGGLSVRDIVAETGTPCFLYDNSAMRQAYRDLETALSGFADIYYSVKANPLPAIISLFREEGAGAEIASVGEYRAAVKAGVAPDNIIFAGPGKSMAELREVIEGGIGEIHIESAEEIARIEAINRPVKASIRINPVPDAQAGAMRMGGKATAFGFDEEELENVLKLFANVRHIDLVGIHIYGGTQILDADMLVSQWRHAIALAGRMAQMLGKPLETIDLGGGLGIPYFAGETSLDLAKVAAAIPDLKALLKAHPLIADAHVIVEPGRFLAGPGGLYVVEVNSVKTSRGTTFVVTDGGMHHHLAASGNLGQIVKRNYPIVAPAMMQAAHDETATIVGPLCTPLDTLARNATLPKLNAGDLLAILQSGAYGASASPGGFLSHTVAKEVLVEDGAFEVIGR

SEQ ID NO: 4185 - protein, 422 aa, Agrobacterium tumefaciens str. C58 (Cereon)
MNHFGYIDGVLHAENVPVPEIAKAVGTPFYVYSTATLERHYKVFSGAFADVDAMVCYAMKANSNQAVLKTLAKLGAGIDVVSGGELRRALAAGVPASRIMFSGVGKTVAEMDYALEAGIYCFNIESEPELEVLNLRAVKAGKRAHVSFRINPDVDARTHAKISTGKKENKFGISYERARAVYAHAATLPGIEVTGIDMHIGSQITELQPFEDAFRLLRELVEVLRTDGHAISHVDIGGGLGIPYRDDNNPPPLPDAYAHIVKNELKSLNCKIVTEPGRLIVGNAGILVTEVIYVKDGGDKTFVIVDGAMNDLIRPTLYEAYHGIRPVVQPSENAPRIKADIVGPVCETGDYLALDREMAAPQPGDLIAVSSAGAYGAVQAGTYNSRLLVPEVLVKGDRFHVIRPRGTYEELIALDSVPAWLD

SEQ ID NO: 4186 - protein, 868 aa, Xylella fastidiosa Temecula1
MSASPTAERWIVLKFGGTSVSRRHRWDTIAMVVRKRLEEHGTRVLIVVSALSGVTNELTAIAQGVVDSAKRVTALEQRHRDFLVELGLDAQAVLGTRFAMLSDLLQDARAVTRSLDWQAELLGQGELLSSTLGAAYLGASGIDIGWMDARDWLTALPPQPNQSEWSQRLSVSCQWKSDVEWRTRFDAQRAQVLITQGFISRHQDGGTAILGRGGSDTSAAYFGALLGAACVEIWTDVPGMFSANPKEVPDARLLTRLDYYEAQEIATTGAKVLHPRSIKPCRDTGVPMLILDTERPDVLGTRIDAEVEPVLGVKAISRRDGIVLVSMEGIGMWQQVGFLADVFTLFKKHGLSVDLIGSAETNVTVSLDPSENLVNTDVLTALSTDLSQICKVKIIVPCAAITLVGRGMRSLLHKLSEVWATFGKERVHMISQSSNDLNLTFVIDETDADGLLAVLHFKLIESGAMPVQDRAVFGSPWREIIGHVRTRVMPWWHSARMRLLAMRDEEGIGPCYVYHLPTVRERARQLNAVAAVDQCYYAIKANPHPAILRTLIEEGFGLECVSLGELRHVFEVVPHLVPSRVLFTPSFASRVEYEQAFLLGVNVTLDNVEALRLWPEVFRERTLWLRIDLGYGDGHHEKVTTGGKTSKFGLSVTRIDEFIDVAKTLNITVTGLHAHLGSGVESGNHWSRMYDELAGFASRIGSVSTLDIGGGLPIPYRPDDEPFDVGAWGASLAEVKALHPKFQLVIEPGRFLVAEAGVLLTRVTQVIEKDDILRVGLEAGMHTLIRPALYDAWHGVENLTRLDETPHVLCDVVGPICESSDVFGRRRHLPAATASGDLMLIADAGAYGFSMASTYNLRGLPAEVVLDA

SEQ ID NO: 4187 - protein, 448 aa, Giardia lamblia ATCC 50803
MSVLTRASLVEYNLLPIGKGADISKVIVDAYAKSGREAVCVLNVSEIERHYNIWKTHLPEVQVRYAVKCNMHPLLLRSLHLLGAGFDCASPAEVRAALSAGCPPSKIIYANPQKPKRSIEEAFRLNCNTFTFDSEHELLSMLESTPPGKVGRFVLRLLPPDESSSICRFGVKFGASPSECYRLIRLCKHLGANLVGFSFHVGSGCGSVDSFRLAVQYMGEAAKFAKEQGFTLTVLNIGGGYMSKGAERHYDEPNRHAHITPPSFEEIASALREEINRIKVYFTNKSEDLEIMAEPGRFFAGDIMTLGTRIYGRRIIFDKIEDNSCLTEKEIMESGKASINEVKYYVGDGVYGYYNAILFDHVVPHLRFTDKHGNRKELSGAHAGSSLNTSSIFGPTCDSLDCILKERKLPLLDVGDWVITDAFGAYTYAAATEFNGIPHVSVVCCIEE

SEQ ID NO: 4188 - protein, 428 aa, Methanothermobacter thermautotrophicus str. Delta H
MFPDIEVNDKGHLLIGGADAVELADEYGTPLYVIDEMRIRENYRRLYRAFSGEYSRFQVFYACKANTNLAVMRILEEEGSGIDAVSPGEIYTALMAGFDPDRILYTGNNVRDDELQFALDSGVRINVDSRSQLLRLSEIAPEGLRISFRVNPLVGAGHHEHCITGGEMSKFGVMEREAPEVYRMAMDLGFEPVGIHAHIGSGILDPEPFMLAVETLMDIAGRVHEATGVEFEFIDFGGGLGIPYTPEEEPLDIDEFASKITGLFKDKLSEYGLGRPMMCLEPGRYIVGDASYLLTRVNTIKESYRKFAGVDAGFNTLLRPAMYGSYHHILVAERPLDEPSEKMDVAGNVCESGDLFARDRQLPEINEGDVLAIMNAGAYSFSMSSQYNSRPRPAEVLVREGKVDVVRERETFSDLLRGQNVPARLLKR

SEQ ID NO: 4189 - protein, 399 aa, Magnetospirillum magnetotacticum
MRWAEQREFSGLFHDPAVREDFAMTAKIARFLEEVRPQTPCVVVDLDVVRDNYHSLRRWLPLAEVYYAVKANPAPEIVRMLTEEGSRFDVASRGEIDLCLSNGTPAERISFGNTIKKQSDIAYAYAKGVRLYAFDSEAELEKLALAAPGSRVFCRILMTCDGAEWPLSRKFGCEIDMAKDLLVKARDLGLDPYGVSFHVGSQQTDLKQWDIAVGKAAMLFSALDAAGIDLRMVNLGGGFPARYRKEVDGIERYAEAVMDAMTKHFGNNIPAMIIEPGRSLVGDAGILETEVVLISRKGYEDDTRWVYLDVGKFGGLAETMDEAIKYRIVTGRDGEDTAPVILAGPTCDSADILYEKAGYEMPVSLKVGDKVRILSTGAYTTSYSAVNFNGFEPLKAYFI

SEQ ID NO: 4190 - protein, 274 aa, Magnetospirillum magnetotacticum
MTDRIRDYLRARRDLGRDEGPVMVLDLDVVRENYTAFARALPDTRVFYAVKANPAAEVLRLLAEMGSCFDTASVAEIEMALSAGATADRVSFGNTIKKERDIVRALKLGIRLFAVDCQAEVEKISRASEAAGIEAGDVQVFCRILCDGAGADWPLSRKFGCEPEMAVNVLEHAHRHGLHAYGVSFHVGSQQANTEAWDGALASAAAIFQDCALRGIGLSMVNLGGGFPTKYLKQVPGVETYGDAIFRALTKHFGNRIPETNHRAGAAAWSAMRA

SEQ ID NO: 4191 - protein, 424 aa, Magnetospirillum magnetotacticum
MNHFHYSNGTLFAEDVAIARIAREVGTPFYCYSTATLERHYTVFAEALKSAGLDATICFAAKANPNMAVIRTFAQLGAGADVVSEGELRQALAAGVPAARIVFSGVGKTRHELEFAVAKGIFQINVESEPELEMLSEVAAARGLVMPIAIRVNPDVDAGTHAKITTGKKENKFGIEWTRAREVYARAKALPGVEPVSIACHIGSQLTELDPFREAFLRVRDLVAMLRADGIDIRRLDLGGGLGVPYDDETPPEPKAYAEVIKASLGDLGCRFIFEPGRLLVGNAGILVSSIIRVKEGSTRTFLIVDAAMNDLARPSLYDAYHSIFPVAEPKAGAPLAEVDVVGPVCETGDTFARQRRLPPMRAGDLLALGTAGAYGAAMSSTYNTRPLIPEVLVKGADYAVIRARPSYEDMRSLESLPGWLSDD

SEQ ID NO: 4192 - protein, 390 aa, Methanosarcina acetivorans C2A
MRKESYEFPLEDFIPREDFNKIKKFSRDKETPFLVIDLQKIERSYEELVEHMPFAKIHYAVKANPMDRVVLALKDKGSNFDVATIYELDQVLRLGVEPERISYGNTIKKEKDIAYAYEKGVRLFVTDSESDLKKLSREAPGSRVFFRILTESDGADWPLSRKFGSHPDLIYKLILKAEKLGLEPYGLSFHVGSQQRDIGQWDNAISKCKYLFEAAAEKGIQLKMINLGGGFPAKYQAQANDLETYAREIRRFLHDDFGEELPEILIEPGRSLVADAGIIVSEVVMISKKARFNQYKWVYLDIGKFGGLIETLDECIKYPIFCDKKGCAEEVILAGPTCDSMDILYEHHKYSFPHTMREGNRAYIFTTGAYTQSYCSVNFNGFPPLKAYLI

SEQ ID NO: 4193 - protein, 405 aa, Methanopyrus kandleri AV19
MVESSTTSWRRPVRGHRCTSTTRMLPVKAAREYQEAFSWFPDRVYVCYAMKANFNPYLVEHIVDETRAADVVSLWEMKVAVNAGAETVVVNGNAKSSDEIRAAVERSWVINVDSFEEFQRIEKIARHEGERALVALRVNPKVSPDTHSHIATAVEGSKFGVELEIAERVCRRMIESEWVEFLGLHYHIGSQITDLRPFSEALRSVRTFLEDTGLIEEISYLNIGGGLGIRYRRGEEVPSPHDLAEELQEDLKELHSESSGFDLYLEPGRSIVGEAGILVTSVRQVKRGRRRWVFVDTGMNALIRPALYDAYHEVVVHGGDYSATEKASVAGPLCESGDVLAEDRELPIDISEGDLVVFLSAGAYCESMASNYNCYPIPGSVVVRNGEITGVRRVQDYEAFSKTWW

SEQ ID NO: 4194 - protein, 419 aa, Caulobacter crescentus CB15
MRTYHSPLDLVRERSPERPVALVRPDAVAVAARWFQSEFKGDVFYAVKANPSPWVIRELAKAGVRSFDVASLNEVELVANEAPGSRMAFMHPVKSRAAISAAYFDHGVKTFSFDTHEELAKILDATGQAKDLNLIVRMGVQAEGAAYSLSGKFGVEMHNAPDLLLAARRATQDLMGVSFHVGSQCMRPTAFQAAMAQASRALVRAGVLADVVDVGGGFPSIYPGMVPPDLSEYLAAIDRGFAEMMVHETTELWCEPGRALVAEASSLLVKVELKKGDALYLNDGSYGSLFDAAHMKWPFPVKLYRKSGEVVEEGLKPFRFYGPTCDSVDHMPGPFYLPESVDEGDYIEIGMLGAYGVAMNTRFNGFGETDTAQVQDAPMASMYGLAKRSIPVVRQETEERKIVRFSRPKGAAGKRKRRR

SEQ ID NO: 4195 - protein, 421 aa, Caulobacter crescentus CB15
MNHFEYGPQGLACEGVPLAKIAAEVGTPVYVYSRATLERHFVVFRDALAMSGVVDPLIAYAVKANSNVAVLKVLGDLGAGADTVSEGEVRRALAAGIPGERIVFSGVGKARREIAFALQAGVAEINVESEPELNLIAEVAAELGVRAKVAFRVNPDVAAGGHAKIATGKSENKFGVSFAEAARLYANASNNANLQPVGVACHIGSQITDLAPMRAAFTKMRGLVEQLLAEGLSVERLDLGGGLGVPYFNHPEPPSPAEFAAMVGEVTQGLPVTLAFEPGRVIAANAGVLVSEVIHVHERPEGRKFLVIDAAMNDLVRPAMYDAFHDIRPVIQRTGETVYDVVGPVCETGDTFTRDRALPPFAAGDLVAFMSAGAYGAAMASEYNTRPLVPEVLVDGDRYAVIRQRPTYDEMLARDLVPDWV

SEQ ID NO: 4196 - protein, 402 aa, Campylobacter jejuni subsp. jejuni NCTC 11168
MDYKQLKQEFNTPFYIYNFDFIKERFLNLKEAFKARKSQIFYAVKANSNLSLLQMLANLDSGFDCVSIGEVKRALKAGAKAYKIIFSGVGKTKEELRQALEYDILYINLESEAEMMLLESVAKELNLKARISIRVNPNVDAKTHPYISTGLNENKFGVEIDIARKMYLYAKNSSFLEPVGVHFHIGSQLLDISPIHEAAAIVAKLVRELKALQIDLKFFDIGGGLGVAYEKNECEPDLYDYAQGILAQLHGLDLTIGMEPGRYLVAKSGEFVCSVLYEKQNKTKRFVVVDGAMNDLIRPSLYEAYHEIILPYNQGEESLCDVVGGICESGDFFAKARSLPSTQSDDIMVIKNTGAYGFSMSSNYNTRNKVCELALEEGQVRLIRQRENFEDQIALEEKFLKA

SEQ ID NO: 4197 - protein, 390 aa, Methanosarcina mazei Goe1
MRKEPYDFPLDDYISREEFNKIKKFSRDKETPFLIVDLQKIERSYDELVEHMPFAKIHYAVKANPLDKVVLALKRKGSNFDVATIYELDQLIRLGVEPERISYGNTIKKEKDIAYAYDNGVRLFVTDSESDLKKLARRAPGSRVFFRILTESDGADWPLSRKFGSHPDLIYKLILKAEKLGLEPYGLSFHVGSQQRDIGQWDNAIAKCKYLFEAVAEKGIHLKMINLGGGFPAKYQSQAHDLETYAHEIRRFLHEDFGEELPEILIEPGRSLVADAGIIVSEVIMIAKKARFNQYKWVYLDIGKFGGLIETLDECIKYPIFCDKKGCAEEVILAGPTCDSMDILYEHHKYSFPHTMRDGNRVYIFTTGAYTQSYSSICFNGFPPLKAYVI

SEQ ID NO: 4198 - protein, 416 aa, Chlorobium tepidum TLS
MLDSHFFSFSDGILCCESVALDELARQFGTPLFVTSRQSLVSQYRSFEEAFASLPHFTCYSVKANFNLAVIRTLAEEGCGCDVNSGGELYRALTAGVPANKIIMAGVGKSEAEIKYGLTSGVMMIKAESISELKAINSVAEHLGKVAQVGVRINPNVTAETHPYITTGDSKEKFGIDEAGLGEVFELFKTLPNLELHGLDMHIGSQIFDPEYYVAATQKLLEVLESARHLGFDIKWLDLGGGFPVTYDPQKPAPPITKFAEKLIPMLQDKGVTVIFEPGRFIAANASVIVTKILYRKKNQIGKEFFIVDAGMTELIRPALYQSHHEVLSVKQHDRSVVADVVGPICESSDFFARHRTIDDAPEGELLAVLSSGAYGAVMSSNYNGRLRPAEVMVDGDEVTLTRRRETYEQLVQNEL

SEQ ID NO: 4199 - protein, 447 aa, Coccidioides posadasii
MVMAPSVFEPTDVYITEKYHHESKGSYNSTNHGGPELSHAREASKELILDILQKKAASIDVQNCCPGEEDPFYVADLGEVYRQHIRWKMNLGRVKPFYAVKCNPDPQVLRLMAHLGNGFDCASKAEIDYVLAAGSTPSRIIYAHPCKTKSYLRYAAQQGVNEMTFDNADELYKIKTMCPDRDVFLRILTDDSASLCRLSMKFGASLTVTRSLLELAKDLGLNVVGVSFHVGSGAEDQQHFVKAVEDARFVFDQASDIGHDLKVLDVGGGFCDETFERFAAALSDALDTYFPPHIRVIAEPGRYYVASAFTLAANVIARRDVSPAASDSDSASGPAEMYMIYLNDGCYGNFSNIVFDHQHPVAQILTKDDMDSTHPVEYSIWGPTCDGIDVITKRVTLNREVLGVGNWLYFENMGAYTQCSATRFNGFTDKHDIIYISTEPSAGAMGY

SEQ ID NO: 4200 - protein, 445 aa, Clostridium thermocellum ATCC 27405
MLMRKVENMFVSKALKVNSKNHLEIGGCDCVDLVNNFGTPLYVMDESLIRENCRIYKNALDKYYNGNGLVLYASKAFCTMAMCKIVQQEGLGLDVVSGGELYTAIKAGFPMEKVYFHGNNKTIDELELAIDNNVRRIVVDNRQELLHVNRIAAEKGKTVNISFRIKPGIDAHTHDFIRTGQIDSKFGVALENGEAMEIIGEAVKLSNVKVVGLHCHIGSQIFELAPFEEAARVMLTFIAKIKEELGIEIEELNLGGGFGIKYTQDDDPIEYDRYIKSVSEVVKSVCEDKGIKLPFIVIEPGRSIVASAGITLYRIGTIKDIKGVRKYIAVDGGMTDNPRYALYQSKYEGVIANKADAAKTEKVTIAGKCCESGDLLGKDVLLPEAEEGDILAILATGAYNYSMSSNYNRIPRPAVVLVKDGKARVIVKREDYNDIIRNDIIPEDL

SEQ ID NO: 4201 - protein, 414 aa, Microbulbifer degradans 2-40
MSDFHYQNGELFAEQCSLNAIADALGTPCYVYSKAAFTRAYQDYANALGNHPGMVCYAVKANSNIAVLQVLAKLGAGFDIVSSGELRRVLKAGGQPNRIIFSGVGKTREEMREALEVGIACFNVESEAELERLADVAAELGVVASISLRVNPDVDAKTHPYISTGLKENKFGIDIQRAPAVYARASELASLKVVGVDCHIGSQLTELTPFLDALDRLLQLVDTLAETGITIEHLDIGGGLGVTYRDEVPPAVADYLTQIKAKLGDRKLAIIMEPGRSIAANAGVMLTEVEFLKPTEHKNFAIIDGAMNDNIRPALYQAWQDVKPLSQREGETQQWDLVGPVCETGDFLAKDRALALQAGDRLALMSSGAYGFVMSSNYNTRGRAAEVLVDGDKYFVVRERESFEDLIRGEHLLP

SEQ ID NO: 4202 - protein, 377 aa, Brucella suis 1330
MATQRIIDFLNTRRPEGPCLVVDTDVVRENYQGFEKALPYSRIFYAVKANPAPEILRLLASLGSSFDTASVAEIEMALEAGATPDRISYGNTIKKERDIARAFDLGIRLYAVDCVEEVEKIARVAPGSRVFCRVLTDGEGAEWPLSRKFGCVPAMAKDVLRRAKALGLDAYGVSFHVGSQQTDLTAWDRALADAAAVFRTLADEGIILRMVNMGGGFPTRYLKDVPTAQAYGMAIFDALSRHFGNRIPETIIEPGRGMVGNAGVIKTEVVLVSRKADNDNVRWVYLDIGKFGGLAETMDEAIRYQIVTPHDGSETEPCVLAGPTCDSADVLYEKTPYPLPVSLTIGDEILIEGTGAYTTTYSAVAFNGFEPLRSYVI

SEQ ID NO: 4203 - protein, 421 aa, Brucella suis 1330
MNHFEYRNGVLHAENVSLPEIAKAVGTPFYVYSRATIERHFRVFHDAFADMDTLVTYALKANSNQAVLTALAKLGAGADTVSQGEIRRALAAGIPANRIVFSGVGKTPREMDFALEAGIYCFNVESEPELEILSARAVAAGKVAPVSLRINPDVDAKTHAKISTGKSENKFGIPRDKARAAYARAASLPGLNVVGIDMHIGSQIIDLEPFDNAFALMAELVKELQADGHNIRHVDVGGGLGIPYRTDNTPPPPPVAYAQIVAKHIKPLGLKTVFEPGRLIVGNAGLLVTEVIFVKEGDAKNFVIVDAAMNDLIRPTLYDAFHDIRPVIMPNDNAPRIRADFVGPVCETGDYLGLDREVAKPAPGDLIAICTTGAYGAVLSSTYNSRLLIPEVLVDGERYHVVRPRRTYEELLALDSVPDWL

SEQ ID NO: 4204 - protein, 417 aa, Haemophilus somnus 129PT
MDFFLYKDGHLMAENVSVKKIAEQFGTPAYIYSRATLERHWYAFDNALGDHPHLICFAVKSNPNIAILNIMAKLGSGFDIVSQGELERVLFAGGDPKKVVFSGVAKSEQEIARALEVGIRCFNVESAAELIRINQVARKMGKIASISLRVNPDVDAHTHPYISTGLKENKFGVSVEQAREVYRQASQLENIKIVGIDCHIGSQLTELQPFLDATDRLIVLMEQLKKDGITLEHVDLGGGLGVTYSDEKAPHPSEYATALLEKLKNYQNLEIILEPGRAITANAGILLTRVEYIKSNESRHFAIVDTGMNDMIRPALYQAYMNIIEVDRTLSRETKVYDVVGPICETSDFLGKQRSLAIAQGDFIVQRSAGAYGASMASTYNSRPRAIEIMVDGEQVHLIKRREEFAELWHLEKLLEM

SEQ ID NO: 4205 - protein, 387 aa, Pseudomonas syringae pv. syringae B728a
MPINVEDYYSAETFKKMKAFADKQETPFVVIDTDIISKAYDDLRAGFEFAKVYYAVKANPAVEVINLLKEKGSSFDIASIYELDKVLSCGVGPERMSYGNTIKKSKDIRYFYEKGVRLFATDSEADLRNIAKAAPGAKVYVRILTEGSTTADWPLSRKFGCQTDMAMDLLILARDLGLVPYGISFHVGSQQRDISVWDAAIAKVKVIFERLKEEDGIVLKLINMGGGFPANYITRTNSLETYAEEIIRFLKEDFGDDLPEIILEPGRSLISNAGILVSEVVLVARKSRTAVERWVYTDVGKFSGLIETMDEAIKFPIWTEKKGEMEEVVIAGPTCDSADIMYENYKYGLPLNLAIGDRMYWLSTGAYTTSYSAVEFNGFPPLKSFYL

SEQ ID NO: 4206 - protein, 371 aa, Pseudomonas syringae pv. syringae B728a
MDTLFAQLADDTNDTFYTVDPRWITQNAQQFSGCFPGTVLYAMKANPLVHVLEALSQGGINHFDVASLAEVQTVHNTLPNAVQYLMNPVKSRHCLHEAYYRHGVRSFVLDSEEELSKLRDVLPERDSTISMFVRYAPSESTAVYDLRGKFGASPALATQLVHQVAASTDWSLGLSFHVGSQAIEDGPWLAALDDADAIVRDTAQHVRHLDIGGGFPGNYLNSMGNTPDLVGRVCEHIQTSPTLKDLNLICEAGRGLVYGGMSLFARVLSRREHSVFCGAGIFGGLLSAQQWLQFPARVWRDAAPYAGSAEATFNIFGPTCDSMDRLAFPYSLASDIREGDWLEFQSTGAYSVSLRTPFNGFYADRIISLPS

SEQ ID NO: 4207 - protein, 415 aa, Pseudomonas syringae pv. syringae B728a
MDAFNYRDGELFAEGVALSAIAERFGTPTYVYSRAHIEAQYRAYADALSGMPHMVCFAVKANSNLGVLNVLARLGAGFDIVSRGELERVLAAGGKAEKIVFSGVGKTREDMRRALEVGVHCFNVESTDELERLQEVAAELNVRAPISLRVNPDVDAGTHPYISTGLKENKFGIAIAAAEDVYIRASQLPNLEVIGVDCHIGSQLTTLEPFIDALDRLLALVDRLGDCGIHLHHIDLGGGLGVRYRDEEPPLAADYIKAVRERLAGRDLGLLFEPGRFIVANAGALLTRVEYLKHTEHKDFAIVDAAMNDLIRPALYQAWMDVTAVRPRDSEPRAYDIVGPICETGDFLAKGRELALAEGDLLAVHSAGAYGFVMSSNYNTRGRAAEVLVDGSQAFEVRRRETVAELFAGESLLPE

SEQ ID NO: 4208 - protein, 387 aa, Pseudomonas fluorescens PfO-1
MSIQVEDYFARETFQKMKAFADKQETPFVVIDTAMIAQAYDDLRAGFEFAKVYYAVKANPAVEIIDLLKEKGSSFDIASIYELDKVLSRGVSADQISYGNTIKKSKDIRYFYEKGVRLFATDSEADLRNIAKAAPGAKVYVRILTEGSTTADWPLSRKFGCQTDMAMDLLILARDLGLVPYGISFHVGSQQRDISVWDAAIAKVKVIFERLKEEDGIHLKLINMGGGFPANYITRTNSLETYAEEIIRFLKEDFGDDLPEIILEPGRSLIANAGILVSEVVLVARKSRTAVERWVYTDVGKFSGLIETMDEAIKFPIWTEKKGEMEEVVIAGPTCDSADIMYENYKYGLPLNLAIGDRLYWLSTGAYTTSYSAVEFNGFPPLKSFYV

SEQ ID NO: 4209 - protein, 415 aa, Pseudomonas fluorescens PfO-1
MDAFNYRGGELFAEGVALSAIADRFGTPTYVYSRAHIEAQYLAYADALAGMPHLVCFAVKANSNLGVLNVLARIGAGFDIVSRGELERVLAAGGSPDKIVFSGVGKTRDDMRRALEVGVHCFNVESTDELERLQVVAAELGVRAPISLRVNPDVDAGTHPYISTGLKENKFGIAIADAEDVYVRAAHLPNLEVVGVDCHIGSQLTTLPPFLDALDRLLDLVDRLGDCGIHLRHIDLGGGLGVRYRDEEPPLAADYIKAVRERLVGRDLALVFEPGRFIVANAGVLLTQVEYLKHTEHKDFAIVDAAMNDLIRPALYQAWMDVTPVKPRETAARTYDVVGPICETGDFLAKERELALEEGDLLAVHSAGAYGFVMSSNYNTRGRAAEVLVDGDQAFEVRRRETVAELFAGESLLPE

SEQ ID NO: 4210 - protein, 387 aa, Pseudomonas aeruginosa PAO1
MSIKVEDYFAPETFQRMKAFADKQETPFVVIDKQTIADAYDQLTDCFPFARIYYAVKANPATEITELLRDKGSNFDIASIYELDKVMKTGVGPERISYGNTIKKSKDIRYFYEKGVRLFATDSEADLRNIAKAAPGAKVYVRILTEGSTTADWPLSRKFGCQTDMAMDLLILARQLGLEPYGISFHVGSQQRDISVWDAAIAKVKVIFERLKEEDGIVLKMINMGGGFPANYITKTNDLETYAEEIIRFLKEDFGDDLPEIILEPGRSLIANAGILVSEVVLVARKSRTAVERWVYADVGKFSGLIETMDESIKFPIWTEKQGEMEEVVIAGPTCDSADIMYEHYKYGLPLNLASGDRLYWLSTGAYTTSYSAVEFNGFPPLKAFYL

SEQ ID NO: 4211 - protein, 415 aa, Pseudomonas aeruginosa PAO1
MDTFSYRDAELFAEGVALSRIAERFGTPTYVYSRAHIEAQYRAYADALAGMPHLVCFAVKANSNLGVLNVLARLGAGFDIVSRGELERVLAAGGDPAKVVFSGVGKTRDDMRRALEVGVHCFNVESGEELERLQRVAAELGVKAPVSLRVNPDVDAQTHPYISTGLKENKFGIAIDEAEAVYARAAELDHLEVIGVDCHIGSQLTQLEPFLDALERLLGLVDRLAGKGIGIRHLDLGGGLGVRYRDEQPPLAGDYIRAIRERLHGRDLTLVFEPGRSIVANAGVLLTRVEYLKHTEHKDFAIVDAAMNDLIRPALYQAWMDVQAVRPRDAAPRRYDLVGPICETGDFLAKDRDLALAEGDLLAVRSAGAYGFVMSSNYNTRGRAAEVLVDGEQTHEVRRRETVQELYAGESLLPQ

SEQ ID NO: 4212 - protein, 391 aa, Shewanella oneidensis MR-1
MSQFQSIDVADYYDAQTFKRIEEFAKDKATPFVVIDTSIIAKQYDDMVNSFPYADVYYAVKANPAAEILTLLKDKGSNFDIASIYELDMVMNVGVTADRVSYGNTIKKRQDVRAFYERGVRMYASDSEADLRMIAEEAPGSRIYVRILTEGTDTADWPLSRKFGCQNEMAYELLVLANELGLEPYGISFHVGSQQRDIGAWDSAIGKVKSIFDRLRDEHNIVLKMINMGGGFPANYIDKTNQLGVYAEQITHFLKEDFGDDLPQIILEPGRSLISNAGVLVSEVVLISKKSYTALERWVFTDVGKFSGLIETMDEAIKFPIFTHKQGELEKCVIAGPTCDSADIMYEHYSYGLPNDLAIGDRMYWLTAGAYTTTYSAVCFNGFPPLKDYYL

SEQ ID NO: 4213 - protein, 432 aa, Clostridium tetani E88
MRLFGTMEVKDNNLYIGGVSCKELKNKYSTPLYIIDEDFLRGRCKEYYNNFGVEKHGNKVAYAGKSFLTIAMCQIIKEEGLFLDVVSSGELYTALKANFPMNKIYFHGNNKTLDEIEMGIELGVGKFVVDNFYEMNNINNMARKKGIKQSILLRITPGIEAHTHDYIKTGQVDSKFGFSMVGEEVYKAVETALSLPNINLSGIHCHIGSQIFETTPYEEAVDIMFEILKEIKNRYDYEISEVDLGGGFGIYYTKEDKPKETKEYCEAILKKALNKSKELGIKLPMLGIEPGRSIIGNAATLIYTIGAIKEIPGIRKYVSIDGGMNNNIRPALYDAKYECEVANNMNSDDRELVTIAGKCCETGDIVIEDVEISKSKSGDILAIPSVGAYGYSMSSNYNKIPKPAIVLVKDGESRVMCKRESFDDMLKNELSL

SEQ ID NO: 4214 - protein, 399 aa, Vibrio vulnificus CMCP6
MAHSQSIFDIHSLTSPVLSAEEIHLIEASVEQFGAPLLLLDCDVIRQQYRALKNALPNVTLHYALKPLPHPVVVRTLLAEGASFDLATTGEVELVASEGVPADLTIHTHPIKRDADIRDALAYGCNVFVVDNLNELEKFKAYRDDVELLVRLSFRNSEAFADLSKKFGCSPEQALVIIETAKEWNIRIKGLSFHVGSQTTNPNKYVEAIHTCRHVMEQVVERGLPALSTLDIGGGFPVNYTQQVMPIDQFCAPINEALSLLPETVHVLAEPGRFICAPAVTSVASVMGQAEREGQIWYYLDDGIYGSFSGLMFDDARYPLTTIKQGGELIPSVLSGPTCDSVDVIAENILLPKLNNGDLVIGRTMGAYTSATATDFNFFKRAQTIALNEFVASSERMIG

SEQ ID NO: 4215 - protein, 417 aa, Vibrio vulnificus CMCP6
MDYFNYQDDGQLWAEEVSLTSLAEQYGTPLYVYSRATLERHWHAFDRSVEGHPHLVCYAVKANSNLGVLNTLARLGSGFDIVSGGELERVLAAGGDPRKVVFSGVGKTEAEMRRALELNIKCFNVESEPELERLNRVAGELGVKAPISLRINPDVDAQTHPYISTGLRDNKFGIAFDRAPAVYQFAQSLANLNVQGIDCHIGSQLTAIEPFIDATDRLLALIDDLKEQGINIRHLDVGGGLGVVYRNELPPQPSEYAKALLGRLENHQDLELIFEPGRAIAANAGVLLTKVEFLKHTEHKNFAIIDAAMNDLMRPALYQAWQDIVPVQPRQGEAVTYDLVGPICETGDFLGKDRSLVLAENDLLAVRSAGAYGFVMSSNYNTRVRAAEVMVDGKQHYLVRQREELRSLWELEHILPE

SEQ ID NO: 4216 - protein, 385 aa, Methanosarcina barkeri
MCFRWRISFQEHDFNRIKKFSRGKETPFLTVDLQKIEQSYDELVEHMPFAKIHYAVKANPMDEVVLALKSKGSNFDVATVYELDQLLRLGVEPERISYGNTIKKEKDIEYAYEKGVRLYVTDSDSDLKKLARKAPGSRVFFRILTESDGADWPLSKKFGSHPDLIYKLILKAEKLGLEPYGLSFHVGSQQRDIGQWDNAISKCKYLFEAAAEKGIHLKMINLGGGFPAKYQAQAHDLETYAGEIRRFLHEDFGEELPEIIIEPGRSLVANAGIIVSEVVMISKKARFNQYKWVYLDIGKFGGLIETLDECIKYPIFCDKKGCAEEVILAGPTCDSMDILYEHHKYTFPHTMREGNRVYIFTAGAYTQSYSSVCFNGFPPLKAYLT

SEQ ID NO: 4217 - protein, 359 aa, Pseudomonas syringae pv. tomato str. DC3000
MVIDTAIISKAYDDLRAGFDFAKVYYAVKANPAVEVINLLKDKGSSFDIASIYELDKVLSCGVGPERMSYGNTIKKSKDIRYFYEKGVRLFATDSEADLRNIAKAAPGAKVYVRILTEGSTTADWPLSRKFGCQTDMAMDLLILARDLGLVPYGISFHVGSQQRDISVWDAAIAKVKVIFERLKEEDGIVLKLINMGGGFPANYITRTNSLETYAEEIIRFLKEDFGDDLPEIILEPGRSLISNAGILVSEVVLVARKSRTAVERWVYTDVGKFSGLIETMDEAIKFPIWTEKKGEMEEVVIAGPTCDSADIMYENYKYGLPLNLAIGDRMYWLSTGAYTTSYSAVEFNGFPPLKSFYL

SEQ ID NO: 4218 - protein, 415 aa, Pseudomonas syringae pv. tomato str. DC3000
MDAFNYRDGELFAEGVALSAIAERFGTPTYVYSRAHIEAQYRAFADALSGMPHMVCFAVKANSNLGVLNVLARLGAGFDIVSRGELERVLAAGGKAERIVFSGVGKTREDMRRALEVGVHCFNVESTDELERLQEVAAELNVRAPISLRVNPDVDAGTHPYISTGLKENKFGIAIAAAEDVYIRASQLPNLEVIGVDCHIGSQLTTLEPFIDALDRLLDLVDRLGDCGIHLHHIDLGGGLGVRYRHEEPPLAGDYIKAVRERLAGRDLGLLFEPGRFIVANAGVLLTQVEYLKHTEHKDFAIVDAAMNDLIRPALYQAWMDVTAVRPRDSEPRAYDIVGPICETGDFLAKGRELALAEGDLLAVHSAGAYGFVMSSNYNTRGRAAEVLVDGTQAFEVRRRETVAELFAGESLLPE

SEQ ID NO: 4219 - protein, 390 aa, Aquifex aeolicus VF5
MTKVVNYGEVQYGFAKRYFEEFLSERKGRIEKLLKPEKTPVLLMDIQGVKKKYLEVKYHFPEFNVYYAVKANDDESVIRALVEVGAGFEVASSQELEKVLRLGGKIEKVISSNPVKPPEFIEFAYQKGVRTFAVDSITEVKKIKDIAPRSKVYVRIAVPNEGSDWPLSRKFGVSVEEAVEILEYANDLGLVPYGITFHVGSQCNNLRNWFIAVKLSAQLWEKARAKGLKLQMLNMGGGIPVRYNYEALSVEDIAYYVKGLMRKYFPVQPYELQIEPGRGIVGDQGIMVTKVIGKAKRGSENWLYIDTGVFNGLAEALGGIRYPFFLEREGELKEWTIGGVSCDSMDVVAKNVYLPEPEVGDYLYILSAGAYTTVYASNFNGFPKPEVVPF

SEQ ID NO: 4220 - protein, 420 aa, Aquifex aeolicus VF5
MELLKEYNPYLEYRDGELFIEGVSLKELAQTFGTPLYVYSSNFIKERFEAYRKAFPDALICYAVKANFNPHLVKLLGELGAGADIVSGGELYLAKKAGIPPERIVYAGVGKTEKELTDAVDSEILMFNVESRQELDVLNEIAGKLGKKARIAIRVNPDVDPKTHPYIATGMQKSKFGVDIREAQKEYEYASKLENLEIVGIHCHIGSQILDISPYREAVEKVVSLYESLTQKGFDIKYLDIGGGLGIKYKPEDKEPAPQDLADLLKDLLENVKAKIILEPGRSIMGNAGILITQVQFLKDKGSKHFIIVDAGMNDLIRPSIYNAYHHIIPVETKERKKVVADIVGPICETGDFLALDREIEEVQRGEYLAVLSAGAYGFAMSSHYNMRPRAAEVLVENGSVKLIRKRENYDYIVEPSLDI

SEQ ID NO: 4221 - protein, 380 aa, Bradyrhizobium japonicum USDA 110
MTERIQEFLRNRRSEGRDTEPCLVVDLEVVRDNYQTFSKALPDSRVFYAVKANPAPEVLALLASMGSCFDTATVAEIEMALAAGATPDRISFGNTIKKERDIARAFALGIRLFAVDCAAEVEKIARAAPGAKVFCRILYDCAGAEWPLSRKFGCDPEMAVDVLDVAKRLGLEPCGISFHVGSQQRKVKAWDRALAMASQVFRDCAERGINLSMVNMGGGFPTKYLKDVPPVVTYGRSIFRALRKHFGNQIPETIIEPGRGMVGNAGIIESEVVLISKKSDEDEVRWVYLDIGKFGGLAETMDESIRYAIRTAHDGADMTPCVLAGPTCDSADVLYEKNPYPLPVTLEIGDKVLIEGTGAYTSTYSSVAFNGIPPLKTYHI

SEQ ID NO: 4222 - protein, 421 aa, Bradyrhizobium japonicum USDA 110
MNHFDYRNGVLHAEAVNLSELAATVGTPFYCYSTATLERHYRVFADAFAGEKVLVCYAMKANSNQSVLRTLARLGAGADVVSGGELKRALAAGIPARKILFSGVGKTEDELRAALAADILCLNVESEPELELLSRLATEMGKTARISVRVNPDVDAGTHAKISTGKSENKFGIPIAHAREVYARAAKLPGIQVTGTDVHIGSQITDLSKMETAFRILSEFVQTLRADGHDISHVDFGGGLGIPYYMDREAPPAPDAYAAMVKRVSHNLGCTLMFEPGRMIVGNAGILVAKVIYVKHGDGKNFVIIDAAMNDLIRPTLYEAHHDILPVTQPARDAATMVADVVGPVCETGDYLALDRTLPTPKAGDLLAIMTAGAYGAVQAGTYNTRPLVPEVLVKDDQYAVVRPRIDVEQLIAMDTPAPWL

SEQ ID NO: 4223 - protein, 377 aa, Brucella melitensis 16M
MATQRIIDFLNTRRPEGPCLVVDTDVVRENYQGFEKALPYSRIFYAVKANPAPEILRLLASLGSSFDTASVAEIEMALEAGATPDRISYGNTIKKERDIARAFDLGIRLYAVDCVEEVEKIARVAPGSRVFCRVLTDGEGAKWPLSRKFGCVPAMAKDVLRRAKALGLDAYGVSFHVGSQQTDLTAWDRALADAAAVFRTLADEGIILRMVNMGGGFPTRYLKDVPTAQAYGMAIFDALSRHFGNRIPETIIEPGRGMVGNAGVIKTEVVLVSRKADNDNVRWVYLDIGKFGGLAETMDEAIRYQIVTPHDGSETEPCVLAGPTCDSADVLYEKTPYPLPVSLTIGDEILIEGTGAYTTTYSAVAFNGFEPLRSYVI

SEQ ID NO: 4224 - protein, 396 aa, Coxiella burnetii RSA 493
MKLQTITSIAESRPIQPVFAFRPAALGRAVNYFCTQFDGRVLYAVKTNPEKHVIQAVHAHGVTAFDVASYEEIRIIKEYAPGAELYFMHPVKSPHAIREAYFEYGVRHFSLDCLEELHKILRHTENAKDLCLHLRLAIPNTFAEFNLAEKFGINLHEAPELLKQLRKAAYQLGVTFHVGSQCMHPDAYRIAIRMADKVINEAQVEIESFNVGGGFPSIYPGMIPPALTIYFEAIHDEFAKVAQRHPGIQLLCEPGRSLVAESTSVIVNVELRKDDILYINDGTYGSLFDAGIPHFIFPVHLLRPKHTADVDLLPFSFYGPTCDSLDYMKGPFYLPNDIKAGDYIEIGQMGAYGRTLSTAFNGFKQREGVIMVSDEPLMTMYSDEYITHEPLEVIAA

SEQ ID NO: 4225 - protein, 463 aa, Streptomyces avermitilis MA-4680
MSRSAHPAGPRHADVLPEGHYSAPAADLNALDPKVWSHTVSRGDDGVVRVGGIDVKQLAEEFGTPGYFLDEADFRERARAWRTAFGHDADVFYAGKAFLSRAVVRWLHEEGLNLDVCSGGELATALSAGMPADRIAFHGNNKSEEEIRTAVEAGVGRIVLDSFQEIVRVAHIAQSLGKRQRAQIRVTVGVEAHTHEFIATAHEDQKFGIGLADGQAAEAVRRALALDGLELVGIHSHIGSQIFDMAGFEVAARRVVKLLAEVRDEHGVELPEIDLGGGLGIAYTSEDDPREPHEIAKALSEIVTRECEAAKLRTPRISVEPGRAIVGPTAFTLYEVGTIKPLDGLRTYVSVDGGMSDNIRTALYDAEYSVALVSRASDAEPMLVRVVGKHCESGDIVVKDAFLPADLAPGDLIAVPATGAYCRSMASNYNHALRPPVVAVHDGEARVIVRRETEEDILRLDVG

SEQ ID NO: 4226 - protein, 388 aa, Thermotoga maritima
MMEYWIRRALEVVKTPFLLFDLSVVEKKYLEMKAALKKADIYYAVKANSHPRIISLLARLGSNFDVASKGEIEKLLALGVDGKRMSFGNTIKREEDIAFAYKNGIRLFAVDSEMEVEKVAINAPGSFVFVRVETDGADADWPLSRKFGTNPEHALQLLSYASKMKLIPAGLSFHVGSQNLNPESWKKAIEIAGRVFKKAMRSGLNLFLLNVGGGFPVQHTKPIPSMEEIGKAIEEAIDENLWFVHNLKVIAEPGRYMVGEAGWLVTKVLLKSERSGEKWVYIDAGVFHGLAETIQNFEYEIRVLGKEREELEEYHLAGPTCDSVDVIYDRIFLPKSITLNDLVCFINAGAYTVEYNTRFNGIEPPKMVFIEELTEISIEEKIKTRVLD

SEQ ID NO: 4227 - protein, 386 aa, Thermotoga maritima
MDILRKVAEIHGTPTYVYFEETLRKRSRLVKEVFEGVNLLPTFAVKANNNPVLLKILREEGFGMDVVTKGELLAAKLAGVPSHTVVWNGNGKSRDQMEHFLREDVRIVNVDSFEEMEIWRELNPEGVEYFIRVNPEVDAKTHPHISTGLKKHKFGIPLEDLDSFMERFRSMNIRGLHVHIGSQITRVEPFVEAFSKVVRASERYGFEEINIGGGWGINYSGEELDLSSYREKVVPDLKRFKRVIVEIGRYIVAPSGYLLLRVVLVKRRHNKAFVVVDGGMNVLIRPALYSAYHRIFVLGKQGKEMRADVVGPLCESGDVIAYDRELPEVEPGDIIAVENAGAYGYTMSNNYNSTTRPAEVLVRENGRISLIRRRETEMDIFKDVVM

SEQ ID NO: 4228 - protein, 415 aa, Pseudomonas aeruginosa
MDTFSYRDAELFAEGVALSRIAERFGTPTYVYSRAHIEAQYRAYADALAGMPHLVCFAVKANSNLGVLNVLARLGAGFDIVSRGELERVLAAGGDPAKVVFSGVGKTRDDMRRALEVGVHCFNVESGEELERLQRVAAELGVKAPVSLRVNPDVDAQTHPYISTGLKENKFGIAIDEAEAVYARAAELDHLEVIGVDCHIGSQLTQLEPFLDALERLLGLVDRLAGKGIGIRHLDLGGGLGVRYRDEQPPLAGDYIRAIRERLHGRDLTLVFEPGRSIVANAGVLLTRVEYLKHTEHKDFAIVDAAMNDLIRPALYQAWMDVQAVRPRDAAPRRYDLVGPICETGDFLAKDRDLALAEGDLLAVRSAGAYGFVMSSNYNTRGRAAEVLVDGQQTHEVRRRETVEELYAGESLLPQ

SEQ ID NO: 4229 - protein, 416 aa, Pseudomonas fluorescens
MDAFNYRGGELFAEGVALSAIAERFGTPTYVYSRAHIEAQYRTFADALEGMPHLVCFAVKANSNLGVLNVLARLGAGFDIVSGGELERVLAAGGSADKIVFSGVGKTREDMRRALEVGVHCFNIESTDELGSRLQIVAAELGVRAPISLRVNPDVDAGTHPYISTGLKENKFGIAIADAEDVYVRAAQLPNLEVLGVDCHIGSQLTTLEPFIDALDRLLALVDRLGDCGIYLRHIDLGGGVGVRYRDEEPPLVADYIKAVRERLDGRDLALMFEPGRYIVANAGVLLTQVEYLKHTEHKDFAIVDAAMNDLIRPALYQAWMDVTAVRPRDTAARSYDIVGPICETGDFLAKGRELALEEGDLLAVHSAGAYGFVMSSNYNTRGRCAEVLVDGDQAFEVRRRETVAELFAGESLLPE

SEQ ID NO: 4230 - protein, 433 aa, Rhizomucor racemosus
MLTDLETVVINPPYNVGALFKSAPSSPDISVHNRSVSEVFQQRLESITNQKWESDQENAFFVGDLGEVVRQHIRWKSLLPRIEPFYAIKCNPDPMVVQLLASLGCGFDCASKQEIQQVLDVGVDPSRIIYANPCKQASFIRYSAQQNVSRMTFDNAEELFKIKKYYPDAELVLRILTDDSMSLCQLGLKFGAPLHTVQHLLQLAKELNLNVIGVSFHVGSGCLDENAFGDAVVRAKNVFDQAKAMGYDFKFLDVGGGFPGADVKNGITFEKVAAVLGPIVDRLFPKDVRVIAEPGRYYVASAFNLAVNVIGRRTNMAHQDQTDASPEYMYYVNDGMYGSVNCIIFDHQVVHPKVLMKNELFAYGQDLPEAQYESSVWGPTCDSIDCLNKSARLPKLEPGDWLYFENMGAHTICAASQFNGFRKSEVLYTNTFC

SEQ ID NO: 4231 - protein, 451 aa, Ralstonia solanacearum
MPPAQSRPAADSVLPLSFSTGVAVRRPDGFLFMSESLIRQDGALMIEGVALEAIAARFGTPTYVYSRAALTANYRAYAAACEGRNARVQYAMKANSNLAVLQIFAQLGAGFDIVSGGELRRVLAAGGKAADVVFSGVGKTADEMRLALEAGVACFNVESIPELHRLNEVAGSLGKTAPVSLRVNPDVDAKTHPYISTGLKGNKFGVAFDEVLPTYRAAAAMPNLRVVGIDCHIGSQITEVSPYLDAIDKVLDVVARLDAEGIRLSHIDVGGGLGITYTDETPPDITAFARTLLDRIEQRGFGDRTVLFEPGRSLVGNAGLLLTRVEFLKPGAAKNFCIVDAAMNDLARPAMYEAYHHIVPVRERGGAPTVYDIVGPVCESGDWLGRDRALDAQPGDLLAILSAGAYGFTMSSNYNTRGRAAEVIVDGDRVHVARERERFEDLIRGEQLLSA

SEQ ID NO: 4232 - protein, 387 aa, Azotobacter vinelandii
MSIKIEDYYPPATFQRMKAFADKQETPFVVIDTEIIANAYEELGDCFPFARIYYAVKANPAVEIIRLLRDKGSNFDIASRYELDKVMAEGVGPERVSYGNTIKKAKDIRYFYEKGVRLFATDSEADLRNIAKAAPGSKVYVRILTEGTASADWPLSRKFGCQPDMALDLMILARQLGLVPYGLSFHVGSQQRDIDVWDAVIAKVKVIFERLKQEDGIELKMINMGGGFPANYITKTNSLQTYAEEIIRFLKEDFGEELPEIILEPGRSLIANAGILVSEVVLVSRKSRTAVERWVYTDVGKFSGLIETMDEAIKYPIWTEKKGEMEEVVIAGPTCDSADIMYENYKYGLPLNLASGDRLYWLSTGAYTTSYSAVEFNGFPPLKSYYL

SEQ ID NO: 4233 - protein, 415 aa, Azotobacter vinelandii
MEPFIYRDGTLFAEGVALSAIAARFGTPTYVYSRAHIEERYRAYADALAGMPHLVCFAVKANSNLAVLNLLARLGAGFDIVSRGELERVLAAGGDPARVVFSGVGKTREDMRRALEVGVHCFNVESDVELERLQEVAAELGVKAPVSLRVNPDVDAQTHPYISTGLKENKFGIDIEQAEEVYARAAELPNLEVLGIDCHIGSQLTTLSPFLDTLDRLLLLVDRLAARGIVIRHLDLGGGLGVRYRDEQPPAPGDYIAAVRERIEGRALALVFEPGRSIVANAGVLLTRVEYLKHTEHKDFAVIDAAMNDLIRPALYQAWMDVVPVTPHGGEVCSYDLVGPVCETGDFLAKDRELALVEGDLLAVRSAGAYGFVMSSNYNTRGRAAEVLVDGERMHLIRRRETIEDLYAGESLLPN

SEQ ID NO: 4234 - protein, 432 aa, Nicotiana glutinosa
MAGQTIIVSGLNPAAILQSTIGGGASPTAAAAENGTRKVIPLSRDALQDFMLSIITQKLQDEKQPFYVLDLGEVVSLMDQWKSSLPNIRPFYAVKCNPEPSFLSILSAMGSNFDCASRAEIEYVLALGISPDRIVFANPCKPESDIIFAAKVGVNLTTYDSEDEVYKIRKHHPKSELLPRIKPMFDGNARCPMGPKYGALPEEVEPLLRAAQAARLTVSGVSFHIGSGDADSNAYLGAIAAAKEVFETAAKLGMSKMTVLDVGGGFTSGHQFTTAAVAVKSALKQHFDDEPELTIIAEPGRFFAETAFTLATTVIGKRVRGELREYWINDGLYGSMNCVLYDHATVNATPLAVLSNRTNVTCGGSKTFPTTVFGPTCDALDTVLRDYQLPELQVNDWLVFPNMGAYTKAAGSNFNGFNTSTIVTHLAYTYPS

SEQ ID NO: 4235 - protein, 1434 aa, Plasmodium falciparum 3D7
MNGIFEGIEKRVVIKLKESFFKGNRNVNSFLDIPKELWEEKLKYIGCSIVSEISEDKNERRGERCRVYLLSESSLYIFDDSLFIKTCGKTRVLFFIPFVVDLLIYHMDNVGIIEKNCVYDETFIENEKFHNIAEFIKEHFLYCFFTHMNYRNKTKDGYFEQEYPHKSLEDEKKFFEFFFKNVQMYNTHLPMEKMHYIFFYSSDDVHMTDIASTFKFCSEIHLFGINKYNEKNQFHDAYLNNKSLNLFTRVHEDNLKLYDSSDADKEVTTHIYSTRGTYEDTGMVNCVDVIYKNESTLLNRNNIENIPSIENKESNNNSRCCHNNNYSGSCHNIVSVVPSERNNDHVHHRHYEDTLNRSNISAEDNNRNAQLEKEKDEDVRRDDEENKVLIKMIDTNLYECINYNKESFLYNEFYFTPCGYSCNVSEKNNYFCVHYSPEDSVSYVSVEVSSNLSCDRFLDFMHKQLNFYNGKYMFMINYVFCEESNNMSKMVPDDDNNNYSSGKSCVYYQDLNKKEKEEYYRLNKKLRNDLFINSKQFYELHTFTERTVGFMRVQYFVYKLRDVVKCVEKETLLARSSSCLFMFNNIKRNDVHDDYVTKSSNGGVIKQLTERDVDDMYEYALNFCKQNKIVVVDTNTFFDASKRKENLIKLEKVQTNEKDEYEEKDEVYRRGNNELSSLDHLDSKNNLIHMYYEKNKCDIINKDDENSTIATNNNDNNNDNNNDSSSYDKSITISRSSSCNNSHLSYSSFDNNHGNEKMKDYISVDENNNNNNNNNNNNNNNNNKNNNVLLTLQRNSDDENGKDKDNEKNDVSLENNMEKNYKEEIWNYYTKNKVEVKTLEKVLNENIDTSVVCINLQKILAQYVRFKKNLPHVTPFYSVKSNNDEVVIKFLYGLNCNFDCASIGEISKVIKLLPNLSRDRIIFANTIKSINSLIYARKENINLCTFDNLDELKKIYKYHPKCSLILRINVDFKNYKSYMSSKYGANEYEWEEMLLYAKKHNLNIVGVSFHVGSNTKNLFDFCLAIKLCRDVFDMSSNMGFNFYIINLGGGYPEELEYDNAKKHDKIHYCTLSLQEIKKDIQKFLNEETFLKTKYGYYSFEKISLAINMSIDHYFSHMKDNLRVICEPGRYMVAASSTLAVKIIGKRRPTFQGIMLKDLKDHYDPLNFAQQENKKQDETKINHNNDNNDNNDNNDNNDNNINNNNNNQKGGQGNIMNDLIITSTNDSTNKKNDHSSSQVIQNVSCTIRDKEGDNIKINTHTINNPNINGKENTVDGDNINIAHKNIGNNFSSSNSKLGNITNIKKKVVNINDNRYNYFSYYVSDSIYGCFSGIIFDEYNRCPIYVIKNKNNPNQNFMNFNLYLANVFGQSCDGLDMINSITYLPECYINDWLLYEYAGAYTFVSSSNFNGFKKCKKVYIFPESKPSLKGQPNKHW

SEQ ID NO: 4236 - protein, 251 aa, Carica papaya
IAVKCNPEPSFLSMLAAMGSNFDCASRAEIEYVLSLGISPERIVFANPCKPESDIIFAEKVGVNLTTYDSEDEVYENKKHHPKCELLLRIKPMNDGNARCPMGPKYGALPEEIEPLLRIAQASRLTVSGVSFHIGSGDADSNAYLGAIAAAKQVFETAAKFGMSKMNVLDIGGGFTSGHQFTTAATAVKSALQQHFSNEPELTIIAEPGRFFAETAFTLATTIIGKRVRGDLREYWINDGLYGSMNCVLYD

SEQ ID NO: 4237 - protein, 377 aa, Mesorhizobium loti
MATQRILDFLATRRPSGPCLVVDLDVVRDNFRAFEKALPDSKIYYAVKANPAPEILRLLAAMGSSFDTASVAEVEMAMDAGAPADRISFGNTIKKERDIARAYQLGIRLFAVDCVEEVEKIARVAPGARVFCRVLTDGEGAEWPLSRKFGCVPAMAVDVLRHAKGLGLDAYGVSFHVGSQQTDLTAWDRALADAKKVFATLAEEGIVLKMVNMGGGFPTRYLRDVPAAQAYGQAIFSALRKHFGNAIPETIIEPGRGMVGNAGVIKSEVVLISKKADNDNVRWVFLDIGKFGGLAETMDEAIRYPLVTRHDGSETAPCVLAGPTCDSADVMYEKTPYPLPLSLTIGDEVLIEGTGAYTTTYSAVAFNGFEPLRSYVI

SEQ ID NO: 4238 - protein, 406 aa, Mesorhizobium loti
MQRFENAREAALALRPDDPVYCFRPQVLKADARQFMGMFPGKTAYAVKTNGEQIVLKTLVEAGVTAFDVASPGEFAAVRAVSPDAEMLYMHPVKAQSDIKLALEKYGIRVISLDHEDEITKLTRVVRALDIDPGSISVFVRIQTKGSAAYELSKKFGAGPAYAVELAERLNRTGYKVGLCFHVGSQIEDPDTYERALASADWVRNRLTFDIAGLDVGGGFPAEYGHDPNRKQIEMPSLGQIMSRLSGDLKEYQFDQMPLVAEPGRVIVARCLSLIVRVLLRKGKRLYINDGIWASLSDSWTGKITLPARFIPDPAIRTRNGAEKNVVPFKVCGATCDSVDILSRPFWLPETVDTGDWIEIGHIGAYSLSLRTRFNGFYPDTFVEVTTPFDEGDAPQGFASLETMAD

SEQ ID NO: 4239 - protein, 379 aa, Sinorhizobium meliloti
MAMTTARIIDFLNTRRPEGPCLVVDLDVVRDNFKAFRHALPDSAIYYAVKANPAPEILRLLAGLGSNFDCASVAEIEMALDAGATPNRISYGNTIKKERDVARAHALGISLFAVDSHEEVEKIARAAPGARVFCRVLTDGEGAEWPLSRKFGCVPQMAVDVLVYAHQLGLVSYGVSFHVGSQMTKLDAWDAALADAKRVFVQLAKQGIELKMVNMGGGFPTKYLRDVPSAEAYGQAIFGALKKHFGNNIPETIIEPGRGMVGNAGVIKAEVVLVSKKSDNDSHRWVFLDIGKFGGLAETMDEAIRYPIRTARDADAMEPCVLAGPTCDSADVLYEKNMYPLPISLTIGDEVLIEGTGAYTTTYSAVAFNGFEPLKAYVI

SEQ ID NO: 4240 - protein, 422 aa, Sinorhizobium meliloti
MNHFQYRDGILYAEDVPLTEIARAVGTPFYCYSTATLERHYKVFSQAFADVDAMVCYAMKANSNQAVLKTLGRLGAGLDVVSEGELRRALAAGIPAGRIMFSGVGKTAREMDFALEAGIYCFNVESEPELEVLNQRAVRAGRRAPVSFRINPDVDARTHAKISTGKKENKFGISWERARGVYAHAAELPGIEVTGIDMHIGSQITELQPFDDAFKLLRELVDTLRSDGHVIEHVDIGGGLGIPYREDNNPPPLPDAYADIVKNQLKGLDCKIVTEPGRLIVGNAGILVTEVVYVKDGGDKTFVIVDGAMNDLIRPTLYEAYHEIRPVKISAASAPRIKADVVGPVCETGDYLALDREMAMPKPGDLFAIGSAGAYGAVQAGTYNSRLLVPEVLVKGDRFHVIRPRRDYDELIGLDSVPDWLD

SEQ ID NO: 4241 - protein, 431 aa, Glycine max
  unsure (1)..(431): unsure at all Xaa locations
MPSLVAEAFEAKGAEPLSLXXPIFSASGVKGKRVTALSADALTDFIQAIIADKXXDIDSPFSVLDLGVVMGLMDKWACKLPTVQPFYAVKCNPNLSLIGALAALGSSFDCASKAEIESVLSLGVSPDRIIYANPCKSESHIRYAASVGVNVTTYDSLDEVEKIRNCHPTCELLLRIKPPQDSGARTSLGLKYGALPEEVHELLQAAHEAGLKVTGVSFHIGSGGADTRAYDGAISAAKNVFEMASGLGLPRMRVLDIGGGFTSGPPFEAAALKINAAIQASFGNEEGLVVIGEPGRYFAETAFTLATRVIGKRVRGDVREYWIDDGIYGTLNNIVFDYATVTCMPLACTSKPENPTCWNLKTYPSTVFGPTCDSIDTVLRDYQLPELQVNDWLVFPNMGAYTTSSGTNFNGFSSSAKSIFLACSSPEHTMF

SEQ ID NO: 4242 - protein, 251 aa, Phaseolus vulgaris
IAVKCNPEPSFLSMLAAMGSNFDCASRAEIEYVLSLGISPERIVFANPCKPESDIIFAEKVGVNLTTYDSEDEVYKIKKHHPKCELLLRIKPMNDGNARCPMGPKYGALPEEIEPLLRIAQASRLTVSGVSFHIGSGDADSNAYLGAIAAAKQVFETADKFGMSKMNVLDIGGGFTSGHQFTTAATAVKSALQQHFSNEPELTIIAEPGRFFAETAFTLATTIIGKRVRGDLREYWINDGLYGSMNCVLYD

SEQ ID NO: 4243 - protein, 115 aa, Sphaerechinus granularis
MEQLNDKSMKTELFDSSETTLKDIIVSKINDPTMREDADDAFFIGDLGDVIQKHRKWLRNLPRVEPHYAVKCNPDVHVLKLLAGLNIGFDCASKNEIQEILKIGVSPSRIIFANP

SEQ ID NO: 4244 - protein, 251 aa, Daucus carota
IAVKCNPEPSFLSMLAAMGSNFDCASRAEIEYVLSLGISPGRIVFANPCKPESDIIFAEKVGVNLTTYDSEDEVYKIKKHHPKCELLLRIKPMNDGNARCPMGPKYGALPEEVEPLLRIAQASRLTVSGVSFHIGSGDADSNAYLGAIAAAKQVFETADKFGMSKMNVLDIGGGFTSGHQFTTAATAVRSALQQHFSNEPELTIIAEPGRFFAETAFTLATTIIGKRVRGDLREYWINDGLYGSMNCVLYD

SEQ ID NO: 4245 - protein, 435 aa, Capsicum annuum
MAGQTVIVSGLNPAAILQSTIGGAPPSTAAAAAENGDTTRKVVPLSKDALQDFMVSIITQKLQGKKKPFYVLDLGEVVSLMDQWNVALPNVHPFYAVKCNPEPSFLSMLAAMGSNFDCASRAEIEYVLSLGISPERIVFANPCKPESDIIFAEKVGVNLTTYDSEDEVYKIKKHHPKCELLLRIKPMNDGNARCPMGPKYGALPEEIEPLLRIAQASRLTVSGVSFHIGSGDADSNAYLGAIAAAKQVFETAAKFGMSKMNVLDIGGGFTSGHQFTTAATAVKSALQQHFSNEPELTIIAEPGRFFAETAFTLATTIIGKRVRGDLREYWINDGLYGSMNCVLYDHATVTATPLACMSNRVNLNCSGSKMFPSTIFGPTCDALDTVLRDYQLPELQVNDWLIFPNMGAYTKAAGSNFNGFNTSAIVTHLAYAYPS

SEQ ID NO: 4246 - protein, 435 aa, Capsicum annuum
MAGQTVIVSGLNPAAILQSTIGGAPPSTAAAAAENGDTTRKVVPLSKDALQDFMVSIITQKLQGEKKPFYVLDLGEVVSLMDQWNVALPNVRPFYAVKCNPEPSFLSMLAAMGSNFVCASRAEIEYVLSLGISPERIVFANPCKPESDIIFAEKVGVNLTTYDSEDEVYKIKKHHPKCELLLRIKPMNDGNARCPMGPKYGALPEEIEPLLRIAQASRLTVSGVSFHIGSGDADSNAYLGAIAAAKQVFETAAKFGMSKMNVLDIGGGFTSGHQFTTAATAVKSALQQHFSNEPELTIIAEPGRFFAETAFTLATTIIGKRVRGDLREYWINDGLYGSMNCVLYDHATVTATPLACMSNRVNLNCSGSKMFPSTIFGPTCDALDTVLRDYHVPELQVNDWVIFPNMGAYTKAAGSNFNGFNTSAIVTHLAYAYPS

SEQ ID NO: 4247 - protein, 335 aa, Capsicum annuum
AILQSTIGGAPPSTAAAAAENGDTTRKVVPLSKDALQDFMVSIITQKLQGEKKPFYVLDLGEVVSLMDQWNVALPNVRPFYAVKCNPEPSFLSMLAAMGSNFDCASRAEIEYVLSLGISPERIVFANPRKPESDIIFAEKVGVNLTTYDSEDEVYKIKKHHPRCELLLRIKPMNDGNARCPMGPKYGALPKEIEPLLRIAQASRLTVSGVSFHIGSGDADSNAYLGAIAAAKQVFKTAAKFGMSKVNVLDVGDGFTSGHQFTTAATAVKSALQQHFSNEPELTIIAEPGRFFAETAFTLATTIIGKRVRGDLREYWINDGLYGSMNCVLYDKGEF

SEQ ID NO: 4248 - protein, 431 aa, Datura stramonium
MAGQTVIVSGLNPAAILQSTIGGATPAPAAENDHTRKVVPLSRDALQDFMVSIITQKLQDEKQPFYVLDLGEVVSLMDQWNAGLPNIRPFYAVKCNPEPSFLSMLSAMGSNFDCASRAEIEYVLSLGISPDRIVFANPCKPESDIIFAAKVGVNLTTFDSEDEVYKIRKHHPKCELLLRIKPMDDGNARCPMGPKYGALPEEVEPLLRTAQAARLTVSGVSFHIGSGDADSKAYLGAIAAAKGVFETAARFGMSKMTVLDIGGGFTSGHQFTTASAAVRSALEQHFHDEQELTIIAEPGRFFAETAFTLATTIIGKRVRGELREYWINDGLYGSMNCVLYDHATVNATPLACMSNRSNLNCGGSKTFPSTVFGPTCDALDTVLRDYQLPELQVNDWLIFPNMGAYTKAAGSNFNGFNTSAIVTHLAYAYPS

SEQ ID NO: 4249 - protein, 431 aa, Lycopersicon esculentum
MAGQTVIVSGLNPAAILQSTIGGAPVAAAAENGHTRKVVPLSKDALQDFMVSIITQKLQDDKQPFYVLDLGEVVSLMEQWNSALPNIRPFYAVKCNPEPSFLSMLSAMGSNFDCASRAEIEYVLSHGISPDRIVFANPCKPESDIIFAEKIGVNLTTYDSEDEVYKIRKHHPKCELLLRIKPMTDGNARCPMGPKYGALPEEIEPLLRTAQAARLTVSGVSFHIGSGDADSNAYLGAIAAAKQVFETAAQLGMPKMTVLDIGGGFTSGHQFTTAAPAVKSALETHFHDFPELTIIAEPGRFFAETAFTLATTIIGKRVRGELKEYWINDGLYGSMNCVLYDHATVTATPLACMSNRNNLNCGGSKTFPSTVFGPTCDALDTVLRDYQLPELQVNDWLIFPNMGAYTKAAGSNFNGFNTSAIVTHLAYAYPN

SEQ ID NO: 4250 - protein, 433 aa, Nicotiana tabacum
MAGQTIIVSGLNPAAILQSTIGGGASPTAAAAAENGTRKVIPLSRDALQDFMLSIITQKLQDEKQPFYVLDLGEVVSLMDQWKSALPNIRPFYAVKCNPEPSFLSILSAMGSNFDCASRAEIEYVLSLGISPDRIVFANPCKPESDIIFAAKVGVNLTTYDSEDEVYKIRKHHPKSELLLRIKPMLDGNARCPMGPKYGALPEEVDPLLRAAQAARLTVSGVSFHIGSGDADSNAYLGAIAAAKEVFETAAKLGMSKMTVLDVGGGFTSGHQFTTAAVAVKSALKQHFDDEPELTIIAEPGRFFAETAFTLATTIIGKRVRGELREYWINDGLYGSMNCVLYDHATVNATPLAVLSNRSNVTCGGSKTFPTTVFGPTCDALDTVLRDYQLPELQVNDWLVFPNMGAYTKAAGSNFNGFNTSAIVTHLAYSYPS

SEQ ID NO: 4251 - protein, 432 aa, Nicotiana tabacum
MAGQTIIVSGLNPAAILQSTIGGGASPTAAAAENGTRKVIPLSRDALQDFMLSIITQKLQDEKQPFYVLDLGEVVSLMDQWKSALPNIRPFYAVKCNPEPSFLSILSAMGSNFDCASRAEIEYVLSLGISPDRIVFANPCKPESDIIFAAKVGVNLTTYDSEDEVYKIRKHHPKSELLLRIKPMFDGNARCPMGPKYGALPEEVEPLLRAAQAARLTVSGVSFHIGSGDADSNAYLGAIAAAKEVFETAAKLGMSKMTVLDVGGGFTSGHQFTTAAVAVRSALKQHFDDQPELTIIAEPGRFFAETAFTLATTIIGKRVRGELREYWINDGLYGSMNCVLYDHATVNATPLAVLSNRTNVTCGGSKTFPTTVFGPTCDALDTVLRDYQLPELQVNDWLVFPNMGAYTKAAGSNFNGFNTCAIVTHLAYTYPS

SEQ ID NO: 4252 - protein, 433 aa, Nicotiana tabacum
MAGQTVIVSGLNPAAILQSTIGGGASPTAAAAAENGTRKVIPLSRDALQDFMLSIITQKLQDEKQPFYVLDLGEVVSLMDQWKSALPNIRPFYAVKCNPEPSFLSILSAMGSNFDCASRAEIEYVLSLGISPDRIVFANPCKPESDIIFAAKVGVNLTTYDSEDEVNKIRKHHPKSELLLRIKPMLDGNARCPMGPKYGALPEEVDPLLRAAQAARLTVSGVSFHIGSGDADSNAYLGAIAAAKEVFETAAKLGMSKMTVLDVGGGFTSGHQFTTAAVAVKSALKQHFDDEPELTIIAEPGRFFAETAFALATTIIGKRVRGELREYWINDGLYGSMNCVLYDHATVNATPLAVLSNRSNVTCGGSKKFPTTVFGPTCDAFDTVLRDYQLPELQVNDWLVFPNMGAYTKAAESNFNGFNNSAIVTHLAYFYPS

SEQ ID NO: 4253 - protein, 245 aa, Nicotiana tabacum
GTRCPMGPKYGALPEEVDPLLRAAQAARLTVSGVSFHIGSGDADSNAYLGAIAAAKEVFETAAKLGMSKMTVLDVGGGFTSGHQFTTAAVAVKSALKQHFDDEPELTIIAEPGRFFAETAFTLATTIIGKRVRGELREYWINDGLYGSMNCVLYDHATVNATPLAVLSNRSNVTCGGSKTFPTTVFGPTCDALDTVLRDYQLPELQVNDWLVFPNMGAYTKAAGSNFNGFNTSAIVTHLAYSYPS

SEQ ID NO: 4254 - protein, 293 aa, Oryza sativa
  unsure (1)..(293): unsure at all Xaa locations
MFNHLELSDTLYNALSENSIYNYFNCVDKSALPDLLTNKAASEPQLDFSSVELLRQPIDVEQQIREKISQQTEDNAFFIVNLSDIIRKKKQWNNCLPRVEPFYAVKCNPDIEIIKCLAVMGVNFDCASRGEIDLVMSIGVTADRIIYANPCXPKAHLNYAREVGVNMSVFDGEAELYKIKECHPNLKVVMRIATDDRNSMCAFFVKFGARGNPSTAFLMVAKSLNPSXIGVAFHVGSGXCLDWDTYKSSFRRVSRFFQNGEELGLTMNLLGHLGGFPXDIVLFLEIISALIFS

SEQ ID NO: 4255 - protein, 339 aa, Sorghum bicolor
LNPAAILQSTNGGAPPSTAAAAAENGDTTRKVVPLSKDALQDFMVSIITQKFQGEKKPFYVLDLGEVVSLMDQWNVALPNVRPFYAVKCNPEPSFLSMLAAMGSNFDCASRAEIEYVLSLGISPERIVFANPCKPESDIIFAEKVGVNLTTYDLEDEVYKIKKHHPKCELLLRIKPMSDGNARCPMGSKFGAFPEEIEPVFRIAQASRLTVSGVSFHIDSGDADSNAYLGAIAAAKQVFETAAKFGMSKMNVLDIDGGFTSGHQFTTATTTVKSALQQHFSNEPELTIIAGPGRFFAETAYTLATTIIGKRVRGDLREYWINDGLYGSMNCVLYDNATS

SEQ ID NO: 4256 - protein, 497 aa, Triticum aestivum
  unsure (1)..(497): unsure at all Xaa locations
MCREVEQKPHTPRGIPRASDLLAALHTVARARATPRETVTYHAELGSHCLSEIFTVASVVEMVGSSPMQAVLVAPGVKDKKVLAFRQDALKDVAALMRTIAAGGVRSAFYVFDLARVVDLYPSXWRRALPGVRACYAVKCNPEPALLGALAALGAGFDCASRREIEAVLALGVQPGSIVYANPCKPEAHLEYAAEVGVNLTTYDSEEEVVKVKRCHPGCELILRIKGPDGGEARVDLGTKYGAHEDEVLPLLRAAQREGLNVAGVSFHVGSGASNTDVYRGAIEAARGVFDAAAALGMPPMRVLDIGGGFMAGSAFDEAATVINAALERYFGELPCVEVIGEPGRYFAETAFTMAARVIGKRTRGEVREYWIDDGLYGTLSCIPMDHYVPHPRPLAVXXRAGEKAYTSTVFGPTCDSLDTVVTGYQLPEMNVGDWLVFDDMGAYTTASGSNFNGFSTSDIKTYLAYSSXYGTYDVATYYVAHAIRFVFAVHKTKSCN

SEQ ID NO: 4257 - protein, 194 aa, Triticum aestivum
  unsure (1)..(194): unsure at all Xaa locations
XARAAFDAAAQLGMPPMRVLDIGGGFMPDATFDEAAEAINDALAQHFPPGCGVEVIGEPGQYFAEKAFTLAARVIGRRARGEAREXGASTCRARGRSLPHLGRLRAAPEAAHCPASARRRGEGTTYASTVFGPTCDSRDKVVTGHQLPEMKVGDWLVFDGIGAYAASSGSNFNGFLISDIKTHLAYSTXPPTSS

SEQ ID NO: 4258 - protein, 126 aa, Triticum aestivum
  unsure (1)..(126): unsure at all Xaa locations
XEGKGYMLYVNDGVYGNFSNIMFDHQQPTAKILRTSGKTLFETAAAEPTPVGEGFEYSIWGPTCDGIDRITDSTRFDPILDVGDWLYFEDMGAYTKCSATQFNGFSNAHDVIYVCSEPGAKALLGL

SEQ ID NO: 4259 - protein, 148 aa, Triticum aestivum
  unsure (1)..(148): unsure at all Xaa locations
IPATQAEHTPHQQCPAQVLARIRSRPDRHGRRQPNAVGAGGPRGXXGRKLHAFKRNGXXDAGVTGVMRSIAGTEEPFFVFDLATVVDLYSRWCRALDGVRPYYAVKCNPEPAMLGAMAALGAGFDCASRAEIEAVLALGVVEPGSIVX

SEQ ID NO: 4260 - protein, 125 aa, Triticum aestivum
  unsure (1)..(125): unsure at all Xaa locations
DSALRAHHXIAARQTWPEAALQAAVLGAPGVKGRKVRALKRSDKDAVAGLIRSIAGXXEEQGAFFVFDLAAVADLYSRWCRALDGVRPFYAVKCNPEPAMLGAMAALGAGFDCASRAEIEAVLAH

SEQ ID NO: 4261 - protein, 467 aa, Zea mays
  unsure (1)..(467): unsure at all Xaa locations
SHQTTFSPQGLLGITCQVRWIGHRLVNTSSPTNKFDPAAHLSPSSIVITMVGSSPLQAVLVAPGVKDRKVLAFKRDALKDSLIHSILASSPAQRSAFYVFDLAKVVDLFRAWRRALPDARPCYAVKCNPDPALLGALAALGAGFDCASRAEIEAVLALGVRPGDIVYANPCKPEAHLEYAAEVGVNLTTYDSEEEVAKVRRCHPGCELLLRLKGPDGGDVRVDLGTKYGAHPDEVVPLLRAAQRAGVGVAGVSFHVGSGASNLHVYRGAIQAARAAFDAAAALGMPPMRVLDIGGGFVSGPTFDDAAAVINDALAHHFGDLPCVEVIAEPGRYFAETAFTLAARVIGKRTRGEVREYWIDDGLYGSLNCIIMDHYVPTPRPLASPRPGDKTYTSTVFGPTCDSLDTVLTGYLLPEMSVGDWLVFDDMGAYTTGAGSNFNGYATSDIKIYVAYSSXMRTSPRRRAWTN

SEQ ID NO: 4262 - protein, 339 aa, Zea mays
LNPTAILQSTIGGAPPSTAAAAAENGDTTRKVVPLSKDALQDFMVSIITQKLQGEKKPFYVLDLGEVVSLMDQWNVALPNVRPFYAVKCNPEPSFLSMLAAMGSNFDCASRAEIEYVLSLGISPERIVFANPCKPESDIIFAEKVGVNLTTYDSEDEVYKIKKHHPKCELLLRIKPMNDGNARCPMGPKYGALPEEIEPLLRIAQASRLTVSGVSFHNGSGDADSNAYLGAIAAAKQVFETAAKFGMSKINVLDIGGGFTSGHQFTTAATAVKSALQQHFSNEPELTIIAEPGRFFAETAFTLATTIIGKRVRGDLREYWINDGLYGSMNCVLYDNATS

SEQ ID NO: 4263 - protein, 256 aa, Zea mays
SQHEFSIEQVRSRCSSIARVVNRLVITMVGSSPLQAVLVAPGVKDRKVLAFKRDALKDSLIHSILASSPAQRSAFYVFDLAKVVDLFRAWRRALPDARPCYAVKCNPDPALLGALAALGAGFDCASRAEIEAVLALGVRPGDIVYANPCKPEAHLEYAAEVGVNLTTYDSEEEVAKVRRCHPGCELLLRLKGPDGGDVRVDLGTKYGAHPDEVVPLLRAAQRAGVGVAGVSFHVGSGASNLHVYRGAIQAARAAFD

SEQ ID NO: 4264 - protein, 289 aa, Zea mays
CESLDSFVTAIEDAKAVFEMGKNLGFDMHILDLGGGYPGTSDAKIPFEPIAEIIQETLDRCFPPVDGLEIIAEPGRYFAASAFTLVTQVIAKREIQYDDNAAAEAIEFADREIMYYLNDGVYGSFNCTIFDHWTVYPCPWLEANPVQSYIRTVLWGPTCDSMDMIRRDIYMPELIIGDWVVFDEMGAYTIAAASPFNGFKLPKLKYQISGRVMAVLKATKDWPALKKLLVSPESSAEHQQMGCSSSSLSYSGSFGNSENHLHPTPPDTEPGDRIEPCMKNGKISYIQVH

SEQ ID NO: 4265 - protein, 164 aa, Phycomyces blakesleeanus
CKQASYIRYAAQQNVAKMTFDNADELYKIKKFYPNAELVLRILTDDSKSLCQLGIKFGAPLDTVDHLLQTAKDLDLNVIGVSFHVGSGCYDQYAFSEAVNLARGVFDKAEAMGFNFSLLDVGGGFPSADVTDGVTFEKIAAVLGPTVDALFPPNIRVIAEPGRY

SEQ ID NO: 4266 - protein, 421 aa, Novosphingobium aromaticivorans
MGTSKPQGSLVQRSVWGSLELHIHPDALAVVRASAPDQPAILNRPHAAARAARFFVEKFPGKSLYAVKANPSADLLRVLWDSGVTHYDVASIAEVRLVRATLPEATLCFMHPVKAPAAIREAYEQHGVRVFSLDSFEELEKIKEACGFAEDLTLCVRLRVSSDYSELSLASKFGCDLTNAAELLQATRQAADSLGVCFHVGSQSMSPHAYVQALERVRAAIVDASVTVDIIDVGGGFPSIYPGMEPPPLEDYFGVIDRTYESLPISYSAELWCEPGRALCAEYNSMIVRVERRRGAELYINDGAYGALFDAAHVGWRFPVRVLREEVANDGVEIEMEPFSFYGPTCDDMDHMEGPFELPADMKVGDYIEIGMLGAYGAAMKTAFNGFGATEVFEVSDEPMASQYRGDRRDPRVSDNVVSLR

SEQ ID NO: 4267 - protein, 419 aa, Novosphingobium aromaticivorans
MDHFEVSNGVLHAEDVALPVIAAEVGTPVYVYSRATLTRHARVFRDALSILPAVKIAFAVKSNPNLAVLKVLAAEGYGADVVSGGEMERALAAGMKPDGIVFSGVGKTEAEMRRGIEAGIGQFNLESEEEGLELAEIAASMGKVASAALRVNPDVDAGTHGKISTGKAENKFGVPFDRAAAIYARLADTPGLNMRGLALHIGSQLSKLDPLEAAFTKVGGLMRAIREGGHAVTHMDLGGGVGVPYKAGEVFPQPAEYAAMVAKVTADWGVTLMFEPGRVITGNTGVLMTQVVRVKEGAGHPWVVVDAAMNDLARPALYDAWHDFAAVEPTGETFVANIVGPICESSDTFAMARTIDKVGRGDLAVFRTAGAYGATMANTYNSRPLVPEVMVDGEKWAVVADRIDPATILAAERVPDFLK

SEQ ID NO: 4268 - protein, 432 aa, Schizosaccharomyces pombe
MPAIMEKNMLVSESLRTTELLGHVKPIDSVVTWSSPGSSRQAIGEAFKNTIEEIERAAVRGEPADSDAFFVADLNGVYRQLLRWHAKLPRVQPFYAVKCNPDPKVLALLNKFGTGFDCASKGELEQILGLGVSPDRIVYANPCKAITYVRYAASKGINLMTFDNADELYKVKQHHPNSRLLLRISTDDSNSLCRLSLKFGASLDDTGKLLDIAKSLELNVVGVSFHVGSGSYDPSAFLDAIQRSRQVFDQGLERGFNFDLLDIGGGFMNDSFDGVADLIRSALDTYFDPSIRVISEPGRFFVSSSFTLAVNVIAKRKLDDEEKVMYYVNDGVYGSLNCILFDHQHPVARVLKCGSRFVYNDLVGTGQHRCFIWGPTCDSLDVIANDAHLPYELNVGDWIYFEDAGAYTVAAASCFNGFKTSRIVYLDTDILD

SEQ ID NO: 4269 - protein, 363 aa, Schizosaccharomyces pombe
FVADLNGVYRQLLRWHAKLPRVQPFYAVKCNPDPKVLALLNKFGTGLDCASKGELEQILGLGVSPDRIVYANPCKAITYVRYAASKGINLMTFDNADELYKVKQHHPNSRLLLRISTDDSNSLCRLSLKFGASLDDTGKLLDIAKSLELNVVGVSFHVGSGSYDPSAFLDAIQRSRQVFDQGLERGFNFDLLDIGGGFMNDSFDGVADLIRSALDTYFDPSIRVISEPGRFFVSSSFTLAVNVIAKRKLDDEEKVMYYVNDGVYGSLNCILFDHQHPVARVLKCGSRFVYNDLVGTGQHRCFIWGPTCDSLDVIANDAHLPYEPNVGDWIYFEDAGAYTVAAASCFNGFKTSRIVYLDTDILD

SEQ ID NO: 4270 - protein, 449 aa, Yarrowia lipolytica
MAPHILGPEPVQADSSFLGTRPCPTLSYPASFVDEVSASIDQGLSESEKLIANAMKTRIEAIDLETCSPGSEDSFFVADLGIVYSQFMRWSNCLPRVTPFYAMKCNGDPKVLQLLAALGTGFDCASRNEIQTILDLGVSQDRIIYAHPCKVASYIRYASSVGVEKMVFDNAEELYKCAKYHPTAKLFLRIVTDDSQSLCQFSVKYGAALENTQSLLQLAKDLGLNVAGVSFHVGSGAGDPNAFLDAVRNAKRVFDQGAAIGMHLNTLDVGGGFSDDSFESSAAVLGDALDKYFPEESGVNLMAEPGRFFVSEAFTIASHVIARRIIENQNKAMLYLNDGVYGNMNCILFDHQEPVPKVLTYQGKFMYGERYQKQKSSQDVSVWGPTCDGIDCISKSCQLPVLLDVGDWMYFTSFGAYTVAASTTFNGFNSDCETLYVCSKKEVEQYIKL

SEQ ID NO: 4271 - protein, 81 aa, Yarrowia lipolytica
GVSFHVGSGAGDPNAFLDAVRNAKRVFDQGAAIGMHLNTLDVGGGFSDDSFESSAAVLGDALDKYFPEESGVNLIAEPGRY

SEQ ID NO: 4272 - protein, 484 aa, Neurospora crassa
MVMPTVVSDRMGTIDFIDYTNNHVFSKCQTDSLNTVNNGSLKHDDYLHGLANGKLVAKQMIGDALRQRVESIDSEFCEPGDEDTFFVADLGEVYRQHLRWKLNLPRVKPFYAVKCHPDERLLQLLAALGTGFDCASKAEIEQVLRMGVDPSRIIYAQPCKTNSYLRYVAQQGVRQMTFDNADELRKIARLYPDAELFLRILTDDSSSLCRFSMKFGASLDSTDGLLGLARQLGLNVVGVSFHVGSGASDPTAFLKAVQDAHVVFQQAAAYGYSLKTLDVGGGFCSDDSFEQMANVLRAALDEYFPAHTGVNLIAEPGRYYASSAFTLACNIIARRTIQDGSAVSVSDSSSMSDDGSVNNGDARYMVYVNDGLYGNFSSIMFDHQHPVAKILRAGGRTMYNSVAAHESSAEDAIEYSIWGPTCDGIDRITESIRFREILDVGDWLYFEDMGAYTKCSATTFNGFSNEHDVIYVCSEPGAMALLGL

SEQ ID NO: 4273 - protein, 459 aa, Ustilago maydis
MSSITLSRLMVTSPSITATLTRSVGVFSTTLTYHGCEANGENAFFVADLSEVYRQHLRWMRALPRIVPFYAVKCNPDPYVLQLLGALGTGFDCASNGEIEAVLKLGINPARIIYANPSKAASFVRHAAGHNVGLTTFDNMDELEKMKRYHPSCKLVVRILTDDSKSACQLGLKFGAPIASVPRLLERARELELDVVGVSFHVGSGCYDPDSFRDAVYRACAFEMGKQAGFSFDLLDVGGGFGHDNFEMVAGVLGPAIDAYFPDEDFAPGGKEVVGKVNGLRIIAEPGRFYVHSAFALATNIIAVRRGEPSAAMDHVEATPKAQVMYYQNDGLYGSFNCVIFDHVKFIQSSDAGPRVRVRADDWVARGASGECGRLALQQEAMTLESCSVWGPTCDSIDCVRDHVELPKGLQVGDWLVYENMGAYTICAASTFNGIRRSEIRYTLGHGQDADIVRQLMLQ

SEQ ID NO: 4274 - protein, 421 aa, Zymomonas mobilis
MIPFSLKNGTLCVEDIPLPEIAAQYGTPCYVYSHSYLTERARRFTKALDGAGKGKSLVAFAVKANPSQAILASFAKEGLGADVVSAGEIRRAVHAGIPPERIVFSGVGKTAEEMRYALEIGIGQFNIESVSEIEMLAEVATSLGKKAAVALRINPDVDPHTHAKIATGKADTKFGIAAEDALSAYEKLASYPSLKIQGIASHIGSQITDLAPFEAAAERIYEIITALEKAGHAIETADLGGGLGVRYKDDQPEPPSVEAYGEMIKRVTKGWNCRLIFEPGRSLIANAGVLLSKVIRIKESKTARFVILDAAMNDLVRPTLYDAYHEIKAVTPSAQTYQADIVGPVCETGDIFARNRSISAVKADDLMAIMSAGAYGATMASAYNSRPLVAEVMVSGNKSALIRKRQSVEDLMRDEQKVEWL

SEQ ID NO: 4275 - protein, 473 aa, Candida albicans
MKHTIIENEPEIKLQNDLNHHIEISPNTKTTNGTTTTTTTLNVNKTLKAIDLIETSIKNHISTIDHENCLPNDEDSFFVCDLGEIINSVNQWQQILPMVQPYYAVKCNSNPQILTTLSELGVNFDCASKNEIDLVLSLGIHQAHERIIYANPCKTNSFIRHAADENVNLTTVDNVHELYKLAKFHPHCKILIRLITDDSTAQCQLSTKFGCDLNTAIGEILPKAKELGLQVHGVAFHVGSGAKDFSSIYQAIKDSRILFDEMLSMGFTPKLLDIGGGFERETFPQSSQMVKFALEKFFPIEFSQSNEIKFIAEPGRFMVANAFTLITHIIARRDLPTGGNNNNNDMTPSAMLYINDGVYGNLNCILFDHQTPKVYVLTNENQLFYKQEMMRSLSVNNNNNNNNKTDGFKFSIWGPTCDGLDCVSSLAKLSKNVQVGDWLFFENVGAYTSCASTKFNGLSSGETKTLYVNSNEE

SEQ ID NO: 4276 - protein, 470 aa, Candida albicans
MKHTIIENEPEIKLQNDLNHHIEISPNTKTTNGTTTTTTTLNVNKTLKAIDLIETSIKNHISTIDHENCLPNDEDSFFVCDLGEIINSVNQWQQSLPMVQPYYAVKCNSNPQILTTLSELGVNFDCASKNEIDLVLSLGIHQAHERIIYANPCKTNSFIRHAANENVNLTTVDNVHELYKLAKFHPHCKILIRLITDDSTAQCQLSTKFGCDLNTAIGEILPKAKELSLQVHGVAFHVGSGAKDFSSIYQAIKDSRILFDEMLSMGFTPKLLDIGGGFERETFPQSSQMVKFALEKFFPIEFSQSNEIKFIAEPGRFMVANAFTLITHIIARRDLPTGGNNHNNDMTPSAMLYINDGVYGNLNCILFDHQTPKVYVLTNENQLFYKQEMMRSLSVNNNNNKTDGFKFSIWGPTCDGLDCVSSLAKLSKNVQVGDWLFFENVGAYTSCASTKFNGLSSGETKTLYVNSNEE

SEQ ID NO: 4277 - protein, 440 aa, Erwinia chrysanthemi
MADPTPPVAAEAGSLFANGYVEEIPVANIADRIGTPFYVYSARQLRRQLQQLRQQLPTGTAIYYSLKANPNLSVVRALAEQGAGCEVCSPAELKTALAAGVSPQHILYVGPGKSLPALKLAIDCGIRAIVVESVTELDNLNRLAARANTVQTVALRINPDFSSAHARLVMSGKPTQFGMMRDTLHTVLASLHRWPSISLRGFHVYLGTRILNAQAIADNTRNILQLALDLRDTHRLTLDFVDVGGGFGVPYFPKETPLDLPALGAAIASIVADFRRRAADTQIIIELGRYLVAEAGLFVTRVNTLKTAGGKTFAVCDGGANCHSAAAGLNSMLRKNFPLLRLGDNQGRPLQPYQVSGPLCTPTDLLGDNVLLPTLEVDDLIGITHSGAYGLTASPGSFLSFGYPVEVMVDGRRLTLIRQPETTEQLLARQQPVDLCGDTP

SEQ ID NO: 4278 - protein, 721 aa, Crithidia fasciculata
MSNHDVSLSNASHYNHANYTELVPLPTIAQTPTHHFAHDENHVTITENGVTMTTTVSAAAMMTATAPLPVSPVHAFDEAAQRRLLARKTALLEQYRMYPQSADRLAQQRRHHEASHLRDAEDSDGAALSPSLLSPTDCNKTTAAYAQTVAMSPNEKGGADRHTPVAASQDLVDLFFLEGSDAVNGMSFSAYPIYGERTAAERRAAVRAVFEKYGVDMQLPASPAVLAAAPAHRQRRFRTVLPRDSVETREQYWRRLSNVYIQKGVKATMAAAANPTGSNKPAYEAEDPFYMIDLGRVVEQMARWRHELPMVRPHFAVKCNPNLAIMEVLGALGAGFDCASKDEIHLVLDNHLVDSPDDIVFANPCKQLGDLREARACGVTYVTVDNVPEMEKIGRMLPSARAIIRIKTNDAAAKCAFSTKFGAGMDDVESLLQAARQHNVEVYGVSFHVGSGNGDQSAYVSALRDSYRVFQLAAGYGFNCTVLDIGGGYPGTEPIPGSGETSFETIARAMRPVLEELFGGGDVTIISEPGRYFTAATHALAMNVFATRTLRLSDVEKENCQAFQNVVNMDEPEEYQYYVNDGLYHSFNCIVFDHAHPTLLLLNDGDGADDTAEGVANAAVDDVDSEEEGEPTVDGAPTNDSLFVSAWDRRRNLTRRPLRITTIFGPTCDSMDCILKKQPFPEMKLGDWLLAPDMGSYTTAAGCPFNGFATRRREWVSSVAL

SEQ ID NO: 4279 - protein, 707 aa, Leishmania donovani
MGDHDVALCHVSRYNHANYWAFVPLPTVSDDTGCDSLHHDSASERIRMAPPASASKAGAAEERLHPYERRLLDQYQIHLQPANRNPLSRADSAAGREETAQTPAQVQMVPVVAVADSTSDQHASVASSQDLVDLFFLEGSQAVDGLCFSPYPIYGWRTAEERRAAVCEVFKTYNVVTRLPASPAALAAAQRRYSRHRHSAIAPINKSAIETREQYWRRLSNLYTQKGVKDAASAADAAATTATNGAVPAAPAYEPEDPFYIIDLGRVVEQMARWRHELPMVRPYFAVKSNPQPAVLEVLSALGAGFDCASKEEIHMVLGRQLVASPDDIIFANPCKQLGDLREAQACGVTYVTVDNPLEMEKISRLMPSAHAIIRIKTNDSKAQCSFSTKFGAPLEDVEGLLEAARQFNVTVCGVSFHVGSGNDDQSAYVSAVRDAYQVFQQAVQYGFKCTILDIGGGFPGTEVVEGSGNTSFEAIARTIRPVLAELFGGGDVTIISEPGRYFTAASHALLMNVFASRTLRLSDVEVSRQAFQSVVSMDEPEEYQYYVNDGLYHSFNCILFDHAHPTLLLLNDGDGADGVESGTEAAAVCSEEEGETSLSGPLANDPLFMSAWDRRRSFARRPLRITTIFGPTCDSMDCILKKQPFPEMKLGDWLLVPDMGSYTTAAAGFFNGFATRRLEWVSSVDLCARPRPVYTREGNTLRCVSE

SEQ ID NO: 4280 - protein, 732 aa, Leishmania tarentolae
MGDHEVSLCHVSHYNHANYLDLVPLPTVSDDMGFESLCHDSASGRIRIAHPTPALNPNAAEELLSPCPTCRLEQCHIHFQPANHNSPSPAHPATGGKEAAEVRDTDAEESLLPTQTVLSSPECSAHIPAQLQMVTGGAPADSTEDQRTPVAASQNLVDLFFLEGSQAVDGVCFSPYPIYGWRTAEERQAAIWEVFRTYNVATRLPVSPAALAAAQSRYSCYKQSATAPTNNRVAETREQYWRRLANLYIQKGVKAASSAAHNAATTVTNGAVPVAPTCDPEDPFYIIDLGRVVEQMARWRHELPMVRPYFAVKSNPQAAVLEVLSALGAGFDCASREEIQMVLRNNLVATPDDIIFANPCKQLSDMREAQACGVTYVTVDNPLEMEKISRVMPSARAIIRIKTNDSKAQCSFSTKFGASLEDVEGLLQVARQFNVAVCGVSFHVGSGNYDESAYVSAVRDAYQVFQQAAKYGFHCTILDIGGGFPGTEAVEGSGSASFESIARRIRPVLVELFGGGEVTIISEPGRYFTAASHALLMNGFASRTLPLSEVEVSRQAFQSVVSMQEPREHQYYVNDGLYHSFNCILFDHAHPKLLLLNDGDGADEVQSGTEAAAAYSDEEGGKSPSGPLANDSLFMSAWDRRRNLTSRPLRITTIFGPTCDSMDCILKKQPFPEMKLGDWLLVPDMGSYTTAAAGVFNGFATRRLEFVSSADLSARSRAVHAHEGNTFEFVSE

SEQ ID NO: 4281 - protein, 425 aa, Trypanosoma brucei
GAMDIVVNDDLSCRFLEGFNTRDALCKKISMNTCDEGDPFFVADLGDIVRKHETWKKCLPRVTPFYAVKCNDDWRVLGTLAALGTGFDCASNTEIQRVRGIGVPPEKIIYANPCKQISHIRYARDSGVDVMTFDCVDELEKVAKTHPKAKMVLRISTDDSLARCRLSVKFGAKVEDCRFILEQAKKLNIDVTGVSFHVGSGSTDASTFAQAISDSRFVFDMGTELGFNMHILDIGGGFPGTRDAPLKFEEIAGVINNALEKHFPPDLKLTIVAEPGRYYVASAFTLAVNVIAKKVTPGVQTDVGAHAESNAQSFMYYVNDGVYGSFNCILYDHAVVRPLPQREPIPNEKLYPSSVWGPTCDGLDQIVERYYLPEMQVGEWLLFEDMGAYTVVGTSSFNGFQSPTIYYVVSGLPDHVVRELKSQKS

SEQ ID NO: 4282 - protein, 445 aa, Trypanosoma brucei
MTTKSTPSSLSVNCLVAQTEKSMDIVVNDDLSCRFLEGFNTRDALCKKISMNTCDEGDPFFVADLGDIVRKHETWKKCLPRVTPFYAVKCNDDWRVLGTLAALGTGFDCASNTEIQRVRGIGVPPEKIIYANPCKQISHIRYARDSGVDVMTFDCVDELEKVAKTHPKAKMVLRISTDDSLARCRLSVKFGAKVEDCRFILEQAKKLNIDVTGVSFHVGSGSTDASTFAQAISDSRFVFDMGTELGFNMHILDIGGGFPGTRDAPLKFEEIAGVINNALEKHFPPDLKLTIVAEPGRYYVASAFTLAVNVIAKKVTPGVQTDVGAHAESNAQSFMYYVNDGVYGSFNCILYDHAVVRPLPQREPIPNEKLYPSSVWGPTCDGLDQIVERYYLPEMQVGEWLLFEDMGAYTVVGTSSFNGFQSPTIYYVVSGLPDHVVRELKSQKS

SEQ ID NO: 4283 - protein, 425 aa, Trypanosoma brucei
GAMDIVVNDDLSCRFLEGFNTRDALCKKISMNTCDEGDPFFVADLGDIVRKHETWKKCLPRVTPFYAVACNDDWRVLGTLAALGTGFDCASNTEIQRVRGIGVPPEKIIYANPCKQISHIRYARDSGVDVMTFDCVDELEKVAKTHPKAKMVLRISTDDSLARCRLSVKFGAKVEDCRFILEQAKKLNIDVTGVSFHVGSGSTDASTFAQAISDSRFVFDMGTELGFNMHILDIGGGFPGTRDAPLKFEEIAGVINNALEKHFPPDLKLTIVAEPGRYYVASAFTLAVNVIAKKVTPGVQTDVGAHAESNAQSFMYYVNDGVYGSFNCILYDHAVVRPLPQREPIPNEKLYPSSVWGPTCDGLDQIVERYYLPEMQVGEWLLFEDMGAYTVVGTSSFNGFQSPTIYYVVSGLPDHVVRELKSQKS

SEQ ID NO: 4284 - protein, 423 aa, Trypanosoma brucei brucei
MDIVVNDDLSCRFLEGFNTRDALCKKISMNTCDEGDPFFVADLGDIVRKHETWKKCLPRVTPFYAVKCNDDWRVLGTLAALGTGFDCASNTEIQRVRGIGVPPEKIIYANPCKQISHIRYARDSGVDVMTFDCVDELEKVAKTHPKAKMVLRISTDDSLARCRLSVKFGAKVEDCRFILEQAKKLNIDVTGVSFHVGSGSTDASTFAQAISDSRFVFDMGTELGFNMHILDIGGGFPGTRDAPLKFEEIAGVINNALEKHFPPDLKLTIVAEPGRYYVASAFTLAVNVIAKKVTPGVQTDVGAHAESNAQSFMYYVNDGVYGSFNCILYDHAVVRPLPQREPIPNEKLYPSSVWGPTCDGLDQIVERYYLPEMQVGEWLLFEDMGAYTVVGTSSFNGFQSPTIYYVVSGLPDHVVRELKSQKS

SEQ ID NO: 4285 - protein, 1419 aa, Plasmodium falciparum
MNGIFEGIEKRVVIKLKESFFKGNRNVNSFLDIPKELWEEKLKYIGCSIVSEISEDKNERRGERCRVYLLSESSLYIFDDSLFIKTCGKTRVLFFIPFVVDLLIYHMDNVGIIEKNCVYDETFIENEKFHNIAEFIKEHFLYCFFTHMNYRNKTKDGYFEQEYPHKSLEDEKKFFEFFFKNVQMYNTHLPMEKMHYIFFYSSDDVHMTDIASTFKFCSEIHLFGINKYNEKNQFHDAYLNNKSLNLFTRVHEDNLKLYDSSDADKEVTTHIYSTRGTYEDTGMVNCVDVIYKNESTLLNRNNIENIPSIENKESNNNSRCCHNNNYSGSCHNIVSVVPSERNNDHVHHRHYEDTLNRSNISAEDNNRNAQPEKEKDEDVRRDDEENKVLIKMIDTNLYECINYNKESFLYNEFYFTPCGYSCNVSEKNNYFCVHYSPEDSVSYVSVEVSSNLSCDRFLDFIHKQLNFYNGKYMFMINYVFCEESNNMSKMVPDDDNNNYSSGKSCVYYQDLNKKEKEEYYRLNKKLRNDLFINSKQFYELHTFTERTVGFMRVQYFVYKLRDVVKCVEKETLLARSSSCLFMFNNIKRNDVHDDYVTKSSNGGVIKQLTERDVDDMYEYALNFCKQNKIVVVDTNTFFFDASKRKENLIKLEKVQTNEKDEYEEKDEVYRRGNNELSSLDHLDSKNNLIHMYYEKNKCDIINKDDENSTIATNNNDNNNDSSSYDKSITISRSSSCNNSHLSYSSFDNNHGNEKMKDYISVDENNNNNNNNKNNNVLLTLQRNSDDENGKDKDNEKNDVSLENNMEKNYKEEIWNYYTKNKVEVKTLEKVLNENIDTSVVCINLQKILAQYVRFKKNLPHVTPFYSVKSNNDEVVIKFLYGLNCNFDCASIGEISKVIKLLPNLSRDRIIFANTIKSINSLIYARKENINLCTFDNLDELKKIYKYHPKCSLILRINVDFKNYKSYMSSKYGANEYEWEEMLLYAKKHNLNIVGVSFHVGSNTKNLFDFCLAIKLCRDVFDMSSNMGFNFYIINLGGGYPEELEYDNAKKHDKIHYCTLSLQEIKKDIQKFLNEETFLKTKYGYYSFEKISLAINMSIDHYFSHMKDNLRVICEPGRYMVAASSTLAVKIIGKRRPTFQGIMLKELKDHYDPLNFAQQENKKQDETKINHNNDNNDNNDNNDNNINNNNNNQKGGQGNIMNDLIITSTNDSTSKKNDHSSSQVIQNVSCTIRDKEGDNIKINTHTINNPNINGKENTVDGDNINIAHKNIGNNFSSSNSKLGNITNIKKKVVNINDNRYNYFSYYVSDSIYGCFSGIIFDEYNRCPIYVIKNKNNPNQNFMNFNLYLANVFGQSCDGLDMINSITYLPECYINDWLLYEYAGAYTFVSSSNFNGFKKCKKVYIFPESKPSLKGQPNKHW

SEQ ID NO: 4286 - protein, 948 aa, Plasmodium falciparum
MFMINYVFCEESNNMSKMVPDDDNNNYSSGKSCVYYQDLNKKEKEEYYRLNKKLRNDLFINSKQFYELHTFTERTVGFMRVQYFVYKLRDVVKCVEKETLLARSSSCLFMFNNIKRNDVHDDYVTKSSNGGVIKQLTERDVDDMYEYALNFCKQNKIVVVDTNTFFFDASKRKENLIKLEKVQTNEKDEYEEKDEVYRRGNNELSSLDHLDSKNNLIHMYYEKNKCDIINKDDENSTIATNNNDNNNDSSSYDKSITISRSSSCNNSHLSYSSFDNNHGNEKMKDYISVDENNNNNNNNKNNNVLLTLQRNSDDENGKDKDNEKNDVSLENNMEKNYKEEIWNYYTKNKVEVKTLEKVLNENIDTSVVCINLQKILAQYVRFKKNLPHVTPFYSVKSNNDEVVIKFLYGLNCNFDCASIGEISKVIKLLPNLSRDRIIFANTIKSINSLIYARKENINLCTFDNLDELKKIYKYHPKCSLILRINVDFKNYKSYMSSKYGANEYEWEEMLLYAKKHNLNIVGVSFHVGSNTKNLFDFCLAIKLCRDVFDMSSNMGFNFYIINLGGGYPEELEYDNAKKHDKIHYCTLSLQEIKKDIQKFLNEETFLKTKYGYYSFEKISLAINMSIDHYFSHMKDNLRVICEPGRYMVAASSTLAVKIIGKRRPTFQGIMLKDLKAHYDPLNFAQQENKKQDEPKINHNNDNNDNNSNDNNNNNNNNNNNQKGGQGNIMNDLIITSTNDSTNKKNDHSSSQVIQNVSCTIRDKEGDNIKINTHTINNPNINGKENTVDGDNINIAHKNIGNNFSSSNSKLGNITNIKKKVVNINDNRYNYFSYYVSDSIYGCFSGIIFDEYNRCPIYVIKNKNNPNQNFMNFNLYLANVFGQSCDGLDMINSITYLPECYINDWLLYEYAGAYTFVSSSNFNGFKKCKKVYIFPESKPSLKGQPNKHW

SEQ ID NO: 4287 - protein, 947 aa, Plasmodium falciparum
MFMINYVFCEESNNMSKMVPDDDNNNYSSGKSCVYYQDLNKKEKEEYYRLNKKLRNDLFINSKQFYELHTFTERTVGFMRVQYFVYKLRDVVKCVEKETLLARSSSCLFMFNNIKRNDVHDDYVTKSSNGGVIKQLTERDVDDMYEYALNFCKQNKIVVVDTNTFFFDASKRKENLIKLEKVQTNEKDEYEEKDEVYRRGNNELSSLDHLDSKNNLIHMYYEKNKCDIINKDDENSTIATNNNDNNNDSSSYDKSITISRSSSCNNSHLSYSSFDNNHGNEKMKDYISVDENNNNNNNNKNNNVLLTLQRNSDDENGKDKDNEKNDVSLENNMEKNYKEEIWNYYTKNKVEVKTLEKVLNENIDTSVVCINLQKILAQYVRFKKNLPHVTPFYSVKSNNDEVVIKFLYGLNCNFDCASIGEISKVIKLLPNLSRDRIIFANTIKSINSLIYARKENINLCTFDNLDELKKIYKYHPKCSLILRINVDFKNYKSYMSSKYGANEYEWEEMLLYAKKHNLNIVGVSFHVGSNTKNLFDFCLAIKLCRDVFDMSSNMVFNFYIINLGGVYPEELEYDNVKKHDKIHYCTLSLQEIKKDIQKFLNEETFLKTKYGYYSFEKISLAINMSIDHYFSHMKDNLRVICEPGSYMVAASSTLAVKIIGKRRPTFQGIMLKDLKAHYGPLNFAQQENKKQDETKINHNNDNNDNNDNNDNNINNNNNNQKGGQGNIMNDLIITSTNDSTSKKYDHSSRKVIQNVSCTIRDKEVDNIKINTHTINNPNINGKENTVDGDNINIAHKNIGNNFSSSNSKLGNITNIKKKVVNINDNRYNYFSYYVSDSIYGCFSGIIFDEYNRCPIYVIKNKNNPNQNFMNFNLYLANVFGQSCDGLDMINSITYLPECYINDWLLYEYAGAYTFVSSSNFNGFKKCKKVYIFPESKPSLKGQPNKHW

SEQ ID NO: 4288 - protein, 1419 aa, Plasmodium falciparum
MNGIFEGIEKRVVIKLKESFFKGNRNVNSFLDIPKELWEEKLKYIGCSIVSEISEDKNERRGERCRVYLLSESSLYIFDDSLFIKTCGKTRVLFFIPFVVDLLIYHMDNVGIIEKNCVYDETFIENEKFHNIAEFIKEHFLYCFFTHMNYRNKTKDGYFEQEYPHKSLEDEKKFFEFFFKNVQMYNTHLPMEKMHYIFFYSSDDVHMTDIASTFKFCSEIHLFGINKYNEKNQFHDAYLNNKSLNLFTRVHEDNLKLYDSSDADKEVTTHIYSTRGTYEDTGMVNCVDVIYKNESTLLNRNNIENIPSIENKESNNNSRCCHNNNYSGSCHNIVSVVPSERNNDHVHHRHYEDTLNRSNISAEDNNRNAQPEKEKDEDVRRDDEENKVLIKMIDTNLYECINYNKESFLYNEFYFTPCGYSCNVSEKNNYFCVHYSPEDSVSYVSVEVSSNLSCDRFLDFIHKQLNFYNGKYMFMINYVFCEESNNMSKMVPDDDNNNYSSGKSCVYYQDLNKKEKEEYYRLNKKLRNDLFINSKQFYELHTFTERTVGFMRVQYFVYKLRDVVKCVEKETLLARSSSCLFMFNNIKRNDVHDDYVTKSSNGGVIKQLTERDVDDMYEYALNFCKQNKIVVVDTNTFFFDASKRKENLIKLEKVQTNEKDEYEEKDEVYRRGNNELSSLDHLDSKNNLIHMYYEKNKCDIINKDDENSTIATNNNDNNNDSSSYDKSITISRSSSCNNSHLSYSSFDNNHGNEKMKDYISVDENNNNNNNNKNNNVLLTLQRNSDDENGKDKDNEKNDVSLENNMEKNYKEEIWNYYTKNKVEVKTLEKVLNENIDTSVVCINLQKILAQYVRFKKNLPHVTPFYSVKSNNDEVVIKFLYGLNCNFDCASIGEISKVIKLLPNLSRDRIIFANTIKSINSLIYARKENINLCTFDNLDELKKIYKYHPKCSLILRINVDFKNYKSYMSSKYGANEYEWEEMLLYAKKHNLNIVGVSFHVGSNTKNLFDFCLAIKLCRDVFDMSSNMGFNFYIINLGGGYPEELEYDNAKKHDKIHYCTLSLQEIKKDIQKFLNEETFLKTKYGYYSFEKISLAINMSIDHYFSHMKDNLRVICEPGSNMVAASSTLAVKIIGKRRPTFQGIMLKDLKDHYDPLNFAPQENKKQDETKINHNNDNNDNNDNNDNNINNNNNNQKGGQGNIMNDLIITSTNDSTSKKNDHSSSQVIQNVSCTIRDKEGDNIKINTHTINNPNINGKENTVDGDNINIAHKNIGNNFSSSNSKLGNITNIKKKVVNINDNRYNYFSYYVSDSIYGCFSGIIFDEYNRCPIYVIKNKNNPNQNFMNFNLYLANVFGQSCDGLDMINSITYLPECYINDWLLYEYAGAYTFVSSSNFNGFKKCKKVYIFPESKPSLKGQPNKHW

SEQ ID NO: 4289 - protein, 253 aa, Plasmodium falciparum
GSVLCVKCNNDEVVIKFLHGLNCNFDCASIGEISKVIKLLPNLSRDRIIFANTIKSINSLIYARKENINLCTFDNLDVLKKIYKYHPKCSLILRINVDFKNYKSYMSSKYGANEYEWEEMLLYAKKHNLNIVGVSFHVGSNTKNLFDFCLAIKLCRDVFDMSSNMGFNFYIINLGGGYPEELEYDNAKKHDKIHYCTLSLQEIKKDIQKFLNEETFLKTKYGYYSFEKISLAINMSIDHYFTHMKDNLRVICE

SEQ ID NO: 4290 - protein, 435 aa, Panagrellus redivivus
MTLTGCVDYYEIIAGTKVAVCRNAIDNKTVATAIAATRTVNGNDDPFVVMNVSTIMAKVIQWQRTMPRVAPCYAVKCNDDKVLLRTLADLGMGFDCASKAEIEKVIGLVGPEKIVYANPCKTRGFIAHAEAAGVKRMTFDSVEELTKIKQNHADPSLILRISVSDPTAQCQLGIKFGCDPETVAPKLLRKAADMGMNVIGISFHVGSGCNEPATFRTALEYARGLFDLGISLGLSMTLLDIGGGFPGVDTAHISLDACAAVINPALEELFPLDSCPDVEVIAEPGRYFACAAVSVTTNVIASVKVPASRITEKADDVNRDGYMYYMNDGVYGSFNCKLFDHYQPRGMPLAEHDADEPRFPVCVWGPTCDGLDQVEESSVMPRLYEGDWLYYPDMGAYTSVAASTFNGFDKPKTYYFIDEATLGSIVRKADSAPRG

SEQ ID NO: 4291 - protein, 422 aa, Caenorhabditis elegans
MISQFEIIGDNKIGVLPKQVDQLQMCRDIAASKDLQENDSSFMLVDLDKIIERFQLWKRELPMIEPFYAVKCNTDLVLIRILASLGCGFDCASKDEIDIVMGTGVSAERIIYANPCKTRSFIAHAMDRDVKMMTFDNPEELLKIAKLHPNAEMILRIAVSDPTATCPLNLKFGADPIIAAPQLLKTASEEGINVVGISFHVGSGCNDASAYRNALQHAKNLCEIGEGLGFKMDIIDMGGGFPGAEHHNPFEKIAETIRDALDEFFPDTNKRLIAEPGRFFAAGPFSLVANIIHATEVPASKITKDPKDCADHGYMYYINDGVYGSFNCILFDHAHPIGSPLFDTDRNEKFMSTIWGPTCDSLDLVEDKKLMPKMNVGEWLYYPDMGAYTLAAATTFNGFSKPVPMYVMSEEMWESIRDSTHV

SEQ ID NO: 4292 - protein, 422 aa, Caenorhabditis elegans
MISQFEIIGDNKIGVLPKQVDQLQMCRDIAASKDLQENDSSFMLVDLDKIIERFQLWKRELPMIEPFYAVKCNTDLVLIRILASLGCGFDCASKDEIDIVMGTGVSAERIIYANPCKTRSFIAHAMDRDVKMMTFDNPEELLKIAKLHPNAEMILRIAVSDPTATCPLNLKFGADPIIAAPQLLKTASEEGINVVGISFHVGSGCNDASAYRNALQHAKNLCEIGEGLGFKMDIIDMGGGFPGAEHHNPFEKIAETIRDALDEFFPDTNKRLYREPGRFFAAGPFSLVANIIHATEVPASKITKDPKDCADHGYMYYINDGVYGSFNCILFDHAHPIGSPLFDTDRNEKFMSTIWGPTCDSLDLVEDKKLMPKMNVGEWLYYPDMGAYTLAAATTFNGFSKPVPMYVMSEEMWESIRDSTHV

SEQ ID NO: 4293 - protein, 477 aa, Caenorhabditis elegans
MVRHRLPSSTYYTPAGEPEWSREMFGEQSIAVLSGAYRNPIEMARHVAARCGSYQPFFVMDVAAIERRLEALRVMLPRVRPNYAVACNADPVLARVLSNNIDVNFEVSNTAELELVSMNVEPSRAVFCSQLMTRKAIKNAVLAGCSTFVVESEKQVTDVMNASPEAEIILAVCLPYSTGEVPFGCSVDEIEEILDMAHLLGANVTGIYLELGLRATLEDYITSVHDARSIFETADQKFLTLRRVCFGNLSVPTGADGAVNNEFMSFCNSLNNVIDDLFESNIDFSASIGRFLVTNAFTLCTNVIGKRAMDAKFITNDDFDDGVGFVYQTNDGVYGSFGCKQMDIKPLCKPLDVENDSEEQLHFGTILGPTLDGTDVAQRLMKSRQLRVGEWLVWEQMGAFTIPVDSEHSVPPVYYYSGKECWQKLIHKDEQRRSPSPSVSDNEDIGSDGEGGYASSCEDSEAEMALEPLIEDLNEFF

SEQ ID NO: 4294 - protein, 263 aa, Caenorhabditis elegans
MVRHRLPSSTYYTPAGEPEWSREMFGEQSIAVLSGAYRNPIEMARHVAARCGSYQPFFVMDVAAIERRLEALRVMLPRVRPNYAVACNADPVLARVLSNNIDVNFEVSNTAELELVSMNVEPSRAVFCSQLMTRKAIKNAVLAGCSTFVVESEKQVTDVMNASPEAEIILAVCLPYSTGEVPFGCSVDEIEEILDMAHLLGANVTGIYLELGLRATLEDYITSVHDARSIFETADQKFLTLRRVCFGNLSVPITILEKNAGKN

SEQ ID NO: 4295 - protein, 422 aa, Haemonchus contortus
MTMITQMELIGDSKVGIADGEVDALSMCRQIARNYDKDNIDEALCWSTDVVSTDSFVKRELPMIEPFYAVKCNTDRVLVRTLAALGTGFDCASREEIDIVMDLGVSAERIVYANPCKTRSFITHAKERNVSMMTFDSAEELAKVAQLHPQAKMILRIAVSDPTARCPLNLKFGADPVKMAPQLLVHAQELGVDVIGISFHVGSGCNDPTAYREALAHARHLIELGRGLGLDMTLVDLGGGYPGTPQQTSFEDIAAVIRSAVDEYLPPEFGVRLIAEPGRFFAAAPFTLVCNIIHATEVSAEKITKRPEDVEERGFMYYVNDGVYGSFNCILFDHVQPVGTPLFDEIAQEYPSTIWGPTCDSLDKIEDQKLMRMMSVGEWIVYRNMGAYTCSASTTFNGFQRPNAIYMINRKNWARISTSPNV

SEQ ID NO: 4296 - protein, 110 aa, Haemonchus contortus
FYAVKCNTDRVLVRTLAALGTGFDCASREEIDIVMDLGVSAERIVYANPCKTRSFITHAKERNVSMMTFDSAEELAKVAQLHPQAKMILRIAVSDPTARCPLNLKFGADP

SEQ ID NO: 4297 - protein, 415 aa, Haemophilus influenzae Rd
MNFFQYKHNKLYAEDMPVQQLAEQFGTPLYVYSRATLERHWHAFDSAFGNRPHLICFAVKSCSNIGVLNIMAKLGSGFDIVSQGELERVLAAGGDASKVVFSGVAKSREEIMRALEVRIRCFNVESVSELKHINQIAGEMGKIAPISLRVNPDVDAHTHPYISTGLKENKFGVSVNEAREVYKLASTLPNIKITGMDCHIGSQLTELQPFLDATDRLIVLMEQLKEDGITLKHLDLGGGLGVTYTDETPPHPSDYANALLEKLKNYPELEIILEPGRAISANAGILVAKVQYLKSNESRNFAITDTGMNDMIRPALYEAYMNIVEIDRTLEREKAIYDVVGPVCETSDFLGKQRELSIAEGDYIAQCSAGAYGASMSSNYNSRARTAEVLVDGDQSYLIRRRETLQELWALESTI

SEQ ID NO: 4298 - protein, 394 aa, Drosophila melanogaster
MAAATPEIQFYERELNIRRVIEECDLQRLDQALNICDLSSVERNVRLWQKLLPRIKPFYAVKCNDDPMVVRLLAQLGAGFDCASKNEVKLVLGFDVSPERIIFANPCRPVSHLEYAKEHQVSNGTVDNEFEVYKLHTHYPNSNLIVRFKSEAKEAQCPLGDKFGCDADVDAAALMLLAKSLELKVTGTSFHVGSGCSELQAYDRAIKKAKNLFKFGALLGYDMDFLDIGGGFPGSDDVKFEQIAESVNTSVQRHFPDERVHIIAEPGRFFVAAACTLVCKIHAKREIRNEAGKLDTVMYYLNDGVYGSFNCILYDHQVVIAEHYQDNAESLPHLKSLIWGPSCDALDQISEDLHLPNLNRGDLLGFRNMGAYTMPIASAFNGFEVPKTLYFQAI

SEQ ID NO: 4299 - protein, 394 aa, Drosophila melanogaster
MAAATPEIQFYERELNIRRVIEECDLQRLDQALNICDLSSVERKLRLWQKLLPRIKPFYAVKCNDDPMVVRLLAQLGAGFDCASKNEVKLVLGFDVSPERIIFANPCRPVSHLEYAKEHQVSNGTVDNEFEVYKLHTHYPNSNLIVRFKSEAKEAQCPLGDKFGCDADVDAAALMLLAKSLELKVTGTSFHVGSGCSELQAYDRAIKKAKNLFKFGALLGYDMDFLDIGGGFPGSDDVKFEKIAESVNTSVQRHFPDERVHIIAEPGRFFVAAACTLVCKIHAKREIRNEAGKLDTVMYYLNDGVYGSFNCILYDHQVVIAEHYLDNAESLPHLKSLIWGPSCDALDKISEDLHLPNLNRGDLLGFRNMGAYTMPIASAFNGFEVPKTLYFQAI

SEQ ID NO: 4300 - protein, 394 aa, Drosophila melanogaster
MAAATPEIQFYERELNIRRVIEECDLQRLDQALNICDLSSVERNVRLWQKLLPRIKPFYAVKCNDDPMVVRLLAQLGAGFDCASKNEVKLVLGFDVSPERIIFANPCRPVSHLEYAKEHQVSNGTVDNEFEVYKLHTHYPNSNLIVRFKSEAKEAQCPLGDKFGCDADVDAAALMLLAKSLELKVTGTSFHVGSGCSELQAYDRAIKKAKNLFKFGALLGYDMDFLDIGGGFPGSDDVKFEKIAESVNTSVQRHFPDERVHIIAEPGRFFVAAACTLVCKIHAKREIRNEAGKLDTVMYYLNDGVYGSFNCILYDHQVVIAEHYLDNAESLPHLKSLIWGPSCDALDKISEDLHLPNLNRGDLLGFRNMGAYTMPIASAFNGFEVPKTLYFQAI

SEQ ID NO: 4301 - protein, 393 aa, Drosophila melanogaster
MVNGDLRIQYYDEELNIRKVIEQADLEHLDQALNICDLSSLERKLRLWHKLMPRIEPHYAVKCNDDPVVVKFLADLGTGFDCASKNELKLVLGFGVSPERIIFAHPCRPASHLRYAKEQQVVNGTVDNEYEIYKLRKHYPDSSLIVRFKSEAKKALCPLGDKYGCDAEADAAALMLLAKALGLKVTGTSFHVGSGCSEVEAYDRAIEKAENIFKVGEMIGHKMELLDVGGGFPGIDDEMFKEIAQSVNTSVELRFPDKRIRIISEPGRFFVEAAYTLICKVHAKREVRSKDGKLDTMMYYLNDGIFGAFAGMFYYPEEVAPELYLDEAESLPKLKSVIWGPSCDALDKISDLLLPNLNPGDLLGFRNMGAYTMPIASPFNGFDVPETRFFKAK

SEQ ID NO: 4302 - protein, 393 aa, Drosophila melanogaster
MVNGDLRIQYYDEELNIRKVIEQADLEHLDQALNICDLSSLERKLRLWHKLMPRIEPHYAVKCNDDPVVVKFLADLGTGFDCASKNELKLVLGLGVSPERIIFAHPCRPASHLRYAKEQQVVNGTVDNEYEIYKLRKHYPDSNLIVRFKSEAKKALCPLGDKYGCDAEADAAALMLLAKALGLKVTGTSFHVGSGCSEVEAYDRAIEKAENIFKVGEMIGHKMELLDVGGGFPGIDDEMFEEIAQSVNTSVELRFPDKRIRIISEPGRFFVEAAYTLICKVHAKREVRSKDGKLDTMMYYLNDGIFGAFAGMFYYPEEVAPELYLDEAESLPKLKSVIWGPSCDAMDKISDLLLPNLNPGDLLGFRNMGAYTMPIASPFNGFDVPETRFFKAK

SEQ ID NO: 4303 - protein, 1404 aa, Plasmodium yoelii yoelii
MSNVFEGIEKRVVIKLRKNLFMNGNINSLLDISRDLWEEKLNLIGCNIVSEIKEDINAPLNERSRVYLLSESSLYIYNDMIYIKTCGKTKVLFFIPFLVDILIYKWKKYFVLEKSNLYNESFIQNDTKLEEILDFIQKYFEYSFFTHMNYKNVTKDGYYEQEYPHKSVEDEKVFFKFFLKSMEFVNTPLPMNRNHYIFFSQVNKDATIDTSALNVFPNFCSEMHLFGVKKYSMPNQFHSEYLTYDSLNVLSNHSLNIPKSEESEKIEVCSSSVYSFDSVENSSKYTNNTANTNVTVNVSKDIDNNSINTLYNTVDDQTVILTCSDDKNNNLNESDSKLLLAGENSKNMDKDNTQVFNDDNNNNYIFISNPKVQETYSNTNSVRSNEKSTCSSSSTYTSLLQNDLKEFHPKNNAMDTIEDDGRLLVEEEDISYISNEETIDAKVEQIDNLSNKSILDNNLDKNYDQNEPSLSSFTVACSDLINKNANDEKSEDNTSKNIRIKKIEENLYECINTQNNDKFIYNEFYFVPCGFSCNVANKNNYLCVHYSPEDCVSYVSVELSCVLKSENFMNFIKKQLNFYKAQYLYIINYLYDFNENTLAQKSGDNNKDSNNRFLSVLLSSQNNKNIKSINEVVEVNKKLDNNIIINNGQYYSLCAKKEQSVGFLKIQYCVYEQKNFIRNEEKIKSYNSICFEQSNKNAQNVNTLKSTTLSLQDVNSMYEYSYNFCKENNIHIIDIEDDLNSIDNSSNSNHNNYPISNSSDNVDDIHMKKDSNILKESYETEKRTDPISSFLLDEQKAQNEKSRSSSETNSNITDDDNNEFVLEKKYKKEMMNYYRNNRVEISTFNKMLNENIDTSVFCINLQKILLQYIRFKRNLPRVTPFYAVKSNDDEVVLKFLYGLNCSFDCASIGEINKLITLLPDISTDRIIYANTIKSPASLKYAKEKNINLCTFDNIDELKKICKYHPTCSLLLRINIDFKNYKSYMSSKYGANEFEWEKILKFGKENNMNIIGVSFHVGSNTKNIFDFCQAIKLSREVFDISHRLGFKFRILNMGGGYPEELEYDFAKKNEKKHYCTLNEEELKKYIMSFLNEKSVIKKNYNFYNFEKIALAINMSIDHYFKDMKDQLKIISEPGRYMVASSSTLAAKVIGKRCPTFSPIRLSNLKNAEDNNDDNEVKNEQVANNDNDQQNGDGNIQNKDQGNCTGTIPDVELRTEKESKHLPSEVCTNGEIQTSNVCNTNTDNENVSSFGTTTNGKTVIPGSAFNHEDNSKLGNITNIKKKVVNIHDNRYNYYSYYITDSIYGCFSGIIFDEYSRPPIYIINNNKMDSKKMILDSPLYLTNIFGQSCDGLDMITSSTYLPECNINDWIIYEYTGAYTFVSSSNFNGFQPCKKIYIFPRNKFPFSV

SEQ ID NO: 4304 - protein, 396 aa, Musca domestica
MFKENEINFYENEIDLKQVIAGQNLQSADEALFVCDLTRLKEKYDMWTKYMPRVKPYYAVKCNDDGHIVKTLAELGTNFDCASKGEIKQVLDLGVHPDRIIFAQPCKPISHLEYAKEMGVMTSTVDTEFEIHKLHKHFPESNLVIRFRCEAKEAQCPLGDKFGCDAENEATSLMLLAKSLNLKVIGTSFHVGSGCNDLPAYDRAITIAKNLFKFGALLGYEMNLLDIGGGFPGSDNKKFEKIAEIVNKSLMRHFPDDKVNIIAEPGRFFVASAYTLICKIHAKGEARLPNGKLLTKMYYLNDGVYGSFNCILYDHQHAEVQHFVDEENAEVPKFNSLIWGPTCDALDKIAEDLQLPDLKCGDFLAFPNMGAYTIPIASPFNGFMLPKILYFHKAKI

SEQ ID NO: 4305 - protein, 416 aa, Pasteurella multocida
MDYFQYQQAQLMAEQVPVKHIAQQYGTPLYIYSRATLERHWHAFNNALGDHPHLICFAVKSNPNIAILNIMARLGSGFDIVSQGELERVLAAGGEPSKIVFSGVAKTETEIARALEVGIRCFNVESVAELYRINQVAGEMGKTAPISLRVNPDVDARTHPYISTGLKENKFGISVAEARNVYQLANQLPHIQITGMDCHIGSQLTELQPFLDATDRLIVLMEQLKQDGIQLKHLDLGGGLGVPYTNENPPHPSEYASALLDKLKAYHELEIILEPGRAITANAGILVTKVEYLKHNEDRHFAIVDAGMNDMIRPALYQAYMNIIEVDRTLTRDKAVYDVVGPICETSDFLGKQRELAIAAGDYLAQRSAGAYGASMSSNYNSRSRTAEVMVDGDQVHLIRRRETLEELWALERLLP

SEQ ID NO: 4306 - protein, 461 aa, Danio rerio
MTACTGSDFDFAFLEEGFCARDIVEQKINESSLSDDKDAFYVADLGDVLKKHLRWLRVLPRITPFYAVKCNDSRAVVTTLASLGAGFDCASKTEIQIVQSVGVDPSRIIYANPCKQVSQIKYASAHGVQMMTFDSEVELMKVARSHENAKLVLRIATDDSKAVCRLSVKFGATLKSSRLLLERAKELGLDVIGVSFHVGSGCTDPETYSQAISDARYVFDIGAELGYNMSLLDIGGGFPGSEDTKLKFEEIAAVINPALDKYFPVDSGVRIIAEPGRYYVASAYTLAVNIIAKKVIMKEQSASDEEEDVSNDRTLMYYVNDGVYGSFNCILYDHAHVLPTLHKKPKPDERMYPCSIWGPTCDGLDRIVEQCSLPDMQVGDWLLFENMGAYTVAASSTFNGFQKPDIYYIMSRTAWQCMQQIRAQGIPALPLEEPSAGNVPSHCGRESSLDVPAKPCPTQVL

SEQ ID NO: 4307 - protein, 419 aa, Danio rerio
MKGFVDAPNYFIELLEGGTTLENVIDNHIYEQNLAEKNAFVVADLGALMRQHVAWKTTMPLVRPFYPVSCNSSPVVIELLSALGVGFVCANKAETTLVLSHDVPPENIILSGVCKQLSLIKHAAKTGINFLLCENEAELRKIARAHPEAKLLLQVSTEAQIEEASVTIGCSLKGCRHLLELAKELNVSVAGVTFQVPASCKDPQAYTHALSDARCIFDMGKELGFDMNILDIGGGFSGSEFQLKQVHSVIRPLLEAYFPSESGVSIIAEPGNFFVFSCFTLAVNVIGKKAAYRDLHTSTHDKLTSSEAPEFVYYMNDGVYGSFMGRLFGNIISTPSVHKMSLTLDEPVFSSSLWGPSCDPLDQVVERCLLPELAVGDWLVFINMGASGQEGPATFSDTDQPPVYYTISTDDWFEMQEAG

SEQ ID NO: 4308 - protein, 436 aa, Danio rerio
MKGFVDAPNYFIELLEGGTTLENVIDNHIYEQNLAEKNAFVVADLGALMRQHVVWKTTMPLVRPFYPVSCNSSPVVIELLSALGVGFVCANKAETTLVLSHDVPPENIILSGVCKQLSLIKHAAKTGINFLLCENEAELRKIARAHPEAKLLLQVSTEAQIEEASVTIGCSLKGCRHLLELAKELNVSVAGVTFQVPASCKDPQAYTHALSDARCIFDMGKELGFDMNILDIGGGFSGSEFQLKQVHSVIRPLLEAYFPSESGVSIIAEPGNFFVFSCFTLAVNVIGKKAAYRNLHTSTHDKLTSSDAPEFVYYMNDGVYGSFMGRLFGNIISTPSVHKMSLTLDEPVFSSSLWGPSCDPLDQVVERCLLPELAVGDWLVFSNMGASGQEGPATFSDTDQPPVYYTISTDDWFEMQEAGISLDDTMKNLSLVQFGL

SEQ ID NO: 4309 - protein, 116 aa, Platichthys flesus
ASAYTLVVNIIAKKVIMDEDSVSDDEDEGTNDRTLMYYVNDGVYGSFNCILYDHAHCLPVLHKKPKPDEIMYPCSIWGPTCDGLDRIVEQCYLPDMQVGDWLVFENMGAYTVAASS

SEQ ID NO: 4310 - protein, 460 aa, Xenopus laevis
MNSFSNDDFDFSFLEEGFSARDIVEQKINEVSLSDDKDAFYVADLGDIVKKHVRWFKALPRVTPFYAVKCNDGKAIVKTLSILGAGFDCASKTEIQLVQSIGVSPERIIYANPCKQVSQIKYAASCGVEKMTFDSEVELMKVARNHPNAKLVLRIATDDSKAVCRLSVKFGATLKTSRLLLERAKELNVDIIGVSFHVGSGCTDPQTYVQAVSDARCVFDMGAELGFNMHLLDIGGGFPGSEDVKLKFEEITSVINPALDKYFPADSGVKIIAEPGRYYVASSFTLAVNIIAKKVMVNEQSGSDDEEDAANDKTLMYYVNDGVYGSFNCILFDHAHVKPVLTKKPKPDEKFYSSSIWGPTCDGLDRIVERFELPELQVGDWMLFENMGAYTVAAASTFNGFQRPTLYYVMSRPHWQLMHDIKEHGILPEVPDLSALHVSCAQESGMELAPAVCTAASINV

SEQ ID NO: 4311 - protein, 456 aa, Xenopus laevis
MQGYIQESDFNLVEEGFLARDLMEEIINEVSQTEDRDAFFVADLGDVVRKHLRFLKALPRVKPFYAVKCNSSKGVVKILAELGAGFDCASKTEIELVQDVGVAPERIIYANPCKQISQIKYAAKNGVQMMTFDNEVELSKVSRSHPNARMVLRIATDDSKSSARLSVKFGAPLKSCRRLLEMAKNLSVDVIGVSFHVGSGCTDSKAYTQAISDARLVFEMASEFGYKMWLLDIGGGFPGTEDSKIRFEEIAGVINPALDMYFPESSDVQIIAEPGRYYVASAFSLAVNVIAKKEVEHSVSDDEENESSKSIMYYVNDGVYGSFNCLVFDHAHPKPILHKKPSPDQPLYTSSLWGPTCDGLDQIAERVQLPELHVGDWLLFENMGAYTIAASSNFNGFQQSPVHYAMPRAAWKAVQLLQRGLQQTEEKENVCTPMSCGWEISDSLCFTRTFAATSII

SEQ ID NO: 4312 - protein, 456 aa, Xenopus laevis
MQGYIQESDFTLVEEGFLARDLMEEIINEVSQTEDRDAFFVADLGDVVRKHLRFLKALPRVKPFYAVKCNSSKGVVKILAELGAGFDCASKTEIELVQDIGVAPERIIYANPCKQISQIKYAAKNGVQMMTFDNEVELSKVSRSHPNARMVLRIATDDSKSSARLSVKFGAPLKSCRRLLEMAKNLSVDVIGVSFHVGSGCTDSKAYTQAISDARLVFEMASEFGYKMWLLDIGGGFPGTEDSKIRFEEIAGVINPALDMYFPESSDVQIIAEPGRYYVASAFSLAVNVIAKKEVEHSVSDDEENESSKSIMYYVNDGVYGSFNCLVFDHAHPKPILHKKPSPDQPLYTSSLWGPTCDGLDQIAERVQLPELHVGDWLLFENMGAYTIAASSNFNGFQQSPVHYAMPRAAWKAVQLLQRGLQQTEEKENVCTPMSCGWEISDSLCFTRTFAATSII

SEQ ID NO: 4313 - protein, 460 aa, Xenopus laevis
MNSFSNDDFDFSFLEEGFSARDIVEQKINEVSLSDDKDAFYVADFGDIVKKHVRWFKALPRVTPFYAVKCNDGKAIVKTLSILGAGFDCASKTEIQLVQSIGVSPERIIYANPCKQVSQIKYAASCGVEKMTFDSEVELMKVARNHPNAKLVLRIATDDSKAVCRLSVKFGATLKTSRLLLERAKELNVDIIGVSFHVGSGCTDPQTYVQAVSDARCVFDMGAELGFNMHLLDIGGGFPGSEDVKLKFEEITSVINPALDKYFPADSGVKIIAEPGRYYVASSFTLAVNIIAKKVMVNEQSGSDDEEDAANDKTLMYYVNDGVYGSFNCILFDHAHVKPVLTKKPKPDEKFYSSSIWGPTCDGLDRIVERFELPELQVGDWMLFENMGAYTVAAASTFNGFQRPTLYYVMSRPHWQLMHDIKEHGILPEVPDLSALHVSCAQESGMELAPAVCTAASINV

SEQ ID NO: 4314 - protein, 405 aa, Helicobacter pylori 26695
MFNYEELFQTHKTPFYLYDFDKIKQAFLNYKEAFKGRKSLICYALKANSNLSILSLLAHLESGADCVSIGEIYRALKAGIKPYRIVFSGVGKSGFEIEQALKLNILFLNVESFMELTTIETIAQSLGIKARISIRINPNIDAKTHPYISTGLKENKFGVGEKEALEMFLWAKKSAFLEPVSVHFHIGSQLSDLEPIIEASQKVAKIAKSLIALGIDLRFFDVGGGIGVSYENEETIKLYDYAQGILNSLQGLDLTIICEPGRSIVAESGELITQVLYEKKAQNKRFVVVDAGMNDFLRPSLYHAKHAIRVITPSKGREISPCDVVGPVCESSDTFLKDAHLPELEPGDKLVIEKVGAYGSSMASQYNSRPKLLELALEDHKIRVIRKREALEDLWRLEEEGLKGV

SEQ ID NO: 4315 - protein, 405 aa, Helicobacter pylori J99
MFNYEELFQTYKTPFYLYDFDKIKQAFLNYKEAFKGRKSLICYALKANSNLSILSLLANLGSGADCVSIGEIQRALKAGIKPYKIVFSGVGKSAFEIEQALKLNILFLNVESFMELKTIETIAQSLGIKARISIRINPNIDAKTHPYISTGLKENKFGVEEKEALEMFLWAKKSAFLEPVSVHFHIGSQLLDLDPITEASQKVAKIAKSLIALGIDLRFFDVGGGIGVSYENEETIKLYDYAQGILNSLQGLDLTIICEPGRSIVAESGELITQVLYEKKAQNKRFVIVDAGMNDFLRPSLYHAKHAIRVITPCGGREISPCDVVGPVCESSDTFLKDANLPELEPGDKLAIEKVGAYGSSMASQYNSRPKLLELALEDHKIRVIRKREALEDLWRLEIEGLEGV

SEQ ID NO: 4316 - protein, 448 aa, Oculimacula yallundae
MSPSAITTLETQTSLTNIHSYYENPKSSFVEPEVNNHGVNNPKKLIGDALKERIENIDQDACEPGDEDAFFVADLGEVYRQHMRWKLNLPRVKPFYAVKCNPDNRVIQLLAALGTGFDCASKAEIEQVIKADVDPSRIIYAQPCKTNSYVRYAANHNVKQMTFDNADELHKVKKLFPGAELFLRISTDDSSSLCRLSLKFGAAMDTTDGLLALAKELDLNVVGVSFHVGSGASDPLAYMRAVQDARLVFDQAAAHGFSLHTLDIGGGFVSESFEAMASVLCEALDTYMPSHINIIGEPGRYYVSSAFSVACHIIARRTIVEPASSEKSYMIYLNDGLYGNFSSIMFDHQNPIAQVLRTGDRTYFNNIAAQDSVDGTEYSIWGPTCDGIDRISESIRFDHTLDVGDWLYFEEMGAYTKCSATRFNGFSDAHEVIYVASEPGARALLGMN

SEQ ID NO: 4317 - protein, 450 aa, Gallus gallus
FTFLDEGFTAKDILDQKINEVSSSDDKDAFYVADLGDIVKKHMRWHKALPRVTPFYAVKCNDSEAVVKTLAVLGAGFDCASKTEIQLVQSIGVPPERIIYANPCKQLSQIKHAANSGVRMMTFDSEVELMKIARPHPKAKLLLRITTDDSKAVCRLSVKFGATLKTSRLLLERAKELDLAIVGVSFHVGSGCTDPETFVQAISDARCVFDMGAELGFNMYLLDIGGGFPGSEDVKLKFEEITSVINPALDKYFPLDSEVTIIAEPGRYYVASAFTLAVNIIAKKIVSKEQTGSDDEDDVNDKTLMYYVNDGVYGSFNCILYDHAHVKPVLQKRPKPDDGCYSCSIWGPTCDGLDRIVERCNMPELQVGDWILFENMGAYTVAAASTFNGFQRPTIHYVMSRPAWQLMQQIKEQEFLAEVEEQDVASLPLSCACESGIEYPATCASASINV

SEQ ID NO: 4318 - protein, 391 aa, Nitrosomonas europaea
MKKSFAAVQQQTETSIVFDTHPEVSIDLSLVEARLKQGYQKPFLLIDSNIIRNKARRFKTSMPRVRPHYAAKANPDPRVLKTLIEEGVGFEIASIAELDLLMSLGVPAAEIFYSNPMKSRAYIEYAAAKGVEWYVLDSIEELRKIVSIKPDAKLYLRIDTPNIGSDWPLAGKFGTHLVDVSEIIDEAVRLKADLAGVTFHVGSQCRNPQNWRVGIERAQTVFASMREAGLKPRLLNLGGGYPVRHVKPIPSIEVIAEVINEAIADLPEDIHVMAEPGRYLVSDSACFVCRVVGTATRNGKRWMYWDAGIFGGIIEVSEGLRYEILTQRNGSLIPWSVAGPTCDSVDVLMHDEMLPEDIQENDFIFIPNAGAYTTSYASNFNGFPLPDVVVI

SEQ ID NO: 4319 - protein, 417 aa, Nitrosomonas europaea
MSSFSSFEYRDSQLFVESVPLAEIAAKFGTPCYVYSSAAIRTTYQIFDHAFGQRDHLICYAVKANSNLAILNLLARLGSGFDIVSGGELQRVLKAGGDPQKTVFSGVGKTPEEIRAALAANILCFNVESEMELMVLNEIAGQMGKIAPVSLRVNPDVDANTHPYISTGMKENKFGIPAAEAGRIYSLAHQLPHIQVSGLDCHIGSQLTEIAPFIEAADKMLDLLARLQTMGVTIKHLDLGGGLGIRYDRESPPSIEAYIKALCTIAENHPQQLLIEPGRSMVGNAGLLLTRVHYLKHTSHRNFAIVDAAMNDMLRPALYQAYHSILPVTKRTGETKTYQIVGPVCETGDFLGHDRNLALTKNDLLAVMSAGAYGMSMSSNYNTRPRAAEVMVDGSTVHLIRARETVEDLYALEKLPI

SEQ ID NO: 4320 - protein, 200 aa, Saguinus oedipus
ADLGDILKKHLRWLKALPRVTPFYAVKCNDSRAIVNTLAAIGTGFDCASKTEIQLVQSLGVPPERIIYANPCKQVSQIKYAANNGVQMMTFDSEVELMKVARAHPKAKLVLRIATDDSKAICRLSVKFGATLKTSRLLLERAKELNIDVIGVSFHVGSGCTDPETFVQAITDARCVFDMGAEVGFSMYLLDIGGGFPGSE

SEQ ID NO: 4321 - protein, 200 aa, Macaca sp.
ADLGDILKKHLRWLKALPRVTPFYAVKCNDSKAIVKTLAAVGTGFDCASKTEIQLVQNLGVPPERIIYANPCKQVSQIKYAANNGVQMMTFDSEVELMKVTRAHPKAKLVLRIATDDSKAVCRLSVKFGATLRNSRLLLERAKELNIDVVGVSFHVGSGCTDPETFVQAISDARCVFDMGAEVGFSMYLLDIGGGFPGSE

SEQ ID NO: 4322 - protein, 200 aa, Gorilla gorilla
ADLGDILKKHLRWLKALPRVTPFYAVKCNDSKAIVKTLAAIGTGFDCASKTEIQLVQSLGVPPVRIIYANPCKQVSQIKYAANNGVQMMTFDSEVELMKVARAHPKAKLVLRIATDDSKAVCRLSVKFGATLRTSRLLLERAKELNIDVVGVSFHVGSGCTDPETFVQAISDARCVFDMGAEVGFSMYLLDIGGGFPGSE

SEQ ID NO: 4323 - protein, 200 aa, Pan troglodytes
ADLGDILKKHLRWLKALPRVTPFYAVKCNDSKAIVKTLAAIGTGFDCASKTEIQLVQSLGVPPERIIYANPCKQVSQIKYAANNGVQMMTFDSEVELMKVARAHPKAKLVLRIATDDSKAVCRLSVKFGATLRTSRLLLERAKELNIDVVGVSFHVGSGCTDPETFVQAISDARCVFDMGAEVGFSMYLLDIGGGFPGSE

SEQ ID NO: 4324 - protein, 200 aa, Pongo pygmaeus
  unsure (1)..(200): unsure at all Xaa locations
ADLGDILKKHLRWLXAVPRVTPFYAVKCNDSKAIVKTLAAVGTGFDCASKTEIQLVQSLGVPPERIIYANPCKQVSQIKYAANNGVQMMTFDSEVELMKVARAHPKAKLVLRIATDDSKAVCRLSVKFGATLRTSRLLLERAKELNIDVVGVSFHVGSGCTDPETFVQAISDARCVFDMGAEVGFSMYLLDIGGGFPGSE

SEQ ID NO: 4325 - protein, 461 aa, Homo sapiens
MNNFGNEEFDCHFLDEGFTAKDILDQKINEVSSSDDKDAFYVADLGDILKKHLRWLKALPRVTPFYAVKCNDSKAIVKTLAATGTGFDCASKTEIQLVQSLGVPPERIIYANPCKQVSQIKYAANNGVQMMTFDSEVELMKVARAHPKAKLVLRIATDDSKAVCRLSVKFGATLRTSRLLLERAKELNIDVVGVSFHVGSGCTDPETFVQAISDARCVFDMGAEVGFSMYLLDIGGGFPGSEDVKLKFEEITGVINPALDKYFPSDSGVRIIAEPGRYYVASAFTLAVNIIAKKIVLKEQTGSDDEDESSEQTFMYYVNDGVYGSFNCILYDHAHVKPLLQKRPKPDEKYYSSSIWGPTCDGLDRIVERCDLPEMHVGDWMLFENMGAYTVAAASTFNGFQRPTIYYVMSGPAWQLMQQFQNPDFPPEVEEQDASTLPVSCAWESGMKRHRAACASASINV

SEQ ID NO: 4326 - protein, 421 aa, Homo sapiens
  unsure (1)..(421): unsure at all Xaa locations
EEFDCHFLDEGFTAKDILDQKINEVSSSDDKDAFYVADLGDILKKHLRWLKALPRVTPFYAVXCNDSKAIVKTLAATGTGFDCASKTEIQLVQSLGVPPERIIYANPCKQVSQIKYAANNGVQMMTFDSEVELMKVARAHPKAKLVLRIATDDSKAVCRLSVKFGATLRTSRLLLERAKELNIDVVGVSFHVGSGCTDPETFVQAISDARCVFDMGAEVGFSMYLLDIGGGFPGSEDVKLKFEEITGVINPALDKYFPSDSGVRIIAEPGRYYVASAFTLAVNIIAKKIVLKEQTGSDDEDESSEQTFMYYVNDGVYGSFNCILYDHAHVKPLLQKRPKPDERYYSSSIWGPTCDGLDRIVERCDLPEMHVGDWMLFENMGAYTVAAASTFNGFQRPTIYYVMSGPAWQLMQQFQNPDFPP

SEQ ID NO: 4327 - protein, 460 aa, Homo sapiens
MAGYLSESDFVMVEEGFSTRDLLKELTLGASQATTDEVAAFFVADLGAIVRKHFCFLKCLPRVRPFYAVKCNSSPGVLKVLAQLGLGFSCANKAEMELVQHIGIPASKIICANPCKQIAQIKYAAKHGIQLLSFDNEMELAKVVKSHPSAKMVLCIATDDSHSLSCLSLKFGVSLKSCRHLLENAKKHHVEVVGVSFHIGSGCPDPQAYAQSIADARLVFEMGTELGHKMHVLDLGGGFPGTEGAKVRFEEIASVINSALDLYFPEGCGVDIFAELGRYYVTSAFTVAVSIIAKKEVLLDQPGREEENGSTSKTIVYHLDEGVYGIFNSVLFDNICPTPILQKKPSTEQPLYSSSLWGPAVDGCDCVAEGLWLPQLHVGDWLVFDNMGAYTVGMGSPFWGTQACHITYAMSRVAWEALRRQLMAAEQEDDVEGVCKPLSCGWEITDTLCVGPVFTPASIM

SEQ ID NO: 4328 - protein, 420 aa, Homo sapiens
QQGSSVASTEPGSGTWKDHGWHAQGASWMGSHIHPLLVIQDEVAAFFVADLGAIVRKHFCFLKCLPRVRPFYAVKCNSSPGVLKVLAQLGLGFSCANKAEMELVQHIGIPASKIICANPCKQIAQIKYAAKHGIQLLSFDNEMELAKVVKSHPSAKMVLCIATDDSHSLSCLSLKFGVSLKSCRHLLENAKKHHVEVVGVSFHIGSGCPDPQAYAQSIADARLVFEMGTELGHKMHVLDLGGGFPGTEGAKVRFEEIASVINSALDLYFPEGCGVDIFAELGRYYVTSAFTVAVSIIAKKEVLLDQPGREEENGSTSKTIVYHLDEGVYGIFNSVLFDNICPTPILQKKPSTEQPLYSSSLWGPAVDGCDCVAEGLWLPQLHVGDWLVFDNMGAYTVGMGSPFWGTQACHITYAMSRVAW

SEQ ID NO: 4329 - protein, 480 aa, Homo sapiens
MAGYLSESDFVMVEEGFSTRDLLKELTLGASQATTDEVAAFFVADLGAIVRKHFCFLKCLPRVRPFYAVKCNSSPGVLKVLAQLGLGFSCANKAEMELVQHIGIPASKIICANPCKQIAQIKYAAKHGIQLLSFDNEMELAKVVKSHPSAKMVLCIATDDSHSLSCLSLKFGVSLKSCRHLLENAKKHHVEVVGVSFHIGSGCPDPQAYAQSIADARLVFEMGTELGHKMHVLDLGGGFPGTEGAKVRFEEIASVINSALDLYFPEGCGVDIFAELGRYYVTSAFTVAVSIIAKKEVLLDQPGREAPLPPPHIATCAASEPSPPAEENGSTSKTIVYHLDEGVYGIFNSVLFDNICPTPILQKKPSTEQPLYSSSLWGPAVDGCDCVAEGLWLPQLHVGDWLVFDNMGAYTVGMGSPFWGTQACHITYAMSRVAWEALRRQLMAAEQEDDVEGVCKPLSCGWEITDTLCVGPVFTPASIM

SEQ ID NO: 4330 - protein, 350 aa, Homo sapiens
NPCKQVSQIKYAANNGVQMMTFDSEVELMKVARAHPKAKLVLRIATDDSKAVCRLSVKFGATLRTSRLLLERAKELNIDVVGVSFHVGSGCTDPETFVQAISDARCVFDMGAEVGFSMYLLDIGGGFPGSEDVKLKFEEITGVINPALDKYFPSDSGVRIIAEPGRYYVASAFTLAVNIIAKKIVLKEQTGSDDEDESSEQTFMYYVNDGVYGSFNCILYDHAHVKPLLQKRPKPDEKYYSSSIWGPTCDGLDRIVERCDLPEMHVGDWMLFENMGAYTVAAASTFNGFQRPTIYYVMSGPAWQLMQQFQNPDFPPEVEEQDASTLPVSCAWESGMKRHRAACASASINV

SEQ ID NO: 4331 - protein, 448 aa, Homo sapiens
MKGFIDDANYSVGLLDEGTDLGNVIDNYVYEHTLTGKNAFFVGDLGKIVKKHSQWQNVVAQIKPFYTVKCNSAPAVLEILAALGTGFACSSKNEMALVQELGVPPENIIYISPCKQVSQIKYAAKVGVNILTCDNEIELKKIARNHPNAKVLLHIATEDNIGGEEGNMKFGTTLKNCRHLLECAKELDVQIIGVKFHVSSACKESQVYVHALSDARCVFDMAGEIGFTMNMLDIGGGFTGTEFQLEEVNHVISPLLDIYFPEGSGVKIISEPGSYYVSSAFTLAVNIIAKKVVENDKFPSGVEKTGSDEPAFMYYMNDGVYGSFASKLSEDLNTIPEVHKKYKEDEPLFTSSLWGPSCDELDQIVESCLLPELNVGDWLIFDNMGADSFHEPSAFNDFQRPAIYYMMSFSDWYEMQDAGITSDSMMKNFFFVPSCIQLSQEDSFSAEA

SEQ ID NO: 4332 - protein, 448 aa, Homo sapiens
MKGFIDDANYSVGLLDEGTNLGNVIDNYVYEHTLTGKNAFFVGDLGKIVKKHSQWQNVVAQIKPFYTVKCNSAPAVLEILAALGTGFACSSKNEMALVQELGVPPENIIYISPCKQVSQIKYAAKVGVNILTCDNEIELKKIARNHPNAKVLLHIATEDNIGGEEGNMKFGTTLKNCRHLLECAKELDVQIIGVKFHVSSACKESQVYVHALSDARCVFDMAGEIGFTMNMLDIGGGFTGTEFQLEEVNHVISPLLDIYFPEGSGVKIISEPGSYYVSSAFTLAVNIIAKKVVENDKFPSGVEKTGSDEPAFMYYMNDGVYGSFASKLSEDLNTIPEVHKKYKEDEPLFTSSLWGPSCDELDQIVESCLLPELNVGDWLIFDNMGADSFHEPSAFNDFQRPAIYYMMSFSDWYEMQDAGITSDSMMKNFFFVPSCIQLSQEDSFSAEA

SEQ ID NO: 4333 - protein, 362 aa, Homo sapiens
MAGYLSESDFVMVEEGFSTRDLLKELTLGASQATTDEVAAFFVADLGAIVRKHFCFLKCLPRVRPFYAVKCNSSPGVLKVLAQLGLGFSCANKAEMELVQHIGIPASKIICANPCKQIAQIKYAAKHGIQLLSFDNEMELAKVVKSHPSAKMVLCIATDDSHSLSCLSLKFGVSLKSCRHLLENAKKHHVEVVGVSFHIGSGCPDPQAYAQSIADARLVFEMGTELGHKMHVLDLGGGFPGTEGAKVRFEEIASVINSALDLYFPEGCGVDIFAELGRYYVTSAFTVAVSIIAKKEVLLDQPGREEENGSTSKTIVYHLDEGVYGIFNSVLFDNICPTPILQKSKNHSPCYMSLESIHFIAV

SEQ ID NO: 4334 - protein, 374 aa, Homo sapiens
MAGYLSESDFVMVEEGFSTRDLLKELTLGASQATTDEVAAFFVADLGAIVRKHFCFLKCLPRVRPFYAVKCNSSPGVLKVLAQLGLGFSCANKAEMELVQHIGIPASKIICANPCKQIAQIKYAAKHGIQLLSFDNEMELAKVVKSHPSAKFVQQRGTACLIRMVLCIATDDSHSLSCLSLKFGVSLKSCRHLLENAKKHHVEVVGVSFHIGSGCPDPQAYAQSIADARLVFEMGTELGHKMHVLDLGGGFPGTEGAKVRFEEIASVINSALDLYFPEGCGVDIFAELGRYYVTSAFTVAVSIIAKKEVLLDQPGREEENGSTSKTIVYHLDEGVYGIFNSVLFDNICPTPILQKSKNHSPCYMSLESIHFIAV

SEQ ID NO: 4335 - protein, 365 aa, Homo sapiens
MELVQHIGIPASKIICANPCKQIAQIKYAAKHGIQLLSFDNEMELAKVVKSHPSAKMVLCIATDDSHSLSCLSLKFGVSLKSCRHLLENAKKHHVEVVGVSFHIGSGCPDPQAYAQSIADARLVFEMGTELGHKMHVLDLGGGFPGTEGAKVRFEEIASVINSALDLYFPEGCGVDIFAELGRYYVTSAFTVAVSIIAKKEVLLDQPGREEENGSTSKTIVYHLDEGVYGIFNSVLFDNICPTPILQKKPSTEQPLYSSSLWGPAVDGCDCVAEGLWLPQLHVGDWLVFDNMGAYTVGMGSPFWGTQACHITYAMSRVAWEALRRQLMAAEQEDDVEGVCKPLSCGWEITDTLCVGPVFTPASIM

SEQ ID NO: 4336 - protein, 204 aa, Homo sapiens
MAGYLSESDFVMVEEGFSTRDLLKELTLGASQATTDEVAAFFVADLGAIVRKHFCFLKCLPRVRPFYAVKCNSSPGVLKVLAQLGLGFSCANKIASVINSALDLYFPEGCGVDIFAELGRYYVTSAFTVAVSIIAKKEVLLDQPGREEENGSTSKTIVYHLDEGVYGIFNSVLFDNICPTPILQKSKNHSPCYMSLESIHFIAV

SEQ ID NO: 4337 - protein, 393 aa, Selenomonas ruminantium
MKNFRLSEKEVKTLAKRIPTPFLVASLDKVEENYQFMRRHLPRAGVFYAMKANPTPEILSLLAGLGSHFDVASAGEMEILHELGVDGSQMIYANPVKDARGLKAAADYNVRRFTFDDPSEIDKMAKAVPGADVLVRIAVRNNKALVDLNTKFGAPVEEALDLLKAAQDAGLHAMGICFHVGSQSLSTAAYEEALLVARRLFDEAEEMGMHLTDLDIGGGFPVPDAKGLNVDLAAMMEAINKQIDRLFPDTAVWTEPGRYMCGTAVNLVTSVIGTKTRGEQPWYILDEGIYGCFSGIMYDHWTYPLHCFGKGNKKPSTFGGPSCDGIDVLYRDFMAPELKIGDKVLVTEMGSYTSVSATRFNGFYLAPTIIFEDQPEYAARLTEDDDVKKKAAV

SEQ ID NO: 4338 - protein, 461 aa, Bos taurus
MNSFSNEEFDCHFLDEGFTAKDILDQKINEVSYSDDKDAFYVADLGDILKKHLRWLKALPRVTPFYAVKCNDSRTIVKTLAAIGTGFDCASKTEIQLVQSLGVPPERIIYANPCKQVSQIKYAANNGVQMMTFDSEVELMKVARAHPKAKLVLRIATDDSKAVCRLSVKFGATLKTSRLLLERAKELDIDVIGVSFHVGSGCTDPETFVQAISDARCVFDMGAEVGFNMYLLDIGGGFPGSEDVKLKFEEITSVINPALDKYFPSDSGVRIIAEPGRYYVASAFTLAVNIIAKKLVLKEQTGSDDEEESTDRTFMYYVNDGVYGSFNCILYDHAHVKPLLQKRPKPDEKYYSSSIWGPTCDGLDRIVERCNLPEMHVGDWMLFENMGAYTVAAASTFNGFQRPTIYYVMSGPTWQLMQQIRTQDFPPGVEEPDVGPLPVSCAWESGMKRHSAACASTRINV

SEQ ID NO: 4339 - protein, 1035 aa, Mus musculus
RGSSSYSQLLAATCLTKLVSRTNNPLPLEQRIDIRNYVLNYLATRPKLATFVTQALIQLYARITKLGWFDCQKDDYVFRNAITDVTRFLQDSVEYCIIGVTILSQLTNEINQADTTHPLTKHRKIASSFRDSSLFDIFTLSCNLLKQASGKNLNLNDESQHGLLMQLLKLTHNCLNFDFIGTSTDESSDDLCTVQIPTSWRSAFLDSSTLQLFFDLYHSIPPSFSPLVLSCLVQIASVRRSLFNNAERAKFLSHLVDGVKRILENPQSLSDPNNYHEFCRLLARLKSNYQLGELVKVENYPDVIRLIANFTVTSLQHWEFAPNSVHYLLSLWQRLAASVPYVKATEPHMLETYTPEVTKAYITSRLESVHIILRDGLEDPLEDTGLVQQQLDQLSTIGRCEYEKTCALLVQLFDQSAQSYQELLQSASASPMDIAVQEGRLTWLVYIIGAVIGGRVSFASTDEQDAMDGELVCRVLQLMNLTDSRLAQAGNEKLELAMLSFFEQFRKIYIGDQVQKSSKLYRRLSEVLGLNDETMVLSVFIGKVITNLKYWGRCEPITSKTLQLLNDLSIGYSSVRKLVKLSAVQFMLNNHTSEHFSFLGINNQSNLTDMRCRTTFYTALGRLLMVDLGEDEDQYEQFMLPLTAAFEAVAQMFSTNSFNEQEAKRTLVGLVRDLRGIAFAFNAKTSFMMLFEWIYPSYMPILQRAIELWYHDPACTTPVLKLMAELVHNRSQRLQFDVSSPNGILLFRETSKMITMYGNRILTLGEVPKDQVYALKLKGISICFSMLKAALSGSYVNFGVFRLYGDDALENALQTFIKLLLSIPHSDLLDYPKLSQSYYSLLEVLTQDHMNFIASLEPHVIMYILSSISEGLTALDTMVCTGCCSCLDHIVTYLFKQLSRSTKKRTTPLNRESDCFLHIMQQHPAMIQQMLSTVLNIIIFEDCRNQWSMSRPLLGLILLNEKYFSDLRNSIVNSQPPEKQQAMHLCFENLMEGIERNLLTKNRDRFTQNLSAFRREVNDSMKNSTYGVNSNDMMS

SEQ ID NO: 4340 - protein, 1035 aa, Mus musculus
RGSSSYSQLLAATCLTKLVSRTNNTLPLEQRIDIRNYVLNYLATRPKLATFVTQALIQLYARITKLGWFDCQKDDYVFRNAITDVTRFLQDSVEYCIIGVTILSQLTNEINQADTTHPLTKHRKIASSFRDSSLFDIFTLSCNLLKQASGKNLNLNDESQHGLLMQLLKLTHNCLNFDFIGTSTDESSDDLCTVQIPTSWRSAFLDSSTLQLFFDLYHSIPPSFSPLVLSCLVQIASVRRSLFNNAERAKFLSHLVDGVKRILENPQSLSDPNNYHEFCRLLARLKSNYQLGELVKVENYPDVIRLIANFTVTSLQHWEFAPNSVHYLLSLWQRLAASVPYVKATEPHMLETYTPEVTKAYITSRLESVHIILRDGLEDPLEDTGLVQQQLDQLSTIGRCEYEKTCALLVQLFDQSAQSYQELLQSASASPMDIAVQEGRLTWLVYIIGAVIGGRVSFASTDEQDAMDGELVCRVLQLMNLTDSRLAQAGNEKLELAMLSFFEQFRKIYIGDQVQKSSKLYRRLSEVLGLNDETMVLSVFIGKVITNLKYWGRCEPITSKTLQLLNDLSIGYSSVRKLVKLSAVQFMLNNHTSEHFSFLGINNQSNLTDMRCRTTFYTALGRLLMVDLGEDEDQYEQFMLPLTAAFEAVAQMFSTNSFNEQEAKRTLVGLVRDLRGIAFAFNAKTSFMMLFEWIYPSYMPILQRAIELWYHDPACTTPVLKLMAELVHNRSQRLQFDVSSPNGILLFRETSKMITMYGNRILTLGEVPKDQVYALKLKGISICFSMLKAALSGSYVNFGVFRLYGDDALENALQTFIKLLLSIPHSDLLDYPKLSQSYYSLLEVLTQDHMNFIASLEPHVIMYILSSISEGLTALDTMVCTGCCSCLDHIVTYLFKQLSRSTKKRTTPLNRESDCFLHIMQQHPAMIQQMLSTVLNIIIFEDCRNQWSMSRPLLGLILLNEKYFSDLRNSIVNSQPPEKQQAMHLCFENLMEGIERNLLTKNRDRFTQNLSAFRREVNDSMKNSTYGVNSNDMMS

SEQ ID NO: 4341 - protein, 1087 aa, Mus musculus
MADHVQSLAQLENLCKQLYETTDTTTRLQAEKALVEFTNSPDCLSKCQLLLERGSSSYSQLLAATCLTKLVSRTNNPLPLEQRIDIRNYVLNYLATRPKLATFVTQALIQLYARITKLGWFDCQKDDYVFRNAITDVTRFLQDSVEYCIIGVTILSQLTNEINQADTTHPLTKHRKIASSFRDSSLFDIFTLSCNLLKQASGKNLNLNDESQHGLLMQLLKLTHNCLNFDFIGTSTDESSDDLCTVQIPTSWRSAFLDSSTLQLFFDLYHSIPPSFSPLVLSCLVQIASVRRSLFNNAERAKFLSHLVDGVKRILENPQSLSDPNNYHEFCRLLARLKSNYQLGELVKVENYPDVIRLIANFTVTSLQHWEFAPNSVHYLLSLWQRLAASVPYVKATEPHMLETYTPEVTKAYITSRLESVHIILRDGLEDPLEDTGLVQQQLDQLSTIGRCEYEKTCALLVQLFDQSAQSYQELLQSASASPMDIAVQEGRLTWLVYIIGAVIGGRVSFASTDEQDAMDGELVCRVLQLMNLTDSRLAQAGNEKLELAMLSFFEQFRKIYIGDQVQKSSKLYRRLSEVLGLNDETMVLSVFIGKVITNLKYWGRCEPITSKTLQLLNDLSIGYSSVRKLVKLSAVQFMLNNHTSEHFSFLGINNQSNLTDMRCRTTFYTALGRLLMVDLGEDEDQYEQFMLPLTAAFEAVAQMFSTNSFNEQEAKRTLVGLVRDLRGIAFAFNAKTSFMMLFEWIYPSYMPILQRAIELWYHDPACTTPVLKLMAELVHNRSQRLQFDVSSPNGILLFRETSKMITMYGNRILTLGEVPKDQVYALKLKGISICFSMLKAALSGSYVNFGVFRLYGDDALENALQTFIKLLLSIPHSDLLDYPKLSQSYYSLLEVLTQDHMNFIASLEPHVIMYILSSISEGLTALDTMVCTGCCSCLDHIVTYLFKQLSRSTKKRTTPLNRESDCFLHIMQQHPAMIQQMLSTVLNIIIFEDCRNQWSMSRPLLGLILLNEKYFSDLRNSIVNSQPPEKQQAMHLCFENLMEGIERNLLTKNRDRFTQNLSAFRREVNDSMKNSTYGVNSNDMMS

SEQ ID NO: 4342 - protein, 1078 aa, Mus musculus
SLAQLENLCKQLYETTDTTTRLQAEKALVEFTNSPDCLSKCQLLLERGSSSYSQLLAATCLTKLVSRTNNPLPLEQRIDIRNYVLNYLATRPKLATFVTQALIQLYARITKLGWFDCQKDDYVFRNAITDVTRFLQDSVEYCIIGVTILSQLTNEINQADTTHPLTKHRKIASSFRDSSLFDIFTLSCNLLKQASGKNLNLNDESQHGLLMQLLKLTHNCLNFDFIGTSTDESSDDLCTVQIPTNWRSAFLDSSTLQLFFDLYHSIPPSFSPLVLSCLVQIASVRRSLFNNAERAKFLSHLVDGVKRILENPQSLSDPNNYHEFCRLLARLKSNYQLGELVKVENYPDVIRLIANFTVTSLQHWEFAPNSVHYLLSLWQRLAASVPYVKATEPHMLETYTPEVTKAYITSRLESVHIILRDGLEDPLEDTGLVQQQLDQLSTIGRCEYEKTCALLVQLFDQSAQSYQELLQSASASPMDIAVQEGRLTWLVYIIGAVIGGRVSFASTDEQDAMDGELVCRVLQLMNLTDSRLAQAGNEKLELAMLSFFEQFRKIYIGDQVQKSSKLYRRLSEVLGLNDETMVLSVFIGKVITNLKYWGRCEPITSKTLQLLNDLSIGYSSVRKLVKLSAVQFMLNNHTSEHFSFLGINNQSNLTDMRCRTTFYTALGRLLMVDLEDQYEQFMLPLTAAFEAVAQMFSTNSFNEQEAKRTLVGLVRDLRGIAFAFNAKTSFMMLFEWIYPSYMPILQRAIELWYHDPACTTPVLKLMAELVHNRSQRLQFDVSSPNGILLFRETSKMITMYGNRILTLGEVPKDQVYALKLKGISICFSMLKAALSGSYVNFGVFRLYGDDALENALQTFIKLLLSIPHSDLLDYPKLSQSYYSLLEVLTQDHMNFIASLEPHVIMYILSSISEGLTALDTMVCTGCCSCLDHIVTYLFKQLSRSTKKRTTPLNRESDCFLHIMQQHPAMIQQMLSTVLNIIIFEDCRNQWSMSRPLLGLILLNEKYFSDLRNSIVNSQPPEKQQAMHLCFENLMEGIERNLLTKNRDRFTQNLSAFRREVNDSMKNSTYGVNSNDMMS

SEQ ID NO: 4343 - protein, 411 aa, Mus musculus
MVDLGEDEDQYEQFMLPLTAAFEAVAQMFSTNSFNEQEAKRTLVGLVRDLRGIAFAFNAKTSFMMLFEWIYPSYMPILQRAIELWYHDPACTTPVLKLMAELVHNRSQRLQFDVSSPNGILLFRETSKMITMYGNRILTLGEVPKDQVYALKLKGISICFSMLKAALSGSYVNFGVFRLYGDDALENALQTFIKLLLSIPHSDLLDYPKLSQSYYSLLEVLTQDHMNFIASLEPHVIMYILSSISEGLTALDTMVCTGCCSCLDHIVTYLFKQLSRSTKKRTTPLNRESDCFLHIMQQHPAMIQQMLSTVLNIIIFEDCRNQWSMSRPLLGLILLNEKYFSDLRNSIVNSQPPEKQQAMHLCFENLMEGIERNLLTKNRDRFTQNLSAFRREVNDSMKNSTYGVNSNDMMS

SEQ ID NO: 4344 - protein, 1088 aa, Mus musculus
MALHFQSLAELEVLCTHLYVGTDLTERIEAEKALLELIDSPECLSKCQLLLEQGTTSYAQLLAATCLSKLVTRINPLPIEQRIDIRNYILNYVASQPKLAPFVIQALIQVIAKLTKLGWFEVQKDEFIFREIIADVKKFLQGTVEHCIIGVIILCELTQEMNLVDYSRPSAKHRKIATSFRDTSLKDILVLACSLLKQVLAKPLNLQDQDQQSLVMQVLKLVLSCLNFDFLGSSADESADDLCTVQIPTTWRTIFLEPETLDLFFNLYHSLPPLLSQLALSCLVQFASTRRSLFSSPERAKYLGNLIKGVKRILENPQGLSDPGNYHEFCRFLARLKTNYQLGELVLVKEYAEVIGLIANFTITSLQHWEFAPNSVHYLLTLWQRMVASVPFVKSAEPHLLDTYAPEITKAFITSRLESVAIVVRDNLEDPLDDTATVFQQLEQLCTVSRCEYEKTCTLLVQLFDQNAKNYQKLLHAAPGLAVDMAIQEGRLAWLIYLVGTVVGGRLTYTSTDEHDAMDGELSCRVFQLISLMDTRLPHCTNEKIELAVLWFLDQFRKTYVGDQLQRTSKVYARMSEVLGITDDNHVLETFMTKIVTNLKYWGRCEPVISRTLQFLSDLSVGYILLKKLVKIDAVKFMLKNHTSEHFPFLGISETYNVGDFRCRTTFYTALTRLLMVDLGEDEDEFENFMLPLTVSFETVLQIFNNNFKQEEVKRMLIGLARDLRGIAFALNTKTSYTMLFDWIYPAYLPVLQRAIERWYGEPACTTPILKLLAELMQNRSQRLNFDVSSPNGILLFREASKMICTYGNQILSLGSLSKDKIYPMKLKGISICYSALKSALCGNYVSFGVFKLYGDNHFDNVLQAFVKMLLSVSHSDLLQYRKLSQSYYPLLECLTQDHMSFITNLEPPVLLYVLTSLSEGLTTLDTVVSSSCCTSLDYMVTYLFKHIAKEGKKPLRSREAMQAGQRLLHFMQQNPDVLQQMMSVLMNTIVFEDCRNQWSVSRPLLGLILLNEKYFSELRASLINSQPLPKQEVLGQCFRNLMEGVEQNLSVKNRDRFTQNLSVFRRDVAEALRSDGHTDLSSLDMMS

SEQ ID NO: 4345 - protein, 947 aa, Mus musculus
GTVEHCIIGVIILCELTQEMNLVDYSRPSAKHRKIATSFRDTSLKDILVLACSLLKQVLAKPLNLQDQDQQSLVMQVLKLVLSCLNFDFLGSSADESADDLCTVQIPTTWRTIFLEPETLDLFFNLYHSLPPLLSQLALSCLVQFASTRRSLFSSPERAKYLGNLIKGVKRILENPQGLSDPGNYHEFCRFLARLKTNYQLGELVLVKEYAEVIGLIANFTITSLQHWEFAPNSVHYLLTLWQRMVASVPFVKSAEPHLLDTYAPEITKAFITSRLESVAIVVRDNLEDPLDDTATVFQQLEQLCTVSRCEYEKTCTLLVQLFDQNAQNYQKLLHAAPGLAVDMAIQEGRLAWLIYLVGTVVGGRLTYTSTDEHDAMDGELSCRVFQLISLMDTRLPHCTNEKIELAVLWFLDQFRKTYVGDQLQRTSKVYARMSEVLGITDDNHVLETFMTKIVTNLKYWGRCEPVISRTLQFLSDLSVGYILLKKLVKIDAVKFMLKNHTSEHFPFLGISETYNVGDFRCRTTFYTALTRLLMVDLGEDEDEFENFMLPLTVSFETVLQIFNNNFKQEEVKRMLIGLARDLRGIAFALNTKTSYTMLFDWIYPAYLPVLQRAIERWYGEPACTTPILKLLAELMQNRSQRLNFDVSSPNGILLFREASKMICTYGNQILSLGSLSKDKIYPMKLKGISICYSALKSALCGNYVSFGVFKLYGDNHFDNVLQAFVKMLLSVSHSDLLQYRKLSQSYYPLLECLTQDHMSFITNLEPPVLLYVLTSLSEGLTTLDTVVSSSCCTSLDYMVTYLFKHIAKEGKKPLRSREAMQAGQRLLHFMQQNPDVLQQMMSVLMNTIVFEDCRNQWSVSRPLLGLILLNEKYFSELRASLINSQPLPKQEVLGQCFRNLMEGVEQNLSVKNRDRFTQNLSVFRRDVAEALRSDGHTDLSSLDMMS

SEQ ID NO: 4346 - protein, 1088 aa, Mus musculus
MALHFQSLAELEVLCTHLYVGTDLTERIEAEKALLELIDSPECLSKCQLLLEQGTTSYAQLLAATCLSKLVTRINPLPIEQRIDIRNYILNYVASQPKLAPFVIQALIQVIAKLTKLGWFEVQKDEFVFREIIADVKKFLQGTVEHCIIGVIILCELTQEMNLVDYSRPSAKHRKIATSFRDTSLKDILVLACSLLKQVLAKPLNLQDQDQQSLVMQVLKLVLSCLNFDFLGSSADESADDLCTVQIPTTWRTIFLEPETLDLFFNLYHSLPPLLSQLALSCLVQFASTRRSLFSSPERAKYLGNLIKGVKRILENPQGLSDPGNYHEFCRFLARLKTNYQLGELVLVKEYAEVIGLIANFTITSLQHWEFAPNSVHYLLTLWQRMVASVPFVKSAEPHLLDTYAPEITKAFITSRLESVAIVVRDNLEDPLDDTATVFQQLEQLCTVSRCEYEKTCTLLVQLFDQNAQNYQKLLHAAPGLAVDMAIQEGRLAWLIYLVGTVVGGRLTYTSTDEHDAMDGELSCRVFQLISLMDTRLPHCTNEKIELAVLWFLDQFRKTYVGDQLQRTSKVYARMSEVLGITDDNHVLETFMTKIVTNLKYWGRCEPVISRTLQFLSDLSVGYILLKKLVKIDAVKFMLKNHTSEHFPFLGISETYNVGDFRCRTTFYTALTRLLMVDLGEDEDEFENFMLPLTVSFETVLQIFNNNFKQEEVKRMLIGLARDLRGIAFALNTKTSYTMLFDWIYPAYLPVLQRAIERWYGEPACTTPILKLLAELMQNRSQRLNFDVSSPNGILLFREASKMICTYGNQILSLGSLSKDKIYPMKLKGISICYSALKSALCGNYVSFGVFKLYGDNHFDNVLQAFVKMLLSVSHSDLLQYRKLSQSYYPLLECLTQDHMSFITNLEPPVLLYVLTSLSEGLTTLDTVVSSSCCTSLDYMVTYLFKHIAKEGKKPLRSREAMQAGQRLLHFMQQNPDVLQQMMSVLMNTIVFEDCRNQWSVSRPLLGLILLNEKYFSELRASLINSQPLPKQEVLGQCFRNLMEGVEQNLSVKNRDRFTQNLSVFRRDVAEALRSDGHTDLSSLDMMS

SEQ ID NO: 4347 - protein, 1057 aa, Mus musculus
MADHVQSLAQLENLCKQLYETTDTTTRLQAEKALVEFTNSPDCLSKCQLLLERGSSSYSQLLAATCLTKLVSRTNNPLPLEQRIDIRNYVLNYLATRPKLATFVTQALIQLYARITKLGWFDCQKDDYVFRNAITDVTRFLQDSVEYCIIGVTILSQLTNGINQADTTHPLTKHRKIASSFRDSSLFDIFTLSCNLLKQASGKNLNLNDESQHGLLMQLLKLTHNCLNFDFIGTSTDESSDDLCTVQIPTSWRSAFLDSSTLQLFFDLYHSIPPSFSPLVLSCLVQIASVRRSLFNNAERAKFLSHLVDGVKRILENPQSLSDPNNYHEFCRLLARLKSNYQLGELVKVENYPDVIRLIANFTVTSLQHWEFAPNSVHYLLSLWQRLAASVPYVKATEPHMLETYTPEVTKAYITSRLESVHIILRDGLEDPLEDTGLVQQQLDQLSTIGRCEYEKTCALLVQLFDQSAQSYQELLQSASASPMDIAVQEGRLTWLVYIIGAVIGGRVSFASTDEQDAMDGELVCRVLQLMNLTDSRLAQAGNEKLELAMLSFFEQFRKIYIGDQVQKSSKLYRRLSEVLGLNDETMVLSVFIGKVITNLKYWGRCEPITSKTLQLLNDLSIGYSSVRKLVKLSAVQFMLNNHTSEHFSFLGINNQSNLTDMRCRTTFYTALGRLLMVDLGEDEDQYEQFMLPLTAAFEAVAQMFSTNSFNEQEAKRTLVGLVRDLRGIAFAFNAKTSFMMLFEWIYPSYMPILQRAIELWYHDPACTTPVLKLMAELVHNRSQRLQFDVSSPNGILLFRETSKMITMYGNRILTLGEVPKDQVYALKLKGISICFSMLKAALSGSYVNFGVFRLYGDDALENALQTFIKLLLSIPHSDLLDYPKLSQSYYSLLEVLTQDHMNFIASLEPHVIMYILSSISEGLTALDTMVCTGCCSCLDHIVTYLFKQLSRSTKKRTTPLNRESDCFLHIMQQHPAMIQQMLSTVLNIIIFEDCRNQWSMSRPLLGLILLNEKYFSDLRNSIVNSQPPEKQQAMHLCFENLMEGIERNLLTKNRDR

SEQ ID NO: 4348 - protein, 172 aa, Mus musculus
MADHVQSLAQLENLCKQLYETTDTTTRLQAEKALVEFTNSPDCLSKCQLLLERGSSSYSQLLAATCLTKLVSRTNNPLPLEQRIDIRNYVLNYLATRPKLATFVTQALIQLYARITKLGWFDCQKDDYVFRNAITDVTRFLQDSVEYCIIGVTILSQLTNEINQADTTHPLT

SEQ ID NO: 4349 - protein, 640 aa, Rattus norvegicus
MLKVEGDDYSQLKERKTQGCEDVKAPDAILEYETFFFLSSSELNEKNVVRPKNDVSRVPEKAWKIVKVYARMSEVLGITDDNHVLETFMTKISKQHHWLHSSFLMPPDFLSSPKLDADKGFVSFTREHFPFLGISDTYSVSDFRCRTTFYTALTRLLMVDLGEDEDEFENFMLPLTVSFETVLQIFNNNFKQEEVKRMLIGLARDLRGIAFALNTKTSYTMLFDWMYPYYTVTIPALCTEGCQALSFVHRFTAANTELCLVLSLYTEDPSVCTGRAWNGERNSVVKLAQSYTGLPQPRYPAYLPVLQRAIERWYGEPACTTPILKLLAELMQNRSRVNFAVFLRSQRLNFDVSSPNGILLFREASKMICTYGNQILSLGSLSKDQIYPMKLKGISICYSALKSALCGNYVSFGVFKLYGDNHFDNVLQAFVKMLLSVSHSDLLQYRKLSQSYYPLLECLTQDHMSFITNLEPPVLLYVLTSLSEGLTTLGAGANTRDQCGKASCWNRPKDHQGQRVLVGIVELLSCCTSLDYMVTYLFKHIAKEGKKPLRCREAMQAGQRLLHFMQQNPDVLQQVSWTMESTWLNLGLPTHKDPSAVRFTVELRKGNSFDAKKEEKAQKAQTSYLDLGQSCCSCSLQTSC

SEQ ID NO: 4350 - protein, 828 aa, Rattus norvegicus
MLDRRVRPRWSGCSGVLAECAVIAAHVKTVMVELVTGYRRSTERGQSIPVRRGASTCYLVPTDVHKPLSKLAALYSQGPGTLAGIAGTVDIQSLAELEALCTHLYVGTDLNERIEAEKALLELIDSPECLSKCQLLLEQGTTSYAQLLAATCLSKLVTRINPLPVEQRIDIKHAIAPFTRFAFRFSEVGVVTDVFFIGNYILNYVASQPKLAPFVIQALIQVIAKLTKLGWFEVQKDEFVFREIIADVKKFLQGTVEHCIIGVIILSELTQEMNLVLAKPLNLQDQDQQSLVMQVLKLVLSCLSFDFLGSSADESADDLCTVQIPTTWRTIFLEPETLDLFFNSYHSLPPLLSQLALSCLVQFASTRRSLFSSPERAKYLGNLIKGVKRILENPQGLSDPGNYHEFCRFLARLKTNYQLGELVLVKEYAEVIGLIANFTITSLQHWEFAPNSVHYLLTLWQRMVASVPFVKSAEPHLLDTYAPEITKAFITSRLESVAIVVRDNLEDPLDDTATVFQQLEQLCTVSRCEYEKTCTLLVQLFDQNAQNYQKLLHSASGLAIDMAIQEGQSVLHSCEQCAISPEVRAQHNSTLTSCDMQTAVTKYPGRLAWLIYLVGTVVGGRLTYTSTDEHDAMDGELSCRVLAGELEKLELCCPGLVELPEDAVSCDFYFPVVCALYLSVVHLSCDLLGATLDPVLLALSGAPVELSSRTTLSLLEPLTQCVFQLISLMDTRLPRRTNEKIELAVLWFLDQFRKTYVGDQLQRTSKESCFSACVFERFGSLVLYSPAFPAVEYTGGAADGILSLQLSGLRNLVLLTVTVKLSRKVLVR

SEQ ID NO: 4351 - protein, 147 aa, Rattus norvegicus
MRDSGRKSLAQLENLCKQLYETTDTTTRLQAEKALVEFTNSPDCLSKCQLLLERGSSSYSQLLAATCLTKLVSRTNNPLPLEQRIDIRNYVLNYLATRPKLATFVTQALIQLYARITKLGWFDCQKDDYVFRNAITDVTRFLITRST

SEQ ID NO: 4352 - protein, 1114 aa, Anopheles gambiae str. PEST
SCARTYRKHLNLITMEPELLEILCKQFYESQDAQLRVEAEKALYHFQDDPEALSKCQTLLDRANSSFSQLFATTILTKLVTKNIQVLRMQQRVDIRNYVLNYLATRPNLQPFVIQALISLLVKITKLCWIDMYEQEYVFQNILQDVKEFLGGSVDHCVIGVQILSQLTVEMNQQSESACNLTFPKHLRITSLYRDKMLYEIFILACTLLSQAKDSVCKNLNCLDEAQQGLFTHLLELARNCLSYDFVGATADESSDDIATVQIPTNWRPAFLDSESDSLKLFFDLYHMLPTRLSSLALSCLAQITSIRRSIFSNSERIKFLTKLVKGATDILKTSHGLSDPDNYHEFCRLLARLKSNYQLSELVIVENYPEAIQLIAKFTVQSLQMWQSAPNSIHYLLSLWQRLIASLPYVKSPEPHYLETYTPEVTKAFITSKLDAVPVIVREGLEDPVDDTDMVQQQLEQFATIGRCEYDKTCALLVQLFDQTANRYQEILSSPSTANHIDLQICEGQLTWLVYIIGASIGGRIATPSFDDHDVLECDIIIRVLQLMTLTDSRLPQCGCEKLELAFMYFLAHVRKIYITEHMQKLKMFPRLSEILGVSDDDMTMLTVTSRKMYAEATQRISLCITNLKYLGNSEMVLRKTLALLNDLTLICSSVRKLIKLDEIQFMLNNRTREHFSFLGSGTVAATRCRSMFYTCLGRLLMMDLGEDVERFNTFMMPLTKTIENIIMMNFPSEEAKKELIGLSRDLRGLALAFNAKMPYMMLFDWIYPDYSPILIRAVQMWAHDPTVTTPVLKLFTELVYNRSQRLLFDVSSPNGILLFRETSKLICCYGESMLSLNVPKEQMYPMKLKGISVCFQMLKQILSGNYVNFGVFKLYGDNALDNVLNMTAKLILTIPHDDILVYPKLSLSYYTLIQCLAQDHISYLSTLEPPLFLYILESISQGLNALESVVCSCCCQTLDHIVTYIFKQLQLNVSTFPNKKHRQAVPPENNMFLKVMELHPEILQGLLSTMMNIVMFEDCKHHWSMSRPLLVLILLYEDCFRRIRETVIQSQPVAKQQNMARLFEMLMDGIERNLLIQNRDKFTQNLLQFRRDINASLKITPQPNSTANEMDD

SEQ ID NO: 4353 - protein, 1195 aa, Plasmodium falciparum 3D7
MSESELQQLQVLCEAMYCGNKEEQNQAHTILLPLVNNVMNVSKLKNILGSTNHVHTLIFTTSGLLQLITNEWNKIDQKEKDELKEFVISYLYNKGNFVRLYVRIVKLSWLENTNYSLITKQVEYFLNSVTSHWIIGLYIYAALIEDMHPQCGVNSAKSRRCAISFRDYVLKDIFKVGIETLEEFVKGSIRIELRIEENRLLIKVLELIYNSLSFDFMGTMINDESSDENISLMIPQSWDIFNEKNIPKLFFDMYELCMSEEDDIRNCCGKYCLRSLILLGSLRKTFFTNEKQKVHYMNEFLGGINKIIEKKIGLNDEDCFHEMCRLIGKIDTSVRLQELSTYSNFLSWCHNIYLFTMDGMKNWKYLCNSKHYLLGIWSNMLNIIPPKVIKEINNRTDEKDLLKDVLSNKNIFAKKNSISDNFNSHDIDNKYLIICDYIYDITIIFINTRLELANYICEKGDNCEIENPLYNDVLRSEQLELISNLSKLQYNFIGAKLLSIFYELKSNHENNLISKTVFIEQTTWLVFIIASIISSSAISNMKNSSFNNFKINSELCFLVFSLMDQTNKSPEVFEYLEFAYLNCLELFKKVYISGKKNNQFLKEMRSVALKIIPDGGSNMYPNNNNNNNNNNNNNNNSNNIINNNNSSNSCGINNTLGFTTGSTNNPNTLLNNNMNNFATPSLITNENDDDNNDPLIDLIISKILFNLNNRVEYEQIIKRSLDLFHDLVSGMNIVCLEDKTPKLIVFARLLLKNEKILNLLHNRSTKFLEISKYYKYRTNYYLILTKLLFMEQNLVSSTFEKYIAPINNILECIKREININGKDIILKNNEIKLTFIGALRDLRGICMACNNVETYNMFFNFFINSHPLEDNQMNILTSLVDVIWNSYDICIPFLKFMCEFVYNKSQRITFPKSSPNGILLFKVVSNILIIISNNLLQKDKFIDIYKEKYKIISLLLNMFNNCLNGDFVNFAIFDLYNDDILNNSLNLALNMCLVIPTNDLLSYIKHLKPYFSFLDLVTKNFFQRILNLEFQLIADIIHNVKEGLCSFDYTVSMTCCSILDNIVTYIFTNRKNSTEQGQVINKNKHHMIIKNFLESQPQALKEVLNLMFHLILGGDFGSTWSMSQPLLGLILLDAQGYFKIQEQLISQQSEEKKQKLRHSFCKLMDHIESNLAPNNRENFTRNLYTFAQEIRNILI

SEQ ID NO: 4354 - protein, 1059 aa, Arabidopsis thaliana
MESLAQLEAMCERLYNSQDSAERAHAENSLRCFSVNTDYISQCQYILDNSSKPYSLMLASSSLLKQVTDHTLPLNLRLDIRAYIVNYLATRGPKMQSFVIASLIQLLCRLTKFGWLDDDRFRDVVKESTNFLEQGSSDHYAIGLRILDQLVQEMNQPNPGLPSTHHRRVACNFRDQSLFQVFRIALTSLSYLKNDAAGRLQELALSLALRCVSFDFVGTSIDESTEEFGTVQIPTSWRSVLEDSSTLQIFFDYYGSTESPLSKEALECLVRLASVRRSLFTNDATRSNFLAHLMTGTKEILQTGKGLADHDNYHVFCRLLGRFRLNYQLSELVKMEGYGEWIQLVAEFTLKSLQSWQWASSSVYYLLGMWSRLVASVPYLKGDSPSLLDEFVPKITEGFIISRFNSVQASVPDDPTDHPLDKVEVLQDELDCFPYLCRFQYERTGMYIINTMEPLLQSYTERGQLQFADNSELALIEAKLSWIVHIVAAIVKIKQCSGCSVETQEVLDAELSARVLRLVNVMDSGLHRQRYGEISKQRLDRAILTFFQNFRKSYVGDQAMHSSKQLYARLKELLGLHDHLVLLNVIVGKIATNLKCYTESEEVINHTLSLFLELASGYMTGKLLLKLDTVTFIISNHTREQFPFLEEYRCSRSRTTFYYTIGWLIFMEDSLIKFKTSMEPLLQVFRTLESTPDSMFRTDAVKFALIGLMRDLRGIAMATSSRRSYGFLFDWLYPAHMPLLLRGVSHWFDTPEVTTPLLKFMAEFVHNKTQRLTFDSSSPNGILLFREVSKLIVAYGSRILALPNVADIYAFKYKGIWVSLTILSRALSGNYCNFGVFELYGDRALADALDIALKMTLAIPLADILAYRKLTKAYFGFVEVLCASHITFILKLDTATFMHLVGSLESGLKGLDTSISSQCAIAVDNLASYYFNNITMGEAPTTPAAIRFAQHIADCPSLFPEILKTLFEIVLFEDCGNQWSLSRPMLSLILISEQIFSDLKAKILSSQSIILMVQPADQHQRLSACFDSLMTDISRGLDSKNRDKFTQNLTLFRHEFRVK

SEQ ID NO: 4355 - protein, 265 aa, Glycine max
  unsure (1)..(265): unsure at all Xaa locations
XSKLXVAYGSRVLSLPSAADIYTYKYKGIWICLTILSRALSGNYVNFGVFELYGDRALSDALDAALKMTLSIPMSDILAYRKLTRAYFAFLEVXFNSHITFVLNLDTNTFMHMVGSLESGLKGLDTSISSPTRPAVDNLAAFYFNNITMGEAPNLPASVNLARHIGECPNLFPEILKTLFEIILFEDCGNQWSLSRPMLSLILINEQIFSDLKAQILSSQPMDQHQRLSSCFDKLMADVTLSIDSKNRDKFTQNLTIFRHEFRAK

SEQ ID NO: 4356 - protein, 228 aa, Glycine max
  unsure (1)..(228): unsure at all Xaa locations
XYVNFGVFELYGDRALSDALDAALKMTLSIPMSDILAYRKLTRAYFAFLEVLFNSHITFVLNLDTNTFMHMVGSLESGLKGLDTSISSQVICASAVDNLAAFYFNNITMGEAPNLPASVNLARHIAECPNLFPEILKTLFEIILFEDCGNQWSLSRPMLSLILINEQIFSDLKAQIXFSQPXXDQHQHQRLSSCFDKLMADVALSIDSKNRDKFTQNLTIFRHEFRAK

SEQ ID NO: 4357 - protein, 181 aa, Glycine max
  unsure (1)..(181): unsure at all Xaa locations
XAYFAFLEVLFNSHITFVLNLDTNTFMHMVGSLESGLKGLDTSISSQCASAVDNLAAFYFNNITMGEAPNLPASVNLARHIGECPNLFPEILKTLFEIILFEDCGNQWSLSRPMLSLILINEQIFSDLKAQILSSQPMDQHQRLSSCFDKLMADVTLSIDSKNRDKFTQNLTIFRHEFRAK

SEQ ID NO: 4358 - protein, 149 aa, Glycine max
  unsure (1)..(149): unsure at all Xaa locations
NLRFAMELAQLEALCERLYNSQDSVERAHAENTLKCFSMNTEYISQCQYILDHALTPYALMLASSSLLKQVTEHSLAMKLRLDIWAYLINYLATRGPELQPFVAASLIHFLGRVTKXFGWFDXDDRFRDLGKESMNFLSQATPGHYAIX

SEQ ID NO: 4359 - protein, 235 aa, Glycine max
  unsure (1)..(235): unsure at all Xaa locations
XPSLLDEFVPKITESFITSRFNSVQAGLPDDLSENPLDNAELLQDQLDCFPYLCRFQYESSSLFIINIMEPVLQIYTERARLHVPDNSDLIVIEDKLAWIVHIIAAILKIKQCTGCSVESQEVLDAELSARVLQWINVTDSGIHSQRYGEISQQRLDRAIITFFQHFRKSYVGDQAIHSSKLYSRLSELLGLHDHLLLVNVIIGEIVTNLKCYTESEEVIDHALSLFFELASGYX

SEQ ID NO: 4360 - protein, 188 aa, Glycine max
  unsure (1)..(188): unsure at all Xaa locations
FVNFGIFELYGDRALVDALDITVKIILSIPLADIFAFRKVAAAYFAFLESLFSCHLSFVLSLDKTTFMLVVGSLESGLKDSXXKISSQCASAIDNLATFYFTHVTVGESVTSPAALNLAGLLSDCAELFSPAPETISYLXAFLFIIFRFLYIVYHDSFCSFGKGIGFFSFISGGDFFYERSAGIYWHT

SEQ ID NO: 4361 - protein, 141 aa, Glycine max
  unsure (1)..(141): unsure at all Xaa locations
XKEHFPCLEANRCTRSRTTFYYTIGWLIFMEDSPVKFKSSMDPLQQVFLSLESTPDAVFRTDAVRYALVGLMRDLRGIAMATNSRRTYGFLFDWXYPAHMPLLLKSISHWTDTPGVTTPVVKLMAELVLNKAHRLTFDSSX

SEQ ID NO: 4362 - protein, 158 aa, Glycine max
  unsure (1)..(158): unsure at all Xaa locations
XQYLFQIFQISLTSLGQLKNDVVNQLQELXLALSLKCLSFDFVGTSVDESSDEFGXVQIPXPWKPVLEDSSTLQIFFDYYAITKPPLSKEALECLVRLASVRRXLFTNDAARXKFLAHLMTGTKVILQTGQGVVGLLLLHLFCIIMSRIKXKRYLSXX

SEQ ID NO: 4363 - protein, 117 aa, Glycine max
  unsure (1)..(117): unsure at all Xaa locations
XMRICYNIYHHELHYLGXXXSYSXNYVLDXFSVSLPNTLRXESHLXXAFMQLTRAYFAFLEVLFNSHITFVLNLDTNTFMHMVGSLESGLKGLDTSISSQVIVTNLISVFLFSDXIK

SEQ ID NO: 4364 - protein, 799 aa, Oryza sativa (japonica cultivar-group); identical to SEQ ID NO: 405

SEQ ID NO: 4365 - protein, 387 aa, Triticum aestivum
  unsure (1)..(387): unsure at all Xaa locations
XASADAAFRTDVVKYAFTGLMRDLRGIAMATNXTYGLLFDWLYPSRMPLLLRXAISLLTDEPEVTTPLLKFMSEFVLNKAQRLTFDSSSPNGILLFREISKLIVAYGSRILLLPNGTNIYRSKYKGIWXISLTVLSRAXLCGNYVNFGVFELYGDRALADALDISLKMTLSIPLADILTFKQLSKAYYGYMEVLFNNHITINSVLNLDTSTFVHIVTSLESGLKGLDTGISTQCASAIDSLAAFYFNNITAGDNPPSPXAALNLARHIGELPSLFPQILKSLFEIIIFEDAGNQWSLSRPILSLIMISEQMFSDLRSQVLASQPLDQQQRLSQCFDKLMTDVTRSLEPKNRDRFTQNLTTFRHDFRAKXQSFRITCKFEGGGASALL

SEQ ID NO: 4366 - protein, 370 aa, Triticum aestivum
  unsure (1)..(370): unsure at all Xaa locations
XVRQTGQGLADHGNYHEFCRLLGRFKVNYQLSELLNVEFYGEWLGLVAEFTTKSLLSWQWASNSVYYLLSLWSRLVTSVPYLKGDTPSLLDETVPKITEGFITSRINSVQASFADNSPDHPLENAESLQDQLESLPYLCRFKYESCSLFIINIMEPLLQAYTARSRLPASGDAAELSVIEGQIAWMVHIIAAILKIRQTVGCSQDSQELFDAELAARVLQLINITDTGVHAQRYQEISKQRLDRAILIFVQNFRRSYVGDQAMHASKLYARLSELLGLTDHLVLLNVIVGKIATNLKCYAECEDVIDHTLSLFLELASGYMTGKLLLKLESTKFIIANHSRENFPFLEEYRCVRSRTNFYYILGCLVFMX

SEQ ID NO: 4367 - protein, 1055 aa, Zea mays
  unsure (1)..(1055): unsure at all Xaa locations
MQSMESLAQLEVLCEKLYNSRDSAQRAHAESTLKCFSENSEYISQCQYILDNASTPYALMLASSSLLKQVSDRSLSLMLRLDIRNYVINYLGTRGPKLQNFVIVSLIQLVCRITKFGWFDDDRFRETVKEATDFLGLASQDHYFIGLKILNNLVTEMNQPNPAMPLTLHRKIAGSFKDQFLLQIFQISLTSLNQLKSEAPDDFGHIPLDLALKCLSFDFVGSPVDESSEEFGTVQLPASWRPLLQDPSTLQIFFDYYKVNDIRVSKEALECLVRLASVRRSIFVEDPARSQFLSHLMLGTKEILLTGQGLADHDNYHEFCRXLGRFKVNYQLAELLNVEFYGEWIGLVAEFTTRSLLSWQWASNSVYYLLSLWSRLVTSVPYLKGETPSLLDETVPKITEGFITSRINSVQAILADNSLENPLDSVEVLQDQLEFLPFLCRFQYQSSSLYIINIMEPLLQAYTERSRLPAPGDADELSVIEGQIAWMVHIIAAIVKVRQVTGVSQETQELIDAELSARVLQLISVTDTGAHTQRYQELSKQRLDRAILIFVQSFRRSYVGDQAMHSSKLYGRLSELLGLNDHLILLNVIVGKIATNMKCYAESEDVIDHTLSLFLDLATGYMTGKLLLKLESVKFIIANHSPENFPFLAEYKCSRSRTTFYYILGSLVFMEDSPVKFRTFMEPLQQVALNLEATPDAAFRTDVAKRAFVGWMRDLRGIAMATNSRKTYGLLFDWLYPSRMPLLLRAISLCTDEPEVTTPLLKFTYEFVLNKAQRLTFDSSSPNGILLFREVSKIIVAYGSRILLLPNGTDIYGSKYKGIWISLTVLSRALCGNYVNFGVFELYGDRALADALDISLKMTLSVPLSDILAFKKLSKAYFGYMEVLFNNHIKFVLNLDTNTFIHIVSSLESGLKGLDAGISSQCASAIDNLAAFYFNNITSGDSPPSPASVNLARHIGECPNLFPQILKTLFEIMLFEDAGNQWSLSRPILSLIMTSEQMFSELRAHILASQTVDQQQRLSQCFDKLMTDVNRNLEPKNRDRFTQNLTAFRRDFRLK

SEQ ID NO: 4368 - protein, 197 aa, Zea mays
  unsure (1)..(197): unsure at all Xaa locations
RXRIAAVQALTTIAIRSGEPYRLQIYEFLHALALGGVQSNLNCSXVMGKIKVPVVLFAFNLEATSDSAFRTDVVXHAFIGWMRDLCGIAMATNRTYGLLFVWXYPSRMSLLLRAISLYTDKPELITLNIMNMYEFVLNKAQRLTFDSSSPNGILMFREVSKIIVAYRSRIILLPNGTYIYGSKYKGIWISPTVLSRX

SEQ ID NO: 4369 - protein, 92 aa, Zea mays
  unsure (1)..(92): unsure at all Xaa locations
XPDDFGHIPLDLALKCLSFDFVGSPVDESSEEFGTVQLPASWRPLLQDPSTLQIFFDYYKVNDIRVSKEVYCGDLSKFINNSREFCFDPRLK

SEQ ID NO: 4370 - protein, 61 aa, Zea mays
  unsure (1)..(61): unsure at all Xaa locations
XSLQRYQELSKQRLDRAILIFVQSFRRSYVGDQAMHSSKSLYIILLIFGRVWQMYLLVNSX

SEQ ID NO: 4371 - protein, 1078 aa, Caenorhabditis elegans
MDELPVLNSLCKDLYESVDPQARHRAESNLAELSESPECLQRCMLLFARGDYPYGPMVASTTLMKLLGGKTSITSVQKLELAKYLLEMLGQGAPQFPPYLVTSLCQLFARLTKQEWTYQNPTENQTEDTKIEYPFRDPVDSLVKTINMDNIEESMLAVQLLTLLVADMNSASGMDSVNKHRKNLSQFRDDFLYEIFSVSLNVLNDNVDRNLNDRQLGLLHAVLNLNLQCLLFDYIGSLTDETSEDNCNVQIPTAWRASFTDGKIVQLMFKLLNVLPQESSEKVMTIIAQLASIRRTLFNGTERQAYVQKLVEGVVSVIMNPGKLSDQAAFHEFCRLIARLKTNYQLCELIAVPCYSHMLRLLAEFTVQSLRMMEFSANSTYFLMTFWQRMVTSVPYVRNNDEHLLNVYCPEIMTAFVESRLQHVESIVREGAENPLDDQGATLQVMEHLAIICRCEYENTCKLLTQHFDQNANIWMNGSENDANTAIAEGRLVWLITLIGTAVFGKTTATSSDVHDKMDGELIARFPLKGNLRLEVSFIHMLEQFRRAYIMDQITRASAVYDTLEAELRITEESDMLGVIVQKILTNLKFWPSNSDLLDLSLSLFKDLSLGYSAVRKLFRLPEVQLLLNNHTADHFMFLGPNIDYQTMKQRTTFYEALTRLLTTDYSDDEEMLQRFLRPLTDTVEGICTVIQNNCQGVEEEQLKKIITGLCRDLRGVAIASTTKTIFQILFEWMYPEVFNIMQFSVEKWPGCADVVTPILRLLSEMVQNRQQRLKFEMSSCSAVLLFKETSKIVSIYGERLLQLPEVSKDRVYKERYKNIGVIFLILKNALIGAYVPFGVFRLYGDSCLQDALTTFVKLFTSIPQDDFHSYTKIAQNHYNLLEHVVQDNMPFVTNLSVDVFCALLRSIHSGLSSVDAIVITSACSSLDTILNYLYRRLTRSTPPTNKVGMDPEGDNILIAIKQHPDILAKMLQAVITLMMFGEVKCQWSLSRPLLGLILIQEDVYSDMKRELTSQQTYDRQADFDMLFTQLMSNVEMNLTVKNKDTFTQNLTRFRRDIALVLKGQALPSSSSVNQEMQ

SEQ ID NO: 4372 - protein, 1098 aa, Drosophila melanogaster
MDIQQLEVLCKQLYEATDIRIRSEAEKALVTFVSSQDALPKCQLLLQRADSSYAQLLAASTLTKLIQGLSLQERIDIRSYALNYLATVPNLQHFVVQALVSLLAKLTKYGWFDSYKEEMVFQNLLEDVKKFLQGSVEHCTIGVQILSQLVCEMNSVVEMDVQVSFSKMRKIATSFRDQQLLETFLLSCSLLVSARDNSKNISFMDESQQALISHVLRLTKNCLSFDFIGSSTDESADDMNNVQIPTAWRPAFLDSNTLKLFFDLYQILPNGLASYSISCLVQITSVRRSLFNNSERTKFLTHLVEGVKDILTTLHGLSDPDNYHEFCRLLARLKSNYQLGELIAVPCYPEAIQLIAKFTVESLHLWLFAPNSVHYLLTLWQRMVASVPYVKSPDPHLLGTYTPEVIKAYIESRLDAVPVIIRDNLDDPLDDFCMVQQQLEQLSVIERCEYNKTCNLLVQHFDQKAREYENLLQTPNANSIDITIHELQLTWLVYIIGSAIVGRLTVATSDEHDTMDAELVIRVLQLMTLTDARLPQAGCEKLELAILSFLDQVRKMHSSEQAQKANLNKRLSEVFGLTDEQMLLSFINRKIITNLKFWGRSESIITKTLMLLSELSVHFNSVRKLARLEEVQFMLTHHTSEHFPFLGTNSSLSEMRCRTMFYTSLGRLLMFDLGEDEERFYNFLEPLTNQFESLGSVMMDNNIFSNEEAKKVIIGLARDLRGLALPLNARIQYTMLFEWLYYADYLPILLRAMDLWAHDPAVTTPILKLFAELVHCRTQRLAGNVSSPMGILLFREASKLICIYGNRILHQEVPRERLYPMRLKGIAICFLILKNSLGGNYVNCGVFKLYGDDTLDSVLNIIAKLILTIEQRDLIEYPKLSTAYYNLLNCLSQDHVSYLAALEPAAFVYILKSLTKGLAALDSATYISCCTILDSIVSYIFKQLQMKVSTFPNKKLRSLNQENVQFLKVVEMNSELLQSMMSSLLNNVLQEDCRNQWSMSRPLLVLILLYEDYYRSLKDRIICAQPIEKQQTMAQWFDDLMVGIERNVSSKNKEKFTQNMSTFRRDVVNLPKSTAAFSCDRPMCDGGFEPSEPESSPH

SEQ ID NO: 4373 - protein, 980 aa, Drosophila melanogaster
MVFQNLLEDVKKFLQGSVEHCTIGVQILSQLVCEMNSVVEMDVQVSFSKMRKIATSFRDQQLLETFLLSCSLLVSARDNSKNISFMDESQQALISHVLRLTKNCLSFDFIGSSTDESADDMNNVQIPTAWRPAFLDSNTLKLFFDLYQILPNGLASYSISCLVQITSVRRSLFNNSERTKFLTHLVEGVKDILTTLHGLSDPDNYHEFCRLLARLKSNYQLGELIAVPCYPEAIQLIAKFTVESLHLWLFAPNSVHYLLTLWQRMVASVPYVKSPDPHLLGTYTPEVIKAYIESRLDAVPVIIRDNLDDPLDDFCMVQQQLEQLSVIERCEYNKTCNLLVQHFDQKAREYENLLQTPNANSIDITIHELQLTWLVYIIGSAIVGRLTVATSDEHDTMDAELVIRVLQLMTLTDARLPQAGCEKLELAILSFLDQVRKMHSSEQAQKANLNKRLSEVFGLTDEQMLLSFINRKIITNLKFWGRSESIITKTLMLLSELSVHFNSVRKLARLEEVQFMLTHHTSEHFPFLGTNSSLSEMRCRTMFYTSLGRLLMFDLGEDEERFYNFLEPLTNQFESLGSVMMDNNIFSNEEAKKVIIGLARDLRGLALPLNARIQYTMLFEWLYYADYLPILLRAMDLWAHDPAVTTPILKLFAELVHCRTQRLAGNVSSPMGILLFREASKLICIYGNRILHQEVPRERLYPMRLKGIAICFLILKNSLGGNYVNCGVFKLYGDDTLDSVLNIIAKLILTIEQRDLIEYPKLSTAYYNLLNCLSQDHVSYLAALEPAAFVYILKSLTKGLAALDSATYISCCTILDSIVSYIFKQLQMKVSTFPNKKLRSLNQENVQFLKVVEMNSELLQSMMSSLLNNVLQEDCRNQWSMSRPLLVLILLYEDYYRSLKDRIICAQPIEKQQTMAQWFDDLMVGIERNVSSKNKEKFTQNMSTFRRDVVNLPKSTAAFSCDRPMCDGGFEPSEPESSPH

SEQ ID NO: 4374 - protein, 238 aa, Plasmodium yoelii yoelii
MFNNCLNGDFVNFAIFDLYNDDILNNSLNLALNMCLVIPTNDLLSYIKHLKPYFSFLDLVTKNFFQRILNLEFRLIADIIHNVKEGLCSFDYTVSMTCCSILDNIVTYIFTNRKSSSEQGQIIKNFLENQPQALKEVLNLMFHLILGGNFGSTWSMSQPLLGLILLDAQGYFKIQEQLISQQSEEKKQKLRHSFCKLMDHIDSNLASNNRENFTRNLIAIIILFILSYFFFFFNFITP

SEQ ID NO: 4375 - protein, 516 aa, Plasmodium yoelii yoelii
MSEAELQQLQVLCEAMYCGNKEEQNQAHTILLPLVSNVGNVSKLKNILGSTTHVHTLIFTTSGLLQLITNEWNKIENNEKEELKEFVISYLYNKGVELLNLSSNILGNFVRLYVRIVKLSWLENTNYALITKQVEYFLNSVTSHWIIGLYIYAALIEDMHPQCGVNSAKSRRCAISFRDYVLKDIFKVGIETLEEFVKGSIRIELRVEENRLLMKVLELIYNSLSFDFMGTMINDESSDENISLMIPQSWDIFNEKNIPKLFFDMYEICMSEVDDIRNCCGKYCIRSLILLGSLRKTFFSNEKQKIRYMNEFLGGINKIIEKKIGLHDEDCFHELCRLIGKIDTSIRLQELSTYSNFLSWCNNIYLFTMDGMKNWKYLCNSKHYLLGIWSNMLNIIPPKIIKEINSKTDEKELLNDVMNNKNFFIKKNNSISNSFNTNNDIDNKYLIICDYIYNITIVFINSRLELAKYICETGDSCEMENPLYNDVLRSEQLELISNLCKLQYNFIGGKILFYIL

SEQ ID NO: 4376 - protein, 1087 aa, Homo sapiens
MADHVQSLAQLENLCKQLYETTDTTTRLQAEKALVEFTNSPDCLSKCQLLLERGSSSYSQLLAATCLTKLVSRTNNPLPLEQRIDIRNYVLNYLATRPKLATFVTQALIQLYARITKLGWFDCQKDDYVFRNAITDVTRFLQDSVEYCIIGVTILSQLTNEINQADTTHPLTKHRKIASSFRDSSLFDIFTLSCNLLKQASGKNLNLNDESQHGLLMQLLKLTHNCLNFDFIGTSTDESSDDLCTVQIPTSWRSAFLDSSTLQLFFDLYHSIPPSFSPLVLSCLVQIASVRRSLFNNAERAKFLSHLVDGVKRILENPQSLSDPNNYHEFCRLLARLKSNYQLGELVKVENYPEVIRLIANFTVTSLQHWEFAPNSVHYLLSLWQRLAASVPYVKATEPHMLETYTPEVTKAYITSRLESVHIILRDGLEDPLEDTGLVQQQLDQLSTIGRCEYEKTCALLVQLFDQSAQSYQELLQSASASPMDIAVQEGRLTWLVYIIGAVIGGRVSFASTDEQDAMDGELVCRVLQLMNLTDSRLAQAGNEKLELAMLSFFEQFRKIYIGDQVQKSSKLYRRLSEVLGLNDETMVLSVFIGKIITNLKYWGRCEPITSKTLQLLNDLSIGYSSVRKLVKLSAVQFMLNNHTSEHFSFLGINNQSNLTDMRCRTTFYTALGRLLMVDLGEDEDQYEQFMLPLTAAFEAVAQMFSTNSFNEQEAKRTLVGLVRDLRGIAFAFNAKTSFMMLFEWIYPSYMPILQRAIELWYHDPACTTPVLKLMAELVHNRSQRLQFDVSSPNGILLFRETSKMITMYGNRILTLGEVPKDQVYALKLKGISICFSMLKAALSGSYVNFGVFRLYGDDALDNALQTFIKLLLSIPHSDLLDYPKLSQSYYSLLEVLTQDHMNFIASLEPHVIMYILSSISEGLTALDTMVCTGCCSCLDHIVTYLFKQLSRSTKKRTTPLNQESDRFLHIMQQHPEMIQQMLSTVLNIIIFEDCRNQWSMSRPLLGLILLNEKYFSDLRNSIVNSQPPEKQQAMHLCFENLMEGIERNLLTKNRDRFTQNLSAFRREVNDSMKNSTYGVNSNDMMS

SEQ ID NO: 4377 - protein, 909 aa, Homo sapiens
EWSKMADHVQSLAQLENLCKQLYETTDTTTRLQAEKALVEFTNSPDCLSKCQLLLERGSSSYSQLLAATCLTKLVSRTNNPLPLEQRIDIRNYVLNYLATRPKLATFVTQALIQLYARITKLGWFDCQKDDYVFRNAITDVTRFLQDSVEYCIIGVTILSQLTNEINQADTTHPLTKHRKIASSFRDSSLFDIFTLSCNLLKQASGKNLNLNDESQHGLLMQLLKLTHNCLNFDFIGTSTDESSDDLCTVQIPTSWRSAFLDSSTLQLSTIGRCEYEKTCALLVQLFDQSAQSYQELLQSASASPMDIAVQEGRLTWLVYIIGAVIGGRVSFASTDEQDAMDGELVCRVLQLMNLTDSRLAQAGNEKLELAMLSFFEQFRKIYIGDQVQKSSKLYRRLSEVLGLNDETMVLSVFIGKIITNLKYWGRCEPITSKTLQLLNDLSIGYSSVRKLVKLSAVQFMLNNHTSEHFSFLGINNQSNLTDMRCRTTFYTALGRLLMVDLGEDEDQYEQFMLPLTAAFEAVAQMFSTNSFNEQEAKRTLVGLVRDLRGIAFAFNAKTSFMMLFEWIYPSYMPILQRAIELWYHDPACTTPVLKLMAELVHNRSQRLQFDVSSPNGILLFRETSKMITMYGNRILTLGEVPKDQVYALKLKGISICFSMLKAALSGSYVNFGVFRLYGDDALDNALQTFIKLLLSIPHSDLLDYPKLSQSYYSLLEVLTQDHMNFIASLEPHVIMYILSSISEGLTALDTMVCTGCCSCLDHIVTYLFKQLSRSTKKRTTPLNQESDRFLHIMQQHPEMIQQMLSTVLNIIIFEDCRNQWSMSRPLLGLILLNEKYFSDLRNSIVNSQPPEKQQAMHLCFENLMEGIERNLLTKNRDRFTQNLSAFRREVNDSMKNSTYGVNSNDMMS

SEQ ID NO: 4378 - protein, 1087 aa, Homo sapiens
MADHVQSLAQLENLCKQLYETTDTTTRLQAEKALVEFTNSPDCLSKCQLLLERGSSSYSQLLAATCLTKLVSRTNNPLPLEQRIDIRNYVLNYLATRPKLATFVTQALIQLYARITKLGWFDCQKDDYVFRNAITDVTRFLQDSVEYCIIGVTILSQLTNEINQADTTHPLTKHRKIASSFRDSSLFDIFTLSCNLLKQASGKNLNLNDESQHGLLMQLLKLTHNCLNFDFIGTSTDESSDDLCTVQIPTSWRSAFLDSSTLQLFFDLYHSIPPSFSPLVLSCLVQIASVRRSLFNNAERAKFLSHLVDGVKRILENPQSLSDPNNYHEFCRLLARLKSNYQLGELVKVENYPEVIRLIANFTVTSLQHWEFAPNSVHYLLSLWQRLAASVPYVKATDPHMLETYTPEVTKAYITSRLESVHIILRDGLEDPLEDTGLVQQQLDQLSTIGRCEYEKTCALLVQLFDQSAQSYQELLQSASASPMDIAVQEGRLTWLVYIIGAVIGGRVSFASTDEQDAMDGELVCRVLQLMNLTDSRLAQAGNEKLELAMLSFFEQFRKIYIGDQVQKSSKLYRRLSEVLGLNDETMVLSVFIGKIITNLKYWGRCEPITSKTLQLLNDLSIGYSSVRKLVKLSAVQFMLNNHTSEHFSFLGINNQSNLTDMRCRTTFYTALGRLLMVDLGEDEDQYEQFMLPLTAAFEAVAQMFSTNSFNEQEAKRTLVGLVRDLRGIAFAFNAKTSFMMLFEWIYPSYMPILQRAIELWYHDPACTTPVLKLMAELVHNRSQRLQFDVSSPNGILLFRETSKMITMYGNRILTLGEVPKDQVYALKLKGISIYFSMLKAALSGSYVNFGVFRLYGDDALDNALQTFIKLLLSIPHSDLLDYPKLSQSYYSLLEVLTQDHMNFIASLEPHVIMYILSSISEGLTALDTMVCTGCCSCLDHIVTYLFKQLSRSTKKRTTPLNQESDRFLHIMQQHPEMIQQMLSTVLNIIIFEDCRNQWSMSRPLLGLILLNEKYFSDLRNSIVNSQPPEKQQAMHLCFENLMEGIERNLLTKNRDRFTQNLSAFRREVNDSMKNSTYGVNSNDMMS

SEQ ID NO: 4379 - protein, 1006 aa, Homo sapiens [sequence omitted]

SEQ ID NO: 4380 - protein, 1088 aa, Homo sapiens
MALHFQSLAELEVLCTHLYIGTDLTQRIEAEKALLELIDSPECLSKCQLLLEQGTTSYAQLLAATCLSKLVSRVSPLPVEQRMDIRNYILNYVASQPKLAPFVIQALIQVIAKITKLGWFEVQKDQFVFREIIADVKKFLQGTVEHCIIGVIILSELTQEMNLVDYSRPSAKHRKIATSFRDTSLKDVLVLACSLLKEVFAKPLNLQDQCQQNLVMQVLKLVLNCLNFDFIGSSADESADDLCTVQIPTTWRTIFLEPETLDLFFNLYHSLPPLLSQLALSCLVQFASTRRSLFNSPERAKYLGNLIKGVKRILENPQGLSDPGNYHEFCRFLARLKTNYQLGELVMVKEYPEVIRLIANFTITSLQHWEFAPNSVHYLLTLWQRMVASVPFVKSTEPHLLDTYAPEITKAFITSRLDSVAIVVRDHLDDPLDDTATVFQQLEQLCTVSRCEYEKTCALLVQLFDQNAQNYQKLLHPYSGVTVDITIQEGRLAWLVYLVGTVVGGRLTYTSTDEHDAMDGELSCRVFQLISLMDTGLPRCCNEKIELAILWFLDQFRKTYVGDQLQRTSKVYARMSEVLGITDDNHVLETFMTKIVTNLKYWGRYEPVISRTLQFLNDLSVGYILLKKLVKIDAVKFMLKNHTSEHFPFLGISDNHSLSDFRCRTTFYTALTRLLMVDLGEDEDEFENFMLPLTVAFETVLQIFNNNFKQEDVKRMLIGLARDLRGIAFALNTKTSYTMLFDWMYPTYLPLLQNAVERWYGEPTCTTPILKLMAELMQNRSQRLNFDVSSPNGILLFREASKMVCTYGNQILSLGSLSKDQIYPMKLKGISICYSALKSALCGNYVSFGVFKLYGDNHFDNVLQAFVKMLLSVSHSDLLQYRKLSQSYYPLLECLTQDHMSFIINLEPPVLMYVLTSISEGLTTLDTVVSSSCCTSLDYIVTYLFKHIAKEGKKPLRCREATQAGQRLLHFMQQNPDVLQQMMSVLMNTIVFEDCRNQWSVSRPLLGLILLNEKYFSELRASLINSQPLPKQEVLAQCFRNLMEGVEQNLSVKNRDRFTQNLSVFRRDVAEALRSDGNTEPCSLDMMS

SEQ ID NO: 4381 - protein, 413 aa, Homo sapiens [sequence omitted]

SEQ ID NO: 4382 - protein, 576 aa, Homo sapiens
MALHFQSLAELEVLCTHLYIGTDLTQRIEAEKALLELIDSPECLSKCQLLLEQGTTSYAQLLAATCLSKLVSRVSPLPVEQRMDIRNYILNYVASQPKLAPFVIQALIQVIAKITKLGWFEVQKDQFVFREIIADVKKFLQGTVEHCIIGVIILSELTQEMNLVDYSRPSAKHRKIATSFRDTSLKDVLVLACSLLKEVFAKPLNLQDQCQQNLVMQVLKLVLNCLNFDFIGSSADESADDLCTVQIPTTWRTIFLEPETLDLFFNLYHSLPPLLSQLALSCLVQFASTRRSLFNSPERAKYLGNLIKGVKRILENPQGLSDPGNYHEFCRFLARLKTNYQLGELVMVKEYPEVIRLIANFTITSLQHWEFAPNSVHYLLTLWQRMVASVPFVKSTEPHLLDTYAPEITKAFITSRLDSVAIVVRDHLDDPLDDTATVFQQLEQLCTVSRCEYEKTCALLVQLFDQNAQNYQKLLHPYSGVTVDITIQEGRLAWLVYLVGTVVGGRLTYTSTDEHDAMDGELSCRVFQLISLMDTGLPRCCNEKIELAILWFLDQFRKTYVGDQLQRTSKKTDIFL

SEQ ID NO: 4383 - protein, 580 aa, Homo sapiens
MALHFQSLAELEVLCTHLYIGTDLTQRIEAEKALLELIDSPECLSKCQLLLEQGTTSYAQLLAATCLSKLVSRVSPLPVEQRMDIRNYILNYVASQPKLAPFVIQALIQVIAKITKLGWFEVQKDQFVFREIIADVKKFLQGTVEHCIIGVIILSELTQEMNLVDYSRPSAKHRKIATSFRDTSLKDVLVLACSLLKEVFAKPLNLQDQCQQNLVMQVLKLVLNCLNFDFIGSSADESADDLCTVQIPTTWRTIFLEPETLDLFFNLYHSLPPLLSQLALSCLVQFASTRRSLFNSPERAKYLGNLIKGVKRILENPQGLSDPGNYHEFCRFLARLKTNYQLGELVMVKEYPEVIRLIANFTITSLQHWEFAPNSVHYLLTLWQRMVASVPFVKSTEPHLLDTYAPEITKAFITSRLDSVAIVVRDHLDDPLDDTATVFQQLEQLCTVSRCEYEKTCALLVQLFDQNAQNYQKLLHPYSGVTVDITIQEGRLAWLVYLVGTVVGGRLTYTSTDEHDAMDGELSCRVFQLISLMDTGLPRCCNEKIELAILWFLDQFRKTYVGDQLQRTSKEVAGDCILLN

SEQ ID NO: 4384 - protein, 334 aa, Mesocricetus auratus
MEAAHFFEGTEKLLEVWFSRQQSDASQGSGDLRTIPRSEWDVLLKDVQCSIISVTKTDKQEAYVLSESSMFVSKRRFILKTCGTTLLLKALVPLLKLARDYSGFDSIQSFFYSRKNFMKPSHQGYPHRNFQEEIEFLNAIFPNGAAYCMGRMNSDCWYLYTLDFPESRVINQPDQTLEILMSELDPAVMDQFYMKDGVTAKDVTRESGIRDLIPGSVIDATLFNPCGYSMNGMKSDGTYWTIHITPEPEFSYVSFETNLSQTSYDDLIRKVVEVFKPGKFVTTLFVNQSSKCRTVLSSPQKIEGFKRLDCQSAMFNDYNFVFTSFAKKQQQQQS

SEQ ID NO: 4385 - protein, 334 aa, Mus musculus
MEAAHFFEGTEKLLEVWFSRQQSDASQGSGDLRTIPRSEWDVLLKDVQCSIISVTKTDKQEAYVLSESSMFVSKRRFILKTCGTTLLLKALVPLLKLARDYSGFDSIQSFFYSRKNFMKPSHQGYPHRNFQEEIEFLNAIFPNGAAYCMGRMNSDCWYLYTLDFPESRVISQPDQTLEILMSELDPAVMDQFYMKDGVTAKDVTRESGIRDLIPGSVIDATLFNPCGYSMNGMKSDGTYWTIHITPEPEFSYVSFETNLSQTSYDDLIRKVVEVFKPGKFVTTLFVNQSSKCRTVLSSPQKIDGFKRLDCQSAMFNDYNFVFTSFAKKQQQQQS

SEQ ID NO: 4386 - protein, 334 aa, Mus musculus
MEAAHFFEGTEKLLEVWFSRQQSDASQGSGDLRTIPRSEWDVLLKDVQCSIISVTKTDKQEAYVLSESSIFVSKRRFILKTCGTTLLLKALVPLLKLARDYSGFDSIQSFFYSRKNFMKPSHQGYPHRNFQEEIEFLNVIFPNGAAYCMGRMNSDCWYLYTLDFPESRVISQPDQTLEILMSELDPAVMDQFYMKDGVTAKDVTRESGIRDLIPGSVIDATLFNPCGYSMNGMKSDGTYWTIHITPEPEFSYVSFETNLSQTSYDDLIRKVVEVFKPGKFVTTLFVNQSSKCRTVLSSPQKIDGFKRLDCQSAMFNDYNFVFTSFAKKQQQQQS

SEQ ID NO: 4387 - protein, 334 aa, Mus musculus
MEAAHFFEGTEKLLEVWFSRQQSDASQGSGDLRTIPRSEWDVLLKDVQCSIISVTKTDKQEAYVLSESSMFVSKRRFILKTCGTTLLLKALVPLLKLARDYSGFDSIQSFFYSRKNFMKPSHQGYPHRNFQEEIEFLNAIFPNGAAYCMGRMNSDCWYLYTLDFPESRVISQPDQTLEILMSELDPAVMDQFYMKDGVTAKDVTRESGIRDLIPGSVIDATLFNPCGYSMNGMKSDGTYWTIHITPEPEFSYVSFETNLSQTSYDHLIRKVVEVFKPGKFVTTLFVNQSSKCRTVLSSPQKIDGFKRLDCQSAMFNDYNFVFTSFAKKQQQQQS

SEQ ID NO: 4388 - protein, 265 aa, Mus musculus
MFVSKRRFILKTCGTTLLLKALVPLLKLARDYSGFDSTESFFYSRKNFMKSSHQGYPHQNFQEEIKFLNAIFPNGAAYCMGRMNSDCWYLYTLDFPESRVISQPDQTLEILMSELDPAVMDQFYMKDGVTAKDVTRESGICDLIPGSAIDATLFNPCGYSMNGMKSDGTYWTVHITPEPEFSYVSVETNLSQTSYDDLIRKVVEVFKPRKFVTTLFVNQSSKFCTVFSSPQKINSFNRLDCQSSMFNDYNFVFTSFAKKQQQQQS

SEQ ID NO: 4389 - protein, 182 aa, Mus musculus
MEAAHFFEGTEKLLEVWFSRQQSDASQGSGDLRTIPRSEWDVLLKDVQCSIISVTKTDKQEAYVLSESSMFVSKRRFILKTCGTTLLLKALVPLLKLARDYSGFDSIQSFFYSRKNFMKPSHQGYPHRNFQEEIEFLNAIFPNGAAYCMGRMNSDCWYLYTLDFPREPSNQSARSNTGNSDE

SEQ ID NO: 4390 - protein, 217 aa, Mus musculus
MKPSHQGYPHRNFQEEIEFLNAIFPNGAAYCMGRMNSDCWYLYTLDFPESRVISQPDQTLEILMSELDPAVMDQFYMKDGVTAKDVTRESGIRDLIPGSVIDATLFNPCGYSMNGMKSDGTYWTIHITPEPEFSYVSFETNLSQTSYDNLIRKVVEVFKPGKFVTTLFVNQSSKCRTVLSSPQKIDGFKRLDCQSAKFNDYNFVFTSFAKKQQQQQS

SEQ ID NO: 4391 - protein, 291 aa, Mus musculus
MGIEKVLEVLFSRQQSDARQGSGDLRTIPRSEWDVLLKDVQCSIISVTKTDKQEVYVLSESGMFFSKERFILKTSEFHEALPHENFEKEIEFLNTIFQNKAAYCMGCMNSDCWRLYALDFPESRVINQPDQTLEILMNELDPAVMDQFYMKDGVTAKDVTRESGIHDLIPGSVIDATLFNSCGYSIYGMKSDGTYWTIHITPEPEFSYVSFETNLSQTCYDDLIRKVVEVFKPGKFVTTLFVNQSSKCHKCFLRPRRLTTLKVLIARVLCSMITILFLPVFLRNSNNSRVD

SEQ ID NO: 4392 - protein, 139 aa, Mus musculus
MNSDCWHLYALDFPESRVIIQPDQTLEILMNELDPAVMDQFYMKDGVTAKDVTRESGIHDLIPGSVIDATLFNSCGYSIYGMKSDGTYWTIHITPEPEFSYVSFETNLSQTCYDDLIRKVVEVFKPGKFVTTLFVNQMF

SEQ ID NO: 4393 - protein, 334 aa, Mus spretus
MEAAHFFEGTEKLLEVWFSRQQSDASQGSGDLRTIPRSEWDVLLKDVQCSIISVTKTDKQEAYVLSESSMFVSKRRFILKTCGTTLLLKALVPLLKLARDYSGFDSIQSFFYSRKNFMKPSHQGYPHRNFQEEIEFLNVIFPNGAAYCMGRMNSDCWYLYTLDFPESRVISQPDQTLEILMSELDPAVMDQFYMKDGVTAKDVTRESGIRDLIPGSVIDATLFNPCGYSMNGMKSDGTYWTIHITPEPEFSYVSFETNLSQTSYDDLIRKVVEVFKPGKFVTTLFVNQSSKCRTVLSSPQKIDGFKRLDCQSAMFNDYNFVFTSFAKKQQQQQS

SEQ ID NO: 4394 - protein, 333 aa, Rattus norvegicus
MEAAHFFEGTEKLLEVWFSRQQSDASQGSGDLRTIPRSEWDVLLKDVQCSIISVTKTDKQEAYVLSESSMFVSKRRFILKTCGTTLLLKALVPLLKLARDYSGFDSIQSFFYSRKNFMKPSHQGYPHRNFQEEIEFLNAIFPNGAAYCMGRMNSDCWYLYTLDLPESRVINQPDQTLEILMSELDPAVMDQFYMKDGVTAKDVTRESGIRDLIPGSVIDATLFNPCGYSMNGMKSDGTYWTIHITPEPEFSYVSFETNLSQTSYDDLIRKVVEVFKPGKFVTTLFVNQSSKCRTVLSSPQKIDGFKRLDCQSAMFNDYNFVFTSFAKKQQQQS

SEQ ID NO: 4395 - protein, 333 aa, Rattus norvegicus
MEAAHFFEGTEKLLEVWFSRQQSDASQGSGDLRTIPRSEWDVLLKDVQCSIISVTKTDKQEAYVLSESSMFVSKRRFILKTCGTTLLLKALVPLLKLARDYSGFDSIQSFFYSRKNFMKPSHQGYPHRNFQEEIEFLNAIFPNGAGYCMGRMNSDCWYLYTLDLPESRVINQPDQTLEILMSELDPAVMDQFYMKDGVTAKDVTRESGIRDLIPGSVIDATLFNPCGYSMNGMKSDGTYWTIHITPEPEFSYVSFETNLSQTSYDDLIRKVVEVFKPGKFVTTLFVNQSSKCRTVLSSPQKIDGFKRLDCQSAMFNDYNFVFTSFAKKQQQQS

SEQ ID NO: 4396 - protein, 279 aa, Rattus norvegicus
MQTKTKSHLPEGTEKHLKVRFSRQQFDTNQGSRDLHTAPRSEWDALLNNNMSTITVTKTDKQEAYVLRGTHTGISRKKQSEFLNAISPNGAYCMKHINSDCWYLYTLDLPESRVINQPNQTLEILKSEFDPAVMDQFYMKDGVTAKDVTHESRIHDLIPGSVVDATLFNPCGYSMNGMKPDRTYWTIHITPEPEFSYVSFETNLSQTSYHDLIRKVMEIFKPGNFVITLFVNQSSKCRTMFSSPQKISSFKHLDCQSAISNDYNFVFTSFAKKQQQQHS

SEQ ID NO: 4397 - protein, 393 aa, Hordeum chilense
MAAPVSAIGFEGYEKRLEITFSEASIFADPHGRGLRALSRAQIDSVLDLARCTIVSELSNKDFDSYVLSESSLFIYSQKIVIKTCGTTMLLLTIPRILELAEELCMPLAAVKYSRGMFIFPGAQPAPHRSFSEEVDVLNRYFGHLNSGGNAYVIGDPAKPGQKWHIYYATEQPEQPMVTLEMCMTGLDKTKASVFFKTHADGHVSCAKEMTKLSGISDIIPEMEVCDFDFEPCGYSMNAINGSAFSTIHVTPEDGFSYASYEVQGMDASALAYGDIVKRVLRCFGPSEFSVAVTIFGGRGHAATWGKKLDAEAYDCNNVVEQELPCGGVLIYQSFAANEELAVSAGSPRSVFHCFENVESGHPLVKEGKLANLLAWRAEEESLEEGTGALLCE

SEQ ID NO: 4398 - protein, 306 aa, Aspergillus nidulans
GKMNGEHWYLYLTEPYTSLTPPATPTADSDDEVTQTKFIQLPDRSDLGMGPQDEASDETLEVLMTDLDEESAKQFYLDHATSVAEKRYSNFEKDDHVDVFSNGSDLEVDDVSSSQGSGILPAELTTEGHALGTVVSESCGLSDVYPKGKFPDSRIDAYLFTPCGFSANGVIPSPDGGKGTHYFTVHVTPEPHCSYASFETNVPHSRNGQTSAGIIQQVVNIFKPGRFTVTVFEAKPGVDGEWDADKEARYIERQAARRVSKGENVEGYKRVDRIVHDLHGYDLVFRYYERLDWKGGAPRLGEEVIA

SEQ ID NO: 4399 - protein, 361 aa, x Citrofortunella mitis
MALPVSAIGFEGYEKRLEVSFFEPGVFADPGGRGLRSLSKHQLDEILKPAECTIVSSLSNEYLDSYVLSESSLFVYPYKVIIKTCGTTKLLLSIPAILKLAESLSLSVRSVRFTRGSFIFAGAQPFPHRSFSEEVAVLDGHFGKFGMDSTAFVMGSPDNTKRWHVYSASAEAGSHVNLVYTLEMCMTGLDRKRASVFYKTNESSAAMMTEDSGIRKILPKSEICDFEFDPCGYSMNSIEGDAVSTIHVTPEDGFSYASFEAVGYDFEVVKLTSLLERVLACFKPAEFSVALHSDIVGDEHGDTFTLDFKGYSCGEKIYEELGNNGSLIYYSFSRTDCSTSPRSILKCCWSEDEKDEEVEGK

SEQ ID NO: 4400 - protein, 338 aa, Anopheles gambiae str. PEST
NKASCTPDRMAESEDLSNSSSNSSSREDMHFFEGVEKLLEIWFEPSTACKNADLRKIPRPMWDALLKTVRCEIISFTRNDQIDAYVLSESSMFVSKRRWILKTCGTTTPLQCFEPLLRLAAEIAGYTEIEDLFYSRKNYKRPELQVSPHRGFDEEVAFLDSFFDDGRAYSLASMQPDPDQTIEILMTDLDPSVMAIFTKDVCTTAKEATQKSGIHRLLPGMVIDDYLFDPCGYSMNGISKNGCYMTIHITPEREFSYVSFESNVASSDYGELIKRVTRTFQPGKFIVTVFANKTSIAANANREIEHLGTIDQWKRRDIQYSRFASYDLTYAQYCKYPS

SEQ ID NO: 4401 - protein, 228 aa, Vitis vinifera
MALPVSAIGFEGYEKRLEISFFEPGIFADPVGMGLRSLSKTQLDEILEPAECTIVSSLSNDEVDSYVLSESSLFVYHYKIIIKTCGTTKLLLSIPPILKLANSLDLSVRSVKYTRGSFIFPGAQSFPHRNFSEEVVELDGHFGELGAGSKAYMMGSHDKPQKWHVYTAAAEFTGRSDPVYTLEMCMTGLDRKKASVFYKTDTSSAAVMTENSGIRKILPNSEICDFDF

SEQ ID NO: 4402 - protein, 363 aa, Spinacia oleracea
MAISAIGFEGFEKRLEITFFEPSIFVDPEGKGLRALCKAQLDEILGPAECTIVDSLANESVDSYVLSESSLFIYAYKIIIKTCGTTKLLRAIPPILRLAGKLSLDVKSVRYTRGSFIFPGAQSYAHRSFSEEVAVLDGYFGKLAAGSKAFVMGDPAKPQKWHVYSASAETISFEEPVYTLEMCMTGLKKEKASVFFKSQSPNAAVMTESSGIRKILPDSKICDFDFEPCGYSMNAIEGPAISTIHITPEDGFSYASFEAVGYDLKKTDLNQLVERVLACFEPSEFSIAIHAEIAANSMEHNCYVNVNGYSREEGGIEELGFGAASVFYQKFCKASTGFGATNKPKPALKCCWKEDKFEEEKDY

SEQ ID NO: 4403 - protein, 381 aa, Dianthus caryophyllus
MMVPTLGNSNYNTVSPMNGDDNNTMALSAIGFEGFEKRLEISFFEPGIFVDPEGKGLRALSKAQLDEILGPAECTIVDSLANESVDSYVLSESSLFVYSYKIIIKTCGTTKLLHSILPILTLADGLCLDVKSVRYTRGSFIFPGAQSYPHRSFSEEVAVLDKYFGNLGTGSKAFVMGSPAKPQKWHVYSATAEPSYDDPVYTLEMCMTGLDKGKASVFFKSESASAAVMTETSGIRKILPDSAICDFDFEPCGYSMNAIEGPAVSTIHITPEDGFSYASFEAVGYDLKIVDVNQLVERVLNCFQPREFSIAVSVDTADKVLEQYCAVNVAGYCREEGGVEGLGVGGSVLYQKFGKVATVSGLNKSPKCCRKEEENDEKREC

SEQ ID NO: 4404 - protein, 377 aa, Dianthus caryophyllus
MTIPMMGNTTDDNNNMTISAIGFEGFEKRLEISFFEPGIFVDPEGKGLRALSKAHLDEILGPAECTIVDSLANESVDSYVLSESSLFVYSYKIIIKTCGTTKLLNSIPPILRLAETLFLDVKSVRYTRGSFIFPGAQSFPHRSFSEEVAVLDNYFAKLGAGSKAIVMGSPGKPQKWHVYSATAETNYDDPVYTLEMCMTGLDKEKASVFFKSQSASAAVMTESSGIRKILPDSVICDFDFEPCGYSMNAIEGPAVSTIHITPEDGFSYASFEAVGYDLQVVDLNLLVERVLACFEPKEFSIAVHADTDTADKVLARNCSVNVIGYSREEGGIEELGLGGSVFYQKFCKGTAPVCPPAPKKTLKCCWKEEEIDEEMEF

SEQ ID NO: 4405 - protein, 362 aa, Ipomoea nil
MALSTSAIGFEGYEKRLEISFFEAGIFSDPEGRGLRALSKEQLDKVLKPAECTIVSSLSNNEVDSYVLSESSLFVYPYKIIIKTCGTTKLLLSIPPILELADGLSLKVKSVKYTRGSFNFPEVQPYPHRNFSEEVAILDGYFGKLGTGSKAYVMGGAGKQQQWHVYSASAESAENTFPIYTLEMCMTGLDKKSASVFFKTQSSSAAVMTDASGIRKILPGSDICDFDFEPCGYSMNAVEGGTISTIHVTPEDGFSYASFEAMGYDFKDVNLDALIQRVLSCFQPAEFSVALHCDSIGEKLDSVFELDVKGYACGERSYEALGKGGSIMYCGFTSTGSCGSPRSTLLCCWSENEDQEGEKKHF

SEQ ID NO: 4406 - protein, 362 aa, Arabidopsis thaliana
MAMSAIGFEGYEKRLEVTFFEPGLFLDTQGKGLRALAKSQIDEILQPAECTIVSSLSNDQLDSYVLSESSLFIFPYKIVIKTCGTTKLLLSIEPLLRLAGELSLDVKAVRYTRGSFLCPGGQPFPHRNFSEEVSVLDGHFAKLGLSSVAYLMGNDDETKKWHVYSASSANSNNKNNVYTLEMCMTGLDKDKASVFYKNESSSAGSMTDNSGIRKILPQSQICDFEFEPCGYSMNSIEGDAISTIHVTPEDGFSYASFEAVGYDFTTMDLSHLVSKVLTCFKPKQFSVAVHSTVAQKSYDSGLSVDLDDYGCKESTMESLGEERGTVMYQRFEKLGRYCGSPRSTLKCEWSSNSSCNSEDEKE

SEQ ID NO: 4407 - protein, 347 aa, Arabidopsis thaliana
MAVSGFEGFEKRLELRFFDDDKPITKNPMGLRLIDFESLDQVLNEVQCTVVSAVANRSFDAYVLSESSLFVYPTKIIIKTCGTTQLLKSIRPLIHLARNLGLTLRACRYSRGSFIFPKAQPFPYTSFKDEVIVVEESLPKSLCYRKASVMTPSNNPSRAWHVFTASADVESDEHVVVVEVCMTELDRVNARSFFKRKGDEKNNSDSAGKEMTRLSGIDNINANAYICDFAFDPCGYSMNGVDGDRYSTIHVTPEDGFSYASFECGLSLYDNGHEDISEVLSRAIDVFRPSDVSIATTYGGEDYNHEVTKRVERVLAKKLDLKCRSRLMDEFPGSGTVVYQSFTPRRK

SEQ ID NO: 4408 - protein, 366 aa, Arabidopsis thaliana
MALSAIGFEGYEKRLEVTFFEPSIFQDSKGLGLRALTKSQLDEILTPAACTIVSSLSNDQLDSYVLSESSFFVYPYKVIIKTCGTTKLLLSIPPLLKLAGELSLSVKSVKYTRGSFLCPGGQPFPHRSFSEEVSVLDGHFTQLGLNSVAYLMGNDDETKKWHVYAASAQDSSNCNNNVYTLEMCMTGLDREKAAVFYKDEADKTGSMTDNSGIRKILPKSEICDFEFEPCGYSMNSIEGDAISTIHVTPEDGFSYASFEAVGYDFNTLDLSQLVTRVLSCFEPKQFSVAVHSSVGANSYKPEITVDLEDYGCRERTFESLGEESGTVMYQTFEKLGKYCGSPRSTLKCEWSSNNSCSSEDEKDEGI

SEQ ID NO: 4409 - protein, 366 aa, Arabidopsis thaliana
MALSAIGFEGYEKRLEVTFFEPSIFQDSKGLGLRALTKSQLDEILTPAACTIVSSLSNDQLDSYVLSESSFFVYPYKVIIKTCGTTKLLLSIPPLLKLAGELSLSVKSVKYTRGSFLCPGGQPFPHRSFSEEVSVLDGHFTQLGLNSVAYLMGNDDETKKWHVYAASAQDSSNCNNNVYTLEMCMTGLDREKAAVFYKDEADKTGSMTDNSGIRKILPKSEICDFEFEPCGYSMNSIEGDAISTIHVTPEDGFSYASFEAVGYDFNTLDLSQLVTRVLSCFEPKQFSVAVHSSVGANSYKPEITVDLEDYGCRERTFESLGEESGTVMYHTFEKLGKYCGSPRSTLKCEWSSNNSCSSEDEKDEGI

SEQ ID NO: 4410 - protein, 366 aa, Arabidopsis thaliana
MALSAIGFEGYEKRLEVTFFEPSIFQDSKGLGLRALTKSQLDEILTPAACTIVSSLSNDQLDSYVLSESSFFVYPYKVIIKTCGTTKLLLSIPPLLKLAGELSLSVKSVKYTRGSFLCPGGQLFPHRSFSEEVSVLDGHFTQLGLNSVAYLMGNDDETKKWHVYAASAQDSSNCNNNVYTLEMCMTGLDREKAAVFYKDEADKTGSMTDNSGIRKILPKSEICDFEFEPCGYSMNSIEGDAISTIHVTPEDGFSYASFEAVGYDFNTLDLSQLVTRVLSCFEPKQFSVAVHSSVGANSYKPEITVDLEDYGCRERTFESLGEESGTVMYQTFEKLGKYCGSPRSTLKCEWSSNNSCSSEDEKDEGI

SEQ ID NO: 4411 - protein, 366 aa, Arabidopsis thaliana
MALSAIGFEGYEKRLEVTFFEPSIFQDSKGLGLRALTKSQLDEILTPAACTIVSSLSNDQLDSYVLSESSFFVYPYKVIIKTCGTTKLLLSIPPLLKLAGELSLSVKSVKYTRGSFLCPGGQPFPHRSFSEEVSVLDGHFTQLGLNSVATLMGNDDETKKWHVYAASAQDSSNCNNNVYTLEMCMTGLDREKAAVFYKDEADKTGSMTDNSGIRKNLPKSEICDFEFEPCGYSMNSIEGDAISTNHVTPEDGFSYASFEAVGYDFNTLDLSQLVTRVLSCFEPKQFSVAVHSSVGANSYKPEITVDLEDYGCRERTFESLGEESGTVMYQTFEKLGKYCGSPRSTLKCEWSSNNSCSSEDEKDEGI

SEQ ID NO: 4412 - protein, 349 aa, Arabidopsis thaliana
MAVSATGFEGFEKRLEISFFETTDFLDPQGKSLRSLTKSQLDEILTPAECTIVSSLTNSFVDSYVLSESSLFVYPYKIIIKTCGTTKLLLSIPHILRLADSLCLTVKSVRYTRGSFIFPGAQSYPHRSFSEEVALLDDYFGKLNAGSKAFVMGGSDNNPQRWHVYSASSTEESAVCDKPVYTLEMCMTGLDNIKASVFFKTNSVSASEMTISSGIRNILPGSEICDFNFEPCGYSMNSIEGDAVSTIHVTPEDGFSYASFETVGYDLKALNFKELVDRVLVCFGPEEFSVAVHANLGTEVLASDCVADVNGYFSQERELEELGLGGSVLYQRFVKTVECCSPKSTLGFC

SEQ ID NO: 4413 - protein, 369 aa, Brassica juncea
MSVSAIGFEGYEKRLEVSFFEPSLFVDTHGKGLRALPKSQIDEILAPAECTIVSSLSNDELDSYVLSESSLFIFPYKIIIKTCGTTKLLPSIEPLLRLAGELSLEVKSVRYTRGSFLCPGGQPFPHRNFSEEVSVLDGHFAKMGLSSVAYLMGDDDETKKWHVYSASAPARNGNGNNNNNVYTLEMCMTGLDKEKASVFYKNESSSAGSMTDNSGIRKILPQSQICDFEFEPCGYSMNSVEGDAISTIHVTPEDGFSYASFEAVGYDFTTMDLSHLVSKVLTCFEPKQFSVAVHSSVAQKSYDSGLSVDLEDYGCRETTIELLGEERGTVMYQSFEKLGRYCGSPRSTLKCEWSSSSSCTSEDEKEEGI

SEQ ID NO: 4414 - protein, 367 aa, Brassica juncea
MALSAIGFEGYEKRLEVSFFEPSFFQDSKGLGLRALTRSQLDEILTPAACEIVSSLSNDHLDSYVLSESSFFVYPYKVIIKTCGTTKLLLSIPPLLKLAGELSLSVKSVKYTRGSFLCPGGQPFPHRSFSEEVSVLDGHFTKLGLNSVAYLMGNDDENKKWHVYAASAQTSSDCNNNVYTLEMCMTGLDKEKASVFYKNETGGENGSMTDNSGIRKILPKSQICDFEFEPCGYSMNSVEGDAISTIHVTPEDGFSYASFEAVGYDFNTLDLSQLVTRVLSCFEPKQFSVAVHSSVGSNAYKPEISVDLEDYGCRERTFESLGEESGTVMYQTFEKLGKYCGSPRSTLKCEWSSNNSCSSEDEKDEGI

SEQ ID NO: 4415 - protein, 368 aa, Brassica juncea
MSLSAIGFEGLRERLEVSFFEPSLFLDTHGKGLRALSKSQIDEILAPAECTIVSSLSNDELDSYVLSESSLFIFPYKIIIKTCGTTKLLLSIEPLLRLAGGVSLEVKSVRYTRGSFLCPGGQPFPQRNLSEEVSVLDGHFAKMGLSSVAYLMGDDDETKKWHVYSASAPAKNSNGDNNVYTLEMCMSGLDKDKASVFFKNESSSAGSMTDNSGIRKILPQSQICDFEFEPCGYSMNSVEGDASSTIHVTPEDGFSYASFEAVGYDFTTMDLSQLVSRVLTCFEPKQFSVAVHSSVAQKSYDHSGLSVDLEDYGCRETTVGVSRRRERNSDVSEVREAGNVLWFSEIDLKCEWSSNSSCTSEDEKEEGI

SEQ ID NO: 4416 - protein, 358 aa, Malus x domestica
MAMEGSAIGFEGYEKRLEIAFFEPSIFLDPEGRGLRSLSKAQIDEFLDQAECTIVSSLSNDDVDSYVLSESSLFIHPYKMIIKTCGTTKLLRVIPTVLQLAETISLAVRSVKYTRGSFIFPGAQTYPHRSFSEEVSVLDSYFGKLGSGSRAYVMGRSDGPQKWHVYSATAESASFVEPVYTLEMCMTGLDRGKASVFYKSESSSATTMTNESGIRKILPDSDICDFEFDPCGYSMNSIEGAAISTIHVTPEDGFSYASFETAGYDLKDVNLNQLVERVLVCFQPKEFSIAVHANVVSKSLQQHSLVDLKGYCREESSHEELGLGGAIVYQRFLKTERCGSPRSTLKGCWREEEEEEDY

SEQ ID NO: 4417 - protein, 374 aa, Malus x domestica
MAVPVSAIGFEGYEKRLEVSFFEPGLFADPKGMGLRSLSKAQIDEILTPAECTIVSSLSNDDLDSYVLSESSLFVYPYKVIIKTCGTTKLLRSIPAILKLADSLSLAVKSVRYSRGSFIFPGAHPSPHRSFSEEVAVLDGHFGKLGLASKAYVMGSPDKTQKWHIYSASAELASLLWGSRQSGPTYTLEMCMTGLDRKRASVFYKSDASSAAGMTVESGIRNILPQSDICDFEFEPCGYSMNSIEGNAVSTIHVTPEDGFSYASFETVGYDFKDVNLTQLLYRVLDCFKPAEFSIALHTTSTAGEDLDAKCPLDLKGYCCGGSSYEGLGLGGAVMYHSFVKDDSGSQSPRSILKCCWSEDEKDEEVEEIGMAKI

SEQ ID NO: 4418 - protein, 356 aa, Glycine max
  unsure (1)..(356): unsure at all Xaa locations
MAMAVSAIGFEGFEKRLEISFFQPGLFADPEGRGLRALTKSQLGEILTPAACTIVSSLKNDNVDSYVLSESSLFVYAYKIIIKTCGTTKLLLAIPPILKFAEMLSLNVKSVNYTRGSFIFPSAQPYPHRNFSEEVAILDGYFGKLGAGSNAYILGGQDKAQNWHVYSASADSVTQCDNVYTLEMCMTGLDREKAQVFYKEQSASAAMMTVNSGIRKILPDSEICDFDFEPCGYSMNSVEGXAAVSTIHVTPEDGFSYASFETVGYDFKAVNLNEMVQRVLACFLPTEFSVAVHVDGASKSFEQTCFLDVKGYCREERSHEGLGMGGSVVYQKFGKTSDCGSPRSTLKCWNEEDEEE

SEQ ID NO: 4419 - protein, 356 aa, Glycine max
  unsure (1)..(356): unsure at all Xaa locations
MAMAVSAIGFEGFEKRLEISFFQPGLFADPEGMGLRALAKSQLDEILTPAACTIVSSLRNDHVDSYVLSESSLFVYAYKIIIKTCGTTKLLLAIPPILKFAEMLSLNVRSVNYTRGSFIFPGAQPYPHRNFSEEVAILDGYFGKLSAXGSNAYILGGQDKSQNWHVYSASADSVTPCDNVYTLEMCMTGLDREKAQVFYKEQSASAAIMTVNSGIRKILPDSEICDFDFEPCGYSMNSVEGAAVSTIHVTPEDGFSYASFETVGYDFKVVNLNEMVKRVLACFLPTEFSVAVHVDGASKLFDQTCFLDVKGYCREERSHEGLGMGGSLVYQKFAKTCDCGSPRSTLKCWKEEDEEE

SEQ ID NO: 4420 - protein, 372 aa, Glycine max
  unsure (1)..(372): unsure at all Xaa locations
LCSVLLPTAIVSLLKHGPWAVSAIGFEGFEKRLEISFFQPGLFADPXEGMGLRALAKSQLDEILTPAACTIVSSLRNDHVDSYVLSESSLFVYAYKIIIKTCGTTKLLLAIPPILKFAEMLSLNVRSVNYTRGSFIFPGAQPYPHRNFSEEVAILDGYFGKLSAGSNAYILGGQDKSQNWHVYSASADSVTPCDNVYTLEMCMTGLDREKAQVFYKEQSASAAIMTVNSGIRKILPDSEICDFDFEPCGYSMNSVEGAAVSTIHVTPEDGFSYASFETVGYDFKVVNLNEMVKRVLACFLPTEFSVAVHVDGASKLFDQTCFLDVKGYCREERSHEGLGMGGSLVYQKFAKTCDCGSPRSTLKCWKEEDEEE

SEQ ID NO: 4421 - protein, 360 aa, Glycine max
VKMAGSAIGFEGYEKRLEISFFEHGVFADPEGIGLRALSKDQLDEILKPAECSIVASLSNDYVDSLALSESSLFIYPYKIIIKTCGTTKLLLSIPVILKLADALDIAVKSVRYTRGSFIFPGAQSFPHRSFSEEVSVLDSYFSNLGSGSKAYVMGDPSKSQIWHIYSASAQTKGSSEVVYGLEMCMTGLEKESASVFFKENTSSAALMTENSGIRKILPQSDISDFEFDPCGYSMNGIEGGAISTIHVTPEDGFSYASFEAVGYDFDEMALGELVERVLACFRPAEFSVALHIDMHGEKLNKFPLDIKGYYCGERSYEELGVGGAVVYQSFVRCDGSTSPRSILKCCWSEDENEDEVREI

SEQ ID NO: 4422 - protein, 355 aa, Glycine max
MAMAVSAIGFEGFEKRLEISFFQPGLFADPEGRGLRALTKSQLGEILTPAACTIVSSLKNDNVDSYVLSESSLFVYAYKIIIKTCGTTKLLLAIPPILKFAEMLSLNVKSVNYTRGSFIFPSAQPYPHRNFSEEVAILDGYFGKLGAGSNAYILGGQDKAQNWHVYSASADSVTQCDNVYTLEMCMTGLDREKAQVFYKEQSASAAMMTVNSGIRKILPDSEICDFDFEPCGYSMNSVEGAAVSTIHVTPEDGFSYASFETVGYDFKAVNLNEMVQRVLACFLPTEFSVAVHVDGASKSFEQTCFLDVKGYCREERSHEGLGMGGSVVYQKFGKTSDCGSPRSTLKCWNEEDEEE

SEQ ID NO: 4423 - protein, 360 aa, Glycine max
VKMAGSAIGFEGYEKRLEISFFENGVFADPGGLGLRALSKDQLDEILKPAECTIVASLSNDYVDSYVLSESSLFVYPYKIIIKTCGTTKLLLSIPVILKLADALDIAVKSVRYTRGSFIFPGAQSFPHRSFSEEVSVLDSYFSNLGSGSKAYVMGDPSKSQIWHIYSASAQTKGSSEAVYGLEMCMTGLDKESASVFFKENTSSAALMTENSGIRKILPQSDISDFEFDPCGYSMNGIEGGAISTIHVTPEDGFSYASFEAVGYDFDEMALGELVERVLACFRPAEFSVALHIDMHGEKLNKFPLDIKGYYCGERSYEELGVGGAVVYQSFVRCDGSTSPRSILKCCWSEDENEDEVREI

SEQ ID NO: 4424 - protein, 335 aa, Glycine max
  unsure (1)..(335): unsure at all Xaa locations
XSARAGGLGLRALSKDQLDEILKPAECTIVASLSNDYVDSYVLSESSLFVYPYKIIIKTCGTTKLLLSIPVILKLADALDIAVKSVRYTRGSFIFPGAQSFPHRSFSEEVSVLDSYFSNLGSGSKAYVMGDPSKSQIWHIYSASAQTKGSSEAVYGLEMCMTGLDKESASVFFKENTSSAASMTENSGIRKILPQSDISDFEFDPCGYSMNGIEGSAISTIHVTPEDGFSYASFEAVGYDFNDMALGELVERILACFCPAEFSVALHIDMHGEKLNKFPLDIKGYYCGERSTEELGVGGAVVYQTFVRCDGSASPRSILKCCWSEDENEDEVREI

SEQ ID NO: 4425 - protein, 137 aa, Glycine max
  unsure (1)..(137): unsure at all Xaa locations
AKMAGSGIVFEGYEKRPQISFFEHGVFADPEGIGLRALSKDQLDEILKPAECSIVASLSNDYVDSYVLSESSLFIYPYKIIIKTCGTTKLLLSIPVILKMADALDIAVKSVRYTRGSFIFPGAQSFSHRNFXEEVFX

SEQ ID NO: 4426 - protein, 163 aa, Glycine max
  unsure (1)..(163): unsure at all Xaa locations
XAVSGFEGFEKRLELHFFGDDPAXXFPLGIRKLEFESLEQVLEAVQCTVVSAVGNSYFDAYVLSESSLFVYPTKIIIKTCGTTQLLKSILPLIHYAHHLGLTLSSCRYTRGSFIFPKAQPFPHTSFKDEVTYLQDTIPSSLCFRKASIMPSKSSSHSWHVFTX

SEQ ID NO: 4427 - protein, 166 aa, Glycine max
  unsure (1)..(166): unsure at all Xaa locations
MESKVGKKKSSSSKSFLYEAPLDYIIEDVRPHGGIKKFRSAAYSNCIRKPSXDSLGRVRTXPPYSAIGFEGYEKRLEISFFENGVFADPEGLGLRALSKDQLDEILKPAECTIVASLSNDYVDSYVLSESSLFIYPYKIIIKTCGTTKLLLSIPVXLKXADALDIA

SEQ ID NO: 4428 - protein, 354 aa, Phaseolus lunatus
MAVSAIGFEGYEKRLEICFSQPGIFADPEGRGLRVLTKSQLDEILTPAACTIVSSLSNEDVDSYVLSESSLFVYAYKIIIKTCGTTKLLLSIPPILKFADMLSLTVRSVTYTRGSFIFPGAQPHPHCSFTEEVAILNDYFGKLGSGSMAYIMGSPDKKQKWHIYSASADPLISSDTNVCTLEMCMTGLDREKAQIFYKEQSASAAIMTVNSGIRKILPKSDICDFDFEPCGYSMNSVEGDAVSTIHITPEDGFSYASFETVGYDFKVLNLNAMVDRVLSCFLPNEFSVAVRVDGASKPSEHMCFVDVKGYCREEWCHEELGMGGFVVYQKFVKISDCVSPRSTLKCWKDEVEEE

SEQ ID NO: 4429 - protein, 353 aa, Pisum sativum
MAVSAIGFEGFEKRLEISFSDPGLFSDPQGRGLRSLTKSQLDEILAPAECTIVSSLANEDVDSYVLSESSLFVYAYKLIIKTCGTTKLLLSIPPILKLADSISLNVRSVRYTRGSFIFPGAQSFPHRHFSEEVAVLDGFFGKLGSGSMAYILGGSDEAQNWHIYCASSDSVSPEGSVYTLEMCMTGLDREKASVFFKEQTGSAAEMTVNSGIRKILRNSEICDFDFEPCGYSMNSVEGSAVSTIHITPEDGFSYASFETAGYDLKAINLNEMVMRVLACFQPTEFSVAVHVDNASKSFEQGCLLDVKGYCCEEKSHQGLGMSGSVVYQKFLKTSYCGSPRSTLKCWKDEDEEE

SEQ ID NO: 4430 - protein, 353 aa, Vicia faba
MAVSAIGFEGFEKRLEISFSDPGLFSDPQGRGLRSLTKSQLDEILAPAECTIVSSLANEDVDSYVLSESSLFVYAYKIIIKTCGTTKLLLAIPPILKLAESISLDVRAVRYTRGSFIFPGAQSFPHRHFSEEVAVLDGFFGKLGSGSKAYIMGGSDEAQNWHVYCASADSVSPADSVYTLEMCMTGLDREKASVFFKQQTGSAAEMTVNSGIRKILPNSEICDFDFEPCGYSMNSVEGPAVSTIHITPEDGFSYASFETAGYDLKAMNLNEMVMRVLACFQPTEFSVAVHVDNASKSFEQGCLLDVKGYCCDEKSHQGLGMSGSVVYQKFVKASDCGSPRSTLKCWKDEDEEE

SEQ ID NO: 4431 - protein, 370 aa, Narcissus pseudonarcissus
MTIMNTSPIGFEGFEKRLEITFSEASAFVDPHGRGLRALSRSQIDSILDLARCTIVDHLSNKDFDSYVLSESSLFIYPHRLILKTCGTTKLLLSIPKILDLASELSLPIQSVKYSRGSFIFPEAQPTPHRNFSEEVSALDHFFGNLASGGNAYVIGDPSSPNRNWHIYYATQKPELPTVTLEMCMTGLDSEKASIFFNSPGNANNAQSKKMTKLSGISNIIPEMEICDFEFEPCGYSMNAICGSAHSTIHVTPEDGSSYASYEAMGFNPAELDFGGLVERVLECFGPADFSVAVTIFGGRGQAGSWGREVDSYGFRCVDLVEQELAGGGLLMYQSFTAGVGRMGSPRSTLHCWDGEEIEEKKAEDKKRRF

SEQ ID NO: 4432 - protein, 319 aa, Oryza sativa (indica cultivar-group)
MYEAPLGYSIEDVRPAGGVKKFQSAAYSNCSDQPAPMGVLSAADPPPVSAIGFEGYEKRLEITFSEAPVFADPDGRGLRALSRAQIDSVLDLARCTIVSELSNKDFDSYVLSESSLFIYSDKIVIKTCGTTKLLLTIPRILELAEGLSMPLAAVKYSRGMFIFPSAQPAPHRSFSEEVAVLNRYFGHLKSGGNAYVIGDPAKPGQKWHIYYATQHPEQPMVTLEMCMTGLDKEKASVFFKTSADGHTSCAKEMTKLSGISDIIPEMEICDFDFEPCGYSMNAIHGLAFSTIHVTPEDGFSYASYEVVGFDALLLLMATW

SEQ ID NO: 4433 - protein, 169 aa, Oryza sativa (indica cultivar-group)
MGVLSAADPPPVSAIGFEGYEKRLEITFSEAPVFADPDGRGLRALSRAQIDSVLDLARCTIVSELSNKDFDSYVLSESSLFIYSDKIVIKTCGTTRLLLTIPRILELAEGLSMPLAAVKYSRGMFIFPSAQPAPHRSFSEEVAVLNRYFGHLKSGGNAYVIGDPAKPGQ

SEQ ID NO: 4434 - protein, 450 aa, Oryza sativa (japonica cultivar-group)
MESKGGKKKSSSSRSLMYEAPLGYSIEDVRPAGGVKKFQSAAYSNCSDQPAPMGVLSAADPPPVSAIGFEGYEKRLEITFSEAPVFADPDGRGLRALSRAQIDSVLDLARCTIVSELSNKDFDSYVLSESSLFIYSDKIVIKTCGTTKLLLTIPRILELAEGLSMPLAAVKYSRGMFIFPSAQPAPHRSFSEEVAVLNRYFGHLKSGGNAYVIGDPAKPGQKWHIYYATQHPEQPMVTLEMCMTGLDKEKASVFFKTSADGHTSCAKEMTKLSGISDIIPEMEICDFDFEPCGYSMNAIHGSAFSTIHVTPEDGFSYASYEVVGFDASTLAYGDLVKRVLRCFGPSEFSVAVTIFGGHGHAGTWAKELNADAYKCNNMVEQELPCGGLLIYQSFDATEDVPVAVGSPKSVLHCFEAENMVNPAPVKEGKLGNLLPWGEDALEENDGVFDE

SEQ ID NO: 4435 - protein, 395 aa, Oryza sativa (japonica cultivar-group)
MAVLSVADSPPVSAIGFEGYEKRLEITFSEAPVFADPNGRGLRALSRAQIDSVLDLARCTIVSELSNEVFDSYVLSESSLFVYPYKIVIKTCGTTKLLLAIPRILELAEELSLPLEAVKYSRGTFIFPEAQPSPHKNFSEEVAVLNRYFGGLKSGGNAYVIGDPAKPGQKWHVYYATQHPEQPVVTLEMCMTGLDKKKASVFFKTSADGHTTYAKEMTKLSGISDIIPEMEVCDFDFEPCGYSMNAIHGPAFSTIHVTPEDGFSYASYEVMGFNPASLAYGDLVKRVLRCFGPLEFSVAVTIFGGRNHAGTWAKGLDVGAYSCSNMVEQELPSGGLLIYQSFTATAEIATGSPRSVLHCFADENTEKAGKMEALYWEDDAVEEIDGTEGKKMRSC

SEQ ID NO: 4436 - protein, 361 aa, Daucus carota
MSSEVSAIGFEGFEKRLEISFFEPSFFADPEGKGLRVLSKNQLDEFLGPAECTIVASLSNEHVDSYVLSESSLFVYAYKIIIKTCGTTKLLKSIPPILKLADSLSLTVRSVRYTRGCFIFPGAQSYPHRSFSEEVSVLDNYFGKLGSGSKAYIMGGSDKQQKWHVYSACAASTRTLDPVYTMEMCMTSLNRDKASVFYKTNSSSATSVTDNSGLRDILPNSRICDFEFDPCGYSMNAVEGPAVSTIHITPEDGFSYSSFEAVGYDPKSVNLSDLVARVLNCFQPGEFSIALQADIASELLEKTSSVHVKGYRVEEKTCEELGMDGSIVYQKFVKTTERCESPRSVLKCCWKEEEKEEKEYQ

SEQ ID NO: 4437 - protein, 357 aa, Catharanthus roseus
MALPASAIGFEGYEKRLEISFFESSFFADPDGKGLRALNKSQIDEILEPAECTIVDSLSNQYLDSYVLSESSLFVYPYKIIIKTCGTTKLLLSIPAILKLAESLSLSVRNVKYTRGSFIFPGAQSFPHRSFSEEVELLDNYFGKLGLESNAFIMGNPDQPQKWHVYSASVGSEQSSDPTYTLEMCMTGLDREKASVFYKSESSSAALMTTRSGIRKILPDSEICDFEFDPCGYSMNSIEEAAISTIHVTPEDGFSYASFEAAGYDLKAQNLGMMIERVLACFQPSEFSVAVHCDVTCKSLEQICSLELKEYSLDEKINEELGLGGSIIYKKFLRIDACGSPRSILKCCWKEDESEEE

SEQ ID NO: 4438 - protein, 362 aa, Datura stramonium
MEMDLPVSAIGFEGFEKRLEISFVEPGLFSDPNGKGLRSLSKAQLDEILGPAECTIVDNLSNDYVDSYVLSESSLFVYSYKIIIKTCGTTKLLLAIPPILRLAETLSLKVQDVRYTRGSFIFPGAQSFPHRHFSEEVAVLDGYFGKLAAGSKAVIMGNPDKTQKWHVYSASAGPVQSNDPVYTLEMCMTGLDREKASVFYKTEGSSAAHMTVRSGIRKILPNSEICDFEFEPCGYSMNSIEGAAVSTIHITPEDGFSYASFESVGYDLKTMELGPLVERVLACFEPAEFSIALHADVATKLLERVCCVDVKGYSLAEWSPEEFGKGGSIVYQKFTKTPYCASPKSVLKGCWKEEEEEKEEKE

SEQ ID NO: 4439 - protein, 361 aa, Nicotiana sylvestris
MDMALPVSAIGFEGFEKRLEISFFEPGLFADPNGKGLRSLSKAQLDEILGPAECTIVDSLSNDDVDSYVLSESSLFVYSYKIIIKTCGTTKLLLAIPPILKLAETLSLKVQDVRYTRGSFIFPGAQSFPHRHFSEEVAVLDGYFGKLAAGSKAVIMGSPDKAQKWHVYSASAGPIQSNDPVYTLEMCMTGLDREKASVFYKTEGSSAAHMTVRSGIRKILPNSEICDFEFEPCGYSMNSIEGAALSTIHITPEDGFSYASFEAVGYDMKTMKLGPLVERVLACFEPDEFSIALHADVATKLLERVCSVDVKGYSLAEWSPEEFGKGGSIVYQKFTRTPFCGSPKSVLKGCWKEDEEKEEKE

SEQ ID NO: 4440 - protein, 361 aa, Nicotiana tabacum
MDSALPVSAIGFEGFEKRLEISFFEPGLFADPNGKGLRSLSKAQLDEILGPAECTIVDSLSNDDVDSYVLSESSLFVYSYKIIIKTCGTTKLLLAIPPILKLAETLSLKVQDVRYTRGSFIFPGAQSFPHRHFSEEVAVLDGYFGKLAAGSKAVIMGSPDKAQKWHVYSASAGPIQSNDPVYTLEMCMTGLDREKASVFYKTEGSSAAHMTVRSGIRKILPNSEICDFEFEPCGYSMNSIEGAALSTIHITPEDGFSYASFEAVGYDMKTMKLGPLVERVLACFQPDEFSIALHADVATKLLERVCSLDVKGYSLAEWSPEEFGKGGSIVYQKFTRTPFCGSPKSVLKGCWKEDEEKEEKE

SEQ ID NO: 4441 - protein, 361 aa, Nicotiana tabacum
MDSALPVSAIGFEGFEKRLEISFFEPGLFADPNGKGLRSLSKAQLDEILGPAECTIVDSLSNDDVDSYVLSESSLFVYSYKIIIKTCGTTKLLLAIPPILKLAETLSLKVQDVRYTRGSFIFPGAQSFPHRHFSEEVAVLDGYFGKLAAGSKAVIMGSPDKAQKWHVYSASAGPIQSNDPVYTLEMCMTGLDREKASVFYKTEGSSAAHMTVRSGIRKILPNSEICDFEFEPCGYSMNSIEGAALSTIHITPEDGFSYASFEAVGYDMKTMKLGPLVERVLACFEPDEFSIALHADVATKLLERVCSVDVKGYSLAEWSPEEFGKGGSIVYQKFTRTPFCGSPKSVLKGCWKEDEEKEEKE

SEQ ID NO: 4442 - protein, 360 aa, Solanum tuberosum
MEMDLPVSAIGFEGFEKRLEISFVEPGLFADPNGKGLRSLSKAQLDEILGPAECTIVDNLSNDYVDSYVLSESSLFVYSYKIIIKTCGTTKLLLAIPPILRLAETLSLKVQDVRYTRGSFIFPGAQSFPHRHFSEEVAVLDGYFGKLAAGSKAVIMGSPDKTQKWHVYSASAGPVQSNDPVYTLEMCMTGLDREKASVFYKTEESSAAHMTVRSGIRKILPKSEICDFEFEPCGYSMNSIEGAAVSTIHITPEDGFSYASFESVGYNPKTMELGPLVERVLACFEPAEFSIALHADVATKLLERTCSVDVKGYSLAEWSPEEFGEGGSIVYQKFTRTPYCESPKSVLKGCWKEEEKEGKE

SEQ ID NO: 4443 - protein, 360 aa, Solanum tuberosum
MEMDLPVSAIGFEGFEKRLEISFVEPGLFADPNGKGLRSLSKAQLDEILGPAECTIVDNLSNDYVDSYVLSESSLFVYSYKIIIKTCGTTKLLLAIPPILRLAETLSLKVQDVRYTRGSFIFPGAQSFPHRHFSEEVAVLDGYFGKLAAGSKAVIMGSPDKTQKWHVYSASAGSVQSNDPVYTLEMCMTGLDREKASVFYKTEESSAAHMTVRSGIRKILPKSEICDFEFEPCGYSMNSIEGAAVSTIHITPEDGFTYASFESVGYNPKTMELGPLVERVLACFEPAEFSVALHADVATKLLERICSVDVKGYSLAEWSPEEFGEGGSIVYQKFTRTPYCESPKSVLKGCWKEEEKEGKE

SEQ ID NO: 4444 - protein, 288 aa, Solanum tuberosum
  unsure (1)..(288): unsure at all Xaa locations
XSLFVYSYKIIIKTCGTTKLLLAIPPILRLAETLSLKVQDVRYTRGSFIFPGAQSFPHRHFSEEVAVLDGYFGKLAAGSKAVIMGSPDKTQKWHVYSASAGSVQSNDPVYTLEMCMTGLDREKASVFYKTEESSAAHMTVRSGIRKILPKSEICDFEFEPCGYSMNSIEGAAVSTIHITPEDGFTYASFESVGYNPKTMELGPLVERVLACFEPAEFSVALHADVATKLLERICSVDVKGYSLAEWSPEEFGEGGSIVYQKFTRTPYCESPKSVLKGCWKEEEKEGKE

SEQ ID NO: 4445 - protein, 362 aa, Ipomoea batatas
MALSTSAIGFEGYENRLEISFFEAGIFSDPEGRGLRALSKEQLDKVLKPAECTIVSSLSNNEVDSYVLSESSLFVYPYKIIIKTCGTTKLLLSIPPILELADGLSLKVKSVKYTRGSFNFPEVQPYPHRNFSEEVAILDSYFGKLSTGSKAYVMGGAGKQQQWHVYSASAESAENTFPIYTLEMCMTGLDKKSASVFFKTQSSSAAVMTDASGIRKILPGSEICDFDFEPCGYSMNAVEGGAISPIHVTPEDGFSYASFEAMGYDFKDVNLDALIQRVLSCFQPAEFSVALHCDSIGEKLDSVFKLDVKGYACGERSYEGLNKGGSIMYCGFTSTGSCGSPRSTLLCCWSENEDEEGEKKHF

SEQ ID NO: 4446 - protein, 361 aa, Helianthus annuus
MTSAIGFEGFEKRLEISFFNPGPSVDPVARGLRSLTKNQLDKFLAPAECTIVSSLSNDLLDSYVLSESSLFVYPYKIIIKTCGTTKLLLSIPHILELSGELSLTVQSVRYTRGSFIFPGAQTFPHRSFTEEVMVLDSHFGKLGMCSNAYVMGGAEKDQKWHVYSASAESANLVTQTAPVYTLEMSMTGLSKRNASVFFKSESSSAAVMTEDSGIRKILPESQICDFDFDPCGYSMNAIEGDAISTIHVTPEDGFSYASFEAVGYDFKSMGLTVLIERVLACFEPSEFSVALHGNENVVKDLNLENNDVNVKGYNVEETKFEVLGGEGGSMVYYGFARGGSSCGSPRSTLHRCWSETENEEE

SEQ ID NO: 4447 - protein, 385 aa, Dictyostelium discoideum
MENNNDYKNRSTEIFNEADAGFVYQSNSNDYSDGFEGPEKKLDIRFGPISKGSVKSIAGSPSKVGLRTIDKEKWQTVLDSARCTIISQTSNDHMDSYVLSESSLFVYPRRAMIKTCGTTTLLHLIAKMVQVGKECGLEVEMVVFSRKNLNQPSKQVFPHCSFSDEVNFLNKIFDGQAYVMGDVNKDHWNLYIADFRKNPTLQRTEQTFEVMMHDLDETVMKQFFKREGVSAWDTTVNSGIADLLPGSMIDDFQFDPCGYSMNGLLNEFYWTIHITPESHCSYVSFDTNVALADYNQLLAKVLNVFKPGRFTAALYAEDGAPCGDPYTAFDVNVPSYAIQNKTVHGFDGGYDVVVSNYQQLDKKVNFSNDDLIQSIESTNIDLIQV

SEQ ID NO: 4448 - protein, 453 aa, Oryza sativa
  unsure (1)..(453): unsure at all Xaa locations
MESKGGKKKSSSSRSLMYEAPLGYSIEDVRPAGGVKKFQSAAYSNCSDQPAPMGVLSAADPPPVSAIGFEGYEKRLEITFSEAPVFADPDGRGLRALSRAQIDSVLDLARCTIVSELSNKDFDSYVLSESSLFIYSDKIVIKTCGTTKLLLTIPRILELAEGLSMPLAAVKYSRGMFIFPSAQPAPHRSFSEEVAVLNRYFGHLKSGGNAYVIGDPAKPGQKWHIYYATQHPEQPMVTLEMCMTGLDKEKASVFFKTSADGHTSCAKEMTKLSGISDIIPEMEICDFDFEPCGYSMNAIHGSAFSTIHVTPEDGFSYASYEVVGFDASTLAYGDLVKRVLRCFGPSEFSVAVTIFGGHGHAGTWAKELNADAYKCNNMVEQELPCGGLLIYQSFDATEDVPVAVGSPKSVLHCFEAENMVNPAPVKEAWMRCLAAMXYAHMPRLEGDQEXDVA

SEQ ID NO: 4449 - protein, 398 aa, Oryza sativa
MGVLSAADPPPVSAIGFEGYEKRLEITFSEAPVFADPDGRGLRALSRAQIDSVLDLARCTIVSELSNKDFDSYVLSESSLFIYSDKIVIKTCGTTKLLLTIPRILELAEGLSMPLAAVKYSRGMFIFPSAQPAPHRSFSEEVAVLNRYFGHLKSGGNAYVIGDPAKPGQKWHIYYATQHPEQPMVTLEMCMTGLDKEKASVFFKTSADGHTSCAKEMTKLSGISDIIPEMEICDFDFEPCGYSMNAIHGSAFSTIHVTPEDGFSYASYEVVGFDASTLAYGDLVKRVLRCFGPSEFSVAVTIFGGHGHAGTWAKELNADAYKCNNMVEQELPCGGLLIYQSFDATEDVPVAVGSPKSVLHCFEAENMVNPAPVKEGKLGNLLPWGEDALEENDGVFDE

SEQ ID NO: 4450 - protein, 398 aa, Oryza sativa; identical to SEQ ID NO: 4449

SEQ ID NO: 4451 - protein, 398 aa, Oryza sativa
MGVLSAADPPPVSAIGFEGYEKRLEITFSEAPVFADPDGRGLRALSRAQIDSVLDLARCTIVSELSNKDFDSYVLSESSLFIYSDKIVIKTCGTTKLLLTIPRILELAEGLSMPLAAVKYSRGMFIFPSAQPAPHRSFSEEVAVLNRYFGHLKSGGNAYVIGDPAKPGQKWHIYYATQHPEQPMVTLEMCMTGLDKEKASVFFKTSADGHTSCAKEMTKLSGISDIIPEMEICDFDFEPCGYSMNAIHGLAFSTIHVTPEDGFSYASYEVVGFDASTLAYGDLVKRVLRCFGPSEFSVAVTIFGGHGHAGTWAKELNADAYKCNNMVEQELPCGGLLIYQSFDATEDVPVAVGSPKSVLHCFEAENMVNPAPVKEGKLGNLLPWGEDALEENDGVFDE

SEQ ID NO: 4452 - protein, 398 aa, Oryza sativa; identical to SEQ ID NO: 4451

SEQ ID NO: 4453 - protein, 549 aa, Oryza sativa
MKSSYFRYECQQIDALMESKGGKKKSSSSRSSLMYEAPLGYSIEDLRPAGGIKKFRSAAYSNLLPSDREGHQSCFLSSSSLASSFETMAVLSVADSPPVSAIGFEGYEKRLEITFSEAPVFADPNGRGLRALSRAQIDSVLDLARCTIVSELSNEVFDSYVLSESSLFVYPYKIVIKTCGTTKLLLAIPRILELAEELSLPLEAVKYSRGTFIFPEAQPSPHKNFSEEVAVLNRYFGGLKSGGNAYVIGDPAKPGQKWHVYYATQHPEQPVVTLEMCMTGLDKKKASVFFKTSADGHTTYAKEMTKLSGISDIIPEMEVCDFDFEPCGYSMNAIHGPAFSTIHVTPEDGFSYASYEVMGFNPASLAYGDLVKRVLRCFGPLEFSVAVTIFGGRNHAGTWAKGLDVGAYSCSNMVEQELPSGGLLIYQSFTATAEIATGSPRSVLHCFADENTEKAGKMEALYWEDDAVEEIDGTEGNELSTLYADLILCTNTTAIGKYDFCSAPITVLHLSVTQVVLQQGLRQMRSDFSYCHFMAKRAGMQQQQQQQLQ

SEQ ID NO: 4454 - protein, 395 aa, Oryza sativa; identical to SEQ ID NO: 4435

SEQ ID NO: 4455 - protein, 319 aa, Oryza sativa; identical to SEQ ID NO: 4432

SEQ ID NO: 4456 - protein, 502 aa, Oryza sativa
  unsure (1)..(502): unsure at all Xaa locations
EFPAIFPLFCCNKSPLAGCFLNLFPCLLRSLLSCLVHCSLQHLIKCRCPWLILGALPLPSPIGFEGYEKRLEITLSDAPVFVDPCGRGLRALSREQIDSFLDLAKCTIVSHLSNKHFDSYVLSESSLFVYPHKGVLKTCGTTKLLLSIPRILELAAELSLPVLSVKYSRGMFIFPGAQPSPHRSFLEEVSVLNSFFGGLKSGGNAYVIGDAFKPKKKWHVYYATEEPXEQPMVTLEMCMTGLDAKKAEVFFKDSTDGSCSSAKEMTMFSGISEIIPEMEICDFEFDPCGYSMNGIYGPAVSTIHVTPEEGFSYASYEAMNFNPSSLVYDDLIKKVLACFCPSDFSVAVTIFGGHGFAKSWAKGAEVDSYMCDDLVEQELPGGGVLMYQSFTAVTPGAVSPRSTLDGWNSDGAEMVGKEMSVCWEGEKAAKKKDADAXEIGSSSTSSCKFDSSEVSETPYLVLLLQFRLSSWLGYRQSICYLFIVLLYLSAQISALDGLLRLP

SEQ ID NO: 4457 - protein, 414 aa, Oryza sativa
MPPLNSTRSITTITTYISSSSSSSDRSIVINLPPLLGTSLICIVYKLNRVAPHALDRSRRRTIVINGFLRGFEKRLELVFELPASGGEVARHGLRLLPAEALREVLDAAQCAVVSAAGNAAADAYVLSESSMFVYPGRVVLKTCGTTPLLRAVPVLLRAAAALRLRLRSCRYSRGEYLFPEAQPFPHAHFADEVAYLDAALPRELLRFRRSAVMPSSSSSSPGASHRWHVYSASSSASSSDADVTAEVCMTELDRGMAARFYQRPGDGRTSHAIGDEMTAASGIGGVVARSLVCAYAFAPCGYSMNALDGARYATVHVTPEDGHCYASFECATDDAAAALAAIRRAVAAFRPATVSVSISHTSSAASSLCTPVAEALEPLGLACHCRAAEVFPGAGTVTYQTFTAPATKHEHDN

SEQ ID NO: 4458 - protein, 398 aa, Oryza sativa
MGDLSAADPPPVSAIGFEGYEKRLEITFSEAPVFADPDGRGLRALSRAQIDSVLDLARCTIVSELSNKDFDSYVLLSPACLSILIKIVIKTCGTTKLLLTIPRILELAEGLSMPLAAVKYSRGMFIFPSAQPAPLRSFSEEVAVLNRYFGHLKSGGNAYVIGDPAKPGQKWHIYYATQHPEQPMVTLEMCMTGLDKEKASVFFKTSADGHTSCAKEMTKLSGISDIIPEMEICDFDFEPCGYSMNAIHGSAFSTIHVTPEDGFSYASYEVVGFDASTLAYGDLVKRVLRCFGPSEFSVAVTIFGGHGHAGTWAKELNADAYKCNNMVEQELPCGGLLIYQSFDATEDVPVAVGSPKSVLHCFEAENMVNPAPVKEGKLGNLLPWGEDALEENDGVFDE

SEQ ID NO: 4459 - protein, 169 aa, Oryza sativa; identical to SEQ ID NO: 4433

SEQ ID NO: 4460 - protein, 391 aa, Triticum aestivum
MAAPTSAIGFEGYEKRLDITFSEASIFADPHGRGLRALSRAQIDSVLDLARCTIVSELSNKDFDSYVLSESSLFIYSQKIVIKTCGTTMLLLTIPRILELAEELCMSLAAVKYSRGMFIFPGAQPAPHRSFSEEVDVLNRYFGHLKSGGNAYVIGDPAKPGQKWHIYYATEQPEQPMVTLEMCMTGLDKKKASVFFKTSADGHVSCAKEMTKLSGISDIIPEMEVCDFDFEPCGYSMNAINGSAFSTIHVTPEDGFSYASYEVMGMDASALAYGDIVKRVLRCFGPSEFSVAVTIFGGRGHAATWGKKLDAEAYDCNNVVEQELPCGGVLIYQSFAANEEVAVSAGSPRSVFHCFEAETVESHPLVKEGKLANLLAWRAEDSLEEGVVLCE

SEQ ID NO: 4461 - protein, 392 aa, Triticum aestivum
MAAPTSAIGFEGYEKRLKITFSEASIFADPHGRGLRALSRAQIDSVLDLARCTIVSELSTKDFDSYVLSESSLFIYSQKIVIKTCGTTMLLLTIPRILELAEELCMPLAAVKYSRGMFIFPGAQPAPHRSFSEEVDVLNRYFGHLKSGGNAYVIGDPAKPGQKWHIYYATEQPEQPMVTLEMCMTGLDKKKASVFFKTQADSHVSCAKEMTKLSGISDIIPEMEVCDFDFEPCGYSMNAINGSAVSTIHVTPEDGFSYASYEVMGMDASALAYGDIVKRVLRCFGPSEFSAAVTIFGGRGHAATWGKKLDAEAYDCNNVVEQELPCGGVLIYQSFTVNEEVAVSAGSPRSVFHCFEAESVHSHPLVKEGKLANLLAWRAEEDSLEEGAVLCE

SEQ ID NO: 4462 - protein, 392 aa, Triticum aestivum
MAAPTSAIGFEGYEKRLEITFSEASIFADPHGRGLRALSRAQIDSVLDLARCTIVSELSNKDFDSYVLSESSLFIYSQKIVIKTCGTTMLLLTIPRILELAEELCMPLAAVKYSRGMFIFPGAQPAPHRSFSEEVDVLNRYFGHLKSGGNAYVIGDPAKPGQKWHIYYATEQPEQPMVTLEMCMTGLDKKKASVFFKTQADGHVSCAKEMTKLSGISDIIPEMEVCDFDFEPCGYSMNAINGSAVSTIHVTPEDGFSYASYEVMGMDASALAYGDIVKRVLRCFGPSEFSVAVTIFGGRGHAATWGKKLEAEAYDCNNVVEQELPCGGVLIYQSFAANEEVAVSAGSPRSVFHCFEAESVQSHPLVKEGKLANLLAWRAEEDSLEEGAVLCE

SEQ ID NO: 4463 - protein, 392 aa, Triticum aestivum
MAAPTSAIGFEGYEKRLEITFSEASIFADPHGRGLRALSRAQIDSVLDLARCTIVSELSNKDFDSYVLSESSLFIYSQKIVIKTCGTTMLLLTIPRILELAEELCMPLAAVKYSRGMFIFPGAQPAPHRSFSEEVDVLNRYFGHLKSGGNAYVIGDPAKPGQKWHIYYATEQPEQPMVTLEMCMTGLDKKKASVFFKTQADGHVSCAKEMTKLSGISDIIPEMEVCDFDFEPCGYSMNAINGSAVSTIHVTPEDGFSYASYEVMGMDASALAYGDIVKRVLRCFGPSEFSVAVTIFGGRGHAATWGKKLDAEAYDCNNVVEQELPCGGVLIYQSFAANEEVAVSAGSPRSVFHCFEAESVHSHPLVKEGKLANLLAWRAEEDSLEEGAVLCE

SEQ ID NO: 4464 - protein, 392 aa, Triticum aestivum
MAAPTSAIGFEGYEKRLEITFSEASIFADPHGRGLRALSRAQIDSVLDLARCTIVSELSNKDFDSYVLSESSLFIYSQKIVIKTCGTTMLLLTIPRILELAEELCMPLAAVKYSRGMFIFPGAQPAPHRSFSEEVDVLNRYFGHLKSGGNAYVIGDPAKPGQKWHIYYATEQPEQPMVTLEMCMTGLDKKKASVFFKTQADSHVSCAKEMTKLSGISDIIPEMEVCDFDFEPCGYSMNAINGSAVSTIHVTPEDGFSYASYEVMGMDASALAYGDIVKRVLRCFGPSEFSAAVTIFGGRGHAATWGKKLDAEAYDCNNVVEQELPCGGVLIYQSFTVNEEVAVSAGSPRSVFHCFEAESVHSHPLVKEGKLANLLAWRAEEDSLEEGAVLCE

SEQ ID NO: 4465 - protein, 399 aa, Triticum aestivum
  unsure (1)..(399): unsure at all Xaa locations
LLFSDQQSLFSLYQPSETMAGSAIGFEGYEKRLEITFSEAPVFTDPNGRGLRALSRAQIDSVLDLAKCTIVSELSNEKFDSYVLSESSLFVYPYKVVIKTCGSTKLLLAIPRVLELAEELSLPLAAVKYSRGTFIFPEAQPSPHKNFSDEVAFLNGYFGGLKSGGNAYVIGDPAKPGQKWHVYYATQQPEQPMVNLEMCMTGLDKKKASVFFKTSADGYTSCAKEMTKLSGISEIIPEMEICDFDFEPCGYSMNAIHGSAFSTIHVTPEDGFSYASYEVMGLDPASMAYGDLVKRVLRSFGPSEFSVAVTIFGGRNLAGTWGERLNVGVYDSTNMVVQELPDGGALIYQSFTAVGEDSTGSPRSVLNCNVHGNLESGSKMDAFLCWEDDAAQEKDERGX

SEQ ID NO: 4466 - protein, 458 aa, Triticum aestivum
  unsure (1)..(458): unsure at all Xaa locations
MESKGGKKSSSSRSSLMYEAPLGYSIEDVRPAGGIEKFRSAAYSNCSRKPSXXSLSCPLSLFSLYHPSEITVLWLAGYVRPVEITFSEAPVFTDRNGWGXLRALSRARIDSVLDLAKCSTVSELSNEKFDSYVLSESSLFVYPYKVVIKTCGTTKLLLAIPRVLELAEELSLPLAAVKYSRGTFIFPEAQPSPHKNFSAEVAFLNGFFGGLKSGGNAYVIGDPAKPGQKWHVYYATQQPEQPVVNLEMCMTGLDKKKASIFFKTSDDGHTSCAKEMTKLSGISEIIPEFQRWRSDFEPCGHVXYSMNAIHGPAFSTIHVTPEDGFSYASYEVMGFDPASLAYGDLVEKIXFGPSEFSVAVTIFGGHSLAGTWGERLNVGIYDSTNMVVQELPDGGALIYQSFTAVGEXXFTGSPRSVLNCNVDGNLVTGCKMDAFLCWEDDAAQEKDERGAGKKMKSS

SEQ ID NO: 4467 - protein, 217 aa, Triticum aestivum
  unsure (1)..(217): unsure at all Xaa locations
MESKGGKKSSSSSSLMYEAPLGYSIEDVRPAGGAKKFSAAYSNCAKKPSXXIVXGIPFPXFKIFMQFYSXLFSPTNLSGLLHDNPSSLVLLPLFLSALLSDSVLDLARCTIVSELSNKDFDSYVLSESSLFIYSQKIVIKTCGTTMLLLTIPRILELAEELCMPLAAVKYSRGMFIFPGAQPAPHRSFSEEVDVLNRYFGHLKSGGNAYVIGDPAKX

SEQ ID NO: 4468 - protein, 120 aa, Triticum aestivum
  unsure (1)..(120): unsure at all Xaa locations
GPIPSFPPSSSCTRIPPTPTKTFDSYVLSESSLFIYSQKIVIKTCGTTMLLLTIPRILELAEELCMPLAAVKYSRGMFIFPGAQPAPHRSFSEEVDVLNRYFGHLKSGGNAYVIGDPAKX

SEQ ID NO: 4469 - protein, 139 aa, Triticum aestivum
  unsure (1)..(139): unsure at all Xaa locations
MAVLQVAAAAPPPVSAIGFEGYEKRLEISFSEAPVFADPNGRGLRALSRDQIDSVLDLARCTIVSELSNEDFDSYVLSESSLFVYPYKMVIKTCGTTKLLLAIPRILELAKELSLPLSAVKYSRGTFIFPDAQPSPHKX

SEQ ID NO: 4470 - protein, 128 aa, Triticum aestivum
  unsure (1)..(128): unsure at all Xaa locations
MAAPTSAIGFEGYEKRLEITFSEASIFADPHGRGLRALSRAQIDSVLDLARCTIVSELSNKDFDSYVLSESSLFIYSQKIVIKTCGTTMLLLTIPRILELAEELCMPLAAVKYSRGMFIFPGAQPAPX

SEQ ID NO: 4471 - protein, 182 aa, Triticum aestivum
  unsure (1)..(182): unsure at all Xaa locations
MAAPTSAIGFEGYEKRLEITFSEASIFADPHGRGLRALSRAQIDSVLDLARXTIVSELSNKDFDSYVLSESSLFIYSQKNGIKTCGTTMXLLTIPKILELAEXLCMPLLXXKYSRGMXXXPGAQAAPXKSFSEEXDVLXXFFXHLXAGXNAYVIGDQRXWQKWHXYXATXQPDKXMXTWKMW

SEQ ID NO: 4472 - protein, 404 aa, Zea mays
  unsure (1)..(404): unsure at all Xaa locations
MAVLQVAAAAPPPVSVIGFEGFEKRLEISFSEAPVLADPSGRGLRALSRAQIDSVLDLARCTIVSELSNEDFDSYVLSESSLFVYPYKIVIKTCGTTKLLLAIPRILELAEELLLPLAAVKYSRGTFIFPEAQPSPHKNFADEVAFLNXRFFGGLKSGGNAYVIGDSAKPGQKWHVYYAAEHPEEPVVTLEMCMTGLDKKKASVFFKTTADGYSLCAXKEMTKLSGISDIIPEMXEICDFDFEPCGYSMNAVHGPALSTIHVTPEDGFSYASYEVMGFNPGSFSYGDLVKRVLRCFGPTEFSVAVTIFGDRDNAKTWGTKLDAEAYACSNMVEQVLPFGGLLIYQSFTVTAETTHGSPRSVLHDFAGDIVKNRSESDAXXWEADAVDESEERDVKKMKCXCGRR

SEQ ID NO: 4473 - protein, 446 aa, Zea mays
  unsure (1)..(446): unsure at all Xaa locations
MAVLSAAGAPPASAIGFEGYEKRLEITFSEAPVFVDPHGSGLRALSRSQIDSVLDLARCTIVSELSNKDFDSYVLSESSLFIYPLKIVIKTCGTTKLLLTIPRILELAEELSMPLAAVKYSRGTFIFPGAQPAPHRSFSEEVAVLNRYFGGLKSGGNAYVIGDAARPGQKWHIYYATEYPEQPMVNLEMCMTGLDTKKASVFFKTNADGNTTCAKEMTKLSGISEIIPEMEICDFDFEPCGYSMNAIHGSAFSTIHVTPEDGFSYASYEVMGLDATALSYGDLVKRVLGCFGPSEFSVAVTIFGGRGQAATWGKELGAEAYDCNNMVEQELPGGGLIIYQSFCAAEDAVASSPKSVLRCFDGENASPFVKDCKLANLVCLEEXLDAIEEKDGVLDMSKTGFWCRFASEFFLFISLRSRGCRLVSSQARLLVRRMSSINMCSYVATC

SEQ ID NO: 4474 - protein, 430 aa, Zea mays
  unsure (1)..(430): unsure at all Xaa locations
LLSSDQKISKTTSRLPPVAVCHLALKRWQSLQVAAAAPPPVSVIGFEGFEKRLEISFSEAPVLADPSGRGLRALSRAQIDSVLDLARCTIVSELSNEDFDSYVLSESSLFVYPYKIVIKTCGTTKLLLAIPRILELAEELLLPLAAVKYSRGXTFIFPEAQPSPHKNFADEVAFLNRFFGGLKSGGNAYVIGDSAKPXGQKWHVYYAAEHPEEPVVTLEMCMTGLDKKKASVFFKTTADGYSLCAKEMTKLSGISDIIPEMEICDFDFEPCGYSMNAVHGPALSTIHVTPEDGFSYASYEVMGFNPGSFSYGDLVKRVLRCFGPTEFSVAVTIFGDRDNAKTWGTKLDAEAYACSNMVEQVLPFGGLLIYQSFTVTAETTHGSPRSVLHDFAGDIVKNRSESDAXXWEADAVDESEERDVKKMKCXCGRR

SEQ ID NO: 4475 - protein, 318 aa, Zea mays
  unsure (1)..(318): unsure at all Xaa locations
MAAPTSAIGFEGYEKRLEITFSEASIFADPHGRGLRALSRAQIDSVLDLARCTIVSELSNKDFDSYVLSESSLFIYSQKIVIKTCGTTMLLLTIPRILELAEELCMPLAAVKYSRGMFIFPGAQPAPHRSFSEEVDVLNRYFGHLKSGGNAYVIGDPAKPGQKWHIYYATEQPEQPMVTLEMCMTGLDKKKASVFFKTSADGHVSCAKEMTKLSGISDIIPEMEVCDFDFEPCGYSMXNAINGSAFSTIHVTPEDGFSYASYEVMGMDASALAYGDIVKRVLRCFGPSEFSVAVTIFGGRGHAATWGKKLEAEAYDCN

SEQ ID NO: 4476 - protein, 404 aa, Zea mays
  unsure (1)..(404): unsure at all Xaa locations
MAVLQVAAAAPPPVSVIGFEGFEKRLEISFSEAPVLADPSGRGLRALSRAQIDSVLDLARCTIVSELSNEDFDSYVLSESSLFVYPYKIVIKTCGTTKLLLAIPRILELAEELLLPLAAVKYSRGTFIFPEAQPSPHKNFADEVAFLNRFFGGLKSGGNAYVIGDSAKPGQKWHVYYAAEHPEEPVVTLEXMTGLDKKKASVFFKTTADGYSLCAKEMTKLSGISDIIPEMEICDFDFEPCGYSMNAVHGPALSTIHVTPEDGFSYASYEVMGFNPGSFSYGDLVKRVLRCFGPTEFSVAVTIFGDRDNAKTWGTKLDAEAYACSNMVEQVLPSGGLLIYQSFTATGAATPGSPRSVLHDFAGDIVKPGDSGEADGPCWEADAVDESEEREVKKMKCXCCDELC

SEQ ID NO: 4477 - protein, 400 aa, Zea mays
  unsure (1)..(400): unsure at all Xaa locations
MAVLSAAGAPPASAIGFEGYEKRLEITFSEAPVFVDPHGSGLRALXSRSQIDSVLDLARCTIVSELSNKDFDSYVLSESSLFIYPLKIVIKTCGTTKLLLTIPRILELAEELSMPLAAVKYSRGTFIFPGAQPAPHRSFSEEVAVLNRYFGGLKSGGNAYVIGDAARPGQKWHIYYATEYPEQPMVNLEMCMTGLDTKKASVFFKTNADGNTTCAKEMTKLSGISEIIPEMEICDFDFEPCGYSMNAIHGSAFSTIHVTPEDGFSYASYEVMGLDATALSYGDLVKRVLRCFGPSEFSVAVTIFGGRGHAGTWGKALGAKVYDCNNMVEQELPGGGLLVYQSFCAAEDAVATSPKSVFHCFDGENVESAPPPMKDYKLANLLCWEEEADAMEEKAGVLDE

SEQ ID NO: 4478 - protein, 399 aa, Zea mays
MAVLSDADASPVSAIGFEGYEKRLEITFSEAPVFVDPHGRGLRALSRAQIDSVLDLARCTIVSELSNKDFDSYVLSESSLFIYPLKIVIKTCGTTKLLLTIPRILELAEELSMPLAAVKYSRGTFIFPGAQPAPHRSFSEEVAALNRYFGGLKSGGNAYVIGDPARPGQKWHVFYATEYPEQPMVNLEMCMTGLDKKKASVFFKTNADGNTTCAKEMTKLSGISEIIPEMEICDFDFEPCGYSMNAIHGSAFSTIHVTPEDGFSYASYEVMGLDATALSYGDLVKRVLRCFGPSEFSVAVTIFGGRGHAGTWGKALGAEVYDCNNMVEQELPGGGLLVYQSFCAAEDAVATSPKSVFHCFDGENVESAPPPMKKDYKLANLLCWEEEADAMEKAGVLDE

SEQ ID NO: 4479 - protein, 400 aa, Zea mays
MAVLSAADASPVSAIGFEGYEKRLEITFSEAPVFVDPHGRGLRALSRAQIDSVLDLARCTIVSELSNKDFDSYVLSESSLFIYPLKIVIKTCGTTKLLLTIPRILELAEELSMPLAAVKYSRGTFIFPGAQPAPHRSFSEEVAALNRYFGGLKSGGNAYVIGDPARPGQKWHVFYATEYPEQPMVNLEMCMTGLDKKKASVFFKTNADGNTACAKEMTKLSGISEIIPEMEICDFDFEPCGYSMNAIHGSAFSTIHVTPEDGFSYASYEVMGLDATALSYGDLVKRVLRCFGPSEFSVAVTIFGGRGHAGTWGKALGAEVYDCNNMVEQELPGGGLLVYQSFCAAEDAVATSPKSVFHCFDGENVESAPPPMKKDYKLANLLCWEEEADAMEEKAGVLDE

SEQ ID NO: 4480 - protein, 402 aa, Zea mays
  unsure (1)..(402): unsure at all Xaa locations
MAVLQAAAPPPVSVIGFEGFEKRLEISFSEAPVLADPSGRGLRALSRAQIDSVLDLARCTIVSELSNDDFDSYVLSESSLFVYPYKIVIKTCGTTKLLLAIPRILELAEELLLPLAAVKYSRGTFIFPXEAQPSPHKNFADEVAFLNRFFGGLKSGGNAYVIGDSAKPGQKWHVYYAAEHPEEPVVTLEMCMTGLDKKKASVFFKTTADGYSLCAKEMTKLSGISDIIPEMEICDFDFEXPCGYSMNAVHGPALSTIHVTPEXDGFSYASYEVMGFNPGSFSYGDLVKRVLRCFGPTEFSVTVTIFGDRDNAKTWGTKLDAEAYACSNMVEQVLPFGGLLIYQSFTVTAETTHGSPRSVLHDFAGDIVKNRSESDAXXWEADAVDESEERDVKKMKCXCGRR

SEQ ID NO: 4481 - protein, 400 aa, Zea mays; identical to SEQ ID NO: 408

SEQ ID NO: 4482 - protein, 400 aa, Zea mays; identical to SEQ ID NO: 408

SEQ ID NO: 4483 - protein, 525 aa, Zea mays
  unsure (1)..(525): unsure at all Xaa locations
MGPGAGTSRPAGRDPKKSRPTYSFSPPSSCPTQSTSSPHLLPLGRSFQRARWSWSRRRSRSGRTFKEIAFVDALMESKGGKKSSSSSSNFMYEAPLGYKIEDVRPAGGIKKFQTAAYSNCVRQPLAMSSADSCVSSPASPIGFEGYEKRLEITFSDAPVFEDPCGRGLRALSREQIDSFLDLARCTIVSQLSNESFDSYVLSESSLFVYPHKVVLKTXCGTTKLLLAIPRILELAAGLSLPLLSAKYSRGTFIFPGAQPAPHRSFSEEVSVLNAFFGNLKSGGNAYLIGEPFKPNKKWHVYYATEEPERPMVTLEMCMTELDVKKAAVFFKNSTGGSCTSAKEMTKLSGIHEIIPEMEICDFEFDPCGYSMNGVFGPAASTIHVTPEEGFSYASYEAMNFDPSSLVYSDVIRRVLAGFSPSDFSVAVTIFGGRGFAKSWATGADIDSYMCGDPVEQELPGGGLLMYQSFTAVPSGSVSPRSTLQTDXLEQRWNGDGLKXRDVYWLLECGEEGGEERFGCLKIWIT

SEQ ID NO: 4484 - protein, 400 aa, Zea mays
  unsure (1)..(400): unsure at all Xaa locations
MAVLSAADAPPASAIGFEGYEKRLEITFSEAPVFVXDPHGRGLRALSRSQIDSVLDLARCTIVSELSQXRDFDSYVLSESSLFIYPLKIVIKTCGTTKLLLTIPRILELAEELSMPLAAVKYSRGTFIFPGAQPAPHRSFSEEVAVLNRYFGGLKSGGNAYVIGDAARPGQKWHIYYATEYPEQPMVNLEMCMTGLDTKKASVFFKTNADGNTTCAKEMTKLSGISEIIPEMEICDFDFEPCGYSMNAIHGSAFSTIHVTPEDGFSYASYEVMGLDATALSYGDLVKRVLGCFGPSEXISVAVTIFGGRGQAGTWGKELGAEAYDCNNMVEQELPGGGILIYQSFCAAEDAVASSPKSVLRCFDGENAXXPFAKDCKLANLVCLEEXLDAIEEKDGVLDE

SEQ ID NO: 4485 - protein, 404 aa, Zea mays
  unsure (1)..(404): unsure at all Xaa locations
MAVLSAAGAPPASAIGFEGYEKRLEITFSEAPXVFVDPHGSGLRALSRSQIDSVLDLARCTIVSELSNKDFDSYVLSESSLFIYPLKIVIKTCGTTKLLLTIPRILELAEELSMPLAAVKYSRGTFIFPGAQPAPHRSFSEEVAVLNRYFGGLKSGGNAYVIGDAARPGQKWHIYYATEYPEQPMVNLEMCMTGXLDTKKASVFFKTNADGNTTCAKEMTKLSGISEIIPEMEICDFDFEPXCGYSMNAIHGSAFSTIHVTPEDGFSYASYEVMGLXDATALSYGDLVKRVLGCFGPXSEFSVAVTIFGGRGQAGTWGKELGAEAYDCNNMVEQELPGGGILXIYQSFCAAEDAVASSXPKSVLRCFDGENAXXPFAKDCKLANLVCLEEXLDAIEEKDGVLDE

SEQ ID NO: 4486 - protein, 412 aa, Zea mays
  unsure (1)..(412): unsure at all Xaa locations
MAVLSAADASPVSAIGFEGYEKXRLEITFSEAPXVFVDPHGXRGFACPSSAQIDSXVLDLARCTIVSELXSNKDFDSYVLSESSLXFIYPLKIVIKTCGTTKLLLTIPRILELAEELSMPLAAVKYSPXGTFIFPGAQPAPHRSFSEEVAALNRYFGGLKSGGNAYVIGDPARPGQKWHVFYATEYPEQPMVNLEMCMTGLDKKKASVFFKTNADGNTACAKEMTKLSGISEIIPEMEICDFDFEPCGYSMNAIHGXSAFSTIHVTPEXDGFSYASYEVMGLDATALSYGDLVKRVLRCFGPSEFSVAVTIFGGRGXHAGTWGKALGAEVYDCNNMVEQELPGGGLLVYQSFCAAEDAXVATSPKSVFHCFDGENRXESAPPPMKKDYKLANLLCWEEEADAMEEKAGVLDE

SEQ ID NO: 4487 - protein, 254 aa, Zea mays
  unsure (1)..(254): unsure at all Xaa locations
MAMSSADSCVSSPASPIGFEGYEKRLEITFSDAPVFEDPCGXRGLRALSREQIDSFLDLARCTIVSQLSNESFDSYVLSESSLFVYAHKVVLKTCGTTKLLLAIPRILELAAGLSLPLLSAKYSRGTFIFPGAQPAPHRSFSEEVSVLNAFFGNLKSGGNAYLIGEPFKPNKKWHVYYATEEPERPMVTLEMCMTELDVKKAAVFFKNSTGGSCTSAKEMTKLSGIHEIIPEMEICDFEFDPCGYSMNGVFGPA

SEQ ID NO: 4488 - protein, 371 aa, Zea mays
  unsure (1)..(371): unsure at all Xaa locations
MAVLSAAGAPPASAIGFEGYEKRLEITFSEAPVFVDPHGSGLRALSRSQIDSVLDLARKIVIKTCGTTKLLLTIPRXILELAEELSMPLAAVKYSRGTFIFPGAQPAPHRSFSEEVAVLNRYFGGLKSGGNAYVIGDAARPGQKWHIYYATEYPEQPMVNLEMCMTGLDTKKASVFFKTNADGNTTCAKEMTKLSGISEIIPEMEICDFDFEPCGYSMNAIHGSAFSTIHVTPEDGFSYASYEVMGLDATALSYGDLVKRVLGCFGPSEFSVAVTIFGGRGQAGTWGKELGAEAYDCNNMVEQELPGGGILIYQSFCAAEDAVASSPKSVLRCFDGENAXXPFAKDCKLANLVCLEEXLDAIEEKDGVLDE

SEQ ID NO: 4489 - protein, 304 aa, Zea mays
  unsure (1)..(304): unsure at all Xaa locations
CKLPVTKTIPRNHFLSSSTGCLSSCSKTIAVLQVVAAAPTPASAIGFEGYEKRLEISFYEAPVFADPNGRGLCALLRPXIYSISDHARCTVVSELSNEDFDSYVLSESSLFVYPYKILIKTCGTTKLLLGIPRILELAKELSLPLVATKYSRGTFIFPDAQPSPHKNFVDEVTFLNHFFDGLRFGGNAYVIGDSAKHKQKWHVYYATTEHXPEELVVTLEMCMTRLDKKRAYVFFKTSIDGYTSCAKDMTKPSVISDLLXVIAFYLLFLLNSSFKTKNIFKNLTRSQASTMSRLACMIWLVLVC

SEQ ID NO: 4490 - protein, 188 aa, Zea mays
  unsure (1)..(188): unsure at all Xaa locations
MAVLQVAAAAPPPVSVIGFEGFEKRLEISFSEAPVLADPSGRGLRALSRAQIDSVLDLARCTIVSELSNDDFDSYVLSESSLFVYPYKIVIKTCGTTKLLLAIPRILELAEELLLPLAAVKYSRGTFIFPEAQPSPHKNFAEEVAFLNRFFGGLKSGGNAYVIGDSAKPGQKWHVYYAAEHPEEPLIX

SEQ ID NO: 4491 - protein, 310 aa, Zea mays
  unsure (1)..(310): unsure at all Xaa locations
MMQATCDKNDSKKPLLVFLHWLSVTCSKTIAVLQVVAAAPTPASAIGFEGYEKRLEISFYEAPVFADPNGRGLCALLRPXIYSISDHARCTVVSELSNEDFDSYVLSESSLVGYPYKILIKTCGTTKLLLGIPRILELAKELSLPLVATKYSRGTFIFPDAQPSPHKNFVDEVTFLNHFFDGLRFGGNAYVIGDSAKHKQKWHVYYATTEHXPKELVVTLEMCMTRLDKKRAYVFFKTSIDGYTSCAKDMTKLSGISDLLXVKECVVTSGASSKAMALRVHGSWVWLVQRLLFAGVGEVPAELGGSGVQL

SEQ ID NO: 4492 - protein, 195 aa, Zea mays
  unsure (1)..(195): unsure at all Xaa locations
SCCQIFPPLAAAAARLPESAGTEELAEFXVENRFCLSHGRGLRALSRXQIDSVLDLARCTIVSELSNKDFDSYVLSESSLFIYPLKIVIKTCGTTKLLLTIPRILELAEELSMPLAAVKYSRGTFIFPGAQPAPHRSFSEEVAALNRYFGGLKSGGNAYVIGDPARPGQKWHVFYATEYPEQPMVNLEMCMTGLD

SEQ ID NO: 4493 - protein, 245 aa, Zea mays
  unsure (1)..(245): unsure at all Xaa locations
SLRLACFPVTKRYQRPLPVFLPWPVCHLALKRWAVLQVAAAAPPPVSVIGFEGFEKRLEISFSEAPVLADPSGRGLRALSRAQIDSVLDLARCTIVSELSNEDFDSYVLSEXSSLVVYPXYRFVIKTCGXTTKLLLAIPRILELAEELLLPLAAVKYSXRGTFIFPEAQPSPHKNFAEEVAFLNRFFGGLKSGGNAHVIGDSAKPGQKWHVYYAAEHPEEPLITLEMCMTGLDKKKASVFFKTLL

SEQ ID NO: 4494 - protein, 178 aa, Zea mays
  unsure (1)..(178): unsure at all Xaa locations
STGSPVLLLALLPPSPALGSDSPAPRAVLFVAEASPAXVIGFEGYEKRLEITFFEAPVFGDPHGRGLRALSRAQMDFVLDLARGTIVSELSNRDFDXYVLSEPSLFIYPLKIAIKTWGTTKFLFTIPRILELAEKLPMPLAAVKYSRGTLIFPGAQPAPHRSFFEEVVALNRYFGXXG

SEQ ID NO: 4495 - protein, 378 aa, Schizosaccharomyces pombe
MSPTLVVDQENSEEFNTSSFEGPEKLLELWFSAPIKTNLSAGEKANLGLKAVSRNDWDDMLAQAQCKVLSVVNSEEIDAYLLSESSMFVFAHKIILKTCGTTTLLASLPRLLEIASSVGFDRPLRIFYSRKNFLYPERQLAPHTSWEEEVRYLQLFFPSGCSYVVGPTNKNHWHLFSDLADDYSLLEDSLDPEDETLEVLMTDMSPERSLQFYAPSLDVVRSARGDDYVREKNNLSGGHILGSYVADESGVRDLCSTSDKKAVLDAFQFEPIGFSSNMIYKDRYATIHVTPQEHCSYASFETNVSQFQFGRSISETIEKTVKTFGANKFCLTLFQAKGASQEKHFSAKLKSFSSYKREEFIVYDFPGYDLIFASFTAV

SEQ ID NO: 4496 - protein, 369 aa, Dendrobium crumenatum
MACSPIGFEGYEKRLEITFSEAPLFVDPHGHGLRALTRPQIDSILEPAKCTIVSQLSNKHFDSYVLSESSLFVYPCKMILKTCGTTRLLLSIPVILDLAAELSLSVTAVKYSRGSFIFPGAQPAPHRSFSEEVAVLNQFFGGLGSGGNAYVIGNPAHPNLNWHVYYASEKPEQPMVTIEMCMTGLNTEKASIFFKNSVPRHESSAKEMTKRSGICDIIPEMKICDFEFDPCGYSMNGINKQALSTIHVTPEDGFSYASYEAMGFKPSAISYRNLIERVLRCFEPANFSVAVTIFGGRPFACSYGQKVSVNGYNCKNLVQQDLSGGGLLLYQSFKASSDGSASPRSILYCWEAEAEDEEENGVKCKKKLF

SEQ ID NO: 4497 - protein, 503 aa, Neurospora crassa
MSGLGVPAIPANYTFSPSEGTPYLTINHDVAADLDSTNAFEGPEKLLEVWFAPSAKALPAGVKEGGLKAVNPDSWTPMLDLVHCKVLSIINSENVDSYLLSESSMFVFPHKIILKTCGTTTLLLGLDLMLRIAAVEAGFPFHNVASLEDPKVAATPLRVFYSRKNFLFPQKQRGPHKSWRDEVTFLDNMFENGSAYMVGKMNGDHWYLYITSPTSSLTPPRTPTSSRGVSPSRRSKIPTGIVAPFGGVIENNADETLEILMTDLDPENAKKFYLEEATAIAKEKLFSKSEANGDASFDVFSSSGDCDADGQAILPEALTTEGHALGTVVSEACGLSAVYPTSTYPDARIDAYQFSPCGFSANGVVPPVAGADGTIPKSGHYFTVHVTPEPQCSFASFETNVPGGQNGRQTAEVIEQVVNIFRPGRFSVTLFEAKGALATTPGEDADDSRRSWGAAAKQRMERINGYRRVDRIVHDFEDYDLVFRYYEREDWVGGGGARMGEEF

SEQ ID NO: 4498 - protein, 382 aa, Leishmania donovani
MNVCSNTTKDPLTLMAMWGSMKGYNPEQGFSFEGPEKRLEVILRCTLETHVDGLRSLDDSVWSGVVGSLNAQIVSRESNEYINSYVLTESSLFVMKNRIILITCGTTTLLNSIPNILEAISAVRGELEWVSFMHKNYSFPWMQKGPHTSLADEFATLKQHFPTGKPYIFGPVDSDHYFLFCYDDIIRPCSSEDDTQLSMTMYGLDKEQTKHWFSDRFISTSAETAAIRAATHLDRVVDGTWTLHDLQFEPCGYSINAIRDEEYQTMHITPEDHCSFASYETNSRAANYSDRMKKVLGVFRPQRFTVIVFLDPESPVGKAYNEGKGIGVEPEYYPEYNLLHRTTNEFAPGYVAMKINYVRTAAVEETDTAVGGAEPGAEGGPD

SEQ ID NO: 4499 - protein, 392 aa, Leishmania infantum
MKHGNYSLATMNVCSNTTKDPLTLMAMWGSMKGYNPEQGFSFEGPEKRLEVILRCTLETHVDGLRSLDDSVWSGVVGSLNAQIVSRESNEYINSYVLTESSLFVMKNRIILITCGTTTLLNSIPNILEAISAVRGELEWVSFMHKNYSFPWMQKGPHTSLADEFATLKQHFPTGKPYIFGPVDSDHYFLFCYDDIIRPCSSEDDTQLSMTMYGLDKEQTKHWFSDRFISTSAETAAIRAATHLDRVVDGTWTLHDLQFEPCGYSINAIRDEEYQTMHITPEDHCSFASYETNSRAANYSDRMKKVLGVFRPQRFTVIVFLDPESPVGKAYNEGKGIGVEPEYYPEYNLLHRTTNEFAPGYVAMKINYVRTAAVEETVTAVGGAEAGAEGGPD

SEQ ID NO: 4500 - protein, 370 aa, Trypanosoma cruzi
MLSNKDPLSLMAMWGSVKGYDPNQGASFEGPEKRLEVIMRIIDETHSEGLHALGDEVWKGVVGSLNAQIVSKESNEYIRSYVLTESSLFVMRDRIILITCGTTTLLNAVPFVLDAVSDVRGEVEWVSFMHKNYSFPWEQKGPHLSMAEEFNTLRTYFPSGKPFIFGPVDSDHYFLFVYDDVIRPCETENDTQLSMTMYGLDRTQTKHWFSDRFISTGTETAAIRKATKLDKVADDSWKLHDLQFEPCGYSINTIRGAEYQTIHITPEDHCSFASYETNTPAVNYSERINTVLGVFAPIRFSVIVFIDPDSDVGRLYQKGQNVGVEAEYYPKYELQNRTVNEFAPGYVVMKMNYARRAEVTEKDSTDSVEE

SEQ ID NO: 4501 - protein, 370 aa, Trypanosoma cruzi
MLSNKDPLSLMAMWGSVKGYDPNQGASFEGPEKRLEVIMRITDETHSEGLHALGDGVWKGVVGSLNAQIVSKESNEYIRSYVLTESSLFVMRDRIILITCGTTTLLNAVPFVLDAVSDVRGEVEWVSFMHKNYSFPWEQKGPHLSMAEEFNTLRTYFPSGKPFIFGPVDSDHYFLFVYDDVIRPCETENDTQLSMTMYGLDRTQTKHWFSDRFISTGTETAAIRKATKLNKVADDSWKLHDLQFEPCGYSINTIRGAEYQTIHITPEDHCSFASYETNTPAVNYSERINTVLGVFAPIRFSVIVFIDPDSDVGRLYQKGQNVGVEAEYYPKYELQNRTVNEFAPGYVVMKMNYARRAEVAEKDSTDSVEE

SEQ ID NO: 4502 - protein, 370 aa, Trypanosoma brucei brucei
MSSCKDSLSLMAMWGSIARFDPKHERSFEGPEKRLEVIMRVVDGTHVSGLLAHDDDVWQKVIDAICAHIVSREFNEYIRSYVLSESSLFVMKDRVILITCGTITLLNCVPLICEAVSTVCGEVEWVSFMHKNYSFPWEQKGPHLSMAEEFKTLRSHFPSGQPFIFGPIDSDHYFLYLDSDVVQPSCSDDAQLSMTMYGLDRNQTKHWYSDKMLPTGPETAVIREATGLSEVVDDSWILHDLQYEPCGYSINAIRGSEYQTIHITPEEHCSFASYETNTCALNYSKCICGVLRVFDPERFSVIVFIDPDSAVGKSYHSGGTIGVEPEYYPNYEAHHRTVNEYTPGHWVLKVNYVKRAVGTVGTSAASGAKE

SEQ ID NO: 4503 - protein, 368 aa, Caenorhabditis elegans
MSATSATNFAVQTHPVKAPDEEYFFEGAEKLLELWFCSSTQNETRSLRIIPREEIDAMLDIARCKILHSKHNESIDSYVLSESSLFISDNRVILKTCGTTRLLAALPVIMQLAGAYAGLDQVQSVYYSRKNFLRPDLQPSLHKNFDAEVEYLDSFFVDGHAYCLGSLKQDRWYLYTFHREVEFPAHKQPDHTLEILMSDLDEEVLHKFTKDYAVDGNDCFMRAGIDKIIPAGADVHDELFDPCGYSMNAYMNDTDQYATIHVTPEKAFSFASFETNQDLVCLYSQTRKVLQCFRPNKILMTVFANDISEKGKDAQQQLWDRELPGYRRTNVQFVRLETETLVYAHFVRKASTGQDSSSSDEDDGERSD

SEQ ID NO: 4504 - protein, 365 aa, Onchocerca volvulus
MSTSTLSDGSLDEGTFAAEDVSGVIEDYFFEGAEKLLEIWFDKNQNGATSLRNIPYSELVSMLDIAQCRILHSKSNECMDSYVLSESSMFISDFRIILKTCGTTRLLHAIERILHIAKIYCNMDNVVSVFYSRKNFMHPEKQPYPHSSFETEVDYLEEHFAGGSAYCIGPQRQDRWFLYTMVTPQAVFPFPEHTLEILMNGLPEDVLSTFSPNVSKDGKDCRMKSAINTILPPDIVVHEELFSPCGYSLNGLIPHSDHYITIHVTPEPDFSYVSFETNQHTLNLCEQMLKVLEIFKPSKFLLTIFTNELSNEGKKMQKNLWDLKICGCRRTNLQFLELPTETLIYVQFERIKSAEQVTCKEVFDR

SEQ ID NO: 4505 - protein, 335 aa, Acyrthosiphon pisum
MATEDFFEGAEKLLEIWFGRQDGKFENGDLRKIPRKKYEDLLKAACCEVISYTSNDKIDAYVLSESSMFVTKRRFILKTCGTTTPIECIKPLLLNVHEFTGFDEVEDVFYSRKNFERPELQKDTYRNFKLEIESLDIMFKGTGVARCMCSSKTDDSWYLYALHPVECFGKEKQKPDQTLEILMTNLDPDVMQIFTKEQSANASQATQDSGKSELLPNMEIDDFLFEPCGYSMNGIAKEGHYMTIHITPQQEFSFVSFETNVPQSSYKELILKVLKTFQPEKCVLTMFTNEISPSNSNHKEFKYLTHLGEWQQDSNRTCSLKNHDLTVSFYSKYPS

SEQ ID NO: 4506 - protein, 347 aa, Drosophila melanogaster
MLENGSHFFEGVEKLLEIWFEESSNGDDDLRNISRSDWENVLSNVNCQIISTSKNDIIDAFVLSESSMFVSKRRWILKTCGTTTPLKCLGQLLKLAEANGYNVVADLFYSRKNFTRPEAQITPHQGFTEEVTYLDSIFPNGRSYCLGSMNLECWYLYTFSRSDIKITPQLISDEKNVDSDPDQTIEILMQDLDPETMSIFYKNKFNDANGATVKSGIDTILPTMHIDDFLFDPCGYSMNGINDKGEYMTIHITPENQFSYVSFETNVALSNYRKLINQVINTFKPGKFIVTIFANKCSLAYETMKELEVEYSQGSHWKRTDMQCCNFPSYNLLFAQYSHSEKTGDYL

SEQ ID NO: 4507 - protein, 347 aa, Drosophila melanogaster
MLENGSHFFEGVEKLLEIWFEESSNGDDDLRNISRSDWENVLSNVNCQIISTSKNDIIDAFVLSESSMFVSKRRWILKTCGTTTPLKCLGQLLKLAEANGYNVVADLFYSRKNFTRPEAQITPHQGFTEEVTYLDSIFPNGRSYCLGSMNLECWYLYTFSRSDIKITPQLISDEKNVDSDPDQTIEILMQDLDPETMSIFYKNKFNDANGATVKSGIDTILPTMHIDDFLFDPCGYSMNGINDKGEYMTIHITPENQFSYVSFETNVALSNYRKLINQVINTFKPGKFIVTIFANKCSLAYETMKELEVEYSQGSHWKRTDMQCCNFPSYNLLFAQYSHSEKTGDNL

SEQ ID NO: 4508 - protein, 347 aa, Drosophila melanogaster
MLENGSHFFEGVEKLLEIWFEESSNGDDDLRNISRSDWENVLSNVNCQIISTSKNDIIDAFVLSESSMFVSKRRWILKTCGTTTPLKCLGQLLKLAEANGYNVVADLFYSRKNFTRPEAQITPHQGFTEEVTYLDSIFPNGRSYCLGSMNLECWYLYTFSRSDIKISPQLITDEKNVDSDPDQTIEILMQDLDPETMSIFYKNKFNDANGATVKSGIDTILPTMHIDDFLFDPCGYSMNGINDKGEYMTIHITPENQFSYVSFETNVALSNYRKLINQVINTFKPGKFIVTIFANKCSLAYETMKELEVEYSQGSHWKRTDMQCCNFPSYNLLFAQYSHSEKTGDYL

SEQ ID NO: 4509 - protein, 138 aa, Drosophila melanogaster
MLENGSHFFEGVEKLLEIWFEESSNGDDDLRNISRSDWENVLSNVNCQIISTSKNDIIDAFVLSESSMFVSKRRWILKTCGTTTPLKCLGQLLKLAEANGYNVVADLFYSRKNFTRPEAQVGKKINCISNDFISYIFR

SEQ ID NO: 4510 - protein, 334 aa, Danio rerio
MEESSAHFFEGTEKLLEVWFSRQDEAKGTGDLRTIPRFEWDKLLENVHCLIISVTKTDKQEAYILSESSMFVSKRRFILKTCGTTLLLQALVPLLELAREYCGFDAIENFFYSRKNFMKPTHQEFPHRNFQEEVEFLSQIFPNGAAYCMGRLNSDCWYLFTLELPEFWENKQADQTLEVLMSDLDPAVMDQFYMKDGVSANDVTRMSGIRDLIPGSVIDATMFNPCGYSMNGMKTDGTYWTIHITPEPEFSYVSFETNLSQTSYDELICRVVDVFKPGKFVTTLFVNQSSKCRSVFSSAQKLESYRLLDRQLAHFNDYNFVFTSYAKSLQQKQS

SEQ ID NO: 4511 - protein, 335 aa, Xenopus laevis
MKMEESAAHFFEGTEKLLELWFSQQDASKGSGDLRDIPRFEWDKLLENVHCLIISVTKTDKQEAYVLSESSMFVSKRRFILKTCGTTLLLQALVPLLELAREYCGFDGIQNFFYSRKNFMKPNHQEYPHRNFHEEVEFLNQIFPNGAAYCMGRINSDCWYLYTLDIPDEYVISQPDQTLEILMSELDPEVMDQFYMKEGVTANDVTRVSGIRDLITGSVIDATMFSPCGYSMNGMKSDGTYWTIHITPEPDFSYVSFETNVSLTTYDDLISKVVDVFKPRKFVTTLFVNQSSKCRTTFSCAQKIEGFRRVDRQFAQFNDYNFVFTSFAKIQPQQS

SEQ ID NO: 4512 - protein, 334 aa, Homo sapiens
MEAAHFFEGTEKLLEVWFSRQQPDANQGSGDLRTIPRSEWDILLKDVQCSIISVTKTDKQEAYVLSESSMFVSKRRFILKTCGTTLLLKALVPLLKLARDYSGFDSIQSFFYSRKNFMKPSHQGYPHRNFQEEIEFLNAIFPNGAAYCMGRMNSDCWYLYTLDFPESRVISQPDQTLEILMSELDPAVMDQFYMKDGVTAKDVTRESGIRDLIPGSVIDATMFNPCGYSMNGMKSDGTYWTIHITPEPEFSYVSFETNLSQTSYDDLIRKVVEVFKPGKFVTTLFVNQSSKCRTVLASPQKIEGFKRLDCQSAMFNDYNFVFTSFAKKQQQQQS

SEQ ID NO: 4513 - protein, 334 aa, Homo sapiens
MEAAHFFEGTEKLLEVWFSRQQPDANQGSGDLRTIPRSEWDILLKDVQCSIISVTKTDKQEAYVLSESSMFVSKRRFILKTCGTTLLLKALVPLLKLARDYSGFDSIQSFFYSRKNFMKPSHQGYPHRNFQEEIEFLNAIFPNGAGYCMGRMNSDCWYLYTLDFPESRVISQPDQTLEILMSELDPAVMDQFYMKDGVTAKDVTRESGIRDLIPGSVIDATMFNPCGYSMNGMKSDGTYWTIHITPEPEFSYVSFETNLSQTSYDDLIRKVVEVFKPGKFVTTLFVNQSSKCRTVLASPQKIEGFKRLDCQSAMFNDYNFVFTSFAKKQQQQQS

SEQ ID NO: 4514 - protein, 354 aa, Homo sapiens
MEAAHFFEGTEKLLEVWFSRQQPDANQGSGDLRTIPRSEWDILLKDVQCSIISVTKTDKQEAYVLSEASMFVSKRRFILKTCGTTLLLKALVPLLKLARDYSGFDSIQSFFYSRKNFMKPSHQGYPHRNFQEEIEFLNAIFPNGAAYCMGRMNSDCWYLYTLDFPESRVISQPDQTLEILMSELDPAVMDQFYMKDGVTAKDVTRESGIRDLIPGSVIDATMFNPCGYSMNGMKSDGTYWTIHITPEPEFSYVSFETNLSQTSYDDLIRKVVEVFKPGKFVTTLFVNQSSKCRTVLASPQKIEGFKRLDCQSAMFNDYNFVFTSFAKKQQQQQSHICRSQMVTSQQTSSVVRQT

SEQ ID NO: 4515 - protein, 334 aa, Homo sapiens
  unsure (1)..(334): unsure at all Xaa locations
MEAAHFFEGTEKLLEVWFSRQQPDANQGSGDLRTIPRSEWDILLKDVQCSIISVTKTDKQEAYVLSEXSMFVSKRRFILKTCGTTLLLKALVPLLKLARDYSGFDSIQSFFYSRKNFMKPSHQGYPHRNFQEEIEFLNAIFPNGAGYCMGRMNSDCWYLYTLDFPESRVISQPDQTLEILMSELDPAVMDQFYMKDGVTAKDVTRESGIRDLIPGSVIDATMFNPCGYSMNGMKSDGTYWTIAITPEPEFSYVSFETNLSQTSYDDLIRKVVEVFKPGKFVTTLFVNQSSKCRTVLASPQKIEGFKRLDCQSAMFNDYNFVFTSFAKKQQQQQS

SEQ ID NO: 4516 - protein, 267 aa, Homo sapiens
  unsure (1)..(267): unsure at all Xaa locations
XSMFVSKRRFILKTCGTTLLLKALVPLLKLARDYSGFDSIQSFFYSRKNFMKPSHQGYPHRNFQEEIEFLNAIFPNGAGYCMGRMNSDCWYLYTLDFPESRVISQPDQTLEILMSELDPAVMDQFYMKDGVTAKDVTRESGIRDLIPGSVIDATMFNPCGYSMNGMKSDGTYWTIHITPEPEFSYVSFETNLSQTSYDDLIRKVVEVFKPGKFVTTLFVNQSSKCRTVLASPQKIEGFKRLDCQSAMFNDYNFVFTSFAKKQQQQQS

SEQ ID NO: 4517 - protein, 267 aa, Homo sapiens
  unsure (1)..(267): unsure at all Xaa locations
XSMFVSKRRFILKTCGTTLLLKALVPLLKLARDYSGFDSIQSFFYSRKNFMKPSHQGYPHRNFQEEIEFLNAIFPNGAAYCMGRMNSDCWYLYTLDFPESRVISQPDQTLEILMSELDPAVMDQFYMKDGVTAKDVTRESGIRDLIPGSVIDATMFNPCGYSMNGMKSDGTYWTIHITPEPEFSYVSFETNLSQTSYDDLIRKVVEVFKPGKFVTTLFVNQSSKCRTVLRSPQKIEGFKRLDCQSAMFNDYNFVFTSFAKKQQQQQS

SEQ ID NO: 4518 - protein, 267 aa, Homo sapiens
  unsure (1)..(267): unsure at all Xaa locations
XSXFVSKRRFILKTCGTTLLLKALVPLLKLARDYSGFDSIQSFFYSRKNFXKPSHQGYPHRNFQEEIEFLNAIFPNGAGYCXGRXNSDCWYLYTLDFPESRVISQPDQTLEILXSELDPAVXDQFYXKDGVTAKDVTRESGIRDLIPGSVIDATXFNPCGYSXNGXKSDGTYWTIHITPEPEFSYVSFETNLSQTSYDDLIRKVVEVFKPGKFVTTLFVNQSSKCRTVLASPQKIEGFKRLDCQSAXFNDYNFVFTSFAKKQQQQQS

SEQ ID NO: 4519 - protein, 334 aa, Bos taurus
MEAAHFFEGTEKLLEVWFSRQQPDANQGSGDLRTIPRSEWDILLKDVQCSIISVTKTDKQEAYVLSESSMFVSKRRFILKTCGTTLLLKALVPLLKLARDYSGFDSIQSFFYSRKNFMKPSHQGYPHRNFQEEIEFLNAIFPNGAAYCMGRMNSDCWYLYTLDFPESRVINQPDQTLEILMSELDPAVMDQFYMKDGVTAKDVTRESGIRDLIPGSVIDATMFNPCGYSMNGMKSDGTYWTIHITPEPEFSYVSFETNLSQTSYDDLIRKVVEVFKPGKFVTTLFVNQSSKCRTVLSSPQKIEGFKRLDCQSALFNDYNFVFTSFAKKQQQQQS

SEQ ID NO: 4520 - protein, 551 aa, Rattus norvegicus
MAKDSDIMPEQQFNSKMTPTSKQSTGLLKTYEESSIPPPGTEMLDAFLRNYEHYCPVIIRKASESMRQTFGFHDTIGPNCTPLLTCLYHRDLLCQPSSFMDSSSIFMASASGCRRVWLLTWCCMLRLLCLREGDSILLGHYSQQILPGSFLAAAGGALQASINPGFARLLISAQCLTLDCDISLGKHSWCMSLRSRHGIPGIPKTGPVVIVLGIIFLHDNCVSEEELWPLLNDMGLYAGRDHFMYGKPRRLITEHFVQEQYLEYRQDFPVIFFHGTAGPFYDVPDASSVGKKGVPALICDCLSQLPRHLLMCLLREVSHIVMERTKKWDVVLKDIQCSTISVTKTDNFFYSHKNFMKPSDQGYPHQNFQEEIKFLNPFFHNGAAYCMGCMNSGCWYLNTLALPESRVINQPIKLWKFCELDSAVMDQFFMEDGVTAKDVTHGSGISDLIPDSVIDATLFNPCDYSMNEMKLDGTYWIIHITPEPEFSYVSFETNLSQTSYDDLIRKVVDVFKPGKFVTTLILTVSNVLIARVQNDYNSVFTSFSKKQQQQS

SEQ ID NO: 4521 - protein, 108 aa, Ipomoea nil
VYPYKIIIKTCGTTKLLLSIPPILELADGLSLKVKSVKYTRGSFNFPEVQPYPHRNFSEEVAILDGYFGKLGTGSKAYVMSDAGKQQQWHVYSASAESAENTFPIYTL

SEQ ID NO: 4522 - protein, 220 aa, Glycine max
  unsure (1)..(220): unsure at all Xaa locations
XXXXXXTXTGPALESATXAPPPKLSGISEIIPEMEICDFDFEPCGYSMNAIHGSAFSTIHVTPEDGFSYASYEVMGLDATALSYGDLVKRVLRCFGPSEFSVAVTIFGGRGHAGTWGKALGAXVYDCNNMVEQELPVGGXLVYQSFCAAEXAXATLPXSVLHXXDGENVXXXXSPMXRXXXTGNLLCWXEEXDXLEDKXXLXMXKPPXGAHXFEXVXXXX

SEQ ID NO: 4523 - protein, 91 aa, Glycine max
  unsure (1)..(91): unsure at all Xaa locations
XFKTSADGHVSCAKEMTKLSGISDIIPEMEVCDFDFEPCGYSMNAINGSAFSTIHVTPEDGFSYASYEVMGMDASALAYGDIVXRVLRCFX

SEQ ID NO: 4524 - protein, 118 aa, Glycine max
  unsure (1)..(118): unsure at all Xaa locations
XILSRSRSLSIFPSLFSINEVLQICSEVVNYTRGSFIFPSAQPYPHRNFSEEVAILDGYFGKLGAGSNAYILGGQDKAQNWHVYSASADSVTQCDXVNSGIRKILPDSEICDFDFEPC

SEQ ID NO: 4525 - protein, 196 aa, Glycine max
  unsure (1)..(196): unsure at all Xaa locations
XLEEILTSADXSTAFIFLPNGIEGKIWWKNTDARHRASVPTIAGALANLSLAIXAIWASAVMLSLNVKFVNYTRGSFIFPSAQPYPHRNFSEEVAILDGYFGKLGALMTRHARRRRLMRRSRTGVXRAGGAWGSHGSGDTVEMCMTGLDGQKAHVLYREQSASSAMMTVNFGIXKIFPDSENCDFDLXPCGYSMNX

SEQ ID NO: 4526 - protein, 110 aa, Glycine max
  unsure (1)..(110): unsure at all Xaa locations
LPNVLPLYICITGLNFNKPHGYYTYQSASAAITTDNAGITKTLPHSEINDYDFEPCGYSMNSDEGTGATTIHITPQDGFSHANLETVGTDFKQLNHNEMVNKVSACSLPX

SEQ ID NO: 4527 - protein, 220 aa, Triticum aestivum
  unsure (1)..(220): unsure at all Xaa locations
XIRHEAPVVNLEMCMTGLDKKKASVFFKTNAGASPTCAKEMTKLSGISEIIPEMEICDFDFEPCGYSMNAIHGSAFSTIHVTPEDGFSYASYEVMGFDATALSYGDLVKRVLRCFGPLEFSVAVTIFGGRGQAGTWGKQLGAEVYDCNNMVEQELPGGGLLIYQSFCAAEDAVATSPKSVLHCFEGVNMENAPVKDRKLANLLCWEEVDAMEEKDGVLDE

SEQ ID NO: 4528 - protein, 396 aa, Saccharomyces cerevisiae; identical to SEQ ID NO: 406

SEQ ID NO: 4529 - protein, 312 aa, Shewanella oneidensis MR-1
MMFFEGAEKKLEISLTPKAVSLRQRGLAFWTTLVACANAEILSKISNKDCDAYLLSESSLFVWDNKILILTCGNSTLIEAACYFINSLGSEHIAALCYQRKNEYQAQLQSTTFAEDIAQLRTLISGQAFRVGHLDAHHHYVFCAAGVPITQVGTRLELMMYHIRGELAEYLNDPVQTEQGIVHRLKLTQLFPEFQLDMHCFKPTGFSLNAIQGSHYFTLHITPSAGQGEHSYVSFETNLNLAAYPYPVVAQLISLFAPSSWDLVSVNQLISTAGLSEHLCVGHCSITTEQGNYIDFNHYQQRQTEELFPKFM

SEQ ID NO: 4530 - protein, 132 aa, Arabidopsis thaliana
MDSQVQFFEGVEKRIEFDFAGTNLRDELNRAVLEKIVKPVECVIEGVLSGDHVDSYLLSASSLFVYDDLVIIKTCGATKIFECINGIVAAVGWNKLRSIKYTRGSFFRPDLQPYPHQRPCDEKRCVRLVPKS

SEQ ID NO: 4531 - protein, 383 aa, Nostoc sp. PCC 7120
MAKHLGKKIAPIPMSTDISVVDLIDNYFTAYNSARLREASQLLACDILKDGVTVGVSLSGAMTPAGFGVSALAPLIRNGFIDWMISTGANLYHDMHYGLGFELFAGNPFLDDVKLREEGTIRIYDIIFGYDVLLETDAFIRKILQAEPFQKRMGTAEFHYLLGKYVREVEKQLGVKHSCLLATAYEYGVPIYTSSPGDSSIGMNVAALALEGSQLILDPAIDVNETAAIAYNAREGEGKSAAVILGGGSPKNFLLQTQPQIHEVLGLEERGHDFFVQFTDARPDTGGLSGATPAEAVSWGKIDPDELPSTIVCYTDSTIALPLVTAYVLNQCPPRPLKRLYDRREELYDKLRTDYLAAKDKPVEKVATNGEVATYPCGTPIRQ

SEQ ID NO: 4532 - protein, 401 aa, Thermosynechococcus elongatus BP-1
MAVPAVEFPWEEQPMSAFATPITPAPIPDNISLTELIDKYFTAYNSARLREICQLLSQRVFKPEVTVGLSLSGAMTPTGLGISALAPLVRAGFVDYIISTGANLYHDIHYALGMDLYAAHPFVDDVQLRKESKIRIYDIIFDYDVLLETDAFLRQVLRSETFQRRMGTAEFHYHLGHYVRELEVQRGQPHSCLLATAYECGVPIYTSSPGDSSIGMNVAAIALEGSKLIIDPAIDVNETAAIAYFAREAAGGKGKSAALIIGGGSPKNFLLQTQPQIHEVLGLEERGHDYFIQITDARPDTGGLSGAVPSEAVSWGKVDPQGLRDTVVCYTDSTIALPILTAYCLNRCQPRPLKRLYDRRGEMVERLQQLYLQAQLQHKVKELPTEAPVATYPCGTPIRRP

SEQ ID NO: 4533 - protein, 95 aa, Oryza sativa
  unsure (1)..(95): unsure at all Xaa locations
MAGAGGGGVRDMDALEGVRSIVLKPSESLDEGRFTRIAGADFNDAGLGLPGLLASLATTGFQASNLGDAVDVVNQMLEIVVFLDPWSFXRNCNLX

SEQ ID NO: 4534 - protein, 86 aa, Zea mays
ELPRDECAATELDPAYSDSGKCNICVASTSKLESTGARDINRHRGQHRIVDIRATTDRRIETKNIKCLAPTYRGDFTLPGALLRSR

SEQ ID NO: 4535 - protein, 387 aa, Saccharomyces cerevisiae; identical to SEQ ID NO: 402

SEQ ID NO: 4536 - protein, 390 aa, Nostoc punctiforme
MSKQLGQKIAPTPISNDINVVDLIDQYFTAYNSARLREICQLLSRDVLTEGVTVGVSLSGAMTPAGFGVSALAPLIRNGFIDWMISTGANLYHDMHYGLGFELFAGNPFLDDVKLRQEGTIRIYDIIFGYDVLLETDAFIRKILQGEAFQKRMGTAEFHYLLGKYVREVEKQLGVQHSCLLATAYEYGVPIYTSSPGDSSIGMNVAALALEGSQLVLDPSIDVNETAAIAYNARESGGKSAAVILGGGSPKNFLLQTQPQLHEVLGLEERGHDYFVQFTDARPDTGGLSGATPSEAVSWGKIDPEELPNTIVCYTDSTIALPLVTAYVLNKCQPRPLKRIYDKREAILDKLQKDYLAAKTQPSDQVPAAVAESAQKQTATYPCGRLIPNT

SEQ ID NO: 4537 - protein, 138 aa, Pyrococcus furiosus DSM 3638
MGDKTKVQVSKLKPGRYIIIDDEPCRIVNITVSSPGKHGSAKARIEAVGIFDGKVRSIVKPTSAEVDVPIIDKRTAQVIAVTPDTVQIMDMETYEMFEVPLDTGVEEEIKDKIKEGINVEYWETLGRIKIMRIKGEEE

SEQ ID NO: 4538 - protein, 138 aa, Pyrococcus abyssi
MGDKTKVQVSKLKPGRYIIIDDEPCRIVNITVSSPGKHGSAKARIEAVGIFDGKVRSIVKPTSAEVDVPIIDKKTAQVIAITPDTVQIMDMETYEMFEVPIDTGVAEEIRDQLKEGINVEYWETLGRVKIMRIKGEGE

SEQ ID NO: 4539 - protein, 72 aa, Castanea dentata
VGGVSDVKGHENSLQIDDLARFAVDDHNKKANTLLQFKKVVNAKQQVVSGTIYILTLEVEDGGKKKVYEAKI

SEQ ID NO: 4540 - protein, 102 aa, Castanea sativa
MAALVGGVSDVKGHENSLQIDDLARFAVDDHNKKANTLLQFKKVVNAKQQVVSGTIYILTLEVEDGGKKKVYEAKIWEKPWLNFKEVQEFKLIGDAPTHHSA

SEQ ID NO: 4541 - protein, 95 aa, Pyrus communis
MAAVGAVRDNQGVANSVETESLARYAVDEHNKKENDLLEFVRVLDDKVQVVSGTMHYLKIEATEGGKKKVYEAKVWVKPWENFKQVQEFKPVSDS

SEQ ID NO: 4542 - protein, 99 aa, Carica papaya
MEPGIVIGGLQDVEGDANNLEYQELARFAVDEHNKKTNAMLQFKRVVNVKQAVVEGLKYCITLEAVDGHKTKVYEAEIWLKLWENFRSLEGFKLLGDAH

SEQ ID NO: 4543 - protein, 118 aa, Citrus x paradisi
MNQRFCCLIVLFLSVVPLLAAGDRKGALVGGWKPIEDPKEKHVMEIGQFAVTEYNKQSKSALKFESVEKGETQVVSGTNYRLILVVKDGPSTKKFEAVVWEKPWEHFKSLTSFKPMVK

SEQ ID NO: 4544 - protein, 140 aa, Glycine max
  unsure (1)..(140): unsure at all Xaa locations
XWKYRVVGSVAALLLLLAIVVPFTQTQTQSARDKAAMAEDAGPLVGGISDSPMGQENDLDVIALARFAVSEHNNKANALLEFENVVKVKKQTVAGTMHYITIRVTEGGAKKLYEAKVWEKPWENFKKLEEFKLVEDVPSA

SEQ ID NO: 4545 - protein, 209 aa, Ricinus communis
MATVQGGVHDSPQGTANNAEIDGIARFAVDEHNKKENAMVEFGRVLKAKEQVVAGTLHHLTIEAIEAGKKKIYEAKVWVKPWLNFKELQEFKHATDVADTTASHPSFTSSDLGVKREGHGAEWKEVAAHDPVVQDAATHAVNTIQQRSNSLFPYQLQEIVHAKAQVVDDFAKFDMILKVKRGTSEEKFKVEVHKNNEGTFLLNQMEPHT

SEQ ID NO: 4546 - protein, 63 aa, Oryza sativa (japonica cultivar-group)
MRKYRVAGLVAALLVLHSLATPSAQAEAHRAGGEGEEKMSSDGGPVLGGVEPVGNENDLHLVD

SEQ ID NO: 4547 - protein, 756 aa, Solanum tuberosum
MAIVGGLVDVPFENKVEFDDLARFAVQDYNQKNDSSLEFKKVLNVKQQIVAGIMYYITFEATEGGNKKEYEAKILLRKWEDLKKVVGFKLVGDDSTMPGGIVNVPNPNNTKFQELARFAIQDYNKKQNAHLEFVENLNVKEQVVAGIMYYITLAATDDAGKKKIYKAKIWVKEWEDFKKVVEFKLVGDDIAKLGGITDVPFPNNPEFQDLARFAIQVYNKKENVHLEFVENLNVKQQVVAGMMYYITLAAIDAGKKKIYETKIWVKEWEDFKKVVEFKLVGDDSAKTGGIINVPNPNSPEFQDLARFAVQDYNNTQNAHLEFVENLNVKEQLVSGMMYYITLAATDAGNKKEYEAKIWVKEWEDFKKVIDFKLVGNDSAKKLGGFTEVPFPNSPEFQDLTRFAVHQYNKDQNAHLEFVENLNVKKQVVAGMLYYITFAATDGGKKKIYETKIWVKVWENFKKVVEFKLVGDDSAKLGGIINVPFPNNPEFQDLARFAVQDYNKKENAHLEFVENLNVKEQLVAGMLYYITLVAIDAGKKKIYEAKIWVKEWENFKKVIEFKLIGDDSAIIGGFTDVPFPNNPEFQDLARFAVQDYNKKENAHLEYVENLNVKEQLVAGMIYYITLVATDAGKKKIYEAKIWVKEWEDFKKVVEFKLVGDDSAKPGGIIIVPFPNSPEFQDLARFAVQDFNKKENGHLEFVENLNVKEQVVAGMMYYITLAATDARKKEIYETKILVKEWENFKEVQEFKLVGDATK

SEQ ID NO: 4548 - protein, 66 aa, Solanum tuberosum
QTQNAHLEFVEVLNVKEQVVAGMMYYITLVATDDGYKKIYKTKIWVKEWENFKEVQEFKQIVYATK

SEQ ID NO: 4549 - protein, 254 aa, Ipomoea batatas
MRVRFFFYFAYFLITLVFFPSVTLQSYSGGHRQEATGFCGEEGEREDNLIRMATTTLGGISDSASAENSVEIESLARFAVEEHNKKENAMIELVRVVKAEEQVVAGKLHHLTLEVIDAGKRKLYEAKVWLKPWMNFKELQGFNHIEDIPTLTSSDLGARRDCPNTGLKSVPVNDPVVQEAAQHAVKTIQQRSNSLLPYELQEIVHANAEVIDDSAKVHMLIKTKRGEKEEKFSVEVHKNNEGAFLLHHMAPANS

SEQ ID NO: 4550 - protein, 254 aa, Ipomoea batatas
MRVRFFFYFAYFLITLVFFPSVTLQSYSGGHRQEATGFCGEEGEREDNLIRMATTTLGGISDSASAENSVEIESLARFAVEEHNKKENAMIELVRVVKAEEQVVAGKLHHLTLEVIDAGKRKLYEAKVWLKPWMNFKELQGFNHIEDIPTLTSSDLGAKRDWPNTGLKSVPVNDPVVQEAAQHAVKTIQQRSNSLLPYELQEIVHANAEVIDDSAKVHMLIKTKRGEKEEKFSVEVPKNNEGAFFLNHMAPANS

SEQ ID NO: 4551 - protein, 199 aa, Sesamum indicum
MATLGGVHDSNSNPDTHSLARFAVDQHNTKENGLLELVRVVEAREQVVAGTLHHLVLEVLDAGKKKLYEAKIWVKPWMDFKQLQEFKHVRDVPSFTSSDLGAKTDDQVSGWRPVPVHDPVVQDAAHHAIKTIQERSNSLFPYELSEVVHANAEVVDTSAKFDMLLKVKRGGKEEKYKVEVHKSTEEGGFNLKKVDLDHS

SEQ ID NO: 4552 - protein, 92 aa, Ambrosia artemisiifolia
MSILGGITEVKDNDNSVDFDELAKFAIAEHNKKENAALEFGKVIEKKQQAVQGTMYYIKVEANDGGEKKTYEAKVWVKLWENFKELQELKLV

SEQ ID NO: 4553 - protein, 90 aa, Artemisia vulgaris
MAVCGGVTECKNFENNVEIETIAKFAVEEHNKKENATLEFVKVVSAKEQVVSGKIYYITIETNDGKTYEAKLWVKPWENFQELQEFKPAA

SEQ ID NO: 4554 - protein, 205 aa, Colocasia esculenta
MALMGGIVDVEGAQNSAEVEELARFAVDEHNKKENALLQFSRLVKAKQQVVSGIMHHLTVEVIEGGKKKVYEAKVWVQAWLNSKKLHEFSPIGDSSSVTPADLGVKRDAHEAEWLEIPTHDPVVQDAANHAVKSIQQRSNTLFPYELLEILHAKAKVLEDLAKIHLLLKLKRGSREEKFKVEVHKNIEGTFHLNQMEQDHSDSGN

SEQ ID NO: 4555 - protein, 135 aa, Coix lacryma-jobi
MRKQRIVPLVAALLVLLALAVSSTRNAREEESMADDAGMLAGGIKDVPANENDLHLQELARFAVDEHNKKANALLGYEKLVKAKTQVVAGTMYYLTIEVKDGEVKKLYEAKVWEKPWENFKELLEFKPVEEDASA

SEQ ID NO: 4556 - protein, 90 aa, Oryza
MARIRARGSSRVDLARFAVTEHNKKANSLLEFEKLVSVKQQVVAGTLYYFTIEVKEGDAKKLYEAKVWEKPWMDFKELQEFKPVDASANA

SEQ ID NO: 4557 - protein, 130 aa, Sorghum bicolor
ARVVPLVAALLVLLALAVSSTRNRNAQEGEESMALDGGIKDVPANENDLHLQELARFAVDEHNKKANALLGYEKLVKAKTQVVAGTMYYLTVEVKDGEVKKLYEAKVWEKPWENFKELQEFKPVEEGASA

SEQ ID NO: 4558 - protein, 142 aa, Triticum aestivum
MEMWKYRVVGSVAALLLLLAIVVPFTQTQTQSARDKAAMAEDAGPLVGGISDSPMGQENDLDVIALARFAVSEHNNKANALLEFENVVKVKKQTVAGTMHYITIRVTEGGAKKLYEAKVWEKPWENFKKLEEFKLVEDVPSA

SEQ ID NO: 4559 - protein, 142 aa, Triticum aestivum; identical to SEQ ID NO: 4558

SEQ ID NO: 4560 - protein, 165 aa, Triticum aestivum
SARIVSLLPCSAAAAINPAPDRPPDAWIRRVVGSVAALLLLLAIVVPFTQTQTQSARDKAAMAEDAGPLVGGIKDSPMGQENDLDVIALARFAVSEHNNKANALLEFENVVKLKKQTVAGTMHYITIRVTEGGAKKLYEAKVWEKPWENFKKLEEFKPVEDAAIA

SEQ ID NO: 4561 - protein, 125 aa, Triticum aestivum
LLAIVVPFTQTRTQSARDKAAMAEDAGPLVGGIKDSPMGQENDLDVIALARFAVSEHNNKANALLEFENVVKLKKQTVAGTMHYITIRVTEGGAKKLYEAKVWEKPWENFKQLQEFKPVEDAAIA

SEQ ID NO: 4562 - protein, 134 aa, Zea mays
MRKHRIVSLVAALLILLALAVSSTRNAQEDSMADNTGTLAGGIKDVPGNENDLHLQELARFAVDEHNKKANALLGFEKLVKAKTQVVAGTMYYLTIEVKDGEVKKLYEAKVWEKPWENFKELQEFKPVDEGASA

SEQ ID NO: 4563 - protein, 134 aa, Zea mays
MRKHRIVSLVAALLILLALAVSSTRNAQEDSMADNTGTLAGGIKDVPGNENDLHLQELARFAVDEHNKKANALLGFEKLVKAKTQVVAGTMYYLTIEVKDGEVKKLYEAKVWEKPWENFKELQEFKPVEEGASA

SEQ ID NO: 4564 - protein, 134 aa, Zea mays; identical to SEQ ID NO: 4563

SEQ ID NO: 4565 - protein, 134 aa, Zea mays; identical to SEQ ID NO: 4563

SEQ ID NO: 4566 - protein, 135 aa, Zea mays
  unsure (1)..(135): unsure at all Xaa locations
MRKHRIVSLVAALLILLALAXVSSNRNAQEDSMADNTGTLVGGIQDVPENENDLHLQELARFAVDEHNKKANALLGFEKLVKAKTQVVAGTMYYLTIEVKDGEVKKLYEAKVWEKPWEKFKELQEFKPVEEGASA

SEQ ID NO: 4567 - protein, 134 aa, Zea mays
MRKHRIVSLVSALLILLALAVSSTRNAQEDSMANNTGTLVGGIQDVPGSENDLHLQELARFAVDEHNKKANALLGFEKLVKAKTQVVAGTMYYLTIEVKDGEVKKLYEAKVWEKPWEKFKELQEFKPVEEGASA

SEQ ID NO: 4568 - protein, 134 aa, Zea mays
MRKHRIVSLVAALLILLALAVSSNRNAQEDSMADNTGTLVGGIQDVPENENDLHLQELARFAVDEHNKKANALLGFEKLVKAKTQVVAGTMYYLTIEVKDGEVKKLYEAKVWEKPWEKFKELQEFKPVEEGASA

SEQ ID NO: 4569 - protein, 134 aa, Zea mays; identical to SEQ ID NO: 4568

SEQ ID NO: 4570 - protein, 135 aa, Zea mays
MRKHRIVSLVAALLVLLALAAVSSTRNAQEESAADNAGMLAGGIKDVPANENDLQLQELARFAVNEHNQKANALLGFEKLVKAKTQVVAGTMYYLTIEVKDGEVKKLYEAKVWEKPWENFKELQEFKPVEEGASA

SEQ ID NO: 4571 - protein, 138 aa, Zea mays
AGRAGAQHRIVSLVAALLILLALAVSSTRNAQEDSMADNTGTLAGGIKDVPGNENDLHLQELARFAVDEHNKKANALLGFEKLVKAKTQVVAGTMYYLTIEVKDGEVKKLYEAKVWEKPWENFKELQEFKPVEECASA

SEQ ID NO: 4572 - protein, 135 aa, Zea mays
MRKHRIVSLVAALLVLLALAAVSSTRSTQKESVADNAGMLAGGIKDVPANENDLQLQELARFAVNEHNQKANALLGFEKLVKAKTQVVAGTMYYLTIEVKDGEVKKLYEAKVWEKPWENFKQLQEFKPVEEGASA

SEQ ID NO: 4573 - protein, 135 aa, Zea mays; identical to SEQ ID NO: 4572

SEQ ID NO: 4574 - protein, 135 aa, Zea mays
MRKHRIVSLVAALLVLLALAAVSSTRSAQKESVADNAGMLAGGIKDVPANENDLQLQELARFAVNEHNQKANALLGFEKLVKAKTQVVAGTMYYLTIEVKDGEVNKLYEAKVWEKPWENFKQLQEFKPVEEGASA

SEQ ID NO: 4575 - protein, 134 aa, Zea mays
  unsure (1)..(134): unsure at all Xaa locations
XHASGIVSLVAALLILLALAVSSTRNAQEDSMADNTGTLAGGIKDVPGNENDLHLQELARFAVDEHNKKANALLGFEKLVKAKTQVVAGTMYYLTIEVKDGEVKKLYEAKVWEKPWENFKELQEFKPVEEGASA

SEQ ID NO: 4576 - protein, 135 aa, Zea mays
MRKHRIVSLVAALLVLLALAAVSSTRSAQKESVADNAGMLAGGIKDVPANENDLQLQELARFAVNEHNQKANALLGFEKLVKAKTQVVAGTMYYLTIEVKDGVVKKLYEAKVWEKPWENFKQLQEFKPVEEGASA

SEQ ID NO: 4577 - protein, 135 aa, Zea mays
MRVHRIVSLLAALLVLLALAAVSSTRSAQEESVADNAGMLAGGIKDVPANENDLQLQELARFAVNEHNKKANALLGFEKLVKAKTQVVAGTMYYLTIEAKDGEVKKLYEAKVWEKPWENFKQLQEFKPVEEGASA

SEQ ID NO: 4578 - protein, 135 aa, Zea mays
MRKHRIVSLVAALLVLLALAAVSSTRSAQKESAADNAGMLAGGIKDVPANENDLQLQELARFAVNEHNQKANALLGFEKLVKAKTQVVAGTMYYLTIEVKDGEVNKLYEAKVWEKPWENFKQLQEFKPVEEGASA

SEQ ID NO: 4579 - protein, 135 aa, Zea mays
MRKHRIVSLVAALLVLLALAAVSSTRSTQKESVADNAGMLAGGIKDVPANENDLQLQELARFAVNEHNQKANALLGFEKLVKAKTQVVAGTMYYLTIEVKDGEVNKLYEAKVWEKPWENFKQLQEFKPVEEGASA

SEQ ID NO: 4580 - protein, 135 aa, Zea mays
MRKHRIVSLVAALLVLLALAAVSSTRSAQKESVADNAGMLAGGIKDVPANENDLQLRELARFAVNEHNQKANALLGLEKLVKAKTQVVAGTMYYLTIEVKDGVVKKLYEAKVWEKPWENFKQLQEFKPVEEGASA

SEQ ID NO: 4581 - protein, 162 aa, Zea mays
  unsure (1)..(162): unsure at all Xaa locations
MRKHRIVSLVSALLILLALAVSSTRNAQEDSMANNTGTLVGGIQDVPGSENDLHLQELARFAVDEHNKKANXALLGFEKLVKAKTQVVAGXTMYYLTIEVKDGEVKKLYEAKVWEKPWENLKGLQEFKPVEEGASALRMSPSPCASLKLKAKLQNKEPCSLV

SEQ ID NO: 4582 - protein, 140 aa, Zea mays
  unsure (1)..(140): unsure at all Xaa locations
XVQYRVVGSVAALLLLLAIVVPFTQTQTQSARDKAAMAEDAGPLVGGISDSPMGQENDLDVIALARFAVSEHNNKANALLEFENVVKVKKQTVAGTMHYITIRVTEGGAKKLYEAKVWEKPWENFKKLEEFKLVEDVPSA

SEQ ID NO: 4583 - protein, 161 aa, Zea mays
  unsure (1)..(161): unsure at all Xaa locations
MALAAAPASGDSQSGPQRNYQVVEMRKHRIVSLVAALLVLLALAAVSSTRSAQKESAADNAGMLAGGIKDVPANENDLQLQELARFAVNEHNQKANXALLGFEKLVKAKTQVVAGTMYYLTIEVKDGEVNKLYEAKVWEKPXWENFKQLQEFKPVEEGASA

SEQ ID NO: 4584 - protein, 88 aa, Vigna radiata
MSQELESVEIDSLARFAVEEHNKKQNALLEFGRVVSAQQQVVSGTLYTITLEAKDGGQKKVYEAKVWEKPWLNFKELQEFKLVGEAPA

SEQ ID NO: 4585 - protein, 100 aa, Persea americana
PLLGGVRDVPDHNSAETEELARFAVQEHNKKANTRLEFSRVVKAKEQVVAGTMYYITLEVVEAGQKKIYEAKVWVKLWENFKELQEFKPVGDSSSTSSDA

SEQ ID NO: 4586 - protein, 98 aa, Dianthus caryophyllus
MATVGGIKDSGGSSANSLEIDELAKFAVDHYNSKENALLEFQRVVNTKEQVVAGTIYYITLEATDGGVKKLYEAKVWVKPWVNFKEVQDFKYVGDASA

SEQ ID NO: 4587 - protein, 98 aa, Dianthus caryophyllus
MATVGGIKDSGGSSAISLEIDELAKFAVDHYNSIENALLEFPRVVNTKEQVVAGTIYYITLEATDGGVKKLYEANVWVKPGVNFKEVQVFKYVGDAFG

SEQ ID NO: 4588 - protein, 99 aa, Rumex obtusifolius
MATIGGIKQVEGSANSLEVESLAKFAVEDHNKKQNAMLEFSKVVNTKEQVVAGTMYYITLEATDGGKKKVYEAKVWVKPWMNFKQVQEFKLLGDQGSTS

SEQ ID NO: 4589 - protein, 201 aa, Arabidopsis thaliana
MALVGGVGDVPANQNSGEVESLARFAVDEHNKKENALLEFARVVKAKEQVVAGTLHHLTLEILEAGQKKLYEAKVWVKPWLNFKELQEFKPASDAPAITSSDLGCKQGEHESGWREVPGDDPEVKHAAEQAVKTIQQRSNSLFPYELLEVVHAKAEVTGEAAKYNMLLKLKRGEKEEKFKVEVHKNHEGALHLNHAEQHHD

SEQ ID NO: 4590 - protein, 234 aa, Arabidopsis thaliana
MMRSRFLLFIVFFSLSLFISSLIASDLGFCNEEMALVGGVGDVPANQNSGEVESLARFAVDEHNKKENALLEFARVVKAKEQVVAGTLHHLTLEILEAGQKKLYEAKVWVKPWLNFKELQEFKPASDAPAITSSDLGCKQGEHESGWREVPGDDPEVKHVAEQAVKTIQQRSNSLFPYELLEVVHAKAEVTGEAAKYNMLLKLKRGEKEEKFKVEVHKNHEGALHLNHAEQHHD

SEQ ID NO: 4591 - protein, 201 aa, Arabidopsis thaliana
MALVGGVGDVPANQNSGEVESLARFAVDEHNKKENALLEFARVVKAKEQVVAGTLHHLTLEILEAGQKKLYEAKVWVKPWLNFKELQEFKPASDAPAITSSDLGCKQGEHESGWREVPGDDPEVKHVAEQAVKTIQQRSNSLFPYELLEVVHAKAEVTGEAAKYNMLLKLKRGEKEEKFKVEVHKNHEGALHLNHAEQHHD

SEQ ID NO: 4592 - protein, 209 aa, Arabidopsis thaliana
VLGFCNEEMALVGGVGDVPANQNSGEVESLARFAVDEHNKKENALLEFARVVKAKEQVVAGTLHHLTLEILEAGQKKLYEAKVWVKPWLNFKELQEFTPASDAPAITSSDLGCKQGEHESGWREVPGDDPEVKHVAEQAVKTIQQRSNSLFPYELLEVVHAKAEVTGEAAKYNMLLKLKRGEKEEKFKVEVHKNHEGALHVNHAEQHHD

SEQ ID NO: 4593 - protein, 230 aa, Arabidopsis thaliana
MRRASMCMMLICVSLVLLSGFGQFVICSEEKGTYNDNVVKMKLGGFSDSKNDWNGGKEIDDIALFAVQEHNRRENAVLELARVLKATEQVVAGKLYRLTLEVIEAGEKKIYEAKVWVKPWMNFKQLQEFKNIIPSFTISDLGFKPDGNGFDWRSVSTNNPEVQEAAKHAMKSLQQKSNSLFPYKLIDIILARAKVVEERVKFELLLKLERGNKLEKFMVEVMKDQTGKYE

SEQ ID NO: 4594 - protein, 232 aa, Arabidopsis thaliana
MDMRRASMCMMLICVSLVLLSGFGQFVICSEEKGTYNDNVVKMKLGGFSDSKNDWNGGKEIDDIALFAVQEHNRRENAVLELARVLKATEQVVAGKLYRLTLEVIEAGEKKIYEAKVWVKPWMNFKQLQEFKNIIPSFTISDLGFKPDGNGFDWRSVSTNNPEVQEAAKHAMKSLQQKSNSLFPYKLIDIILARAKVVEERVKFELLLKLERGNKLEKFMVEVMKDQTGKYE

SEQ ID NO: 4595 - protein, 125 aa, Arabidopsis thaliana
MESKTFWIVTLLLCGTIQLAICRSEEKSTEKTMMLGGVHDLRGNQNSGEIESLARFAIQEHNKQQNKILEFKKIVKAREQVVAGTMYHLTLEAKEGDQTKNFEAKVWVKPWMNFKQLQEFKESSS

SEQ ID NO: 4596 - protein, 92 aa, Arabidopsis thaliana
MLGGVHDLRGNQNSGEIESLARFAIQEHNKQQNKILEFKKIVKAREQVVAGTMYHLTLEAKEGDQTKNFEAKVWVKPWMNFKQLQEFKESSS

SEQ ID NO: 4597 - protein, 116 aa, Arabidopsis thaliana
TLLLCGTIQLAICRSEEKSTEKTMMLGGVHDLRGNQNSGEIESLARFAIQEHNKQQNKILEFKKIVKAREQVVAGTMYHLTLEAKEGDQTKNFEAKVWVKPWMNFKQLQEFKESSS

SEQ ID NO: 4598 - protein, 101 aa, Arabidopsis thaliana
MADQQAGTIVGGVRDIDANANDLQVESLARFAVDEHNKNENLTLEYKRLLGAKTQVVAGTMHHLTVEVADGETNKVYEAKVLEKAWENLKQLESFNHLHDV

SEQ ID NO: 4599 - protein, 101 aa, Arabidopsis thaliana
MADQQAGTIVGGVRDIDANANDLQVESLARFAVDEHNKNENLTLEYKRLLGAKTQVVAGTMHHLTVEVADGETNKVYEAKVLEKAWENLKQLESFNHHHDV

SEQ ID NO: 4600 - protein, 199 aa, Brassica rapa
MAMLGGVRDVPSNENSVEVESLARFAVDEHNKKENALLEFARVVKAKEQVVAGTMHHLTLEIIEAGKKKLYEAKVWVKPWLNFKELQEFKPSTTITPSDLGCKKGEGASGWREVPGDDPEVQHVADHAVKSIQQRSNSLFPYELQEVVHANAEVTGEAAKYNMVLKLKRGEKEEKFKVEVHKNHEGVLHLNHMEQQHHD

SEQ ID NO: 4601 - protein, 205 aa, Brassica rapa
MAMLGGVRDVPANQNSGEVESLARFAVDEHNKKENALLEFARVVKAKEQVVAGTMHHLTLEIIEAGKKLYEAKVWVKPWLNFKELQEFKPASDDGSPSATITPSDLGCKKGEGASGWREVPGDDPEVQHVADHAVKTIQQRSNSLFPYELQEVVHANAEVTGEAAKYNMVLKLKRGEKEEKFKVEVHKNHEGVLHLNHMEQQHHD

SEQ ID NO: 4602 - protein, 95 aa, Brassica rapa
GTSRDVDPNANDLQVESLARFAVDEHNKKENVSLEYRRLIGAKTQVVAGTMHHLTVEVADGETKKVYEAKVLEKAWENLKKLEDFTHLRMFSFIT

SEQ ID NO: 4603 - protein, 207 aa, Brassica oleracea
MAMLGGVRDLPANENSVEVESLARFAVDEHNKKENALLEFARVVKAKEQVVAGTMHHLTLEIIEAGKKKLYEAKVWVKPWLNFKELQEFKPASDDGAPSTTITPSDLGCKKVSDENASGWREVPGDDPEVQHVADHAVKTIQQRSNSLFPYELQEVVHANAEVTGEAAKYNMVLKLKRGEKEEKFKVEVHKNHEGVLHLNHMEQHHD

SEQ ID NO: 4604 - protein, 246 aa, Malus x domestica
QMKSESYISLLIASFFVLLLPAFSSAAEESSTPIGCGHTSHRNMATLGGVHESHGAQNSAEVEDLARFAVQEHNNKENALLEFVSVVKAKEQVVAGTLHHLTIEAIEAGKKKLYQAKVWVKPWMGFKEVQEFKHADEEETPSVTSSDLGVKQGGHPPGWQSVPPHDPQVQDAANHAVKSLQQRSNSLLPYELQEVVHAQAEVAEEHAKFNMLLKVKRGSKEEKFKAEVHKNMEGTFSLNQMEADHS

SEQ ID NO: 4605 - protein, 245 aa, Glycine max
MRASNSSSSISIAKRYFFFFLLFIFFALRSSSGDCSEYHHHHSPMATIGGLHDSQGSQNSVETEALARFAVDEHNKKQNSLLEFARVVRAQEQVVAGTLHHLTLEAIEAGEKKLYEAKVWVKPWLNFKELQEFKPAGDAPSFTSADLGVKKDGHQPGWQSVPTHDPQVQDAANHAIKTIQQRSNSLVPYELHEVADAKAEVIDDFAKFNLLLKVKRGQKEEKFKVEVHKNNQGGFHLNQMEQDHS

SEQ ID NO: 4606 - protein, 245 aa, Glycine max
MRALTSSSSTFIPKRYSFFFFLSILFALRSSSGGCSEYHHHHAPMATIGGLRDSQGSQNSVQTEALARFAVDEHNKKQNSLLEFSRVVRTQEQVVAGTLHHLTLEAIEAGEKKLYEAKVWVKPWLNFKELQEFKPAGDVPSFTSADLGVKKDGHQPGWQSVPTHDPQVQDAANHAIKTIQQRSNSLVPYELHEVADAKAEVIDDFAKFNLLLKVKRGQKEEKFKVEVHKNNQGGFHLNQMEQDHS

SEQ ID NO: 4607 - protein, 245 aa, Glycine max; identical to SEQ ID NO: 4606

SEQ ID NO: 4608 - protein, 244 aa, Glycine max
  unsure (1)..(244): unsure at all Xaa locations
MKVEEEEVNALIRFISSFXFLSILFALRSSSGGCSEYHHHHAPMATIGGLRDSQGSQNSVQTEALARFAVDEHNKKQNSLLEFSRVVRTQEQVVAGTLHHLTLEAIEAGEKKLYEAKVWVKPWLNFKELQEFKPAGDVPSFTSADLGVKKDGHQPGWQSVPTHDPQVQDAANHAIKTIQQRSNSLVPYELHEVADAKTEVIDDFAKFNLLLKVKRGQKEEKFKVEVHKNNQGGFHLNQMEQDHS

SEQ ID NO: 4609 - protein, 260 aa, Glycine max
  unsure (1)..(260): unsure at all Xaa locations
LLERLERLRKDDRRGRKEEINSARALTSSSSTFIPKRYSFFFFLSILFALRSSSGGCSEYHHHHAPMATIGGLRDSQGSQNSVQTEALARFAVDEHNKKQXVVRTQEQVVAGTLHHLTLEAIEAGEKKLYEAKVWVKPWLNFKELQEFKPAGDVPSFTSADLGVKKDGHQPGWQSVPTHDPQVQDAANHAIKTIQQRSNSLVPYELHEVADAKAEVIDDFAKFNLLLKVKRGQKEEKFKVEVHKNNQGGFHLNQMEQDHS

SEQ ID NO: 4610 - protein, 140 aa, Glycine max
  unsure (1)..(140): unsure at all Xaa locations
MAMLGGVRDVPSNENSVEVESLARFAVDEHNKKENALLEFARVVKAKEQVVAGTMHHLTLEIIEAGKKKLYEAKVWVKPWLNFKELQEFKPSTTITPSDLGCKKGEGASGWREVPGDDPEVQHVADHAVKSIQQRSNSLX

SEQ ID NO: 4611 - protein, 124 aa, Glycine max
  unsure (1)..(124): unsure at all Xaa locations
MRVAATRPAXXPLPXALLAALALLFLVGSASLAIGAMASHVLGGKSENPAAANSLETDGLARFAVDEHNKRENALLEFVRVVEAKEQTVAGTLHHLTLEALEAGRKKVYEAKVWVKPWLDFKEL

SEQ ID NO: 4612 - protein, 97 aa, Glycine max
MAALGGNRDVTGSQNSVEIDALARFAVEEHNKKQNALLEFEKVVTAKQQVVSGTLYTITLEAKDGGQKKVYEAKVWEKSWLNFKEVQEFKLVGDAPA

SEQ ID NO: 4613 - protein, 97 aa, Glycine max; identical to SEQ ID NO: 4612

SEQ ID NO: 4614 - protein, 97 aa, Glycine max
MAALGGNRDVAGSQNSLEIDGLARFAVEEHNKKQNALLEFEKVVSAKQQVVSGTLYTITLEAKDGGQKKVYEAKVWEKAWLNFKEVQEFKLVGDAPA

SEQ ID NO: 4615 - protein, 97 aa, Glycine max; identical to SEQ ID NO: 4614

SEQ ID NO: 4616 - protein, 92 aa, Glycine max
GNRDVTGSQNSVEIDALARFAVEEHNKKQNALLEFEKVVTAKQQVVSGTLYTITLEAKDGGQKKVYEAKVWEKSWLNFKEVQEFKLVGDAPA

SEQ ID NO: 4617 - protein, 200 aa, Glycine max
MATETKVQELGGITDVHGAANSVEINNLARFAVEEQNKRENSVLEFVRVISAKQQVVAGVNYYITLEAKDGLIKNEYEAKVWVREWLNSKELLEFKPVNVSSTPIGGITDVTANSLEIDILARFAVDQHNKKENANLEFVGVIRAKQQVVEGFIYYITLEAKDGETKNVYETKVWVRSWLNSKEVLEFKPISINPLSVSV

SEQ ID NO: 4618 - protein, 100 aa, Glycine max
LGGFTDITGAQNSIDIENLARFAVDEHNKKENAVLEFVRVISAKKQVVSGTLYYITLEANDGVTKKVYETKVLEKPWLNIKEVQEFKPITVAVNPLSVTV

SEQ ID NO: 4619 - protein, 97 aa, Vigna unguiculata
MAALGGNRDVAGNQNSLEIDSLARFAVEEHNKKQNALLEFGRVVSAQQQVVSGTLYTITLEAKDGGQKKVYEAKVWEKPWLNFKELQEFKHVGDAPA

SEQ ID NO: 4620 - protein, 101 aa, Manihot esculenta
MATLGGIKEVEESANSVEIDNLARFAVDDYNKKQNALLEFKRVVSTKQQVVAGTMYYITLEVADGGQTKVYEAKVWEKPWLNFKEVQEFKPIGVAPSDSTA

SEQ ID NO: 4621 - protein, 250 aa, Oryza sativa (japonica cultivar-group)
MRVAATTRPASSSAAAPLPLFLLLAVAAAAAALFLVGSASLAMAGHVLGGAHDAPSAANSVETDALARFAVDEHNKRENALLEFVRVVEAKEQVVAGTLHHLTLEALEAGRKKVYEAKVWVKPWLDFKELQEFRNTGDATTFTNADLGAKKGGHEPGWRDVPVHDPVVKDAADHAVKSIQQRSNSLFPYELLEIVRAKAEVVEDFAKFDILMKLKRGNKEEKFKAEVHKNLEGAFVLNQMQQEHDESSSQ

SEQ ID NO: 4622 - protein, 235 aa, Lycopersicon esculentum
MRVIRSRAILIVLFLVSAFGLSEQGKSGGFCSEEMATLGGVHDSHGSSQNSDEIHSLAKFAVDEHNKKENAMIELARVVKAQEQTVAGKLHHLTLEVMDAGKKKLYEAKVWVKPWLNFKELQEFKHVEDVPTFTSSDLGVKQVEQNSGLKSVPVHDPVVEEAAEHAIKTIQQRSNSIHPYKLQEIVHANAEMADDSTKLHLVIKTSRGGKEEKFKVQVQHNNEGAFHLNRMEPDN

SEQ ID NO: 4623 - protein, 94 aa, Lycopersicon esculentum
GGIREAGGSENSLEINDLARFAVDEHNKKQNALLEFGKVVNVKEQVVAGTMYYITLEATEGGKKKAYEAKVWVKPWQNFKQVEDFKLIGDAATA

SEQ ID NO: 4624 - protein, 254 aa, Lycopersicon esculentum
AREKAHLEFVEVLNVKEQVVAGMMYYITLAVTDAGKKKIYEANIWVKEWEHFIKVVEFKPVSDDSVKTGDIVDVPDPNIPPLQDLARFAVQDYNKAQNAHLEYVENLNVKEQLVAGTLYYITLVATDAGKKKIYETKIWVKEWEDFKKVVEFKLVGDDSPNPGGITNVPFPNLPEFKDLARFAVQDYNKKENAHLEFVENLNVKEQVVAGIIYYITLVATDAGKKKIYETKILVKGWENFKEVQDFKLVGDAIK

SEQ ID NO: 4625 - protein, 156 aa, Lycopersicon esculentum
AHLEYVENLNVKEQLVAGTLYYITLVATDAGKKKIYETKIWVKEWEDFKKVVEFKLVGDDSPNPGGITNVPFPNLPQFKDLARFAVQDYNKKENAHLEFVENLNVKEQVVAGIIYYITLVATDAGKKKIYETKILVKGWENFKEVQEFKLVGDATK

SEQ ID NO: 4626 - protein, 282 aa, Helianthus annuus
MSLVGGFTEVKDFANSIVIDDLARFAVDEYNKKQNTLLEFRKVLNAKEQIVSGTLYYITLDAANGGIIKTYEAKVWVKKWENLKELQEFKPVDAATSVIGGITEVKDFANSLEIEDLARFAVDEHNKKQNTLLEFGKVLNAKEQIVAGKLCYITLEATDGGVKKTYEAKVWVKPWENFKELQEFKPVDAATPVIGGITEVKDFANSLVIDDLARFAVDEYSKKQNTLLEFERVLDAKQQIVAGTMYYFILEATVGGVKNTYVAKVLLKPDNSKELKEFKHLY

SEQ ID NO: 4627 - protein, 82 aa, Helianthus annuus
SLEIDELARFAVDEHNKKQNALLEFGKVVNTKEQVVAGKMYYITLEATNGGVKKTYEAKVWVKPWENFKELQEFKPVDAATS

SEQ ID NO: 4628 - protein, 279 aa, Triticum aestivum
  unsure (1)..(279): unsure at all Xaa locations
MXHMIWMPATESKPHPRTRSHREAKRNRKGLLRQSMRVAATRPAXXPLPXALLAALALLFLVGSASLAIGAMASHVLGGKSENPDAANSLETDGLARFAVDEHNKRENALLEFVRVVEAKEQTVAGTLHHLTLEALEAGRKKVYEAEVWVKPWLDFKELQEFRHTGDATSFTISDLGAKRGGHEPGWRDVPVHDPVVKDAASHAVKSIQQRSNSLLPYELVEIVRAKAEVVEDFAKFDILMKLKRGTKEEKMKAEVHKNLEGAFVLNQMQPEHDESSSQ

SEQ ID NO: 4629 - protein, 243 aa, Zea mays
  unsure (1)..(243): unsure at all Xaa locations
MRVAATRPAXXPLPXALLAALALLFLVGSASLAIGAMASHVLGGKSENPAAANSLETDGLARFAVDEHNKRENALLEFVRVVEAKEQTVAGTVHHLTLEALEAGRKKVYEAKVWVKPWLDFKELQEFRHTGDATSFTISDLGAKRGGHEPGWRDVPVHDPVVKDAASHAVKSIQQRSNSLLPYELVEIVRAKAEVVEDFAKFDILMKLKRGTKEEKMKAEVHKNLEGAFVLNQMQPEHDESSS

SEQ ID NO: 4630 - protein, 247 aa, Zea mays
MRVAATRTAAAAAAHPPSAFLLLLVLLGCASLAIGGAAMAGHVLGGVKENPAAANSAESDGLGRFAVDEHNRRENALLEFVRVVEAKEQVVAGTLHHLTLEAVEAGRKKLYEAKVWVKPWLDFKELQEFSHKGDATAFTNADLGAKEGGHEPGWREVPVEDPVVKDAAHHAVKSIQERSNSLFPYELLEILRAHAQVVEDFAKFDILMKLKRGSKEEKIKAEVHKSLEGAFVLNQHQPAEHDESSSQ

SEQ ID NO: 4631 - protein, 274 aa, Zea mays
MKMAAENGSQSSLKRIEPPDFAVLLHYQSMRVAATRAAAAAHPPSAFLLLLVLLGCASLAIGGAAMAGHVLGGVKENPAAANSAESDGLGRFAVDEHNRRENALLEFVRVVEAKEQVVAGTLHHLTLEAVEAGRKKLYEAKVWVKPWLDFKELQEFSHKGDATAFTNADLGAKQGGHEPGWREVPVEDPVVKDAAHHAVKSIQERSNSLFPYELLEILRAHAQVVEDFAKFDILMKLKRGSKEEKIKAEVHKSLEGAFVLNQHQPAEHDESSSQ

SEQ ID NO: 4632 - protein, 274 aa, Zea mays
MKMAAENGSQSNLKRIKPPDFAVLLHYQSMRVAATRAAAAAHPPSAFLLLLVLLGCASLAIGGAAMAGHVLGGVKENPAAANSAESDGLGRFAVDEHNRRENALLEFVRVVEAKEQVVAGTLHHLTLEAVEAGRKKLYEAKVWVKPWLDFKELQEFSHKGDATAFTNADLGAKQGGHEPGWREVPVEDPVVKDAAHHAVKSIQERSNSLFPYELLEILRAHAQVVEDFAKFDILMKLKRGSKEEKIKAEVHKSLEGAFVLNQHQPAEHDESSSQ

SEQ ID NO: 4633 - protein, 275 aa, Zea mays
MTHASAPRRPKQSQVNQTARLRSPPPHYQSMRVAATRAAAAAHPPSAFLLLLLLLGCASLAIGGAAMAGHVLGGVKENPAAANSAESDGLGRFAVDEHNRRENALLEFVRVVEAKEQVVAGTLHHLTLEAVEAGRKKLYEAKVWVKPWLDFKELQEFSHKGDATAFTNADLGAKQGGHEPGWREVPVEDPVVKDAAHHAVKSIQERSNSLFPYELLEILRAHAQVVEDFAKFDILMKLKRGSKEEKIKAEVHKSLEGAFVLNQHQPAEHDESSSQ

SEQ ID NO: 4634 - protein, 243 aa, Zea mays
MRVAPATRTAAAAHPPSAFLLLLGCASLAIGGAAMAGHVLGGVKENPAAANSAESDGLGRFAVDEHNRRENALLEFVRVVEAKEQVVAGTLHHLTLEAVEAGRKKLYEAKVWVKPWLDFKELQEFSHKGDATAFTNADLGAKEGGHEPGWREVPVEDPVVKDAAHHAVKSIQERSNSLFPYELLEILRAHAQVVEDFAKFDILMKLKRGSKEEKIKAEVHKSLEGAFVLNQHQPAEHAESSSQ

SEQ ID NO: 4635 - protein, 236 aa, Zea mays
  unsure (1)..(236): unsure at all Xaa locations
MRVAPATRTAAAAHPPSAFLLLLGCASLAIGGAAMAGHVLGGVKENPAAANSAESDGLGRFAVDEHNRRENALLEFVRVVEAKEQVVAGTLHHLTLEAVEAGRKKLYEAKVWVKPWLDFKELQEFSHKGDATAFTNADLGAKQGGHEPGWREVPVEDPVVKDAAHHAVKSIQERSNSLFPYELLEILRAHAQVVEDFAKFDILMKLKXXLEGAFVLNQHQPAEHDESSSQXTDVTV

SEQ ID NO: 4636 - protein, 208 aa, Zea mays
  unsure (1)..(208): unsure at all Xaa locations
XSPPREPSSLSTVSETDXALLLLRLPTCTTRGPLALEFTRAAGCHEPSVSGTLHHLTLDAVXVGWKKLYEGKVWIKSWIYFSELLQFIHKGDATDFTNVELYDKLRGHEPGWREDPKDDPVFKDAVHHAVKSIQERSNSRYPYELLEILRAHAQXVCADFARFDILMTLKRGSREDKIKAVAHKSLEGVFVLNQHQPAEHDEFSTSVN

SEQ ID NO: 4637 - protein, 157 aa, Zea mays
  unsure (1)..(157): unsure at all Xaa locations
XRVCALTRPXARAADHPPSAFLLLLLLLGCASLAIGGAXXMARHVLLGVKENLPAANSGEGGGLCRFSGGEHNRHENALMEVLRLGEAKEQVEGCTLHHLTLEAVEAGRKKLYKAKGWVKPWLDFKELQEFRHKGGXATVFTNDRLGAKQGGHDPAW

SEQ ID NO: 4638 - protein, 163 aa, Zea mays
  unsure (1)..(163): unsure at all Xaa locations
WVPRGRPGARLAVLLLLYSSTRACVLPXPTTRLATASLAIGAAMAMVGHVLGAREGEPAAANSAESDELGRFTVDEHNKRENALLEFVRVVEVKEXVVAGTLHHLTLEAIKTGKKKIYAAKVWVKPXLDFKNLQEFIHKGEVTTGTNADLSVXAPKKGTSPAY

SEQ ID NO: 4639 - protein, 140 aa, Zea mays
  unsure (1)..(140): unsure at all Xaa locations
LRCPAPLPEHVARTXTRTAGADVDHPPSAFLLLLVLLGCASLASGGAPMAGHVLGGVKENPATANSGEYDGLGRFSGDEHNRRENALLESELVMEANEQVEVGTLHHLTLEDLEAGRKKLYEALDWVKPWLDFQELQEFX

SEQ ID NO: 4640 - protein, 106 aa, Zea mays
  unsure (1)..(106): unsure at all Xaa locations
PSPLPEHALAAVHPPSAFLLLLGCASLAIVGAAMAGHVLGGVKENPVAANSAESDGLERFPVDEHNRRENALLELVRVEEAKEQVVAGTLHHLTLEAVEAGRKKLX

SEQ ID NO: 4641 - protein, 138 aa, Zea mays
  unsure (1)..(138): unsure at all Xaa locations
PDFTFLLHYQSMLVGATRTAAAVDDHPTSAFLLLLVLLGXASIAIGGAXXMAGHVLWGGKENPAGVNNAKFHRLARLADVKHNRRTNALLKIVRVVDAKEQVVAWTLNHLTLDAVXARRKKLYQAQVWGKPWLDFKEX

SEQ ID NO: 4642 - protein, 110 aa, Sandersonia aurantiaca
MATLGAPRDVPAGGENSADVEELARFAVAEHNKKENALLEFGRVVKAKEQVVAGTLHHLTVEAIDAGNKKLYEAKVWVKPWLNFKELQEFRHAGDSPSVTPADLGAKRGD

SEQ ID NO: 4643 - protein, 107 aa, Hordeum vulgare subsp. vulgare
MAEAAHGGGLRGRGVLLGGVQDAPAGRENDLETIELARFAVAEHNAKANALLEFEKLVKVRQQVVAGCMHYFTIEVKEGGAKKLYEAKVWEKAWENFKQLQEFKPAA

SEQ ID NO: 4644 - protein, 96 aa, Cucumis sativus
MSSSEIGGYVPCKDPNDPHVKDIAEWAVAEYNKSQGHHLTLVSILKCESQVVAGVNWRLVLKCKDENNGEGNYETVVWEKIWENFRQLITFDHLLT

SEQ ID NO: 4645 - protein, 122 aa, Arabidopsis thaliana
MTSKVVFLLLLSLVVLLLPLYASAAARVGGWSPISNVTDPQVVEIGEFAVSEYNKRSESGLKFETVVSGETQVVSGTNYRLKVAANDGDGVSKNYLAIVWDKPWMKFRNLTSFEPANNGRFL

SEQ ID NO: 4646 - protein, 122 aa, Arabidopsis thaliana
MTSKVVFLLLLSLVVVLLPLYASAAARVGGWSPISNVTDPQVVEIGEFAVSEYNKRSESGLKFETVVSGETQVVSGTNYRLKVAANDGDGVSKNYLAIVWDKPWMKFRNLTSFEPANNGRFL

SEQ ID NO: 4647 - protein, 117 aa, Arabidopsis thaliana
MMMKSLICLSLILLPLVSVVEGLGGGGGLGSRKPIKNVSDPDVVAVAKYAIEEHNKESKEKLVFVKVVEGTTQVVSGTKYDLKIAAKDGGGKIKNYEAVVVEKLWLHSKSLESFKAL

SEQ ID NO: 4648 - protein, 117 aa, Arabidopsis thaliana
MMMKSLICLSLILLPLVSVVEGLGGGGGLGSRKPIKNVSDPDVVAVAKYAIEEHNKESKENLVFVKVVEGTTQVVSGTKYDLKIAAKDGGGKIKNYEAVVVEKLWLHSKSLESFKAL

SEQ ID NO: 4649 - protein, 350 aa, Oryza sativa (japonica cultivar-group)
MVTDRSARSDNKPTATTTSTRSIFRKKEHGQEQSPNFLEVAALQVTRLDGPGGSTRRSLSWTNGPSHDQSPQGYPARRPVNRDASNAGAGLDLCCSPAARTGGLAISEAAISITYVCRFGAAAFAKNHCVRFGAMLCTAITVYRRRTYPPTQHTDSSDTSYNNIQRRDNHPSLASFPTLTSHKNIVHVGCVSMAARCPVGVASVLLLIVLVTVASAASGARSGGGGGGGIRELRGGGAGRRVGGRTEVRDVEGDREVQELGRFSVEEHNRRRRSRDCGDVRLEFGRVVAAQRQVVSGLKYYLRVAAAEEGAAGQNGGEPRVFDAVVVVKPWLESRTLLTFAPAADSPNES

SEQ ID NO: 4650 - protein, 107 aa, Oryza sativa
MAEEAQSHAREGGRHPRQPAGRENDLTTVELARFAVAEHNSKANAMLELERVVKVRQQVVGGFMHYLTVEVKEPGGANKLYEAKVWERAWENFKQLQDFKPLDDATA

SEQ ID NO: 4651 - protein, 107 aa, Oryza sativa; identical to SEQ ID NO: 4650

SEQ ID NO: 4652 - protein, 109 aa, Oryza sativa
  unsure (1)..(109): unsure at all Xaa locations
MAEEAQXSHAXREGGRHPRQPAGRENDLTTVELARFAVAEHNSKANAMLELERVVKVRQQVVGGFMHYLTVEVKEPGGANKLYEAKVWERAWENFKQLQDFKPLDDATA

SEQ ID NO: 4653 - protein, 106 aa, Oryza sativa
MAEEAQSHAREGGRHPRQPAGRENDLTTVELARFAVAEHNSKANAMLELERVVKVRQQVVGGFMHYLTVEVKEPGGANKLYEAKVWERAWENFKQLQDFKPLDATA

SEQ ID NO: 4654 - protein, 107 aa, Triticum aestivum
MAEAAQGGGLRGRGALLGGVQDAPAGRENDLETIELARFAVAEHNTKANALLEFERLVKVRQQVVAGCMHYFTIEVKEGGAKKLYEAKVWEKAWENFKQLQDFKPAA

SEQ ID NO: 4655 - protein, 103 aa, Triticum aestivum
MAEAAQGGGLRGRGALLGGVQDAPAGRENDLETIELARFAVAEHNTKANALLEFERLVKVRQQVVAGCMHYFTIEVKEGGAKKLYEAKVWEKAWENFKQLQDF

SEQ ID NO: 4656 - protein, 107 aa, Triticum aestivum
MAEAAQGGGLRGRGVLLGGVQDAPAGRENDLATIELARFAVAEHNTKANALLEFERLVKVRQQVVAGCMHYFTIEVKEGGAKKLYEAKVWEKAWENFKQLQDFKPAA

SEQ ID NO: 4657 - protein, 107 aa, Triticum aestivum
MAEAAQGGGLRGRGVLLGGVQDAPAGRENDLATIKLARFAVAEHNTKANALLEFERLVKVRQQVVAGCMHYFTIEVKEGGAKKLYEAKVWEKAWENFKQLQDFKPAA

SEQ ID NO: 4658 - protein, 142 aa, Zea mays
  unsure (1)..(142): unsure at all Xaa locations
RPASSVSSLLSSPFSPSLHSAAHRHRTTAAIDGXGTQXAARGXMVGDVRDAPVGRENDLEAIELARFAVAEHNSKTNAMLEFERLVKVRHQVVAGTLHHFTVEVKEAGGGEKKLYEAKVWEKAWENFKQLQSFELVGDAAVA

SEQ ID NO: 4659 - protein, 142 aa, Zea mays
  unsure (1)..(142): unsure at all Xaa locations
WPASSVSSLLSSPFSPSLHSAAHRHRTTAAIDGXGTQXAARGXMVGDVRDAPVGRENDLEAIELARFAVAEHNSKTNAMLEFERLVKVRHQVVAGTLHHFTVEVKEAGGGEKKLYEAKVWEKAWENFKQLQSFELVGDAAVA

SEQ ID NO: 4660 - protein, 177 aa, Zea mays
  unsure (1)..(177): unsure at all Xaa locations
RPGLGKKKKKKKKKKKKKKKENLETARATTSGSGRHHPSRLVSSRLSSPFPPSLHSAAHRHRTTAAIDGXGTQRXRPVMVGDVRDAPVGRENDLEAIELARFAVAEHNSKTNAMLEFERLVKVRHQVVAGTLHHFTVEVKEAGGGEKKLYEAKVWEKAWENFKQLQSFELVGDAAVA

SEQ ID NO: 4661 - protein, 158 aa, Zea mays
  unsure (1)..(158): unsure at all Xaa locations
SRPAGKKKKLLPAVVAGIIRLVSSRLSSPFPPSLHSAAHRHRTTAAIDGXGTQRAARGXMVGGVRDAPVGRENDLEAIELARFAVAEHNSKTNAMLEFERLVKVRHQVVAGTLHHFTVEVKEAGGGEKKLYEAKVWEKAWENFKQLQSFELVGDAAVA

SEQ ID NO: 4662 - protein, 155 aa, Zea mays
  unsure (1)..(155): unsure at all Xaa locations
LGTSRPAGTSGSGRIIRLVSSRLSSPFPPSLHSAAHRHRTTAAIDGXGTQRAARGXMVGGVRDAPVGRENDLEAIELARFAVAEHNSKTNAMLEFERLVKVRHQVVAGTLHHFTVEVKEAGGGEKKLYEAKVWEKAWENFKQLQSFELVGDAAVA

SEQ ID NO: 4663 - protein, 179 aa, Zea mays
  unsure (1)..(179): unsure at all Xaa locations
AGRVWEKKKKKKKKKKKKKKKKKKKKKPPPGGKGAGIIRSRLVSSRLSSPFPPSLHSAAHRHRTTAAIDGXGTQRAARGXMVGGVRDAPVGRENDLEAIELARFAVAEHNSKTNAMLEFERLVKVRHQVVAGTLHHFTVEVKEAGGGEKKLYEAKVWEKAWENFKQLQSFELVGDAAVA

SEQ ID NO: 4664 - protein, 166 aa, Zea mays
  unsure (1)..(166): unsure at all Xaa locations
SPVQIVWSQAYNTVRNIFALVNLLRQPVDEDEKRSSPFPPSLHSAAHRHRTTAAIDGXGTQRAARGXMVGGVRDAPVGRENDLEAIELARFAVAEHNSKTNAMLEFERLVKVRHQVVAGTLHHFTVEVKEAGGGEKKLYEAKVWEKAWENFKQLQSFELVGDAAVA

SEQ ID NO: 4665 - protein, 157 aa, Zea mays
  unsure (1)..(157): unsure at all Xaa locations
HWVPRGRPGLPAVVAGIIRLVSSRLSSPFPPSLHSAAHRHRTTAAIDGXGTQRAARGXMVGGVRDAPVGRENDLEAIELARFAVAEHNSKTNAMLEFERLVKVRHQVVAGTLHHFTVEVKEAGGGEKKLYEAKVWEKAWENFKQLQSFELVGDAAVA

SEQ ID NO: 4666 - protein, 693 aa, Nostoc sp. PCC 7120
MAVIGCLVLPSDVTGLGSPVSDKNFITSVKMTSINHDPTFSGNSRSTLKKRTLLFRYLAEINLIFGLWYLQWRITNSINFDALWLSIPLLLAEIYSYLGGVMFVIGLWRPLVRQIKSLDQLTPSLPQTDWPIVDVFITCYNEPPEMVEQTAQAALAIDYPPTKLYVYVLDDGNSPAMRAMTEKLCIADLQSPLLQQEANRIDAERSHLVERLQKLESFTSNIQVAEEWLSKSSSVPNQDKTTDEVLAQSLQQFIRWLSPKHHSIAERLKTERQVLAGAIRQKELELVELTRFRYIARPKPAGVPHHAKAGNLNYAIFSGETSGEFILTLDADHIPKPQFLKRVLPYFYTYNLFNGKYEQNRIAFVQTPQDFYNIPPSDPFGHRASLFYGPLQQGKDGMNAAFYTGTNAILRREALINVGLQYFADDFTKDEKRLDEFQLVGGLSSNSITEDMNTAMRLHGAGWKSVYHHELLAEGLAPDDLSSTLKQRLRWAQGTIQVLVKENPLRKSGLTFWQRLQYFKTMYSYFSGFATLIFISCPIIYFFTEIVPVKTYGTDFILHFLPTFIINRLTFVVAIWGIPASEIWRSEQYAIALFPIFIQAVWSVFTGQKMNFQVTPKERQSGIYLSMIWPQLLIFFLTIIGIFWSLYSFAIGRLNHPWVNLLNSSWAVYNLLLLSGIIRASVWQMPKYDSKKV

SEQ ID NO: 4667 - protein, 298 aa, Chloroflexus aurantiacus
EIMQSLHDEAVLAELARRDRSPLAAIETVRQLIPLLVNEAMDYLPISTISVTEDMSTSMRLHACGWRSVYHDEILAHGLAPEDLRSALQQRLRWAQGTIQVFLRENPLFLPGLSIGQRLAYLDTMWSYFSGLPTIIYLIAPVLFLIFGLLPVNALSAEFFWRLTPYLLVNQLLFAVISWGRPTWRGQQYSLALFPIWIKAVVTAAANVWFGKKLGFIVTPKTRQAGRYFGLVRWQLLMMVLLAVSIGVGLLQLALGWRTDGMPVLVNVFWAVYDLVMLSVVIDAALYQPAEESSSEYA

SEQ ID NO: 4668 - protein, 194 aa, Malva sylvestris
HVGLNANGEPFVSCHECNFPICKTCFEYDIKEGRKACLRCASPYDENLLDDVEKASGEQSMMAAQSNKSQDVGVHARHISSVSTLDSEMTEDNGNPIWKNRVESWKEKKNKKKKPTATTKADIEAEVPPEQQMEDKPAPDASQPLSTIIPIPKSKLAPYRTVIIMRLIILGLFFHYRVTNPVDSAFGLWLTSVI

SEQ ID NO: 4669 - protein, 293 aa, Corynebacterium efficiens YS-314
MEAVSKLLDALQIDRSDEAQPIQPIATISVTEDMATAMQLHSQGWRSVYHHEILARGLAPDDLRTMLTQRLRWAQGTLQVMLRDNPMVKKGLSAGQRLMYFATMWSYLSGFTAVIYLAAPVIYLVFGVMPVTAWSGDFFVRFLPYFIINQLLFLFVARGMRTWRGQQYSLALFPVWIKACWTATLNVWFGRPLDFAVTKKDGRDERGIPFRQIWPQLTAMVVLVLAMAIGVGRVIVGVADSMGTIVNVLWVIYDLVVLSVILQAAFYRGFTEPAEPEPESVGAAEISKKPEGE

SEQ ID NO: 4670 - protein, 205 aa, Gossypium raimondii
HTCGEHVGLNVNGEPFVACHECNFPICKSCFEYDLKEGRKACLRCGSPYDENLLDDVEKATGDQSTMAAHLNKSQDVGIHARHISSVSTLDSEMAEDNGNSIWKNRVESWKEKKNKKKKPATTKVEREAEIPPEQQMEDKPAPDASQPLSTIIPIPKSRLAPYRTVIIMRLIILGLFFHYRVTNPVDSAFGLWLTSVICEIWFAF

SEQ ID NO: 4671 - protein, 1129 aa, Mesotaenium caldariorum
MESSTGLVAGSRNRNQFVVIPADEEQRRNVTTPAASVCQICGDDVGLSATGELFVACVECGYPVCRPCYEYERKEGSKACPQCKTVYKRLKGSPRVPTDEEDDDIEDLENEFRGHSHVAHKSHDQHDHDHLDDVESVRSGRNTHDPYATYEPYRVQPQVPLLTDAHYETGSEYGGHTTNSDYGGHGVGSDYGGKTNPSEYSHHHHSHHQAIMVPGGQPGSDAGVHAGSFVNGDGISAKSADPKDPASFGYGSIAWKDRVDAWKQRQDKMQMTTAPGGVLVDANKGGPGGPEDPYNGGNDLPLMDESRQPLSRKVDFNMGLIQPYRLMIVIRLVVLAFFLRYRILNPAPSRPLWMTSVICEIWFAVSWILDQFPKWMPINRETYLDRLNLRFEKEGEPSQLQAVDLFVSTVDPEKEPPLTTANTLLSILSIDYPVDKVSCYLSDDGAAMLTFEALSETSEFARRWVPFVKKYNIEPRAPEMYFSQKIDYLKDKIQPSFVKERRIMKREYEEFKVRINALVSKSMKVPEDGWTMQDGTPWPGNNSRDHPGMIQVFLGPSGGLDTDGNALPRLVYVSREKRPGFNHHKKAGAMNALIRVSAVLTNAPYILNLDCDHYVNNSKALRHAMCFMMDPNVGKKVCYVQFPQRFDGIDRSDRYANHNTVFFDINLRGLDGLQGPVYVGTGCCFRRHALYGYEPKKKESSRGCCSMVFCGCCGLCGRKKEKSAVDNPLKTGKFKGSDPSLPMYNIDDLEDGDGQERESLVALKQFEKRFGQSPVFVLSTFHEEGGSVASSSASSTLKEAIHVISCGYEDKTEWGKEVGWIYGSVTEDILTGFKMHCRGWRSIYCMPKIAAFKGSAPINLSDRLQQVLRWALGSVEIFLSRHCPIWYGWSGSRLKLLQRLAYINTVVYPFTAFPLLAYCTLPAICLLTNQFIIPEISSLNSLWFIALFISIFACAFLEMRWSGVGMEEWWRNEQFWVIGGVSSHLYAVFQGLLKVLAGIDTNFTVTAKAADDGEAYADLYLFKWTSLLIPPTTLIIINLIGAVAGVANAINNGYDQWGPLFGKLFFAFWVVVHLYPFLKGLMGKSNRTPTLIIVWSVLLASIFSLLWVKINPFTNTTNGPALVQCGIRC

SEQ ID NO: 4672 - protein, 239 aa, Mesotaenium caldariorum
DQFPKWNPINRETNLGRLQLRYGDALDAVDLFVSTVDPGKEPPLTTANTLLSILAMDYPVEKLNCYLSDDGASKLTFDAVNETSGFAKKWVPFCKKFAVEPRAPEAYFAQKADFLKGQVQSSFVNERRNMKKEYEEFKVRINHLVSDFQNVPEDGWTMADGSYWPGNNARDHPGMIQVFLGPSGGKDVEGNALPRLVYVSREKRPGFNHHKKAGAMNALIRVSALLTNAPHILILDCDH

SEQ ID NO: 4673 - protein, 978 aa, Zinnia elegans
MMHPETPICNTCGEHIGFGPDGNGVFVGCHECNFPICKSCLEYEINEGHTACIQCGTPYDGNLTKVGEMEKEPVTRNTMAAHLSNSQDAGLHARNVSTVSTVDTEMTDESGNPIWKNRVESWKDKKNKKKKGGDKVAKEVQVPEDQHIEEKQQSADPNAMQPPSQIIPIPKSQITPYRIVIILRLIILGLFFHYRITNPVESSYGLWLTSVICEIWFAISWVLDQFPKWYPINRVTFTDELSARYEREGEPSELAAVDFFVSTVDPLKEPPLITANTVLSILAVDYPVEKVSCYVSDDGAAMLTFESLVETAEFARKWVPFCKKFSIEPRAPEFYFSQKIDYLKDKVQPSFVKERRAMKRDYEEYKVRVNALVAKAQKTPEEGWTMQDGTPWPGNNPRDHPGMIQVFLGHSGAHDIEGNELPRLVYVSREKRPGYQHHKKAGAENALVRVSAVLTNAPYILNLDCDHYVNNSKAVREAMCFMMDPQVGRDVCYIQFPQRFDGIDRSDRYANRNTVFFDVNMKGLDGIQGPVYVGTGCVFYRQALYGYGPQSLPTLPSPSSSSSCCCCGPKKPKKDLEEFKRDARRDDLNAAIFNLKEIESYDDYERSLLISQMSFEKTFGMSSVFIESTLMENGGLAESANPATMINEAIHVISCGYEEKTAWGKEIGWIYGSVTEDILTGFKMHCRGWRSIYCMPVRPAFKGSAPINLSDRLHQVLRWALGSVEIFLSRHCPLWYGWGGGRLKLLQRLAYINTIVYPFTSLPLVAYCTLPAICLLTGKFIIPTLSNIAAVWFLGLFLSIITTSVLEIRWSGVSIEELWRNEQFWVIGGVSAHLFAVFQGFLKMLAGVDTNFTVTAKAADDQEFGELYMIKWTTVLIPPTTLLVLNLVGVVAGFSDALNKGYEAWGPLFGKVFFAFWVILHLYPFLKGLMGRQNRTPTIVILWSVLLASVFSLVWVKIDPFVSKGDSNLTQGCIAIDC

SEQ ID NO: 4674 - protein, 205 aa, Gossypium herbaceum
HTCGEHVGLNVNGEPFVACHECNFPICKSCFEYDLKEGRKACLRCGSPYDENLLDDVEKATGDQSTMAAHLSKSQDVGIHARHISSVSTLDSEMTEDNGNPIWKNRVESWKEKKNKKKKPATTKVEREAEIPPEQQMEDKPAPDASQPLSTIIPIPKSRLAPYRTVIIMRLIILGLFFHYRVTNPVDSAFGLWLTSVICEIWFAF

SEQ ID NO: 4675 - protein, 189 aa, Gossypium longicalyx
HVGLNGNGKPFVACHDCNFPICKTCFDYELKEGRKACLRCGNPYDENLLDDVEKASGDRSTMAAHMDKSQDAGIHARHISSVSTLDSEMTEDNGNPIWKNRVESWKEKKNKKKKTSIKVEIEAQVPPEQLMEDKPAADAFQPLSTVIPIPKSRLAPYRTVIIMRLIILGLFFHYRVTNPVDSAFALWLT

SEQ ID NO: 4676 - protein, 197 aa, Gossypium longicalyx
  unsure (1)..(197): unsure at all Xaa locations
VVEHVGLNVNGEPFVACHECNFPICKSCFEYDLKEGRKACLRCGNPYDENLLDDVEKATGDQSTMAAHLSKSQDVGIHARHISSVSTLDSEMTEDNGNPIWKNRVESWKEKKNKKKKPAANKVEREAEIPPEQQMEDKPAPDASQPLSTIIPXPKSRLAPYRTVIIMRLIILGLFFHYRVTNPVDSAFGLWLTSVIW

SEQ ID NO: 4677 - protein, 197 aa, Gossypium trilobum
VVEHVGLNVNGEPFVACHECNFPICKSCFEYDLKEGRKACLRCGSPYDENLLDDVEKATGDQSTMAAHLSKSQDVGIHARHISSVSTLDSEMAEDNGNPIWKNRVESWKEKKNKKKKPATTKVEREAEIPPEQQMEDKPAPDASQPLSTIIPIPKSRLAPYRTVIIMRLIILGLFFHYRVTNPVDSAFGLWLTSVIC

SEQ ID NO: 4678 - protein, 189 aa, Gossypium trilobum
HVGLNGNGKPFVACHDCNFPICKTCFGYELKEGRKACLRCGNPYDENLLDDAEKASGDRSTIAAHMDKSQDAGIHARHISSVSTLDSEMTEDNGNPIWKNRVESWKEKKSKKKKTSIKVEIEAQVPPEQLMEDKPAADAFQPLSTVIPIPKSRLAPYRTVIIMRLIILGLFFHYRVTNPVDSAFALWLT

SEQ ID NO: 4679 - protein, 197 aa, Gossypium gossypioides
VVEHVGLNINGEPFVACHECNFPICKSCFEYDLKEGRKACLRCGSPYDENLLDDVEKATGDQSTMAAHLSKSQDVGIHARHISSVSTLDSEMAEDNGNPIWKNRVESWKEKKNKKKKPATTKVEREAEIPPEQQMEDKPAPDASQPLSTIIPIPKSRLAPYRTVIIMRLIILGLFFHYRVTNPVDSAFGLWLTSVIC

SEQ ID NO: 4680 - protein, 189 aa, Gossypium gossypioides
HVGLNGNGKPFVACHDCNFPICKTCFDYELKEGRKACLRCGNPYDENLLDDAEKASGDRSTLAAHMDKSQDAGIHARHISSVSTLDSEMTEDNGNPIWKNRVESWKETKNKKKKTSIKVEIEAQVPPEQLMEDKPAADAFQPLSTVIPIPKSRLAPYRTVIIMRLIILGLFFHYRVTNPVDSAFALWLT

SEQ ID NO: 4681 - protein, 189 aa, Gossypium turneri
HVGLNGNGKPFVACHDCNFPICKTCFDYELKEGRKACLRCGNPYDENLLDDAVKASGDRSTIAAHMDKSQDAGIHARHISSVSTLDSEMTEDNGNPIWKNRVESWKEKKNKKKKTSIKVEIEAQVPPEQLMEDKPAADAFQPLSTVIPIPKSRLAPYRTVIIMRLIILGLFFHYRVTNPVDSAFALWLT

SEQ ID NO: 4682 - protein, 197 aa, Gossypium turneri
VVEHVGLNVNGEPFVACHECNFPICKSCFEYDLKEGRKACLRCGSPYDENLLDDVEKATGDQSTMAAHLSKSQDVGIHARHISSVSTLDSERAEDNGNPIWKNRVESWKEKKNKKKKPATTKVEREAEIPPEQQMEDKPAPDASQPLSTIIPIPKSRLAPYRTVIIMRLIILGLFFHYRVTNPVDSAFGLWLTSVIC

SEQ ID NO: 4683 - protein, 197 aa, Gossypium davidsonii
VVEHVGLNVNGEPFVACHECNFPICKSCFEYDLKEGRKACLRCGSPYDENLLDDVEKATGDQSTMAAHLSKSQDVGIHARHISSVSTLDSEMAEDNGNPIWKNRVESWKEKKNKKKKPATTKVEREAEIPPEQQMEDKPAPDASQPLSTIIPISKSRLAPYRTVIIMRLIILGLFFHYRVTNPVDSAFGLWLTSVIC

SEQ ID NO: 4684 - protein, 189 aa, Gossypium davidsonii
HVGLNGNGKPFVACHDCNFPICKTCFDYELKEGRKACLRCGNPYDENLLDDAEKASGDRFTIAAHMDKSQDAGIHARHISSVSTLDSEMTEDNGNPIWKNRVESWKEKKNKKKKTSIKVEIEAQVPPEQLMEDKPAADAFQPFSTVIPIPKSRLAPYRTVIIMRLIILGLFFHYRVTNPVDSAFALWLT

SEQ ID NO: 4685 - protein, 189 aa, Gossypium schwendimanii
HVGLNGNGKPFVACHDCNFPICKTCFDYELKEGRKACLRCGNPYDENRLDDAEKASGDRSTIAAHMDKSQDAGIHARHISSVSTLDSEMTEDNGNPIWKNRVESWKEKKNKKKKTSIKVEIEAQVPPEQLMEDKPATDAFQPLSTVIPIPKSRLAPYRAVIIMRLIILGLFFHYRVTNPVGSAFALWLT

SEQ ID NO: 4686 - protein, 197 aa, Gossypium schwendimanii
VVEHVGLNVNGEPFVACHECNFPICKSCFEYDLKEGRKACLRCGSPYDENLLDDVEKATGDQSTMAAHLSKSQDVGIHARHISSVSTLDSEMTEDNGNPIWKNRVESWKEKKNKKKKPATTKVEREAEIPPEQQMEDKPAPDASQPLSTIIPIPKSRLAPYRTVIIMRLIILGLFFHYRVTNPVDSAFGLWLTSVIC

SEQ ID NO: 4687 - protein, 974 aa, Gossypium hirsutum
MMESGVPVCHTCGEHVGLNVNGEPFVACHECNFPICKSCFEYDLKEGRKACLRCGSPYDENLLDDVEKATGDQSTMAAHLNKSQDVGIHARHISSVSTLDSEMAEDNGNSIWKNRVESWKEKKNKKKKPATTKVEREAEIPPEQQMEDKPAPDASQPLSTIIPIPKSRLAPYRTVIIMRLIILGLFFHYRVTNPVDSAFGLWLTSVICEIWFAFSWVLDQFPKWYPVNRETYIDRLSARYEREGEPDELAAVDFFVSTVDPLKEPPLITANTVLSILALDYPVDKVSCYISDDGAAMLTFESLVETADFARKWVPFCKKFSIEPRAPEFYFSQKIDYLKDKVQPSFVKERRAMKRDYEEYKIRINALVAKAQKTPDEGWTMQDGTSWPGNNPRDHPGMIQVFLGYSGARDIEGNELPRLVYVSREKRPGYQHHKKAGAENALVRVSAVLTNAPFILNLDCDHYVNNSKAVREAMCFLMDPQVGRDVCYVQFPQRFDGIDRSDRYANRNTVFFDVNMKGLDGIQGPVYVGTGCVFNRQALYGYGPPSMPSFPKSSSSSCSCCCPGKKEPKDPSELYRDAKREELDAAIFNLREIDNYDEYERSMLISQTSFEKTFGLSSVFIESTLMENGGVAESANPSTLIKEAIHVISCGYEEKTAWGKEIGWIYGSVTEDILTGFKMHCRGWRSIYCMPLRPAFKGSAPINLSDRLHQVLRWALGSVEIFLSRHCPLWYGFGGGRLKWLQRLAYINTIVYPFTSLPLIAYCSLPAICLLTGKFIIPTLSNLASVLFLGLFLSIIVTAVLELRWSGVSIEDLWRNEQFWVIGGVSAHLFAVFQGFLKMLAGIDTNFTVTAKAADDADFGELYIVKWTTLLIPPTTLLIVNMVGVVAGFSDALNKGYEAWGPLFGKVFFSFWVILHLYPFLKGLMGRQNRTPTIVVLWSVLLASVFSLVWVRINPFVSTADSTTVSQSCISIDC

SEQ ID NO: 4688 - protein, 974 aa, Gossypium hirsutum
MMESGVPVCHTCGEHVGLNVNGEPFVACHECNFPICKSCFEYDLKEGRKACLRCGSPYDENLLDDVEKTTGDQSTMAAHLSKSQDVGIHARHISSVSTLDSEMTGDNGNPIWKNRVESWKEKKNKKKKPATTKVEREAEIPPEQQMEDKPAPDASQPLSTIIPIPKSRLAPYRTVIIMRLIILGLFFHYRVTHPVDSAFGLWLTSVICEIWFAFSWVLDQFPKWYPVNRETYIDRLSARYDREGEPNELAAVDFFVSTVDPLKEPPLITANTVLSILALDYPVDKVSCYISDDGAAMLTFESLVETADFARKWVPFCKKFSIEPRAPEFYFSQKIVYLKDKVQPSFVKERRAMKRDYEEYKIRINALVAKAQKTPEEGWTMQDGTPWPGNNPRDHPGMIQVFLGYSGAHDIEGNELPRLVYVSREKRPGYQHHKQAGADNALVRVSAALTNAPFILNLDCDHYVNNSKAVREAMCCLMDPQGGRDVCYVQFPQRCDGIDRSERYAKRNTVFFDVNMKGRDGSQGPVYVGTGCVCNRQALYGYGPPSMPSFPKSSSSSCSCCCPGKKEPKEPTELYRDAKREELDAAIFNLREIDNYDEYERSMLISQTSFEKTFGLSSVFIESTLMENGGVAESANPSTLIKEAIHVIGCGYEEKTAWGKEIGWIYGSVTEDILTGFKMHCRGWRSIYCMPLRPAFKGSAPINLSDRLHQVLRWALGSLEIFLSRHCPLWYGFGGGRLKWLQRLAYINTSVYPFTSLPLIAYCSLPAICLLTGKFIIPTLSNLASVLYLGLFLSIIVTAVLELRWSGVSIEDLWRNEQFWVIGGVSAHLFAVFQGFLKMLAGIDTNFTVTAKAADDADFGELYIVKWTTLLIPPTTLLIVNMVGVVAGFSDALNKGYEAWGPLFGKVFFSFWVILHLYPFLKGLMGRQNRTPTIVVLWSVLLASVFSLVWVRINPFVSTADSTTVSRANSSIDC

SEQ ID NO: 4689 - protein, 205 aa, Gossypium robinsonii
HTCGEHVGLNVNGEPFVACHECNFPICKSCFEYDLKEGRKACLRCGSPYDENLLDDVEKATGDQSTMAAHLSKSQDIGIHARHISSVSTLDSEMTEDNGNPIWKNRVESWKEKKNKKKQPATTKVEREAEIPPEQQMEDKPAPDASQPLSTIIPIPKSRLAPYRTVIIMRLIILGLFFHYRVTNPVDSAFGLWLTSVICEIWFAF

SEQ ID NO: 4690 - protein, 193 aa, Thespesia populnea
HVGLNVNGDPFVACHECNFPICKSCFEYDLKEGRKACLRCGSPYDENLLDDVEKATGDQSTTAENLSKSQDAGIHARHISSVSTLDSEMTEDNGNPIWKNRVESWKEKKNKKKKPATTKVEREAEIPPEQQMEDKPALDASQPLSTIIPIPKNRLAPYRTVIIMRLIILGLFFHYRVTNPVDSAFGLWLTSVI

SEQ ID NO: 4691 - protein, 978 aa, Populus tremuloides
MMESGAPICHTCGEQVGHDANGELFVACHECSYPMCKSCFEFEINEGRKVCLRCGSPYDENLLDDVEKKGSGNQSTMASHLNDSQDVGIHARHISSVSTVDSEMNDEYGNPIWKNRVKSCKDKENKKKKRSPKAETEPAQVPTEQQMEEKPSAEASEPLSIVYPIPRNKLTPYRAVIIMRLVILGLFFHFRITNPVDSAFGLWLTSVICEIWFAFSWVLDQFPKWNPVNRETYIERLSARYEREGEPSQLAGVDFFVSTVDPLKEPPLITANTVLSILAVDYPVDKVSCYVSDDGAAMLSFESLVETAEFARKWVPFCKKFSIEPRAPEFYFSQKIDYLKDKVQPSFVKERRAMKRDYEEYKVRVNALVAKAQKTPEEGWTMQDGTPWPGNNTRDHPGHDSGLPWEILGARDIEGNELPRLVYVSREKRPGYQHHKKAGAENALVRVSAVLTNAPYILNVDCDHYVNNSKAVREAMCILMDPQVGRDVCYVQFPQRFDGIDKSDRYANRNVVFFDVNMKGLDGIQGPVYVGTGCVFNRQALYGYGPPSMPSLRKRKDSSSCFSCCCPSKKKPAQDPAEVYRDAKREDLNAAIFNLTEIDNYDEHERSMLISQLSFEKTFGLSSVFIESTLMENGGVPESANSPPFIKEAIQVIGCGYEEKTEWGKQIGWIYGSVTEDILSGFKMHCRGWRSIYCMPVRPAFKGSAPINLSDRLHQVLRWALGSVEIFFSRHCPLWYGFGGGRLKWLQRLAYINTIVYPFTSLPLIAYCTIPAVCLLTGKFIIPTLSNLASMLFLGLFISIIVTAVLELRWSGVSIEDLWRNEQFWVIGGVSAHLFAVFQGFLKMLAGIDTNFTVTAKAAEDAEFGELYMVKWTTLLIPPTTLLIINMSGCAGFSDALNKGYEAWGPLFGKVFFAFWVILHLYPFLKGLMGRQNLTPTIVVLWSVLLASVFSLVWVKINPFVNKVDNTLVAETCISIDC

SEQ ID NO: 4692 - protein, 985 aa, Arabidopsis thaliana
MMESRSPICNTCGEEIGAKSNGEFFVACHECSFPICKACLEYEFKEGRRICLRCGNPYDENVFDDVETKTSKTQSIVPTQTNNTSQDSGIHARHISTVSTIDSELNDEYGNPIWKNRVESWKDKKDKKSKKKKKDPKATKAEQQDAQVPTQQHMEDMPPNTESGATDVLSVVIPIPRTKITSYRIVIIMRLIILALFFNYRITHPVDSAYGLWLTSVICEIWFAVSWVLDQFPKWSPINRETYIDRLSARFEREGEQSQLAAVDFFVSTVDPLKEPPLITANTVLSILALDYPVDKVSCYVSDDGAAMLSFESLVETADFARKWVPFCKKYSIEPRAPEFYFSLKIDYLRDKVQPSFVKERRAMKRDYEEFKIRMNALVAKAQKTPEEGWTMQDGTSWPGNNTRDHPGMIQVFLGYSGARDIEGNELPRLVYVSREKRPGYQHHKKAGAENALVRVSAVLTNAPFILNLDCDHYVNNSKAVREAMCFLMDPVVGQDVCFVQFPQRFDGIDKSDRYANRNIVFFDVNMRGLDGIQGPVYVGTGTVFRRQALYGYSPPSKPRILPQSSSSSCCCLTKKKQPQDPAEIYKDAKREELDAAIFNLGDLDNYDEYDRSMLISQTSFEKTFGLSTVFIESTLMENGGVPDSVNPSTLIKEAIHVISCGYEEKTEWGKEIGWIYGSITEDILTGFKMHCRGWRSIYCMPLRPAFKGSAPINLSDRLHQVLRWALGSVEIFLSRHCPLWYGCSGGRLKLLQRLAYINTIVYPFTSLPLVAYCTLPAICLLTGKFIIPTLSNLASMLFLGLFISIILTSVLELRWSGVSIEDLWRNEQFWVIGGVSAHLFAVFQGFLKMLAGLDTNFTVTSKTADDLEFGELYIVKWTTLLIPPTSLLIINLVGVVAGFSDALNKGYEAWGPLFGKVFFAFWVILHLYPFLKGLMGRQNRTPTIVILWSILLASVFSLVWVRINPFVSKTDTTSLSLNCLLIDC

SEQ ID NO: 4693 - protein, 985 aa, Arabidopsis thaliana
MMESRSPICNTCGEEIGVKSNGEFFVACHECSFPICKACLEYEFKEGRRICLRCGNPYDENVFDDVETKTSKTQSIVPTQTNNTSQDSGIHARHISTVSTIDSELNDEYGNPIWKNRVESWKDKKDKKSKKKKKDPKATKAEQHEAQIPTQQHMEDTPPNTESGATDVLSVVIPIPRTKITSYRIVIIMRLIILALFFNYRITHPVDSAYGLWLTSVICEIWFAVSWVLDQFPKWSPINRETYIDRLSARFEREGEQSQLAAVDFFVSTVDPLKEPPLITANTVLSILALDYPVDKVSCYVSDDGAAMLSFESLVETADFARKWVPFCKKYSIEPRAPEFYFSLKIDYLRDKVQPSFVKERRAMKRDYEEFKIRMNALVAKAQKTPEEGWTMQDGTSWPGNNTRDHPGMIQVFLGYSGARDIEGNELPRLVYVSREKRPGYQHHKKAGAENALVRVSAVLTNAPFILNLDCDHYVNNSKAVREAMCFLMDPVVGQDVCFVQFPQRFDGIDKSDRYANRNIVFFDVNMRGLDGIQGPVYVGTGTVFRRQALYGYSPPSKPRILPQSSSSSCCCLTKKKQPQDPSEIYKDAKREELDAAIFNLGDLDNYDEYDRSMLISQTSFEKTFGLSTVFIESTLMENGGVPDSVNPSTLIKEAIHVISCGYEEKTEWGKEIGWIYGSITEDILTGFKMHCRGWRSIYCMPLRPAFKGSAPINLSDRLHQVLRWALGSVEIFLSRHCPLWYGCSGGRLKLLQRLAYINTIVYPFTSLPLVAYCTLPAICLLTGKFIIPTLSNLASMLFLGLFISIILTSVLELRWSGVSIEDLWRNEQFWVIGGVSAHLFAVFQGFLKMLAGLDTNFTVTSKTADDLEFGELYIVKWTTLLIPPTSLLIINLVGVVAGFSDALNKGYEAWGPLFGKVFFAFWVILHLYPFLKGLMGRQNRTPTIVILWSILLASVFSLVWVRINPFVSKTDTTSLSLNCLLIDC

SEQ ID NO: 4694 - protein, 958 aa, Arabidopsis thaliana
MMESRSPICNTCGEEIGVKSNGEFFVACHECSFPICKACLEYEFKEGRRICLRCGNPYDENVFDDVETKTSKTQSIDSGIHARHISTVSTIDSELNDEYGNPIWKNRVESWKDKKDKKSKKKKKDPKATKAEQHEAQIPTQQHMEDTPPNTESGATDVLSVVIPIPRTKITSYRIVIIMRLIILALFFNYRITHPVDSAYGLWLTSVICEIWFAVSWVLDQFPKWSPINRETYIDRLSARFEREGEQSQLAAVDFFVSTVDPLKEPPLITANTVLSILALDYPVDKVSCYVSDDGAAMLSFESLVETADFARKWVPFCKKYSIEPRAPEFYFSLKIDYLRDKVQPSFVKERRAMKRDYEEFKIRMNALVAKAQKTPEEGWTMQDGTSWPGNNTRDHPGMIQVFLGYSGARDIEGNELPRLVYVSREKRPGYQHHKKAGAENALVRVSAVLTNAPFILNLDCDHYVNNSKAVREAMCFLMDPVVGQDVCFVQFPQRFDGIDKSDRYANRNIVFFDVNMRGLDGIQGPVYVGTGTVFRRQALYGYSPPSKPRILPQSSSSSCCCLTKKKQPQDPSEIYKDAKREELDAAIFNLGDLDNYDEYDRSMLISQTSFEKTFGLSTVFIESTLMENGGVPDSVNPSTLIKEAIHVISCGYEEKTEWGKEIGWIYGSITEDILTGFKMHCRGWRSIYCMPLRPAFKGSAPINLSDRLHQVLRWALGSVEIFLSRHCPLWYGCSGGRLKLLQRLAYINTIVYPFTSLPLVAYCTLPAICLLTGKFIIPTLSNLASMLFLGVSIEDLWRNEQFWVIGGVSAHLFAVFQGFLKMLAGLDTNFTVTSKTADDLEFGELYIVKWTTLLIPPTSLLIINLVGVVAGFSDALNKGYEAWGPLFGKVFFAFWVILHLYPFLKGLMGRQNRTPTIVILWSILLASVFSLVWVRINPFVSKTDTTSLSLNCLLIDC

SEQ ID NO: 4695 - protein, 939 aa, Oryza sativa (japonica cultivar-group)
MESGVPPCAACGDDAHAACRACSYALCKACLDEDAAEGRTTCARCGGEYGAPDPAHGQGAVVEEEVEESHEPAAGGVRERVTMASQLSDHQDEGVHARTMSTHARTISSVSGVGSELNDESGKPIWKNRVESWKEKKKEKKASAKKAAAKAQAPPVEEQIMDEKDLTDAYEPLSRIIPISKNKLTPYRAVIIMRLVVLGLFFHYRITNPVYSAFGLWMTSVICEIWFGFSWILDQFPKWCPINRETYVDRLIARYGDGEDSGLAPVDFFVSTVDPLKEPPLITANTVLSILAVDYPVEKISCYVSDDGSAMLTFESLAETAEFARRWVPFCKKYSIEPRAPEFYFSQKIDYLKDKIHPSFVKERRAMKRDYEEYKVRINALVAKAQKTPEEGWIMQDGTPWPGNNPRDHPGMIQVFLGETGARDFDGNELPRLVYVSREKRPGYQHHKKAGAMNALVRVSAVLTNAPYILNLDCDHYVNNSKAVREAMCFMMDPSVGRDVCYVQFPQRFDGIDRSDRYANRNVVFFDVNMKGLDGLQGPVYVGTGCCFYRQALYGYGPPSLPALPKSSVCSWCCCCCPKKKAEKSEKEMHRDSRREDLESAIFNLREIDNYDEYERSMLISQMSFEKSFGLSSVFIESTLMENGGVPESANPSTLIKEAIHVISCGYEEKTEWGKEVLRWALGSVEIFLSRHCPLWYGYGGGRLKWLQRLSYINTIVYPFTSLPLIAYCCLPAICLLTGKFIIPTLSNAATIWFLGLFISIIVTSVLELRWSGIGIEDWWRNEQFWVIGGVSAHLFAVFQGILKMIAGLDTNFTVTAKATDDTEFGELYVFKWTTVLIPPTSILVLNLVGVVAGFSDALNSGYESWGPLFGKVFFAMWVIMHLYPFLKGLMGRQNRTPTIVVLWSVLLASVFSLLWVKIDPFIGSSETTTTNSCANFDC

SEQ ID NO: 4696 - protein, 1091 aa, Nicotiana alata
MDTKGRLVAGSHNRNEFVVINADDVGRVTSVKELSGQICQICGDEIEVTVDGEPFIACNECAFPVCRQCYEYERREGNQACPQCKTRFKRIKGSPRVDGDDEDDEFDDLDHEFDYHGNPRYMSEAAFSSRLGRGTNHNASGLTTPSEVDPAALNSEIPLLTYGQEDDTISADKHALIIPPFMGRGKKVHPVPYSDSMSLPPRPMDPKKDLAVYGYGTVAWKERMEDWKKKQNDKLQVVKHGGGKGGGNDGDELDDPDLPKMDEGRQPLSRKLPISSSRLSPYRLLILVRLAVVGLFFHYRITHPVNDAYALWLISIICEIWFAVSWIFDQFPKWFPIVRETYLDRLSLRYEKEGKPSGLAPIDIFVSTVDPLKEPPLITANTVLSILAVDYPEDKVSCYVSDDGAAMLTFEALSETSEFARKWVPFCKKFNIEPRAPEWYFSQKVDYLKNKVHPSFVRERRAMKRDYEEFKVRINGLVATAQKVPEDGWTMQDGTPWPGNLVRDHPGMIQVFLGNDGVRDIEGNVLPRLIYVSREKRPGFDHHKKAGAMNALMRVSAVISNAPYLLNVDCDHYINNSKALREAMCFMMDPTSGKKICYVQFPQRFDGIDRHDRYSNRNVVFFDINMKGLDGIQGPIYVGTGCVFRRQALYGYDAPKKTKPPGKTCNCWPKWCCCCFGSRKKHKKGKTTKDNKKKTKTKEASPQIHALENIEEGIEGIDSEKATLMPQIKLEKKFGQSPVFVASTLLEDGGIPPGATSASLLKEAIHVISCGYEDKTEWGREVGWIYGSVTEDILTGFKMHCHGWRSVYCMPKRPAFKGSAPINLSDRLHQVLRWALGSVEILLSKHCPIWYGYGCGLKPLERFSYINSVVYPLTSLPLIAYCALPAVCLLTGKFIVPEISNYASILFMGLFIMIAATSVLEMQWGGVTIDDWWRNEQFWVIGGASSHLFALFQGLLKVLAGVSTSFTVTSKAADDGEFSELYLFKWTSLLIPPMTLLIINIIGVIVGISDAINNGYDSWGPLFGRLFFALWVIVHLYPFLKGVMGRQNKVPTIIVVWSILLASIFSLLWVRVNPFTARGGLVLEVCGLDCE

SEQ ID NO: 4697 - protein, 223 aa, Nicotiana tabacum
LDGIQGPVYVGTGCVFNRTALYGYEPPIKPKHKKAGLFSSCFGGSRKKSSKSSKKGSDKKKSSKNVDPTVPIFNLEDIEEGVEGAGFDYEKSLLMSQMSLEKKFGQSAVFVASTLMENGGVPQSATPETLLKEAIHVISCGYEDKSEWGSEIGWIYGSVTEDILTGFKMHARGWRSIYCMPKRPAFKGSAPINLSDRLNQVLRWALGSVEILFSRHCPIWYGY

SEQ ID NO: 4698 - protein, 161 aa, Nicotiana tabacum
  unsure (1)..(161): unsure at all Xaa locations
SDKHADGSVPVFNLEDIEEGIEGSGFDDEKXLLMSQMSLEERFGQSSVFVASTLMEYVGVPQSATPESLLKEAIHVISCGYEDRSDWGREIAWIYGSVTEDILTGFKMHARGWRSIYCMPKRPLSSSAPINLSDRLNQVLRWALGSVEILFSRHCPIWYGY

SEQ ID NO: 4699 - protein, 133 aa, Nicotiana benthamiana
LIYVSREKRPGFQHHKKAGAMSALVRVSAVLTNGPFMLNLDCDHYINNSKALREAMCFLTDPNLGKYVCYVQFPQRFDGIDRNDRYANRNTVFFDINLRGLDGIQGPVYVGTGCVFNRTALYGYEPPIKPKHK

SEQ ID NO: 4700 - protein, 944 aa, Oryza sativa
  unsure (1)..(944): unsure at all Xaa locations
MMESGVPPCAACGDDAHAACRACSYALCKACLDEDAAEGRTTCARCGGEYDNVVWDFVXXTGXRSSXARTMSTHARTISSVSGVGSELNDESGKPIWKNRVESWKEKKKEKKASAKKAAAKAQAPPVEEQIMDEKEPDAYEPLSRIIPISKNKLTPYRAVIIMRLVVLGLFFHYRITNPVYSAFGLWMTSVICEIWFGFSWILDQFPKWCPINRETYVDRLIARCVRYGEDSGLAPVDFFVSTVDPLKEPPLITANTVLSILAVDYPVEKISCYVSDDGSAMLTFESLAETAEFARRWVPFCKKYSIEPRAPEFYFSQKIDYLKDKIHPSFVKXERRAMKRDYEEYKVRINALVAKAQKTPEEGWIMQDGTPWPGNNPRDHPGMIQVFLGETGARDFDGNELPRLVYVSREKRPGYQHHKKAGAMNALVRVSAVLTNAPYILNLDCDHYVNNSKAVREAMCFMMDPSVGRDVCYVQFPQRFDGIDRSDRYANRNVVFFDVNMKGLDGLQGPVYVGTGCCFYRQALYGYGPPSLPALPKSSVCSWCCCCCPKKKAEKSEKEMHRDSRREDLESAIFNLREIDNYDEYERSMLISQMSFEKSFGLSSVFIESTLMENGGVPESANPSTLIKEAIHVISCGYEEKTEWGKEIGWIYGSVTEDILTGFKMHCRGWRSIYCMPIRPAFKGSAPINLSDRLHQVLRWALGSVEIFLSRHCPLWYGYGGGRLKWLQRLSYINTIVYPFTSLPLIAYCCLPAICLLTGKFIIPTVRCLSLYMFLGIGIEDWWRNEQFWVIGGVSAHLFAVFQGILKMIAGLDTNFTVTAKATDDTEFGELYVFKWTTVLIPPTSILVLNLVGVVAGFSDALNSGYESWGPLFGKVFFAMWVIMHLYPFLKGLMGRQNRTPTIVVLWSVLLASVFSLLWVKIDPFIGSSXXTTTTNSCANFDC

SEQ ID NO: 4701 - protein, 939 aa, Oryza sativa; identical to SEQ ID NO: 4695

SEQ ID NO: 4702 - protein, 918 aa, Oryza sativa
  unsure (1)..(918): unsure at all Xaa locations
MMESGVPPCAACGDDAHAACRACSYALCKACLDEDAAEGRTTCARCGGEYEQLERSXXLLTMLCGILWEQDEGVHARTMSTHARTISSVSGVGSELNDESGKPIWKNRVESWKEKKKEKKASAKKAAAKAQAPPVEEQIMDEKXXTDAYEPLSRIIPISKNKLTPYRAVIIMRFVVLGLFFHYGGPTPVYSAVGLWMTSVICEIWFGFSWILDQFPKWCPINRETYVDRLIARYGDGEDSGLAPVDFFVSTVDPLKEPPLITANTVLSILAVDYPVEKISCYVSDDGSAMLTFESLAETAEFARRWVPFCKKYSIEPRAPEFYFSQKIDYLKDKIHPSFVKERRAMKRDYEEYKVRINALVAKAQKTPEEGWIMQDGTPWPGNNPRDHPGMIQVFLGETGARDFDGNELPRLVYVSREKRPGYQHHKKAGAMNALVRVSAVLTNAPYILNLDCDHYVNNSKAVREAMCFMMDPSVGRDVCYVQFPQRFDGIDRSDRYANRNVVFFDVNMKGLDGLQGPVYVGTGCCFYRQALYGYGPPSLPALPKSSVCSWCCCCCPKKKAEKSEKEMHRDSRREDLESAIFNLREIDNYDEYERSMLISQMSFEKSFGLSSVFIESTLMENGGVPESANPSTLIKEAIHVISCGYEEKTEWGKEVLRWALGSVEIFLSRHCPLWYGYGGGRLKWLQRLSYINTIVYPFTSLPLIAYCCLPAICLLTGKFIIPTLSNAATIWFLGLFISIIVTSVLELRWSGIGIEDWWRNEQFWVIGGVSAHLFAVFQGILKMIAGLDTNFTVTAKATDDTEFGELYVFKWTTVLIPPTSILVLNLVGVVAGFSDALNSGYESWGPLFGKVFFAMWVIMHLYPFLKGLMGRQNRTPTIVVLWSVLLASVFSLLWVKIDPFIGSSETTTTNSCANFDC

SEQ ID NO: 4703 - protein, 860 aa, Oryza sativa
  unsure (1)..(860): unsure at all Xaa locations
MESGVPPCAACGDDAHAACRACSYALCKACLDEDAAEGRTTCARCGGEYGAPDPAHGQGAVVEEEVEESHEPAAGGVRERVTMASQLSDHQDEGVHARTMSTHARTISSVSGVGSELNDESGKPIWKNRVESWKEKKKEKKASAKKAAAKAQAPPVEEQIMDEKDLTDAYEPLSRIIPISKNKLTPYRAVIIMRLVVLGLFFHYRITNPVYSAFGLWMTSVICEIWFGFSWILDQFPKWCPINRETYVDRLIARYGDGEDSGLAPVDFFVSTVDPLKEPPLITANTVLSILAVDYPVEKISCYVSDDGSAMLTFESLAETAEFARRWVPFCKKYSIEPRAPEFYFSQKIDYLKDKIHPSFVKXERRAMXDGTPWPGNNPRDHPGMIQVFLGETGARDFDGNELPRLVYVSREKRPGYQHHKKAGAMNALVRVSAVLTNAPYILNLDCDHYVNNSKAVREAMCFMMDPSVGRDVCYVQFPQRFDGIDRSDRYANRNVVFFDKKAEKSEKEMHRDSRREDLESAIFNLREIDNYDEYERSMLISQMSFEKSFGLSSVFIESTLMENGGVPESANPSTLIKEAIHVISCGYEEKTEWGKEVLRWALGSVEIFLSRHCPLWYGYGGGRLKWLQRLSYINTIVYPFTSLPLIAYCCLPAICLLTGKFIIPTLSNAATIWFLGLFISIIVTSVLELRWSGIGIEDWWRNEQFWVIGGVSAHLFAVFQGILKMIAGLDTNFTVTAKATDDTEFGELYVFKWTTVLIPPTSILVLNLVGVVAGFSDALNSGYESWGPLFGKVFFAMWVIMHLYPFLKGLMGRQNRTPTIVVLWSVLLASVFSLLWVKIDPFIGSSETTTTNSCANFDC

SEQ ID NO: 4704 - protein, 743 aa, Oryza sativa
  unsure (1)..(743): unsure at all Xaa locations
XSRLIARYXXDGEDTGFAPVDLLIYTGDALGESSLITEHTELLLLAGGYGAEMIXGHASDDGSAMLTFESLVETAXFARRWVPFCKKYSIEARAPEFYFXQKIDYLKDKIHPSFVKERRAMKRDYEEYKVRINALVAKAQKTPEEGWIMQDGTPWPGNNPRDHPGMIQVFLGETGARDFDGNELPRLVYVSREKRPGYQHHKKAGAMNALVRVSAVLTNAPYILNLDCDHYVNNSKAVREAMCFMMDPSVGRDVCYVQFPQRFDGIDRSDRYANRNVVFFDVNMKGLDGLQGPVYVGTGCCFYRQALYGYGPPSLPALPKSSVCSWCCCCCPKKKAEKSEKEMHRDSRREDLESAIFNLREIDNYDEYERSMLISQMSFEKSFGLSSVFIESTLMENGGVPESANPSTLIKEAIHVISCGYEEKTEWGKEIGWIYGSVTEDILTGFKMHCRGWRSIYCMPIRPAFKGSAPINLSDRLHQVLRWALGSVEIFLSRHCPLWYGYGGGRLKWLQRLSYINTIVYPFTSLPLIAYCCLPAICLLTGKFIIPTLSNAATIWFLGLFISIIVTSVLELRWSGIGIEDWWRNEQFWVIGGVSAHLFAVFQGILKMIAGLDTNFTVTAKATDDTEFGELYVFKWTTVLIPPTSILVLNLVGVVAGFSDALNSGYESWGPLFGKVFFAMWVIMHLYPFLKGLMGRQNRTPTIVVLWSVLLASVFSLLWVKIDPFIGSSXXTTTTNSCANFDC

SEQ ID NO: 4705 - protein, 924 aa, Triticum aestivum
  unsure (1)..(924): unsure at all Xaa locations
MPPARWIEAREAASERARSGRRRGRGWARRTREXGPQTERGLSGSIGNVAWKERVDGWKMKQDKGAIPMTNGTSIAPSEGRAATDIDASTEYNMEDALLNDETRQPLSRKVPIASSKINPYRMVIVLRLVVLSIFLHYRLTNPVRNAYPLWLLSVICEIWFALSWILDQFPKWFPINRETYLDRLALRYDREGEPSQLAAVDIFVSTVDPLKEPPIVTANTVLSILAVDYPVDKVSCYVSDDGASMLTFDALAETSEFARKWVPFVKKYDIEPRAPEFYFCQKIDYLKDKVQPSFVKDRRAMKREYEEFKIRINALVSKALKVPXEGWIMQDGTPWPGNNTRDHPGMIQVFLGHSGGLDTEGNELPRLVYVSREKRPGFQHHKKAGAMNALVRVSAVLTNGQYMLNLDCDHYINNSKAVREAMCFLMDPNLGPQVCYVQFPQRFDGIDRNDRYANRNTVFFDINLRGLDGIQGPVYVGTGCVFNRTALYGYEPPMKNKESGLFSKLCGGRXXSKSKRSTGSKKSDKHADGSVPVFNLEDIEEGVEGAGFDDEKSLLMSQMSLEKRFGQSSVFVASTLMEYGGVPQSATPESLLKEAIHVISCGYEDKSEWGTEIGWIYGSVTEDILTGFKMHARGWRSVYCMPKRPAFKGSAPINLSDRLNQVLRWALGSVEILFSRHCPLWYGYGGRLKFLERFAYINTTIYPLTSLPLLVYCILPAICLLTGKFIMPEISNLASIWFIALFLSIFATGILEMRWSGVGIDEWWRNEQFWVIGGISAHLFAVFQGLLKVLAGIDTNFTVTSKANDEEGDFAELYMFKWTTLLIPPTTILIINMVGVVAGTSYAINSGYQSWGPLFGKLFFAFWVIVHLYPFLKGLMGRQNRTPTIVIVWAVLLASIFSLLWVRVDPFTTRLAGPNIQTCGINC

SEQ ID NO: 4706 - protein, 948 aa, Triticum aestivum
  unsure (1)..(948): unsure at all Xaa locations
ADPPCRRRGGGPVDRAGGGEHGRGAGADEDGRGGRESKQREAGSVLWRGPAXGAFFWNGAGDGWKMKQDKGAIPMTNGXKYCSXSEGRAATDIESTEYNMEDALLNDETRQPLSRKVPIASSKINPYRMVIVLRLVVLSIFLHYRLTNPVRNAYPLWLLSVICEIWFALSWILDQFPKWFPINRETYLDRLALRYDREGEPSQLAAVDIFVSTVDPLKEPPIVTANTVLSILAVDYPVDKVSCYVSDDGASMLTFDALAETSEFARKWVPFVKKYDIEPRAPEFYFCQKIDYLKDKVQPSFVKDRRAMKREYEEFKIRINALVSKALKVPEEGWIMQDGTPWPGNNTRDHPGMIQVFLGHSGGLDTEGNELPRLVSVSREKRPGFQHHKKAGAMNALVRVSAVLTNGQYMLNLDCDHYINNSKAVREAMCFLMDPNLGPQVCYVQFPQRFDGIDRNDRYANRNTVFFDINLRGLDGIQGPVYVGTGCVFNRTAIYGYEPPIKAKKPGXXLASLCGGKKKASKSKKRSSDKKKSNKHVDSSVPVFNLEDIEEGVSGFDDEKSVLMSQMSLEKRFGQSAAFVASTLMECGGVPQSSTPESLLKEAIHVISCGYEDKSEWGTEIGWIYGSVTEDILTGFKMHARGWRSVYCMPKRPAFKGSAPINLSDRLNQVLRWALGSVEILFSRHCPLWYGYGGRLKFLERFAYINTTIYPLTSLPLLVYCILPAICLLTGKFIMPEISNLASIWFIALFLSIFATGILEMRWSGVGIDEWWRNEQFWVIGGISAHLFAVFQGLLKVLAGIDTNFTVTSKANDEEGDFAELYMFKWTTLLIPPTTILIINMVGVVAGTSYAINSGYQSWGPLFGKLFFAFWVIVHLYPFLKGLMGRQNRTPTIVIVWAVLLASIFSLLWVRVDPFTTQNTFVNRCNRPSTVFMRLSSSFLEQRNLIGL

SEQ ID NO: 4707 - protein, 505 aa, Triticum aestivum
  unsure (1)..(505): unsure at all Xaa locations
RPPFCKKYSIEPRAPEWYFQQKIDYLKDKVVPNFVRDRRAMKREYEEFKIRINALVAKAQKVPEEGWTMQDGTPWPGNNVRDHPGMIQVFLGQSGGLDVEGNELPRLVYVSREKRPGYNHHKKAGAMNALVRVSAVLTNAPYMLNLDCDHYVNNSKAVKEAMCFMMDPLVGKKVCYVQFPQRFDSIDRHDRYANKNVVFFDINMKGLDGIQGPIYVGTGCVFRRQALYGYDAPKTKKPPSRTCNCWPKWCVCCFCFGNRKNKKKVTKPKTEKKKRLFFKKEENQSPAYALSEIDEAAAGAETQKAGIVNQQKLEKKFGQSAVFVASTLLEXGGTLRCDSPASLLKEAIHVIGCGYEDKTDWGKEIGWIYGSVTEDILTGFKMHCHGWRSIYCIPKRPAFKGSAPLNLSDRLNQVLRWALGSIEIFFSNHCPLWYGYGGGLKFLERFSYINSIVYPWTSIPLLAYCTLPAICLLTGKFITPELSNLASIWYMSLFICIFATGILEM

SEQ ID NO: 4708 - protein, 498 aa, Triticum aestivum
  unsure (1)..(498): unsure at all Xaa locations
PRVRKTCYVQFPQRFDGIDLHGRRANRNIVFFDINMKGLDGIQGPMYVGXTGCCFNRQALYGYDPVLTEADLEPNIVVKSCCGGRKKKSKSYMDNKNRMMKRTESSAPIFNMDDIEEGIEGYEDERSMLMSQKRLEKRFGQSPIFTASTFMTQGGIPPSTNPASLLKEAIHVISCGYEDKTEWGKEIGWIYGSVTEDILTGFKMHARGWISIYCMPPRPCFKGSAPINLSDRLNQVLRWALGSVEILFSRHCPIWYNYGGRLKLLERVAYINTIVYPLTSLPLIAYCVLPAICLLTNKFIIPEISNYAGMFFILMFASIFATGILELRWSGVGIEDWWRNEQFWVIGGTSAHLFAVFQGLLKVLAGIDTNFTVTSKANDEDGDFAELYVFKWTSLLIPPTTVLVINLVGMVAGISYAINSGYQSWGPLFGKLFFSIWVILHLYPFLKGLMGKQNRTPTIVIVWSILLASIFSLLWVKIDPFISDTQKAVAMGQCGVNC

SEQ ID NO: 4709 - protein, 476 aa, Triticum aestivum
  unsure (1)..(476): unsure at all Xaa locations
XTNDRYANRNTVFFDINLRGLDGIQGPVYVGTGCVFNRTALYGYEPPMKSKESGLFSKLCGGRTSKSKSTGSKKSDKHADGSVPMFNLEDIEEGIEGSGFDDEKSLLMSQMSLEKRFGQSSVFVASTLMEYGGVPQSATPESLLKEAIHVISCGYEDRSDWGREIGWIYGSVTEDILTGFKMHARGWRSIYCMPKRPAFKGSAPINLSDRLNQVLRWALGSVEILFSRHCPIWYGYGGRLKFLERFAYINTTIYPLTSIPLLIYCILPAVCLLTGKFIIPQISNIASIWFISLFISIFATGILEMRWSGVGIDEWWRNEQFWVIGGISAHLFAVFQGLLKVXLAGIDTSFTVTSKASDEDNDFAELYMFKWTTLLIPPTTILIINLVGVVAGTSYAINSGYQSWGPLFGKLFFAFWVIIHLYPFLKGLMGRQNRTPTIVVVWAILLASIFSLLWVRIDPFTTRVTGPDIQMCGINC

SEQ ID NO: 4710 - protein, 472 aa, Triticum aestivum
  unsure (1)..(472): unsure at all Xaa locations
ACLDGIQGPXIYVGTGCVFRRQALYGYDAPKTKKPPSRTCNCWPKWCVCCFCFGNRKNKKKVTKPKTEKKKRLFFKKEENQSPAYALSEIDEAAAGAETQKAGIVNQQKLEKKFGQSAVFVASTLLENGGTLRCDSPASLLKEAIHVIGCGYEDKTDWGKEIGWIYGSVTEDILTGFKMHCHGWRSIYCIPKRPAFKGSAPLNLSDRLNQVLRWALGSIEIFFSNHCPLWYGYGGGLKFLERFSYINSIVYPWTSIPLLAYCTLPAICLLTGKFITPELSNLASIWYMSLFICIFATGILEMRWARVAVDDWWRNEQFWVIGGVSAHLFAVFQGLLKVIAGVDTSFTVTTKAGDDEEFSELYTFKWTTLLIPPTTLLLLNFIGVVAGISNAINNGYESWGPLFGKLFFAFWVIVHLYPFLKGLLGRQNRTPTIVIVWSILLASIISLLWVRVNPFLAKTDGPLLEECGLDCT

SEQ ID NO: 4711 - protein, 386 aa, Triticum aestivum
  unsure (1)..(386): unsure at all Xaa locations
KKSTPRPHRNGTTTPGGKPPQPFPNSFHSFPIPLPQSPSRRRAAPRRDLLCLGAGIGIRGIWCGSEDKTXDWGKEIGWIYGSVTEDILTGFKMHCHGWRSIYCIPKRPAFKGSAPLNLSDRLNQVLRWALGSIEIFFSNHCPLWYGYGGGLKFXERFSYINSIVYPWTSIPLLAYCTLPAICLLTGKFITPELSNLASIWYMSLFICIFATGILEMRWARVAVDDWWRNEQFWVIGGVSAHLFAVFQGLLKVIAGVDTSFTVTTKAGDDEEFSELYTFKWTTLLIPPTTLLLLNFIGVVAGISNAINNGYESWGPLFGKLFFAFWVIVHLYPFLKGLLGRQNRTPTIVIVWSILLASIISLLWVRVNPFLAKTDGPLLEECGLDCT

SEQ ID NO: 4712 - protein, 302 aa, Triticum aestivum
  unsure (1)..(302): unsure at all Xaa locations
WLVSVXCEXWFALSWLLDQFPKWYPINRETYLDRLALRYDKEGRPPRLCPIDIFVSTVDPLKEPPLITADAVLSILAVDYPVDKVSCYVSDDGSAMLTFESLSETAEFARKWVPFCKKHNIEPRAPEFYFQQKIDYLKDKIQPSFVKERRAMKREYEEFKIRINALVAKAQKVPEEGWTMADGTAWPGNNPRDHPGMIQVFLGHSGGLDTDGNELPRLVYVSREKRPGFQHHKKAGAMNALIRVSAVLTNGAYLFNVDXDHYFNSSKALKEAMCFMMDPALRRKTCYVQFPQRFDGIDLHDX

SEQ ID NO: 4713 - protein, 189 aa, Gossypium anomalum
HVGLNGNGKPFVACHDCNFPICKTCFDYELKEGRKACLRCGNPYDENLLDDAEKASGDRSTMAAHMDKSQDAGIHARHISSVSALDSEMTEDNGNPIWKNRVESWKEKKNKKKKTSIKVEIEAQVPPEQLMEDKPAADAFQPLSTVIPIPKSRLAPYRTVIIMRLIILGLFFHYRVTNPVDSAFALWLT

SEQ ID NO: 4714 - protein, 197 aa, Gossypium anomalum
  unsure (1)..(197): unsure at all Xaa locations
VVEHVGLNVNGEPFVACHECNFPICKSCFEYDLKEGRKACLRCGXPYDENLLDDVEKATGDQSTMAAHLSKSQDVGIHARHISSVSTLDSEMTEDNGNPIWKNRVESWKEKKNKKKKPATTKVEREAEIPPEQQMEDKPAPDASQPLSTIIPIPKSRLAPYRTVIIMRLIILGLFFHYRVTNPVDSAFGLWLTSVIC

SEQ ID NO: 4715 - protein, 193 aa, Cienfuegosia tripartita
HVGLNVNGEPFVACHECNFPVCKSCFEYDLKEGRKACLRCGSPYDENLLDDVEKATGDHSAVAANMSKSQDLGVHARHISSVSTLDSEMTEDNGNPIWKNRVESWKEKKNKKKKPATTKVEREAEIPPEQQMEDKPATDASQPLSTIIPIPKSRLAPYRTVIIMRLIILGLFFHYRVTNPVDSAFGLWLTSVI

SEQ ID NO: 4716 - protein, 192 aa, Lebronnecia kokioides
HVGLNVNGEPFAACHECNFPICKSCFEYDLKEGRKACLRCGSPYDENLLDDVEKATGDQSTMAEHLSKSQDVGIHARHISSVSTLDSEMTEDNGNPIWKNRVESWKEKKNKKKPATTKVEREAEIPPEQQMEDKPAPDASQPLSTIIPIPKSRLAPYRTVIIMRLIILGLFFHYRVTNPVDSAFGLWLTSVI

SEQ ID NO: 4717 - protein, 192 aa, Hampea appendiculata
HVGLNVNGEPFVACHECNFPICKSCFEYDLKEGRKACLRCGSPYDENLLDDVEKATGDQSTMAEHLSKSQDVGIHARHISSVSTLDSEMTEDNGNPIWKNRVESWKEKKNKKKPATTKVERKAEIPPEQQMEDKPALDASQPLSTIIPIPKSRLAPYRTVIIMRLIILGLFFHYRVTNPVDSAFGLWLTSVI

SEQ ID NO: 4718 - protein, 187 aa, Gossypioides kirkii
HVGLNGNGEPFAFCHDCNFPICKTCLDYELKEGRKACLRCGNPYDENLLDDAEKASGDRSTMAAHMAKSQDAGIHARHISSVSTLDSEMTEDNGNPIWKNRVESWKEKKNKKKKTSIKVEIEAQVPPEQLMEDKLAADAFQPLSTVIPIPKSRLAPYRTVIIMRLIILGLFFHYRVTNPVASAFALW

SEQ ID NO: 4719 - protein, 193 aa, Gossypioides kirkii
  unsure (1)..(193): unsure at all Xaa locations
EHVGLNVNGEPFVACHECNFPICKSCFEYDLKEGRKACLRCGTPYDENLLDDVEKATGDQSTMAAQLSKPQDVGIHARHISSVSTLDSEMTEXNGNPIWKNRVESWKEKKXKKKKPATTKVEREAEXPPEQQMEDKPVPDASQPLSTIIPIPKSRLAPYRTVIILRLIILGLFFHYRVTNPVXSAFGLWLXSV

SEQ ID NO: 4720 - protein, 190 aa, Kokia drynarioides
HVGLNGNGKLFVACHDCNFPICKTCFDSELKEGRKACLRCGNPYGENLLDDAEKASGDRSTMAAHMDKSHDAGIHARHISSVSTLDSEMTEDNGNPIWKNRVESWKEKKNKKKKTSIKVEIEAQVPAEQLMEDKPRAADAFQPLSTVIPIPKSRLAPYRTVIIMRLIILGLFFHYRVTNPVDSAFALWRT

SEQ ID NO: 4721 - protein, 193 aa, Kokia drynarioides
HVGLNVNGEPFVACHECNLPICKSCFEYDLKEGRKACLRCGSTYDENLLDDVEKATGDQSTMPAQLSKSQDVGIHARHISSVSTLDSEMTEDNGNPIWKNRVESWKEKKNKKKKPAPTKVEREAEIPPEQQMEDKPVPDASQPLSTIIPIPKSRLAPYRTVIILRLIILGLFFNYRVTNPVDSAFGLWLTSVI

SEQ ID NO: 4722 - protein, 192 aa, Thespesia lampas
HVGLNVNGEPFVACHECNFPICKSCFEYDLKEGRKACLRCGSPYDENLLDDVEKATSYQSTMAEHLSKSQDVGIHARHISSVSTLDSEMTEDNGNPIWKNRVESWKEKKNKKKPATTKVEREAEIPPEQQMEDKPALDASQPLSTIIPIPKSRLAPYRTVIIMRLIILGLFFHYRVTNPVDSAFGLWLTSVI

SEQ ID NO: 4723 - protein, 197 aa, Gossypium bickii
  unsure (1)..(197): unsure at all Xaa locations
VVEHVGLNVNGEPFVACHECXFPICKSCFEYNLKEGRKACLRCGSPYDENLLDXVEKATGDQSTMAAHLTKSQDXGIHARHISSVSTLDSEMTEDNGNPIWKNRVESWKEKKNKKKKPATTKVEREAEIPPEQQMEDKPAPDASQPLSTIIPIPKSRLAPYRTVIIMRLIILGLFFHYRVTNPVDSAFGLWLTSVIC

SEQ ID NO: 4724 - protein, 189 aa, Gossypium bickii
  unsure (1)..(189): unsure at all Xaa locations
HVGSNGNGKPFVACHDCNFPICKTCFDYEFKEGRKACLRCGNPYDENLLDDAEKSSGDRSTMAAHMDKSQDAGIHARHISSVSTLDSEMTEDNGNPIWKNRVESWKEXXIXNNKTSIKVEIEAQVPHEQIMEDKPAADAFQPLSTVIPIPKSKLAPYRTVIIMRLIILGFFFHYRVTNPVDSAFALWLT

SEQ ID NO: 4725 - protein, 197 aa, Gossypium somalense
VVEHVGLNVNGEPFVACHECNFPICKSCFEYDLKEGRKACLRCGSPYDENLLDDVEKATGDQSTMAAHLSKSQDVGIHARHISSVSTLDSEMAEDNGNPIWKNRVESWKEKKNKKKKPATTKIEREAEIPPEQQMDDKPAPDASQPLSTIIPIPKSRLAPYRTVIIMRLIILGLFFHYRVTNPVDSAFGLWLTSVIC

SEQ ID NO: 4726 - protein, 189 aa, Gossypium somalense
HVGLNGNGKPFVACHDCSFPICKTCFDYELKEGRKASLLCGNPYDENLLDDAEKASGDRSTMAAHMDKSQDAGTHARHISSVSTLDSEMTEENGNPIWKNRVESWKEKKNKKKKTSIEVEIKAQVPPGQLMEDKPAADTFQSLSTVVPIPKSRLAPYRTVIIMRLIILGLFFRYRVTNPVNSAFALWLT

SEQ ID NO: 4727 - protein, 667 aa, Nostoc punctiforme
MSSVSISDNSSKFSGNSRSLLKKRTLLFRYLAEINLIFGIWYLQWRVTHSINFDALWISIPLLIAEIYSYFGGVMFVIGLWRPLVRQVKSLDQMTPPLPRSDWPTVDVFVTCYNEPPKIVEETAKAALVMDYPPTKLRVYVLDDGNSADMRAMTERLCIEDLQSPQLQQEANRIDAEHSSLLQRLKELENLTPNTQGAEQWLQTSSSEPVVNQLATEFVQSLRQFILWLPPTHQSISDSPVETLRDRLTTERKALEETIRKKELELLELSRFRYIARPKTPGVAHHAKAGNINYAIFSGQTAGNFIVTLDADHIPKQNFLKRVVPYFYTYNLSTGRYDQNQIAFVQTRQDFYNIPPGDPFGHRANLFYGPLQQGKDGMNAAFYTGTNAILRREALVSVGLQNFADEFAKDEKRLDEFDLVGGVSSNSITEDMNTAMRLHSAGWKSIYHNELLAEGLAPDDLSSTLKQRLRWAQGTIQVLVRENPLTKSGLTFWQRLQYFKTMYSYFSGFATLVFISCPIIYFFTDIVPVKTYGSDFAIHFFPAFIINRLTFLAATWGIPATEVWRSEQYAIALFPLLIQAVWSVFTGQKLNFQVTPKQRQSGIYLRLVWPQLVIFILTILGILWSLYRFAIGHLNNPLVHLLNGAWAIYNLLLLSAIIRASVWQPPK

SEQ ID NO: 4728 - protein, 1042 aa, Populus x canescens
MAGLVTGSSQTLHAKDELMPPTRQSATSKKCRVCGDEIGVKEDGEVFVACHVCGFPVCRPCYEYERSEGNQSCPQCNTRYKRHKGCPRVPGDNDDEDANFDDFDDEFQIKHHDHDESNQKNVFSHTEIEHYNEQEMHPIRPAFSSAGSVAGKDLEGDKEGYSNAEWQERVEKWKVRQEKRGLVSKDEGGNDQGEEDEYLMAEARQPLWRKIPIPSSRINPYRIVIVLRLIILCFFFRFRILTPASDAYALWLISVICEVWFGLSWILDQFPKWNPIERETYLDRLSMRFEREGEPNRLGPVDVFVSTVDPLKEPPIITANTVLSILSVDYPVDKVSCYVSDDGASMLLFDSLAETAEFARKWVPFCKKHNIEPRAPEFYFTQKIDYLKDKVHPNFVKERRAMKREYEEFKVRINALVSKAQKKPEEGWVMQDGTPWPGNITRDHPGMIQVYLGSEGALDVEGKELPRLVYVSREKRPGYNHHKKAGAMNALILVSAVLTNAPFMLNLDCDHYINNSKAVREAMCFLMDPQLGKKLCYVQFPQRFDGIDRHDRYANRNVVFFDINMKGLDGVQGPVYVGTGCVFNRQSLYGYDPPVSEKRPKMTCDCWPSWCCCCFGGSRKKSKKKGQRSLLGGLYPMKKKMMGKKYTRKASAPVFDLEEIEEGLEGYEELEKSSLMSQKSLEKRFGQSPVFIASTLMENGGVPEGTNSQSHIKEAIHVISCGYEEKTEWGKEVGWIYGSVTEDILTGFKMHCRGWRSVYCSPKRPAFKGSAPINLSDRLHQVLRWALGSIEIFLSHHCPLWYGYGGKLKLLERLAYINTIVYPFTSIPLLAYCTTPAVCLLTGKFIIPTLNNLASIWFPGPFHLNHSNICVGVGWSGVSIQDLGRNEQFWVIGGVSGHLFAVFQGFFKVLGGVDTNFTVTSKSADDAEFGELYLFKWTTLLIPPTTLIILNMVGVVAGVSARINNGYGSWGPLFGKLFFAFWVIVHLYPFLKGLMGKQNRTPTIVVLWSVLLASIFSLIWVRIDPFLPKQTGPILKQCGVEC

SEQ ID NO: 4729 - protein, 359 aa, Nostoc sp. PCC 7120
MQSTTIPSDNSPSFGQSENTTTLPFTLQDLKAAIPAECFQPNVSKSLFYFFRDVLIVGLLYAVAHYLDSWYFWPIFWLIQGTMFWALFVVGHDCGHQSFSKHKWLNDLIGHLTHTFILVPYHGWRISHRTHHKNTGNIDNDESWYPVTQSQYKEMPLGQKIGRYYVFLLAYPVYLFKRSPNKEGSHFLPSSSLFKPSEKWDVITSTVLWSCMVGLLGFLTYQWGWMWLLKYYAAPYIVFVIWLDLVTFLHHTEADLPWYRGEDWTFLKGAISSIDRNYGLVNHIHHDIGTHVAHHIFLNIPHYNLLKATEAIKPVMGEYYRKSEEPIWKSLWRSCVSCHFVPDTGGKVYYTSNNQVVNK

SEQ ID NO: 4730 - protein, 363 aa, Rhodopseudomonas palustris
MRSQDLFAMPSNMPHDAEAPASDARLWTRILAEYGTPSRSRSIAELTITALPLVALWSAAWFVYSMGHAWASLLIAIPAAGFLLRLFMIQHDCGHGAFFSKRQANDWVGRAIGVITLTPYDCWRRQHATHHATTGNLDRRGVGDLDTLTVREYSELSWWGRLKYRLYRNPLVMFGLGPAYVFLLQQRLPVGLMRDGWRPWVSAMATNAAIAGIVVTLTWFIGIKAFLLVHLPIMLLAATAGVWLFYVQHQFETTTWEHNERWSLHQAALYGSSYYDLPAPLSWFTANIGMHHVHHLASRIPYYRLPRVLHDHPELRAIGRVTLWQSFRCIPLALWDEAQRRLVSFRDVRAQKQQQATVGLATR

SEQ ID NO: 4731 - protein, 164 aa, Hordeum vulgare subsp. vulgare
RSLDSSTRKLRFALPFPMLAYPFYLWSRSPGKSGSHFHPSSDLFQPNEKNDILTSTTCWLAMAGLLAGLTAVMGPLQILKLYAVPYWIFVMWLDFVTYLHHHGHNDKLPWYRGKAWSYLRGGLTTLDRDYGWLNNIHHDIGTHVIRHLFPQIPHYHLVEATEAA

SEQ ID NO: 4732 - protein, 349 aa, Synechocystis sp.
MTATIPPLRPTETSSNPDRPIADLKLQDIIKTLPKECFEKKASKAWASVLITLGAIALGYLGIIYLPWYCLPFTWIWTGTALTGAFVVGHDCGHRSFAKKRWVNDLVGHIAFAPLIYPFHSWRLLHDHHHLHTNKIEVDNAWDPWSVEAFQASPAIVRLFYRAIRGPFWWTGSIFHWGLMHFKLSNFAERDRNKVKLSIAVVFLFAAVAFPALIITTGVWGFVKFWLMPWLVYHFWMSTFTIVHHTIPEIRFRPAEDWSAAEAQLNGTVHCDYPRWVEVLCHDINVHIPHHLSVAIPSYNLRLAHASLKQNWGPFLYERTFNWGLMQQISGQCHLYDPDNGYRTFSSLK

SEQ ID NO: 4733 - protein, 359 aa, Synechocystis sp. PCC 6803; identical to SEQ ID NO: 525

SEQ ID NO: 4734 - protein, 393 aa, Ralstonia metallidurans
MTAPSDTLSPADADAISQAPNHGTNRPKRPAKNIPLPEPIAFEAPFPNRKTIRSWLIPLGGRSTARALLLFAFDYALFAAVLAGVVLASPWWAKVGLGVLAGLIIARLFIIGHDACHQSLTDRRGLNKWLGRLTFLPSLTPYSLWEVGHNVVHHGYTNLKGFDFVWAPYSLEEFRALPRSRRILERIYRNGLGAGLYYLIEIWWFKLFFPSKRQMATRRPIFMWDCALVGAFGAVWIGALVWLAVATGQSPLLLVGTGFVLPFLIWNATVGFVLYVHHTHTSVAWYDTKAMWAKAQPFVSTTVHLRFNFGIGAALHHIMEHTAHHVDMSIPLYQLKRAQALLEHALPGRIIIEKFSWRWYFHTAHRCKLYDFKALCWTDFRGRQTSENAPTPV

SEQ ID NO: 4735 - protein, 379 aa, Arachis duranensis
MGAGGRVTKIEAQKKPLSRVPHSNPPFSVGQLKKAIPPHCFERSLFISFSYVVYDLLVAYLLFYIATTYFHKLPYPFSFLAWPIYWAIQGCILTGVWVIAHECGHHAFSKYQLVDDMVGLTLHSCLLVPYFSWKISHRRHHSNTGSLDRDEVFVPKPKSKVSWYNKYMNNPPGRAISLFITLTLGWPLYLAFNVSGRPYDRFASHYDPYAPIYSNRERLLIYVSDSSVFAVTYLLYHIATLKGLGWVVCVYGVPLLIVNGFLVTITYLQHTHASLPHYDSSEWDWLRGALATVDRDYGILNKAFHHITDTHVAHHLFSTMPHYHAMEATNAIKPILGDYYQFDGTPFYKALWREAKECLYVEPDDGASKKGVYWYKNKF

SEQ ID NO: 4736 - protein, 379 aa, Arachis ipaensis
MGAGGRVTKIEAQKKPLSRVPHSNPPFSVGQLKKAIPPHCFERSLFISFSYVVYDLLMAYLLFYIATTYFHKLPYPFSFLAWPIYWAIQGCILTGVWVIAHECGHHAFSKYQLVDDMVGLTLHSCLLVPYFSWKISHRRHHSNTGSLDRDEVFVLKPKSKVSWYNKYMNNPPGRAISLFITLTLGWPLYLAFNVSGRPYDRFASHYDPYAPIYSNRERLLIYVSDSSVFAVTYLLYHIATLKGLGWVVCVYGVPLLIVNGFLVTITYLQHTHASLPHYDSSEWDWLRGALATVDRDYGILNKAFHHITDTHVAHHLFSTMPHYHAMEATNAIKPILGDYYQFDGTPVYKALWREAKECLYVEPDDGASQKGVYWYKNKF

SEQ ID NO: 4737 - protein, 383 aa, Borago officinalis
MGGGGRMPVPTKGKKSKSDVFQRVPSEKPPFTVGDLKKVIPPHCFQRSVLHSFSYVVYDLVIAALFFYTASRYIHLQPHPLSYVAWPLYWFCQGSVLTGVWVIAHECGHHAFSDYQWLDDTVGLLLHSALLVPYFSWKYSHRRHHSNTGSLERDEVFVPKKRSGISWSSEYLNNPPGRVLVLLVQLTLGWPLYLMFNVSGRPYDRFACHFDPKSPIYNDRERLQIYISDAGIVAVMYGLYRLVAAKGVAWVVCYYGVPLLVVNGFLVLITYLQHTQPSLPHYDSSEWDWLKGALATVDRDYGFLNKVLHNITDTHVAHHLFSTMPHYHAMEATKAIKPILGDYYQCDRTPVFKAMYREVKECIYVEADEGDNKKGVFWYKNKL

SEQ ID NO: 4738 - protein, 302 aa, Brassica rapa subsp. oleifera
GDIRAAIPKHCWVKSPLRSMSYVARDICAVVALAVAAVYVDSWFFWPLYWAAQGTLFWAIFVLGHDCGHGSFSDIPLLNTAVGHILHSFILVPYHGWRISHRTHHQNHGHVENDESWVPLPEKLYKNLSHSTRMLRYTVPLPMLAYPLYLWYRSPGKEGSHYNPYSSLFAPSERKLIATSTTCWSIMLATLVYLSFLVGPVTVLKVYGVPYIIFVMWLDAVTYLHHHGHDDKLPWYRGKEWSYLRGGLTTIDRDYGIFNNIHHDIGTHVIHHLFPQIPHYHLVDATKAAKHVLGRYYREPKT

SEQ ID NO: 4739 - protein, 383 aa, Olea europaea subsp. europaea
MGAGGRMSVPPEGKKSKSDVIQRVPHSKPQFSLGDIKKAIPPHCFQRSVLRSFSYVVYDLTIASLLCYVASTYIQFLPNPLCYFGWLLYWICQGCVLTGVWVVAHECGHHAFSDYQWLDDTVGLILHSSLLVPYFSWKYSHRRHHSNTGSLERDEVFVPRVKSGIRWISKNLNNPPGRVLLLVFQLTLGWPLYLMFNVSGRHYDRFACHYNPNSPMYSDRERAQILISDAGVLAVTCGLYRLTAAKGLAWVFCVYGGPLLVVNGFLVLITYLQHTHPSLPHYDSSGWDWLRGALATVDRDWGILNKVFRNITDTHVSHHLFSTMPHYHAMEATKAIKPILWNYYQFDGTPIFKAMWREAKECIYVERDEGDQNKGVFWYNNTL

SEQ ID NO: 4740 - protein, 365 aa, Leptospira interrogans serovar lai str. 56601
MKVKNKTNHSPKETLGSVREILSDETFANPAYKGVSYFLRDLFFFVIVMVLLWNVDSWYVLPFLWFFAGMIISALFVVGHDCAHEALFKSKFLQYWIGQIAMLPSLHAYNQWGYGHNRIHHGHTIKRQADFVWHPTTKEEYSEFRIFKKLMHRFFWSIWGGGFYYMIEIWFKGMVLFTAPLKEAKRDKLIMLSFAFISSGLVFYFGASSIPGVFDIGTGLWMFTKVCLIPFIAWNYFMGITVYVHHIHSEIPWKTKEEWTPFYGQMKGTVNYHINPIMNFFFHNIFIHMPHHVHMKIPFYNLKRALNEIKVIYGDYVLERNTILGDYLKSTSLCKVIDSDTGKWMTYREAEEMSLKEKDLESIPV

SEQ ID NO: 4741 - protein, 357 aa, Trichodesmium erythraeum IMS101
MQSNTVLDQTNDTKSIELPFTLQEVKAAIPAHCFKSSLWRSLSYFFLDIGIIAGLYGIAYSLDSWFFFPFFWLMQGTMFWALFVVGHDCGHGSFSKYKWVNNLVGHLCHTPILVPFHGWRISHRTHHANTGNIETDESWYPVSESKYNMMLWYEKLFRFYLLLLAYPLYLFKRSPNREGSHFVPNSPLFRPHEKSDVLTSSALWMLMVGFLGCLTYQFGWVFLVKYYLVPYIIFVIWLDLVTFLHHTDSDIPWYRGKDWYFLKGALSSIDRDYGFINSIHHDIGTHVAHHIFLNMPHYHLKTATEAIKPILGEYYHKSSEPIWKSFINSYMNCHFVSDTGSQIYYRSAWKKPSEELS

SEQ ID NO: 4742 - protein, 493 aa, Bradyrhizobium japonicum USDA 110
MAGVSESASVLDEHRPRTYEAPAHMAGYAVPEAAADDSRFAGCVIASMPRSRVSFSSILLTLPENRRRSVNISDLRPFPSQSRCVMGGRPIRRDAGSRREQYCSAGHPGSDQYECVRGRTSELLPEASVGDNDTSSADIGNRPEMTERTPEIRATARMLARYREPDSARGVLELAITAVPLVIIWVLIWAALDHGYWFALLLEVPAAGLLVRLFMIQHDCGHGSFFRGRVANDWVGRAIGVMTLTPYDYWRHNHARHHANSGNLDHRGSGDIDTLTVREFRDQPLWGRMLYRLYRHPLVMFGVGPSYLFILKHRLPVGLMRGGWKPWLSTMGTNVAIAVLVGAMIRLVGYGPFLLVHLPIIVLAASIGVWLFYVQHQFEHTHWSHDDNWNFHDAALYGSSHYQLPGVLRWFTANIGVHHIHHLCSRIPCYRLPDVLRDHPQLAGVGRITLLQSLRTVRLTLWDEERLRLVSFGEAALTSTASPTPAAASRRGR

SEQ ID NO: 4743 - protein, 343 aa, Bacillus cereus ATCC 14579
MTLENTKNLKKQVAPFEKSTIKKSVWQLINTIVPFIILWYLAYKSLSVSYWLTLVPALLAAGFMTRIFIIFHDCTHYSFFKSRRANRIVGTCMGVLTLFPFDQWGHEHSIHHATSGNLDKRGTGDIWTLTVDEYVAAPFRLRLAYRLYRNPFVMFGLGPIYVFLLKNRFNRKGARQKERMNTYLTNIIIVAVVAILCWAIGWQSFLLVHGTIFLIAGSVGIWLFYVQHTFEDSYFEEDKDWEYVKAAVEGSSFYKLPKILQFLTGNIGFHHVHHLSPRVPNYKLEEAHNNTLPLKNVPTITLATSLQSLRFRLWDEKSNNFVSFKDVKNIIKNNVSVRVKSEL

SEQ ID NO: 4744 - protein, 436 aa, Phaeodactylum tricornutum
MGKGGQRAVAPKSATSSTGSATLSQSKEQVWTSSYNPLAKDSPELPTKGQIKAVIPKECFQRSAFWSTFYLMRDLAMAAAFCYGTSQVLSTDLPQDATLILPWALGWGVYAFWMGTILTGPWVVAHECGHGAYSDSQTFNDVVGFIVHQALLVPYFAWQYTHAKHHRRTNHLVDGESHVPSTAKDNGLGPHNERNSFYAAWHEAMGDGAFAVFQVWSHLFVGWPLYLAGLASTGKLAHEGWWLEERNAIADHFRPSSPMFPAKIRAKIALSSATELAVLAGLLYVGTQVGHLPVLLWYWGPYTFVNAWLVLYTWLQHTDPSIPHYGEGEWTWVKGALSTIDRDYGIFDFFHHTIGSTHVVHHLFHEMPWYNAGIATQKVKEFLEPQGLYNYDPTPWYKAMWRIARTCHYVESNEGVQYFKSMENVPLTKDVRNKAA

SEQ ID NO: 4745 - protein, 495 aa, Phaeodactylum tricornutum
MVRFSTAALLSLSTLTTSCIGAFQLSSPAQLPTSRLRRHTNTAPLSAVAVDSGSSDPALVGNLPLPNNNDNEDKNRRMPMMDLKGIALSGLKGQALSVRAEDFPQAKDLRAVIPKDCFEPDTAKSLGYLSVSTMGTILCSVVGANLLSVLDPSNPLTWPLWAAYGAVTGTVAMGLWVLAHECGHGAFSKNRSLQDAVGYIIHSIMLVPYFSWQRSHAVHHQYTNHMELGETHVPDRADKEGEKSLALRQFMLDSFGKDKGMKAYGGLQSFLHLIVGWPAYLLIGATGGPDRGMTNHFYPNPLSTPTQPKKELFPGNWKEKVYQSDIGIAAVVGALIAWTATSGLAPVMALYGGPLIVINAWLVLYTWLQHTDTDVPHFSSDNHNFVKGALHTIDRPYDKLDPWGIIDFLHHKIGTTHVAHHFDSTIPHYKAQIATDAIKAKFPEVYLYDPTPIPQAMWRVAKGCTAVEQRGDAWVWKNEGIEDLVEHRQSKLSSE

SEQ ID NO: 4746 - protein, 436 aa, Limnanthes douglasii
MASWVLSQYALNPLPHIFRTPRTSITSHKLTVSHTNNRATPDLTKLSLIKFRERKLGLRVSAPFQIASTTPEEEDEVAEFDPGSPPPFKLADIRAAIPKHCWVKNQWRSMSYVVRDVVIVLGLAAAAVAANSWAVWPLYWVAQGTMFWALFVLGHDCGHGSFSNNHKLNSVVGHLLHSSILVPYHGWRIRHRTHHQNHGHVENDESWHPMSEKLFRSLDKIALTFRFKAPFPMLAYPFYLWERSPGKTGSHYHPDSDLFVPSEKKDVITSTICWTTMVGLLIGLSFVMGPIQILKLYVVPYWIFVMWLDFVTYLDHHGHEDKLPWYRGEEWSYLRGGLTTLDRDYGLINNIHHDIGTHVIHHLFPQIPHYHLVEATQAAKPIFGKYYKEPAKSKPLPFHLIDVLLKSLKRDHFVPDTGDIVYYQSDPQISGSLKPE

SEQ ID NO: 4747 - protein, 396 aa, Amylomyces rouxii
MATKRNVTSNAPAAEDISISNKAVIDEAIERNWEIPNFTIKEIRDAIPAHCFRRDTFRSFTHVLHDIIIMSILAIGASYIDSIPNTYARIALWPLYWIAQGIVGTGVWVIGHECGHQAFSPSKTINNSVGYVLHTALLVPYHSWRFSHSKHHKATGHMSKDQVFVPSTRKEYGLPPREQDPEVDGPHDALDEVPLLSCIACSFNLPLAGLFISSPMSLVKITPVGLLISTPSVLSTIENQFWDVMSSTAGVLGMIGFLAYCGQVLALLLSSSTMLFPYLNVNFWLVLITYLQHTDPKLPHYRENVWNFQRGAALTVDRSYGFLLDYFHHHISDTHVAHHFFSTMPHYHAEEATVHIKKALGKHYHCDNTPVPIALWKVWKSCRFVEDEGDVVFFKN

SEQ ID NO: 4748 - protein, 396 aa, Amylomyces rouxii
MATKRNVTSNAPAAEDISISNKAVIDEAIERNWEIPNFTIKEIRDAIPAHCFRRDTFRSFTHVLHDIIIMPILAIGASYIDSIPNTYARIALWPLYWIAQGIVGTGVWVIGHECGHQAFSPSKTINNSVGYVLHTALLVPYHSWRFSHSKHHKATGHMSKDQVFVPSTRKEYGLPPREQDPEVDGPHDALDEVPLLSCIACSFNLPLAGLFISSPMSLVKITPVGLLISTPSVLSTIENQFWDVMSSTAGVLGMIGFLAYCGQVLALLLSSSTMLFPYLNVNFWLVLITYLQHTDPKLPHYRENVWNFQRGAALTVDRSYGFLLDYFHHHISDTHVAHHFFSTMPHYHAEEATVHIKKALGKHYHCDNTPVPIALWKVWKSCRFVEDEGDVVFFKN

SEQ ID NO: 4749 - protein, 196 aa, Dunaliella salina
YWVPYHGWRISHRNHHANHGHVENDESWHPTRKSVYDKMDDLGRIGRLTLPWSMFAYPFYLWKRSPGKTGSHYDPNCDLFVTKTEKEQCITSNVFLVAWLGVLAACKTQLGIPAMINLYVMPYWFFVVWLDVVTYLQHHGSHDPEEKLPWFRGEEWSYLRGGLTTLDRDYGIFSRIHHSIGIHVVHQFFPQIPHYQ

SEQ ID NO: 4750 - protein, 418 aa, Chlorella vulgaris
MVAALTTQLVCSAAIVRSARPSGLSRALPLRRRVTLRVANIAAPAEDMLVGQPAVVPPFEGGKRLANAPPFTLQDMRDAIPAECFEKDTFRSAAHLALDVGIVAALAIGAYTIGNPLVWPLYWFLQGTMFWALFVVGHDCGHQSWSNNKTLNDFVGNIVHSSIMVPYHGWRISHRTHHANHGHVENDESWHPIVKSNYEKLDKWAKLGRLLFPFPLFAYPFYLLNRSPGKNGSHYDPKSDLFTASEGPLVETSNKFQCAWIGFLAGCTVALGPLAMLNLYVLPYWVFVVWLDVVTYLHHHGPSDPEEEVPWYRGEEWSYFRGGLSTIDRDYGIFNKLHHDIGTHVVHHLFPQIPHYHLQKATEAVKPIMGDYYREPEKSPGPIPTHLFEPLRRSFARDHFVDNTGDIVFYQQDKNLKL

SEQ ID NO: 4751 - protein, 350 aa, Synechococcus sp. PCC 7002
MQSTVRSPGSRESLRQDLPFTLKDVKAAIPDYCFQPSVFRSLAYFFLDIGIIAGLYAIAAYLDSWFFYPIFWFAQGTMFWALFVVGHDCGHGSFSRSKFLNDLIGHLSHTPILVPFHGWRISHRTHHSNTGNIDTDESWYPIPESKYDQMGFAEKLVRFYAPLIAYPIYLFKRSPGRGPGSHFSPKSPLFKPAERNDIILSTAAIIAMVGFLGWFTVQFGLLAFVKFYFVPYVIFVIWLDLVTYLHHTEADIPWYRGDDWYYLKGALSTIDRDYGIFNEIHHNIGTHVAHHIFHTIPHYHLKDATEAIKPLLGDYYRVSHAPIWRSFFRSQKACHYIADQGSHLYYQPKK

SEQ ID NO: 4752 - protein, 449 aa, Picea abies
MALVLSDCCVLKTLPSLKMGSKHKPMVPQAAVPATVGLRPLPSLCLGRSFPKHKGAGTFPYGPLRRGPRLGGETGVAVPLRPTLVSDNENGEAGFDPSAPPPFTLAEIRAAIPKHCWGKNTWKSISYVVRDVAVVIGLAAAASYFNNWVFWPIYWVAQGTMFWALFVLGHDCGHGSFSSNHKLNSVIGHLTHSSILVPYHGWRISHRTHHQNHGHVENDESWHPMSKKLYNSLDETTRKLRFNIPWALLAYPFYLWGRTPGKKGSHFHPDSDLFVPSEKKDVITSTACWSAMVALLAGLTVFMGPAWIIKFYVIPYWIFVMWLDLVTYLHHHGYDEKVPWYRGKEWSYLRGGLTTIDRDYGLINNIHHDIGTHVVHHLFPQIPHYHLVEATEAVKPVLGKYYREPKQSGPLPLHLLDPLVKSMSQDHYVNDEGEIVYYQADPDIKKSRR

SEQ ID NO: 4753 - protein, 382 aa, Persea americana
MGAGGRMSVVTPSVKKDVLERVPIAKPPFTFGQLKKAIPPHCFNRSIPRSMSYVVSDLTISSILYYLATTYIPLLPSPLSYFIAWPLYWALQGCVLTGVWVIAHECGHHAFSDYSWLDDTVGLILHSFLLVPYFSWKYSHRRHHSNTGSLTSDEVFVPKPKSQMPWFSKYLNNPPGRFLTLAFSLTLGWPLYLAFNVSGRKYDRFACHFDPYGPIYSDRERLQILISDLGVLAVLCGLFRLVAVCGLGWVVCVYGVPLLIVNGFLVLITFLQHTHPSLPHYDSEEWDWLRGALATVDRDYGVLNKVFHNITDTHVAHHLFSTMPHYHAMEATKAIRPILGDYYHSDGTPVYKAMYREAKECVYVEPDEGSGVKGVFWYRNKF

SEQ ID NO: 4754 - protein, 455 aa, Betula pendula
MASWVLSECGLKPLPQVFPRPRAGPISYKPSKIRFLHSNETGTDLKFHSKRVSSGCLRERNWGLKVSAPWRVASVEGEEEREERINGVNGFKEEEEPGFDPGAPPPFNLSNIRAAIPKHCWVKDPWRSVSYVVRDVVVVFALAAAAVYLNKWFVWPLYWAAQGTMFWALFVLGHDCGHGSFSNNHKLNSVVGHLLHSSILVPYHGWRISHRTHHQNHGHVENDESWHPLPERIYKNLDNLTKSFRFNAPFPLFAYPFYLWGRSPGKTGSHFDPNSDLFVPNERKDVITSTVCWTAMAALLVGLGFVMGPGQLLKLYGVPYWVFVMWLDLVTYLHHHGHGDKLPWYRGKEWSYLRGGLTTIDRDYGLINNIHHDIGTHVIHHLFPQIPHYHLIEATEAAKPVLGKYYREPQKSLPLPFHLIGSLIRSLKQDHYVSDSGDVVYYRTDPKISGSSKLK

SEQ ID NO: 4755 - protein, 382 aa, Spinacia oleracea
MGAGGRSIPPSARKEKSDALNRVPYEKPPFTLGQIKKAIPPHCFKRSVLRSFSYVVYDFTIAFLLYYVATNYIHLLPKPFNYLAWPVYGFVQGCVLTGVWVIAHECGHHAFSDYQWLDDTVGLVLHSFLLVPYFSWKYSHRRHHSNTGSMEKDEVFVPQRKENMSWFSKYLSNPPGRILTLVVTLTLGWPLYLLFNVSGRKYERFACHYDPSSPIYSDRERLQIFISDVGISIVAFGLYHLAAAKGISWVLCVYGGPLLVVNGFLVLITFLQHTHPSLPHYDTSEWDWLRGALATADRDYGILNKVFHNITDTHVAHHLISTMPHYHAMEATKAIKPILGKYYRLDSTPVFKAMWREAKECMYVEADEDDQNKGVLWYRNKL

SEQ ID NO: 4756 - protein, 346 aa, Prunus armeniaca
KKAIPPHCFQRSVIRSFSYVFYDLTIAFLLYYIASNYIQPLSQPLSSLAWPVYWFVQGCVLTGVWVIAHECGHHAFSDYQWLDDTVGLILHSALLVPYFSWKYSHRRHHSNTGSIERDEVFVPKQKSAIGWYSKYLNNPPGRFLTLTIQLTLGWPLYLAFNVSGRHYEGFACHYHPYGPIFSDRERLQIFLSDAGVLAVVYGLYRLAVAKGLAWVVCYYGGPLMVVNGFLVLITYLQHTHPSLPHYDSSEWDWLKGALATVDRDYGILNKVFHNITDTHVAHHLFSTMPHYHAMEATKAIKPILGDYYQLDRTPVFKAMFREAKECIYIQRDEGDQKGVFWYNNKL

SEQ ID NO: 4757 - protein, 399 aa, Momordica charantia
MGGRGAIGVLRNGGGPKKKMGPGQGLGPGERITHARPPFSISQIKKAIPPHCFQRSLRRSFSYLLSDIALVSAFYYVADTYFHRLPHPLLHYLAWPVYWFCQGAVLTGMWGIAHDCGHHAFSDYQLVDDVVGFLIHSLVFVPYFSFKISHRRHHSNTSSVDRDEVFVPKPKAKMPWYFKYLTNPPARVFIIFITLTLGWPMYLTFNISGRYYGRFTSHFDPNSPIFSPKERVLVHISNAGLVATGYLLYRIAMAKGVGWLIRLYGVPLIVLNACVVLITALQHTHPSFPYYDSTEWDWLRGNLVTVDRDYGPIMNRVFHHITDTHVVHHLFPSMPHYNGKEATVAAKRILGEYYQFDGTPIWKAAWREFRECVYVEPDEDDGATSGSSSKGVFWYHNKL

SEQ ID NO: 4758 - protein, 435 aa, Arabidopsis thaliana; identical to SEQ ID NO: 361

SEQ ID NO: 4759 - protein, 435 aa, Arabidopsis thaliana
MASSVLSECGFRPLPRFYPKHTTSFASNPKPTFKFNPPLKPPSSLLNSRYGFYSKTRNWALNVATPLTTLQSPSEEDTERFDPVAPPPFNLADIRAAIPKHCWVKNPWMSMSYVVRDVAIVFGLAAVAAYFNNWLLWPLYWFAQGTMFWALFVLGHDCGHGSFSNDPRLNSVAGHLLHSSILVPYHGWRISHRTHHQNHGHVENDESWHPLPESIYKNLEKTTQMFRFTLPFPMLAYPFYLWNRSPGKQGSHYHPDSDLFLPKEKKDVLTSTACWTAMAALLVCLNFVMGPIQMLKLYGIPYWIFVMWLDFVTYLHHHGHEDKLPWYRGKEWSYLRGGLTTLDRDYGWINNIHHDIGTHVIHHLFPQIPHYHLVEATEAAKPVLGKYYREPKNSGPLPLHLLGSLIKSMKQDHFVSDTGDVVYYEADPKLNGQRT

SEQ ID NO: 4760 - protein, 446 aa, Arabidopsis thaliana; identical to SEQ ID NO: 360

SEQ ID NO: 4761 - protein, 446 aa, Arabidopsis thaliana
MANLVLSECGIRPLPRIYTTPRSNFLSNNNKFRPSLSSSSYKTSSSPLSFGLNSRDGFTRNWALNVSTPLTTPIFEESPLEEDNKQRFDPGAPPPFNLADIRAAIPKHCWVKNPWKSLSYVVRDVAIVFALAAGAAYLNNWIVWPLYWLAQGTMFWALFVLGHDCGHGSFSNDPKLNSVVGHLLHSSILVPYHGRRISHRTHHQNHGHVENDESWHPMSEKIYNTLDKPTRFFRFTLPLVMLAYPFYLWARSPGKKGSHYHPDSDLFLPKERKDVLTSTACWTAMAALLVCLNFTIGPIQMLKLYGIPYWINVMWLDFVTYLHHHGHEDKLPWYRGKEWSYLRGGLTTLDRDYGLINNIHHDIGTHVIHHLFPQIPHYHLVEATEAAKPVLGKYYREPDKSGPLPLHLLEILAKSIKEDHYVSDEGEVVYYKADPNLYGEVKVRAD

SEQ ID NO: 4762 - protein, 386 aa, Arabidopsis thaliana
MVVAMDQRTNVNGDPGAGDRKKEERFDPSAQPPFKIGDIRAAIPKHCWVKSPLRSMSYVVRDIIAVAALAIAAVYVDSWFLWPLYWAAQGTLFWAIFVLGHDCGHGSFSDIPLLNSVVGHILHSFILVPYHGWRISHRTHHQNHGHVENDESWVPLPERVYKKLPHSTRMLRYTVPLPMLAYPLYLCYRSPGKEGSHFNPYSSLFAPSERKLIATSTTCWSIMFVSLIALSFVFGPLAVLKVYGVPYIIFVMWLDAVTYLHHHGHDEKLPWYRGKEWSYLRGGLTTIDRDYGIFNNIHHDIGTHVIHHLFPQIPHYHLVDATKAAKHVLGRYYREPKTSGAIPIHLVESLVASIKKDHYVSDTGDIVFYETDPDLYVYASDKSKIN

SEQ ID NO: 4763 - protein, 163 aa, Arabidopsis thaliana
LNSRYGFYSKTRNWALNVATPLTTLQSPSEEDTERFDPGAPPPFNLADIRAAIPKHCWVKNPWMSMSYVVRDVAIVFGLAAVAAYFNNWLLWPLYWFAQGTMFWALFVLGHDCGHGSFSNDPRLNSVAGHLLHSSILVPYHGWISHRTHHQNHGHVENDESWH

SEQ ID NO: 4764 - protein, 177 aa, Arabidopsis thaliana
LSNNNKFRPSLSSSSYKTSSSPLSFGLNSRDGFTRNWALNVSTPLTTPIFEESPLEEDNKQRFDPGAPPPFNLADIRAAIPKHCWVKNPWKSLSYVVRDVAIVFALAAGAAYLNNWIVWPLYWLAQGTMFWALFVLGHDCGHGSFSNDPKLNSVVGHLLHSSILVPYHGWRISHRTH

SEQ ID NO: 4765 - protein, 429 aa, Brassica juncea
MANLVLSECGIRPLPRIYTTPRSTFLSNTTFKLKPSPAFRLNGFSTKNWALNVTTPLTVDSSPPTSEEHETQRFDPGAPPPFNLADIRAAIPKHCWVKNPWKSMSYVVRDVAIVFALAAGAAYLNSWLVWPLYWLAQGTMFWALFVLGHDCGHGSFSNDPRLNSVVGHLLHSSILVPYHGWRISHRTHHQNHGHVENDESWHPMSEKIFKTLDRPTRFFRFTLPLVMLAYPFYLWARSPGKKGSHYNPDSDLFLPKERNDVLTSTACWTAMAALLVCLNFVMGPMQMLKLYGIPYWINVMWLDFVTYLHHHGHEDKLPWYRGKEWSYLRGGLTTLDRDYGVINNIHHDIGTHVIHHLFPQIPHYHLVEATEAAKPVLGKYYREPDKSGPLPLHLLGILAKSMKEDHYVSDEGDVVYYKADPNLYGEVKV

SEQ ID NO: 4766 - protein, 404 aa, Brassica napus
FKFRQSPSSPRFRLNSRNWALNVTTPLTVDSSSSPPIEEEPKTQRFDPGAPPPFNLADIRAAIPKHCWVKNPWKSMSYVVRELAIVFALAAGAAYLNNWLVWPLYWIAQGTMFWALFVLGHDCGHGSFSNDPRLNSVVGHLLHSSILVPYHGWRISHRTHHQNHGHVENDESWHPMSEKIYKSLDKPTRFFRFTLPLVMLAYPFYLWARSPGKKGSHYHPDSDLFLPKERNDVLTSTACWTAMAVLLVCLNFVMGPMQMLKLYVIPYWINVMWLDFVTYLHHHGHEDKLPWYRGKEWSYLRGGLTTLDRDYGLINNIHHDIGTHVIHHLFPQIPHYHLVEATEAAKPVLGKYYREPDKSGPLPLHLLGILAKSIKEDHFVSDEGDVVYYEADPNLYGEIKVTAE

SEQ ID NO: 4767 - protein, 172 aa, Brassica rapa
FILVPYHGWRISHRTHHQNHGHVENDESWVPLPEKLYKNLSHSTRMLRYTVPLPMLAYPLYLWYRSPGKEGSHYNPYSSLFAPSERKLIATSTTCWSIMLATLVYLSFLVGPVTVLKVYGVPYIIFVMWLDAVTYLHHHGHDDKLPWYRGKEWSYLRGGLTTIDRDYGIFNN

SEQ ID NO: 4768 - protein, 163 aa, Brassica rapa
TSFKFRQSPSSPRFRLNSRNWALNVTTPLTVDSSSSPPIEEEPKTQRFDPGAPPPFNLADIRAAIPKHCWVKNPWKSMSYVVRDVAIVFALAAGAAYLNNWLVWPLYWIAQGTMFWALFVLGHDCGHGSFSNDPRLNSVVGHLLHSSILVPYHGWRIRHRTHH

SEQ ID NO: 4769 - protein, 169 aa, Brassica oleracea
TSFKFRQSPSSSSLNLRLNSRNWALNVSTPLTVDSSSSPPIEEEPKTQRFDPGAPPPFNLADIRAAIPKHCWVKNPWKSMSYVVRDVAIVFALAAGAAYLNNWLVWPLYWIAQGTMFWALFVLGHDCGHGSFSNDPRLNSVVGHLLHSSILVPYHGWRISHRTHHQNHG

SEQ ID NO: 4770 - protein, 165 aa, Brassica oleracea
SNTTFKLKPSPAFRLNGFSTKNWAALNVTTPLTADSPPPTSEEHERQRFDPGAPPPFNLADIRAAIPKHCWVKNPWKSMSYVVRDVAIVFALAAGAAYLNSWLVWPLYWLAQGTMFWALFVLGHDCGHGSFSNDPRLNSVVGHLLHSSILVPYHGWRISHRTHHQ

SEQ ID NO: 4771 - protein, 141 aa, Brassica oleracea
LPEKLYKNLSHSTRMLRYTVPLPMLAYPLYLWYRSPGKEGSHYNPYSSLFAPSERKLIATSTTCWSIVLATLVYLSFLVGPVTVLKVYGVPYIIFVMWLDAVTYLHHHGHDDKLPWYRGKEWSYLRGGLTTVDRDYGIFNN

SEQ ID NO: 4772 - protein, 108 aa, Brassica oleracea
VVRPGAPPPFNLADIRAAIPKHCWVKNPWRSMSYVVRDVAIVFGLAAVAAYFNSWLLWPLYWFAQGTMFWALFVLGHDCGHGSFSNDPRLNSVAGHLLHSSILVPYHG

SEQ ID NO: 4773 - protein, 286 aa, Prunus persica
FVLGHDCGHGSFSNNPKLNSVVGHLLHSSILVPYHGWRISHRTHHQNHGHVENDESWHPLSEKVYKTLDKATQMLRFTLPFPMLAYPFYLWGRSPGKSGSHFDPNSDLFVPNERKDIITSTACWTAMAGLLVGLSFVMGPVQMLKLYGVPYWLFVMWLDLVTYLHHHGHEDKLPWYRGKEWSYLRGGLTTLDRDYGLINNIHHDIGTHVIHHLFPQIPHYNLVEATEAAKPVLGKYYREPKKSGPLPLHLLGVLIRSMKRDHYVSDTGDVVYYQTDKKLPGSVTSE

SEQ ID NO: 4774 - protein, 340 aa, Mesorhizobium loti
MNMISPDAAANSKRAWLKILARYKKPDRRRSAVELAITLIPFATLWALSSAAYAYGHWWGLILILPAAGFLVRIFMIQHDCGHGSFFANRYADDWIGRALGVLTLTPYDCWRRAHATHHASAGNLDERGMGDIRTLTVAEYRQLSWRGRLAYRLYRHPLVMFGLGPIWLFIFSQRLPIGMMRGGLTPWVSSMTTNLAIALAAALLIWAVGPGAFLVVHLPIVILAGSAGIWLFYVQHQFEETEWAKDDDWEFQHAALHGSSYYDLPPVLNWFTGNIGVHHVHHLSAKVPGYRLQEVLRDYPELRGIGRVTLLDSLRCVKLALWDENRRKLVSFREARATM

SEQ ID NO: 4775 - protein, 379 aa, Arachis hypogaea
MGAGGRVTKIEAQKKPLSRVPHSNPPFSVGQLKKAIPPHCFERSLFISFSYVVYDLLMAYLLFYIATTYFHKLPYPFSFLAWPIYWAIQGCILTGVWVIAHECGHHAFSKYQLVDDMVGLTLHSCLLVPYFSWKISHRRHHSNTGSLDRDEVFVPKPKSKVSWYNKYMNNPPGRAISLFITLTLGWPLYLAFNVSGRPYDRFASHYDPYAPIYSNRERLLIYVSDSSVFAVTYLLYHIATLKGLGWVVCVYGVPLLIVNGFLVTITYLQHTHASLPHYDSSEWDWLRGALATVDRDYGILNKAFHHITDTHVAHHLFSTMPHYHAMEATNAIKPILGDYYQFDGTPVYKALWREAKECLYVEPDDGASQKGVYWYKNKF

SEQ ID NO: 4776 - protein, 379 aa, Arachis hypogaea
MGAGGRVTKIEAQKKPLSRVPHSNPPFSVGQLKKAIPPHCFERSLFISFSYVVYDLLVAYLLFYIATTYFHKLPYPFSFLAWPIYWAIQGCILTGVWVIAHECGHHAFSKYQLVDDMVGLTLHSCLLVPYFSWKISHRRHHSNTGSLDRNEVFVPKPKSKVSWYNKYMNNPPGRAISLFITLTLGWPLYLAFNVSGRPYDRFASHYDPYAPIYSNRERLLIYVSDSSVFAVTYLLYHIATLKGLGWVVCVYGVPLLIVNGFLVTITYLQHTHASLPHYDSSEWDWLRGALATVDRDYGILNKAFHHITDTHVAHHLFSTMPHYHAMEATNAIKPILGDYYQFDGTPFYKALWREAKECLYVEPDDGASKKGVYWYKNKF

SEQ ID NO: 4777 - protein, 379 aa, Arachis hypogaea
MGAGGRVTKIEAQKKPLSRVPHSNPPFSVGQLKKAIPPHCFERSLFISFSYVVYDLLMAYLLFYIATTYFHKLPYPFSFLAWPIYWAIQGCILTGVWVIAHECGHHAFSKYQLVDDMVGLTLHSCLLVPYFSWKISHRRHHSNTGSLDRDEVFVPKPKSKVSWYNKYMNNPPGRAISLFITLTLGWPLYLAFNVSGRPYDRFASHYDPYAPIYSNRERLLIYVSDSSVFAVTYLLYHIATLKGLGWVVCVYGVPLLIVNGFLVTITYLQHTHASLPHYDSSEWDWLRGALATVDRDYGILNKAFHHITDTHVAHHLFSTMPHYRAMEATNAIKPILGDYYQFDGTPVYKALWREAKECLYVEPDDGASQKGVYWYKNKF

SEQ ID NO: 4778 - protein, 355 aa, Sinorhizobium meliloti
MSAHVYPPASLVEDNAGAWLKTLAKYRQPRLGRSAFELFVTLVPFAIFWAAACFSLANGFWPGLIAILPASAFLLRLFMIQHDCGHGSFFSRRGLDDWTGRLLGVLTLTPYDYWRRAHAAHHATAGNLDERGVGDITTLTITEYCALSPIKRLGYRLYRHPLVMFGIGPAWLFLFKQRLPFGMMNSGALPWISTMATNFAIVTLAALMVWAVGLGTFLLIHLPVVLLAGAAGVWLFYVQHQFEETHWSAGEDWRFPQAALHGASHYDLPPVLRWLTGNIGIHHVHHLSSRIPYYRLPEVLRDHPQLAGIGRITLWDSLKCVRLVLWDDRRRRLVSFHDAAGSLRRSLTEDGRKTK

SEQ ID NO: 4779 - protein, 380 aa, Vigna radiata var. radiata
MIQAQTLQHFGNGAREGDQSYFDPGAPPPFKIADIRAAIPKHCWEKSTLRSLSYVLRDVLVVTALAASAISFNSWFFWPLYWPAQGTMFWALFVLGHDCGHGSFSNSSKLNSFVGHILHSLILVPYNGWRISHRTHHQNHGHVEKDESWVPLTEKVYKNLDDMTRMLRYSFPFPIFAYPFYLWNRSPGKEGSHFNPYSNLFSPGERKGVVTSTLCWGIVLSVLLYLSLTIGPIFMLKLYGVPYLIFVMWLDFVTYLHHHGYTHKLPWYRGQEWSYLRGGLTTVDRDYGWINNVHHDIGTHVIHHLFPQIPHYHLVEATKSAKSVLGKYYREPQKSGPLPFHLLKYLLQSISQDHFVSDTGDIVYYQTDPKLHQDSWTKSK

SEQ ID NO: 4780 - protein, 460 aa, Ricinus communis
MAAGWVLSECGLRPLPRIYSRPRIGFTSKTTNLLKLRELPDSKSYNLCSSFKVSSWSNSKQSNWALNVAVPVNVSTVSGEDDREREEFNGIVNVDEGKGEFFDAGAPPPFTLADIRAAIPKHCWVKNPWRSMSYVLRDVVVVFGLAAVAAYFNNWVAWPLYWFCQGTMFWALFVLGHDCGHGSFSNNPKLNSVVGHLLHSSILVPYHGWRISHRTHHQNHGHVENDESWHPLSEKIFKSLDNVTKTLRFSLPFPMLAYPFYLWSRSPGKKGSHFHPDSGLFVPKERKDIITSTACWTAMAALLVYLNFSMGPVQMLKLYGIPYWIFVMWLDFVTYLHHHGHEDKLPWYRGKAWSYLRGGLTTLDRDYGWINNIHHDIGTHVIHHLFPQIPHYHLVEATEAAKPVMGKYYREPKKSGPLPLHLLGSLVRSMKEDHYVSDTGDVVYYQKDPKLSGIGGEKTE

SEQ ID NO: 4781 - protein, 413 aa, Oryza sativa (japonica cultivar-group)
MARLLLSGVAPLPLLPCRRRAIAFALPLGNVRLRLRVAAPTSRVATVEEDDNENNAPPPPCEDFDPGAAPPFGLADIRAAIPKHCWVKDPWRSMGYVLRDVVVVFALAAAAARLHSCLAWPLYWAAQGTMFWALFVLGHDCGHGSFSNNSRLNSVMGHILHSSILVPYHGWRISHRTHHQNHGHVDKDESWHPLPERLYRSLNRATRMLRFSIPFPMLAYPFYLWSRSPGKSGSHFHPSSDLFQPNERNDVLTSTACWVAMAALLAGLTFLMGPLLMLNLYFVPYWIFVMWLDFVTYLHHHGHNDKLPWYRGKEWSYLRGGLTTVDRDYGWINNIHHDIGTHVIHHLFPQIPHYHLIEATEAAKGVMGKYYREPDKSGPFPLHLFGALSRSLKRDHYVSDTGDVVYYQTDPAN

SEQ ID NO: 4782 - protein, 269 aa, Oryza sativa (japonica cultivar-group)
NNVVGHLLHSFILVPYHGWRFSHRTHHQNHGHIERDESWHPITEKLYWQLETRTKKLRFTLPFTLLAFPWYRSPGKTGSHFLPSSDLFSPKEKSDVIVSTTCWCIMISLLVALACVFGPVPVLMLYGVPYLVFVMWLDLVTYLHHHGHNDLPWYRGEEWSYLRGGLTTVDRDYGWINNIHHDIGTHVIHHLFPQIPHYHLVEATKAARPVLGRYYREPEKSGPLPLHLFGVLLRTLRVDHFVSDVGDVVYYQTDHSLNGTDWAEDAKHK

SEQ ID NO: 4783 - protein, 407 aa, Pelargonium x hortorum
IRGRCDKEKKVLLRRPPLPRLQPSFHHFCFVMEPKLAPSAYGHDDSDFDPSAPPPFRLGEIRAAIPQHCWVKSPWRSMSYVVRDIVVVFALAVAAFRLDSWLVWPIYWAVQGTMFWAIFVLGHDCGHGSFSDSHILNSVMGHILHSSILVPYHGWRISHKTHHSNHGHVENDESWVPLTEKTYKSLDVSTRLLRFTIPFPVFAYPFYLWWRSPGKKGSHFNPYSDLFAPSERRDVLTSTISWSIMVALLAGLSCVFGLVPMLKLYGGPYWIFVMWLDTVTYLHHHGHDDHKLPWYRGKEWSYLRGGLTTVDRDYGLFNNIHHDIGTHVIHHLFPQIPHYHLVEATRAAKPVLGKYYREPKRSGPFPYHLIDNLVKSIKEDHYVSDTGDIVFYETDPEQFKSDPKKLA

SEQ ID NO: 4784 - protein, 383 aa, Daucus carota
MGAGGRMSAPSNVKKTETEALRRAPHEKPPFTIGDLKKAIPAHCFEKSLITSFRYLIQDLLMAYALYYVATNYIDQYLPHPINYLGWAAYIAIQGCVLTGAWVVGHECDHDAFSDYGWINDLVGLVVHSSLMVPYFSWKISHRRHHANTQSLENDEVYVPRFKSNIRNYYKILNNPPGRVIVWLITLLIGFPIYLMFNVSGHKYERWTSHYDPHSPLYTERERKQIIVSDFAILAVLYGLYNLVLAKGFAWVFCVYGGPLLVVNGWFTLITILNHTHPSLPYYDSSEWDWLRGALCTVDRDYGILNKVFHNVCNAHVCHHIFSMIPHYHGLEATEAMKPLLGDYYQYDGTPILKAMYREMKECIYVEKDEGETKGVYWSRKDI

SEQ ID NO: 4785 - protein, 438 aa, Petroselinum crispum
MASWVISECGLRPLPRIYARPRSGASCFNSKNPVKNLRFLDENVKISMTGSRNWGLRVSVPMSVPSVSEEEERFESLVEEENEFDPGAAPPFKLSDVRAAIPKHCWVKDPVRSMSYVLRDVLIVFGLAVAASFVNNWAVWPLYWIAQGTMFWALFVLGHDCGHGSFSNDAKLNSVVGHILHSSILVPYHGWRISHRTHHQNHGHVENDESWHPLSEKLFNSLDDLTRKFRFTLPFPMLAYPFYLWGRSPGKKGSHYDPSSDLFVPNERKDVITSTVCWTAMAALLVGLNFVMGPVKMLMLYGIPYWIFVMWLDFVTYLHHHGHDDKLPWYRGKEWSYLRGGLTTLDRDYGWINNIHHDIGTHVVHHLFPQIPHYHLIEATEAAKPVFGKYYREPKKSGPVPFHLLATLWKSFKKDHFVSDTGDVVYYQAHPEIAKTQK

SEQ ID NO: 4786 - protein, 438 aa, Capsicum annuum
MASWVLSECGVRPLPRIYPKPRPGLASSTATTNINMRISPTRTDLVSRNCWALRVSAPLRIQTVGEEERDIKDRQYDEYFDPGAPPPFKLSDIRAAIPKHCWVKNPWRSMSYVVRDVAIVLGLAAAAAYLNNWVVWPLYWFAQSTMFWALFVLGHDCGHGSFSNNHKLNSVAGHILHSSILVPYHGWRISHRTHHQNHGHVENDESWHPLSEKVYNSLDYATKKLRFTLPFPLLAYPFYLWGRSPGKKGSHFDSNSDLFVPSEKKDVITSTLCWTAMAAFLVGLSFVMGPIQLLKLYVIPYWGFVMWLDIVTYLHHHGHDDKLPWYRGEEWSYLRGGLTTLDRDYGWINNIHHDIGTHVIHHLFPQIPHYHLVEATEAAKPVLGKYYKEPKKSGPLPFYLLGYLIKSMEEDHYVSDTGNVVYYQLILTFWMSEIEFLV

SEQ ID NO: 4787 - protein, 447 aa, Lycopersicon esculentum
MASWVLSECGLGPLPKIYPKPTIGFSSSVSVSATSLNLRRISPSPIRTDRNCWALRVSAPLRIQIAGEEEEQTTNNGDEFFDPGAPPPFKLSDIKAAIPNHCWVKNPWTSMSYVVRDVAIVFGLAAAAAYFNNWLVWPLYWFAQSTMFWPLYWFAQSTMFWALFALGHDCGHGSLSNNHSLNSVAGHILHSSIPVPYHGWRISHRTHHQNHGHVENDESWHPLSEKLYNSLDDITKKFRFTLPFPLLAYPFYLWGRSPGKKGSHFDPNSDLFVASEKKDVITSTVYWTAMAALLVGLSFVMGPLQMLKLYGIPYLGLCHMLDLVAYLHHHGHEDKVPWYRGEEWSYLRGGLTTLDRDYGWINNIHHDIGTHVIHHLFPQIPHYHLVEATEAAKPVLGKYYKEPKKSGPLPFYLLGYLIRSMKEDHFVSDTGNVVYYETDPNLYGSKK

SEQ ID NO: 4788 - protein, 441 aa, Nicotiana tabacum
MASWVLSECGLRPLPRIYPKPRTGAATSASSHIKLRISRTDLSGSAISLSNTNKERNWALRVSAPLRIQTVGEEESERTNNSGGEFFDPGAPPPFKLSDIKAAIPKHCWVKNPWKSMSYVVRDVAIVFGLAAAAAYFNNWVVWPLYWFAQSTMFWALFVLGHDCGHGSFSNNHKLNSVVGHILHSSILVPYHGWRISHRTHHQNHGHVENDESWHPIPEKIYNSLDLATKKLRFTLPFPLLAYPFYLWSRSPGKKGSHFDPNSDLFVPSEKKDVMTSTLCWTAMAALLVGLSFVMGPFQVLKLYGIPYWGFVMWLDLVTYLHHHGHDDKLPWYRGEEWSYLRGGLTTLDRDYGWINNIHHDIGTHVIHHLFPQIPHYHLVEATEAAKPVLGKYYKEPKKSGPLPFYLLGVLIKSMKQDHYVSDTGDIVYYRTDPQLSGFQK

SEQ ID NO: 4789 - protein, 383 aa, Solanum commersonii
MGAGGRMSAPNGETEVKRNPLQKVPTSKPPFTVGDIKKAIPPHCFQRSLIRSFSYVVYDLILVSIMYYVANTYFHLLPSPYCYIAWPIYWICQGCVCTGIWVNAHECGHHAFSDYQWVDDTVGLILHSALLVPYFSWKYSHRRHHSNTGSLERDEVFVPKPKSQLGWYSKYLNNPPGRVLSLTITLTLGWPLYLAFNVSGRPYDRFACHYDPYGPIYNNRERLQIFISDAGVLGVCYLLYRIALVKGLAWLVCVYGVPLLVVNGFLVLITYLQHTHPSLPHYDSTEWDWLRGALATCDRDYGVLNKVFHNITDTHVVHHLFSTMPHYNAMEATKAVKPLLGDYYQFDGTPIYKEMWREAKECLYVEKDESSQGKGVFWYKNKL

SEQ ID NO: 4790 - protein, 431 aa, Solanum tuberosum
MASWVLSECGLRPLPRIYPKPRIGSSSVCATNLNLRRISPSPIRTDRNCWALRVSAPLRIQIAGEEEEQTTNNGDEFDPGASPPFKLSDIKAAIPKHCWVKNPWTSMSYVVRDVAIVFGLAAAAAYFNNWLVWPLYWFAQSTMFWALFVLGHDCGHGSFSNNHNLNSVAGHILHSSILVPYHGWRISHRTHHQNHGHVENDESWHPLSEKLYNSLDDITKKFRFTLPFPLLAYPFYLWGRSPGKKGSHFDPSSDLFVASEKKDVITSTVCWTAMAALLVGLSFVMGPLQVLKLYGIPYWGFVMWLDIVTYLHHHGHEDKVPWYRGEEWSYLRGGLTTLDRDYGWINNIHHDIGTHVIHHLFPQIPHYHLVEATEAAKPVLGKYYKEPKKSGPLPFYLLGYLIKSMKEDHFVSDTGNVVYYQTDPNLYGSEK

SEQ ID NO: 4791 - protein, 447 aa, Sesamum indicum
MASWVLSECGLRPLPRVYPKPRTGHPLLNSNPTKLRFSRTDLGNGSSFCLSSGILREKNWALRVSAPLRVLQVEEEEENKEGERVINGGEEFDPGAPPPFKLSDIREAIPKHCWVKDPWRSMGYVVRDVAVVFGLAAVAAYFNNWVVWPLYWFAQSTMFWALFVLGHDCGHGSFSNDPKLNSVVGHILHSSILVPYHGWRISHRTHHQNHGHVENDESWHPLSEKIYKNLDTATKKLRFTLPFPLLAYPIYLWSRSPGKQGSHFHPDSDLFVPNEKKDVITSTVCWTAMLALLVGLSFVIGPVQLLKLYGIPYLGNVMWLDLVTYLHHHGHEDKLPWYRGKEWSYLRGGLTTLDRDYGWINNIHHDIGTHVIHHLFPQIPHYHLIEATEAAKPVLGKYYREPKKSAPLPFHLLGDLTRSLKRDHYVSDVGDVVYYQTDPQLTGAEKS

SEQ ID NO: 4792 - protein, 189 aa, Lactuca sativa
MGSGGRATQRDNSGNKVVKRAPSSKPPFTLSDIKKTIPPHCFNRSLLRSSSYLFVDLFFSFFFYYVASTYIIHLPTPLSYVAWVVYWILQGCVQMGLWVIGHECGHQAFSDYTWLNDTIGYFLHTSLLAPYFSWKYSHRRHHSNTASLEHDESFVPKKKSSLNSFARLLNTPPGRFFRLVILCTIGWLL

SEQ ID NO: 4793 - protein, 435 aa, Oryza sativa
  unsure (1)..(435): unsure at all Xaa locations
MARLVLSECCGLTPLRLXXGRGAIALPAPSSLAGGPRRPVSAAAAGGAIHRERRPGVRWRRPKPAAGEVGGXXGDGFDPGAPPPFGLAEIRAAIPKHCWVKDPWRSMSYVLRDVVVVLGLAAAAARVDSWLVWPLYWAAQGTMFWALFVLGHDCGHGSFSGGPKLNSVVGHILHSSILVPYHGWRISHRTHHQNHGHVEKDESWQPLSERRYNSPDYMTKNLRFPMXPFPMLAFPLYLFARSPGKKGSHFNPSSDLFQPNEKKDVITSTASWLAMVGILAGLTFVMGPLKMLKLYAVPYVIFVMWLDXVTYLHHHGHEDKLPWYRGKEWSYLRGGLTTLDRDYGWINNVHHDIGTHVIHHLFPQIPHYHLVEATEAAKPVLGKYYKEPEKSAPLPFHLLGVLAKSLNSDHYVSDTGDVVYYQTDLKTSSSAQSSD

SEQ ID NO: 4794 - protein, 388 aa, Oryza sativa
  unsure (1)..(388): unsure at all Xaa locations
MSASARVAAPTSRVATVEEDDNEDFDPGAAPPFGLADIRAAIPKHCWVKDPWRSMGYVLRDVVVVFALAAAAARLHSCLAWPLYWAAQGTMFWALFVLGHDCGHGSFSNNSRLNSVMGHILHSSILVPYHGWRISHRTHHQNHGHVDKDESWHPLPERLYRSLNRATRMLRFSIPFPMLAYPFYLWSRSPGKSGSHFHPSSDLFQPNERNDVLTSTACWVAMAALLAGLTFLMGPLLMLNLYFVPYWIFVMWLDFVTYLHHHGHNDKLPWYRGKEWSYLRGGLTTVDRDYGWINNIHHDIGTHVIHHLFPQIPHYHLIEATEAASVMGKYYREPDKSGPFPLHLFGALSRSLKRDHYVSDTGDVVYYQTDPANXINFTFPSILLSPEA

SEQ ID NO: 4795 - protein, 385 aa, Oryza sativa
MAASATQEADCKASEDARLFFDAAKPPPFRIGDVRAAIPAHCWRKTPLRSLSYVARDLLIVAALFAAAATRIDVSVAWAAWPLYWAAQGTMFWALFVLGHDCGHGSFSDSAMLNNVVGHLLHSFILVPYHGWRISHRTHHQNHGHIEKDESWHPITEKLYRKLETRTKKLRFTLPFPLLAFPVYLWYRSPGKTGSHFLPSSDLFSPKEKSDVIVSTTCWCIMISLLVALACVFGPVPVLMLYGVPYLVFVMWLDLVTYLHHHGHNDLPWYRGEEWSYLRGGLTTVDRDYGWINNIHHDIGTHVIHHLFPQIPHYHLVEATKAARPVLGRYYREPEKSGPLPLHLFGVLLRSLRVDHFVSDVGDVVYYQTDHSLNGTDWAEDAKHK

SEQ ID NO: 4796 - protein, 381 aa, Oryza sativa
MAASATQEADCKASEDARLFFDAAKPPPFRIGDVRAAIPVHCWRKTPLRSLSYVARDLLIVAALFAAAASSIDLAWAWAWPLYWARQGTMVWALFVLGHDCGHGSFSDSAMLNNVVGHLLHSFILVPYHGWRFSHRTHHQNHGHIERDESWHPITEKLYWQLETRTKKLRFTLPFTLLAFPWYRSPGKTGSHFLPSSDLFSPKEKSDVIVSTTCWCIMISLLVALACVFGPVPVLMLYGVPYLVFVMWLDLVTYLHHHGHNDLPWYRGEEWSYLRGGLTTVDRDYGWINNIHHDIGTHVIHHLFPQIPHYHLVEATKAARPVLGRYYREPEKSGPLPLHLFGVLLRTLRVDHFVSDVGDVVYYQTDHSLNGTDWAEDAKHK

SEQ ID NO: 4797 - protein, 381 aa, Oryza sativa; identical to SEQ ID NO: 4796

SEQ ID NO: 4798 - protein, 297 aa, Oryza sativa
MSYVLRDVVVVLGLAAAAARVDSWLVWPLYWAAQGTMFWALFVLGHDCGHGSFSSNAKLNSVVGHILHSSILVPYHGWRISHRTHHQNHGHVEKDESWQPFARSPGKKGSHFNPSSDLFQPNEKKDVITSTASWLAMVGILAGLTFVMGPLKMLKLYAVPYVIFVMWLDFVTYLHHHGHEDKLPWYRGKEWSYLRGGLTTLDRDYGWINNVHHDIGTHVIHHLFPQIPHYHLVEATEAAKPVLGKYYKEPEKSAPLPFHLLGVLAKSLNSDHYVSDTGDVVYYQTDLKTSSSAQSSD

SEQ ID NO: 4799 - protein, 308 aa, Oryza sativa
  unsure (1)..(308): unsure at all Xaa locations
MARLLLSGVAPLPLLPCRRRAIAFALPLGNVRLRSRVATVEEDDNENNAPPPPCEDFDPGAAPPFGLADIRAAIPKHCWVKDPWRSMGYVLRDVVVVFALAAAAARLHSCLAWPLYWAAQGTMFWALFVLGHDCSDLFQPNERNDVLTSTACWVAMAALLAGLTFLMGPLLMLNLYFVPYWIFVMWLDFVTYLHHHGHNDKLPWYRGKEWSYLRGGLTTVDRDYGWINNIHHDIGTHVIHHLFPQIPHYHLIEATEAASVMGKYYREPDKSGPFPLHLFGALSRSLKRDHYVSDTGDVVYYQTDPANX

SEQ ID NO: 4800 - protein, 440 aa, Triticum aestivum
  unsure (1)..(440): unsure at all Xaa locations
MARLALSDCRGLTPLRARSRGGAIALPSPPHLAAGPRRPAAAAIHRDWALRVAAPTRLASVXXEEDKRSLGGAEEAGSSSAGFNPGAPPPFGLAEIRAAIPKHCWVKDPWRSMSYVLRDVLVVLGLAAAAARVDSWLVWPLYWAAQGTMFWALFVLGHDCGHGSFSSNPKLNSVVGHILHSSILVPYNGWRISHRTHHQNHGHVEKDESWHPLPQRLYNSLDNMTKKLRFSMPFPMLAFPLYLFARSPGKEGSHFNPNSDLFQPNENKDVLTSTASWLAMIGVLAGLSFVMGPLKMLKLYAVPYVIFVMWLDFVTYLHHHGHEDKVPWYRGKEWSYLRGGLTTLDRDYGLINNIHHDIGTHVIHHLFPQIPHYHLVEATEAAKPVLGKYYKEPEKSAPLPFHLLQVLSRSLKEDHYVSDTGDIVYYQSESETSTCAQSSD

SEQ ID NO: 4801 - protein, 381 aa, Triticum aestivum
RQDDGSGSSSRAQGGDEGPSADGFDPGAPPPFGLADIRAAIPKHCWVKDPWRSMGYVVRDVVVVLALAATAARLDSWLAWPVYWAAQGTMFWALFVLGHDCGHGSFSNNAKLNSVVGHILHSSILVPYNGWRISHRTHHQNHGHVENDESWHPLPEKLYRSLDSSTRKLRFALPFPMLAYPFYLWSRSPGKSGSHFHPSSDLFQPNEKKDILTSTTCWLAMAGLLAGLTVVMGPLQILKLYAVPYWIFVMWLDFVTYLHHHGHNDKLPWYRGKAWSYLRGGLTTLDRDYGWLNNIHHDIGTHVIHHLFPQIPHYHLVEATEAAKPVLGKYYREPDKSGPFPFHLFGALARSMKSDHYVSDTGDIIYYQTDPKLAAGAHTSD

SEQ ID NO: 4802 - protein, 380 aa, Triticum aestivum
RQDDGSGSSSRAQGGDEGPSADGFDPGAPPPFGLADIRAAIPKHCWVKDPWRSMGYVVRDVVVVLALAATAARLDSWLAWPVYWAAQGTMFWALFVLGHDCGHGSFSNNAKLNSVVGHILHSSILVPYNGWRISHRTHHQNHGHVENDESWHPLPEKLYRSLDSSTRKLRFALPFPMLAYPFYLWSRSPGKSGSHFHPSSDLFQPNEKKDILTSTTCWLAMAGLLAGLTVVMGPLQILKLYAVPYWIFVMWLDFVTYLHHHGHNDKLPWYRGKAWSIYTGGLTTLDRDYGWLNNIHHDIGTHVIHHLLPQIPHYHLVEATEAATVLGKYYREPDKSGPFPFHLFGALARSMKSDHYVSDTGDIIYYQTDPKLAAGAHTSD

SEQ ID NO: 4803 - protein, 380 aa, Triticum aestivum
RQDDGSGSSSRAQGGDEGPSADGFDPGAPPPFGLADIRAAIPKHCWVKDHWSSMGYVVRDVVVVLALAATAARLDSWLAWPVYWAAQGTMFWALFVLGHDCGHGSFSNNAKLNSVVGHILHSSILVPYNGWRISHRTHHQNHGHVENDESWHPLPEKLYRSLDSSTRKLRFALPFPMLAYPFYLWSRSPGKSGSHFHPSSDLFQPNEKKDILTSTTCWLAMAGLLAGLTVVMGPLQILKLYAVPYWIFVMWLDFVTYLHHHGHNDKLPWYRGKAWSIYTGGLTTLDRDYGWLNNIHHDIGTHVIHHLLPQIPHYHLVEATEAATVLGKYYREPDKSGPFPFHLFGALARSMKSDHYVSDTGDIIYYQTDPKLAAGAHTSD

SEQ ID NO: 4804 - protein, 383 aa, Triticum aestivum
MAPAMRPEQEASCKATEDHRSEFDAAKPPPFRIGDVRAAVPAHCWRKSPLRSLSYVARDVAVVAALAAAAWRADSWALWPLYWAVQGTMFWALFVLGHDCGHGSFSDSGTLNSVVGHLLHTFILVPYNGWRISHRTHHQNHGHIEKDESWHPITEKVYQKLEPRTKTLRFSVPFPLLAFPVYLWYRSPGKEGSHFNPSSDLFTPKERRDVIISTTCWFTMIALLIGMACVFGLVPVLKLYGVPYIVNVMWLDLVTYLHHHGHQDLPWYRGEEWSYLRGGLTTVDRDYGWINNIHHDIGTHVIHHLFPQIPHYHLVEATKAARPVLGRYYREPEKSGPLPMYLITVLLKSLRVDHFVSDVGDVVFYQTDPSLSGDKWTGTDKQK

SEQ ID NO: 4805 - protein, 383 aa, Triticum aestivum
MAPAMRPEQEASCKATEDHRSEFDAAKPPPFRIGDVRAAVPAHCWPQEPPASLSYVARDVAVVAALAAAAWRADSWALWPLYWAVQGTMFWALFVLGHDCGHGSFSDSGTLNSVVGHLLHTFILVPYNGWRISHRTHHQNHGHIDRDESWHPITEKVYQKLEPRTKTLRFSVPFPLLAFPVYLWYRSPGKEGSHFNPSSDLFTPKERRDVIISTTCWFTMIALLIGMACVFGLVPVLKLYGVPYIVNVMWLDLVTYLHHHGHQDLPWYRGEEWSYLRGGLTTVDRDYGWINNIHHDIGTHVIHHLFPQIPHYHLVEATKAARPVLGRYYREPEKSGPLPMHLITVLLKSLRVDHFVSDVGDVVFYQTDPSLSGDKWTGTDKQK

SEQ ID NO: 4806 - protein, 383 aa, Triticum aestivum; identical to SEQ ID NO: 4805

SEQ ID NO: 4807 - protein, 398 aa, Zea mays
WALRVSAPTRLTSAVEEDKRSSPLGEGDEHVAASGAAGGEFDPGAPPPFGLAEIRAAIPKHCWVKDPWRSMAYVLRDVVVVLGLAAAAARLDSWLVWPLYWAAQGTMFWALFVLGHDCGHGSFSNNPKLNSVVGHILHSSILVPYHGWRISHRTHHQNHGHVEKDESWHPLPERLYKSLDFMTRKLRFTMPFPLLAFPLYLFARSPGKSGSHFNPSSDLFQPNEKKDIITSTASWLAMVGVLAGLTFLMGPVAMLKLYGVPYFVFVAWLDMVTYLHHHGHEDKLPWYRGQEWSYLRGGLTTLDRDYGLINNIHHDIGTHVIHHLFPQIPHYHLIEATEAAKPVLGKYYKEPKKSGPLPWHLFGVLAQSLKQDHYVSDTGDVVYYQTDSKTNTSAQKSD

SEQ ID NO: 4808 - protein, 398 aa, Zea mays; identical to SEQ ID NO: 4807

SEQ ID NO: 4809 - protein, 398 aa, Zea mays
WALRVSAATRLTSAVEEDKRSSPLGEGDEHVAASGAAGGEFDPGAPPPFGLAEIRAAIPKHCWVKDPWRSMAYVLRDVVVVLGLAAAAARLDSWLVWPLYWAAQGTMFWALFVLGHDCGHGSFSNNPKLNSVVGHILHSSILVPYHGWRISHRTHHQNHGHVEKDESWHPLPERLYKSLDFMTRKLRFTMPFPLLAFPLYLFARSPGKSGSHFNPSSDLFQPNEKKDIITSTASWLAMVGVLAGLTFLMGPVTMLKLYGVPYFVFVAWLPAGTYLHHHGHEDKLPWYRGQEWSYLRGGLTTLDRDYGLINNIHHDIGTHVIHHLFPQIPHYHLIEATEAAKPVLGKYYKEPKKSGPLPWHLFGVLAQSLKQDHYVSDTGDVVYYQTDSKTNTSAQKSD

SEQ ID NO: 4810 - protein, 443 aa, Zea mays
MARLVLSECSGLAPVRRLRAGRGAIAARSPPALSAAPRRRPASASIHRDWALRVSAPTRLASAAVEEDKPSAAPGQEEGAAAGGEFDPGAPPPFGLAEIRAAIPKHCWVKDPWRSMSYVLRDVAVVLGLAAAAARLDSWLVWPLYWAAQGTMFWALFVLGHDCGHGSFSNNPKLNSVVGHILHSSILVPYHGWRISHRTHHQNHGHVEKDESWHPLPERLYKSLDFMTRKLRFTMPFPLLAFPLYLFARSPGKSGSHFNPGSDLFQPTEKNDIITSTASWLAMVGVLAGLTFLMGPVPMLKLYGVPYLVFVAWLDMVTYLHHHGHEDKLPWYRGKEWSYLRGGLTTLDRDYGWINNIHHDIGTHVIHHLFPQIPHYHLIEATEAAKPVLGKYYKEPKNSGALPWHLFRVLAQSLKQDHYVSHTGDVVYYQAESKTSTSAQKSD

SEQ ID NO: 4811 - protein, 443 aa, Zea mays; identical to SEQ ID NO: 4810

SEQ ID NO: 4812 - protein, 398 aa, Zea mays
WALRVSAPTRLTSAVEEDKRSSPLGEGDEHVAASGAAGGEFDPGAPPPFGLAEIRAAIPKHCWVKDPWRSMAYVLRDVVVVLGLAAAAARLDSWLVWPLYWAAQGPSVWAPCVLGHDCGHGSFSNNPKLNSVVGHILHSSILVPYHGWRISHRTHHQNHGHVEKDESWHPLPERLYKSLDFMTRKLRFTMPFPLLAFPLYLFARSPGKSGSHFNPSSDLFQPTEKNDIITSTASWLAMVGVLAGLTFLMGPVPMLKLYGVPYLVFVAWLDMVTYLHHHGHEDKLPWYRGKEWSYLRGGLTTLDRDYGWINNIHHDIGTHVIHHLFPQIPHYHLIEATEAAKPVLGKYYKEPKKSGALPWHLFRVLAQSLKQDHYVSDTGDVVYYQADSKTSTSAQKSD

SEQ ID NO: 4813 - protein, 467 aa, Zea mays
  unsure (1)..(467): unsure at all Xaa locations
ADNRKPDLNGCRQTSWVTLTAGAGGAVGPSRPARPPRISSRREEESQAATGPGEPAWHACSSPSQSPCPLAAAAALWFLVPRGTEAAAASVSLCPPPPPPPXTQQEFDPAAAPPFGLGDIRAAIPKHCWVKDPWRSMGYVVRDVVLVLGLAAAAARLDSWLVWPLYWAAQGTMFWALFVLGHDCGHGSFSNNPILNSVVGHILHSSILVPYNGWRISHRTHHQNHGHVDKDESWHPLPERLFKSLDSVVLMLRFRLPFPMLVYPFYLANRSPGKSGSHFHPASDLFQPSESKQVLTSTACWLAMVALLAGLAFLMGPLQMLKLYLVPYWVFGMWLDFVTXLHHHGHNDKXLPWYXRGKEWTYLRGGLTTLDRDYGWINNIHHDIGTHVIHHLFPQIPHYHLIEATEAAKPVLGNYYREPQKSGPLPLHLLGDLVQSLRRDHYVSDTGDVVYYQTDPTXLAVLVHSLD

SEQ ID NO: 4814 - protein, 388 aa, Zea mays
MQMTADQESAAKATEDDTMIFDAGKPPPFRIGDVRAAVPEHCWRKSPWRSLWYVARDVAVVAALGAAAAGMDSWAVWPLYWAAQGTMFWALFVLGHDCGHGSFSDSATLNSVVGHLLHSFILVPYHGWRISHRTHHQNHGHIHRDESWHPITEKLYRQLEPRTKKLRFTVPFPLLAFPVYLLYRSPGKSGSHFLPSSDLFSPKEKSDVMVSTTCWCIMLASLLAMACAFGPLQVLKMYGIPYLVFVMWLDLVTYLHHHGHHQLPLPWYRGQEWSYLRGGLTTVDRDYGWINNVHHDIGTHVIHHLFPQIPHYHLVEATKAAKPVLGRYYREPHKSGPLPLHLLVVLLRSLRVDHFVSDHGDVVYYQTDHDLNTSSAHGWANQNHHKQK

SEQ ID NO: 4815 - protein, 511 aa, Zea mays
MARLVLSECCGLAPLRLRAGRGAIAAPSPPALSAAAAPGRPAPAAIHRDWALRVSAPTRLTSAVEEDKRSSPLGEGDEHVAASGAAGGEFDPGAPPQFGLAEIRAAIPKHCWVKDPWRSMAYVLRDVVVVLGLAAAAARLDSWLVWPLYWAAQGTMFWALFVLGHDCGHGSFSNNPKLNSVVGHILHSSILVPYHGWRISHRTHHQNHGHVEKDESWHPLPERLYKSLDFMTRKLRFTMPFPLLAFPLYLVRLRTWKSGSHFNPSSDLFQPNEKKDIITSTASWLAMVGVLAGLTFLMGPVTMLKLYGVPYFVFVAWLDMVTYLHHHGHEDKLPWYRGQTEAAKPVLGKYYKEPKKSGPLPWHLFGVLAQSLKQDHYVSDTGDGLASWGSPEVGALAAGAWGRADEGAERRPALARTAVGLRGGRPGGWGVGLGGCLRLGPGGQPARAGLGGWGRRVTGPIVGGLRPPKDKSIYDRKSMIVTKVVVAPKLHARELRLNRRKENRLKREKVI

SEQ ID NO: 4816 - protein, 292 aa, Zea mays
MFWALFVLGHDCGHGSFSNNPKLNSVVGHILHSSILVPYHGWRISHRTHHQNHGHVEKDESWHPLPERLYKSLDFMTRKLRFTMPFPLLAFPLYLFARSPGKSGSHFNPGSDLFQPTEKNDIITSTASWLAMVGVLAGLTFLMGPVPMLKLYGVPYLVFVAWLDMVTYLHHHGHEDKLPWYRGKEWSYLRGGLTTLDRDYGWINNIHHDIGTHVIHHLFPQIPHYHLIEATEAAKPVLGKYYKEPKNSGALPWHLFRVLAQSLKQDHYVSHTGDVVYYQAESKTSTSAQKSD

SEQ ID NO: 4817 - protein, 262 aa, Zea mays
LHSSILVPYHGWRISHRTHHQNHGHVEKDESWHPLPERLYKSLDFMTRKLRFTMPFPLLAFPLYLFARSPGKSGSHFNPGSDLFQPTEKNDIITSTASWLAMVGVLAGLTFLMGPVPMLKLYGVPYLVFVAWLDMVTYLHHHGHEDKLPWYRGKEWSYLRGGLTTLDRDYGWINNIHHDIGTHVIHHLFPQIPHYHLIEATEAAKPVLGKYYKEPKNSGALPWHLFRVLAQSLKQDHYVSHTGDVVYYQAESKTSTSAQKSD

SEQ ID NO: 4818 - protein, 236 aa, Zea mays
KPMQMTADQESAAKATEDHDVVFDAGKPPPFRIGDVRAAVPEHCWRKNPWRSLWYVARDVAVVAALGAAAAGMDSWAVWPLYWAAQGTMFWALFVLGHDCGHGSFSDSATLNSVVGHLLHSFILVPYHGWRISHRTHHQNHGHIHRDESWHPITEKLYRQLEPRTKKLRFTVPFPLLAFPVYLLYRSPGKSGSHFLPSSDLFSPKEKSDVMVSTTCWCIMLASLLAMACAFGPLQG

SEQ ID NO: 4819 - protein, 188 aa, Zea mays
  unsure (1)..(188): unsure at all Xaa locations
XAARPGFLVFPRVRPASDITSTAFWLAMVGVLSGLTFLMGPVTMLKLYGVPYFVFVASRPAGTYLHHHGHEDKLPWYRGQEWSYLRGGLTTLDRDYGLINNIHHDIGTHVIHHLFPQIPHYHLIEATEAAKPVLGKYYKEPKKSGPLPWHLFGVLAQSLKQDHYVSDTGDVVYYQTDSKTNTSAQKSD

SEQ ID NO: 4820 - protein, 152 aa, Zea mays
  unsure (1)..(152): unsure at all Xaa locations
XWLDFVTYLHHHGHNDKLPWYRGKEWTYLRGGLTTLDRDYGWINNIHHDIGTHVIHHLFPQIPHYHLIEATEAAKPVLGNYYREPQKSGPLPLHLLGDLVQSLRRDHYVSDTGDVVYYQTDPTISCSGPFTXLIEGGWKLCETQGSEATGEI

SEQ ID NO: 4821 - protein, 438 aa, Perilla frutescens
MASWVLSECGLRPLPRIYPKPRTGQYLSNSNPSKLRLSRTGFSSDSSFSLVGRERNWGLKVSAPLRFQEVEEESEERGSVIVNGVDEFDPGAPPPFKLSDIRAAIPKHCWVKDPWRSMSYVVRDVVVVFGLAAAAAYFNNWAVWPIYWFAQSTMFWALFVLGHDCGHGSFSNDPKLNSVAGHLLHSSILVPYHGWRISHRTHHQNHGHVENDESWHPIPEKIYRTLDFATKKLRFTLPFPMLAYPFYLWGRSPGKKGSHFHPDSDLFVPNERKDVITSTVCWTAMVAILAGLSFVMGPVQLLKLYGIPYIGFVAWLDLVTYLHHHGHDEKLPWYRGKEWSYLRGGLTTLDRDYGWINNIHHDIGTHVIHHLFPQIPHYHLIEATAAAKPVLGKYYKEPKKSGPFPFYLLGVLQKSMKKDHYVSDTGDIVYYQTDPELN

SEQ ID NO: 4822 - protein, 384 aa, Brassica carinata
MGAGGRMQVSPSPKKSETDTIKRVPCETPPFTVGELKKAIPPHCFKRSIPRSFSYLIWDIIVASCFYYVATTYFPLLPHPLSYIAWPLYWACQGCVLTGVWVIAHECGHHAFSDYQWLDDTVGLIFHSFLLVPYFSWKYSHRRHHSNTGSLERDEVFVPKKKSDIKWYGKYLNNPLGRTVMLTVQFTLGWPLYLAFNVSGRPYPEGFACHFHPNAPIYNDRERLQIYVSDAGILAVCYGLYRYAAAQGVASMVCLYGVPLLIVNAFLVLITYLQHTHPSLPHYDSSEWDWLRGALATVDRDYGILNKVFHNITDTHVAHHLFSTMPHYHAMEATKAIKPILGDYYQFDGTPWVKAMWREAKECIYVEPDRQGEKKGVFWYNNKL

SEQ ID NO: 4823 - protein, 193 aa, Gibberella zeae
DLDMAFVPRTSPKPSLSFRIAGMDVAELIEDTPIAQAVKLIFHQLFGWQVYTFFNASSGKGSKQWEPKSGLASWFRVSHFEPTSAVFRPAEAPFILISDIGLALTGTALYFASKEVGVSTVLYLYLVPYLWVHHWLVAITYLHHHHTELPHYTAEGWTYVKGALATVDREFGFIGKHLFHGIIEKHVIHHLFP

SEQ ID NO: 4824 - protein, 212 aa, Trypanosoma cruzi
MSRVDNLTVAPGSPDVMKAVLKSGRNKENNVIVPSSALTIREIQEKIPVKYFERNTTRSVMFLLRDLAQVALTYAIMYAVALPLATSMEVSAARTVADGGALSLMAGTAMTTAAWLLKGVLWAVFWFVQGLNGTALWVLAHECGHQAFSPMKGLNDTVGMILHSALLVPYHSWRITHGGHHKHTNHLTKDLVFVPEKRNSVWSSWRMHRWCH

SEQ ID NO: 4825 - protein, 375 aa, Prochlorococcus marinus subsp. pastoris str. CCMP1378
MSDIPSMKEFQSVIPNNCFKSQTITSLGYLLQSIIIQAIVVAIGLTIPFSQRMVPIWILYALLSGTTAMGFWVIAHECGHGAFSKNKTLETITGYLLHSLLLVPYFSWQRSHAVHHRFTNHITNGETHVPIVIDGNGISEKVGGEKELSFSSKLGKTKYGILQLVLHLIFGWPAYLLSGSTGGLKYGTSNHFWPRKPFSKTLWPAVWAKKVWISDIGVAAVIVGLIIFIIKHGFFPIIGMYVGPLLVVNCWLVIYTWLHHTDSDVPHLSNSEFSFMRGAFLSIDRPYGKIINILHHNIGSSHVVHHVCPTIPHYHATKATLAIRKAFNKAYLFNPDPIHKALWNIACNCIAVKSDIDEGRYIWQSSYKKKIKTTY

SEQ ID NO: 4826 - protein, 376 aa, Caenorhabditis elegans
MTIATKVNTNKKDLDTIKVPELPSVAAVKAAIPEHCFVKDPLTSISYLIKDYVLLAGLYFAVPYIEHYLGWIGLLGWYWAMGIVGSALFCVGHDCGHGSFSDYEWLNDLCGHLAHAPILAPFWPWQKSHRQHHQYTSHVEKDKGHPWVTEEDYNNRTAIEKYFAVIPISGWLRWNPIYTIVGLPDGSHFWPWSRLFETTEDRVKCAVSGVACAICAYIAFVLCDYSVYTFVKYYYIPLLFQGLILVIITYLQHQNEDIEVYEADEWGFVRGQTQTIDRHWGFGLDNIMHNITNGHVAHHFFFTKIPHYHLLEATPAIKKALEPLKDTQYGYKREVNYNWFFKYLHYNVTLDYLTHKAKGVLQYRSGVEAAKAKKAQ

SEQ ID NO: 4827 - protein, 402 aa, Caenorhabditis elegans
MVAHSSEGLSATAPVTGGDVLVDARASLEEKEAPRDVNANTKQATTEEPRIQLPTVDAFRRAIPAHCFERDLVKSIRYLVQDFAALTILYFALPAFEYFGLFGYLVWNIFMGVFGFALFVVGHDCLHGSFSDNQNLNDFIGHIAFSPLFSPYFPWQKSHKLHHAFTNHIDKDHGHVWIQDKDWEAMPSWKRWFNPIPFSGWLKWFPVYTLFGFCDGSHFWPYSSLFVRNSERVQCVISGICCCVCAYIALTIAGSYSNWFWYYWVPLSFFGLMLVIVTYLQHVDDVAEVYEADEWSFVRGQTQTIDRYYGLGLDTTMHHITDGHVAHHFFNKIPHYHLIEATEGVKKVLEPLSDTQYGYKSQVNYDFFARFLWFNYKLDYLVHKTAGIMQFRTTLEEKAKAK

SEQ ID NO: 4828 - protein, 402 aa, Caenorhabditis elegans
MVAHSSEGLSATAPVTGGDVLVDARASLEEKEAPRDVNANTKQATTEEPRIQLPTVDAFRRAIPAHCFERDLVKSIRYLVQDFAALTILYFALPAFEYFGLFGYLVWNIFMGVFGFALFVVGHDCLHGSFSDNQNLNDFIGHIAFSPLFSPYFPWQKSHKLHHAFTNHIDKDHGHVWIQDKDWEAMPSWKRWFNPIPFSGWLKWFPVYTLFGFCDGSHFWPYSSLFVRNSDRVQCVISGICCCVCAYIALTIAGSYSNWFWYYWVPLSFFGLMLVIVTYLQHVDDVAEVYEADEWSFVRGQTQTIDRYYGLGLDTTMHHITDGHVAHHFFNKIPHYHLIEATEGVKKVLEPLSDTQYGYKSQVNYDFFARFLWFNYKLDYLVHKTAGIMQFRTTLEEKAKAK

SEQ ID NO: 4829 - protein, 384 aa, Lesquerella fendleri
MGAGGRIMVTPSSKKSETEALKRGPCEKPPFTVKDLKKAIPQHCFKRSIPRSFSYLLTDITLVSCFYYVATNYFSLLPQPLSTYLAWPLYWVCQGCVLTGIWVIGHECGHHAFSDYQWVDDTVGFIFHSFLLVPYFSWKYSHRRHHSNNGSLEKDEVFVPPKKAAVKWYVKYLNNPLGRILVLTVQFILGWPLYLAFNVSGRPYDGFASHFFPHAPIFKDRERLQIYISDAGILAVCYGLYRYAASQGLTAMICVYGVPLLIVNFFLVLVTFLQHTHPSLPHYDSTEWEWIRGALVTVDRDYGILNKVFHNITDTHVAHHLFATIPHYNAMEATEAIKPILGDYYHFDGTPWYVAMYREAKECLYVEPDTERGKKGVYYYNNKL

SEQ ID NO: 4830 - protein, 181 aa, Lesquerella fendleri
  unsure (1)..(181): unsure at all Xaa locations
YWHRRHHSNNGSLEKDEVFVPPKKAAVXWYVKYLNNPLGRILVLTVQFILGWPLYLAFNVSGRPYDGFASHFFPHAPIFKDRERLQIYISDAGILAVCYGLYRYAASQGLTAMICVYGVPLLIVNFFLVLVTFLQHTHPSLPHYDSTEWEWIRGALVTVDRDYGILNKVFHNITDTHVAHH

SEQ ID NO: 4831 - protein, 161 aa, Lesquerella fendleri
YRHRRHHSNTGSLERDEVFVPKQKSAIKWYGEYLNNPPGRIMMLTVQFVLGWPLYLAFNVSGRPYNGFASHFFPNAPIYNDRERLQIYISDAGILAVCYGLYRYAVAQGLASMICLNGVPLLIVNFFLVLITYLQHTHPALPHYDSSEWDWLRGALATVDR

SEQ ID NO: 4832 - protein, 359 aa, Nostoc punctiforme
MPSNIITFNNPLGSEKSEDTTKLPFNLQDLKAAIPAECFQPNVKKSLFYFFRDILIIGLLYAVASYLDSWLFFPIFWLMQGTMFWALFVVGHDCGHQSFSKHKWLNDLIGHLSHTPILVPYHGWRISHRTHHKNTGNIDNDESWYPVSESQYKEMPLAQKIGRYYVFLLAYPVYLFKRSPNKEGSHFLPGSSLFKPSEKWDVITSTVLLIGMVGLLGFLTYQWGWMWLLKYYAVPYLVFIVWLDLVTFLHHTEPELPWYRGEDWTFLKGAISSIDRDYGLVNHIHHDIGTHVAHHIFLNIPHYNLLKATEAIKPVMGEYFHKSEEPIWKSLWNSCISCHFVPDTGSRVYYTSNNKLAKD

SEQ ID NO: 4833 - protein, 399 aa, Mortierella alpina
MAPPNTIDAGLTQRHISTSAPNSAKPAFERNYQLPEFTIKEIRECIPAHCFERSGLRGLCHVAIDLTWASLLFLAATQIDKFENPLIRYLAWPVYWIMQGIVCTGVWVLAHECGHQSFSTSKTLNNTVGWILHSMLLVPYHSWRISHSKHHKATGHMTKDQVFVPKTRSQVGLPPKENAAAAVQEEDMSVHLDEEAPIVTLFWMVIQFLFGWPAYLIMNASGQDYGRWTSHFHTYSPIFEPRNFFDIIISDLGVLAALGALIYASMQLSLLTVTKYYIVPYLFVNFWLVLITFLQHTDPKLPHYREGAWNFQRGALCTVDRSFGKFLDHMFHGIVHTHVAHHLFSQMPFYHAEEATYHLKKLLGEYYVYDPSPIVVAVWRSFRECRFVEDQGDVVFFKK

SEQ ID NO: 4834 - protein, 400 aa, Mortierella alpina
MAPPNTIDAGLTQRHISTSAAPTSAKPAFERNYQLPEFTIKEIRECIPAHCFERSGLRGLCHVAIDLTWASLLFLAATQIDKFENPLIRYLAWPAYWIMQGIVCTGIWVLAHECGHQSFSTSKTLNNTVGWILHSMLLVPYHSWRISHSKHHKATGHMTKDQVFVPKTRSQVGLPPKENVAVAVQEEDMSVHLDEEAPIVTLFWMVIQFLFGWPAYLIMNASGQDYGRWTSHFHTYSPIFEPRNFFDIIISDLGVLAALGTLIYASMQLSLLTVTKYYIVPYLFVNFWLVLITFLQHTDPKLPHYREGAWNFQRGALCTVDRSFGKFLDHMFHGIVHTHVAHHLFSQMPFYHAEEATHHLKKLLGEYYVYDPSPIVVAVWRSFRECRFVEDHGDVVFFKK

SEQ ID NO: 4835 - protein, 400 aa, Mortierella alpina
MAPPNTIDAGLTQRHITTTAAPTSAKPAFERNYQLPEFTIKEIRECIPAHCFERSGLRGLCHVAIDLTWASLLFLAATQIDKFENPLIRYLAWPAYWIMQGIVCTGIWVLAHECGHQSFSTSKTLNNTVGWILHSMLLVPYHSWRISHSKHHKATGHMTKDQVFVPKTRSQVGLPPKESAAAAVQEEDMSVHLDEEAPIVTLFWMVIQFLFGWPAYLIMNASGQDYGRWTSHFHTYSPIFEPRNFFDIIISDLGVLAALGALIYASMQLSLLTVTKYYIIPYLFVNFWLVLITFLQHTDPKLPHYREGAWNFQRGALCTVDRSFGKFLDHMFHGIVHTHVAHHLFSQMPFYHAEEATYHLKKLLGEYYVYDPSPIVVAVWRSFRECRFVEDHGDVVFFKK

SEQ ID NO: 4836 - protein, 375 aa, Crepis alpina
MGGGGRGRTSQKPLMERVSVDPPFTVSDLKQAIPPHCFKRSVIRSSYYIVHDAIIAYIFYFLADKYIPILPAPLAYLAWPLYWFCQASILTGLWVIGHECGHHAFSDYQWVDDTVGFILHSFLMTPYFSWKYSHRNHHANTNSLDNDEVYIPKSKAKVALYYKVLNHPPGRLLIMFITFTLGFPLYLFTNISGKKYERFANHFDPMSPIFKERERFQVLLSDLGLLAVLYGVKLAVAAKGAAWVTCIYGIPVLGVFIFFDIITYLHHTHLSLPHYDSSEWNWLRGALSTIDRDFGFLNSVLHDVTHTHVMHHLFSYIPHYHAKEARDAINTVLGDFYKIDRTPILKAMWREAKECIFIEPEKGRGSKGVYWYNKF

SEQ ID NO: 4837 - protein, 437 aa, Vernicia fordii
ERPPGQVTGAVSRTHSSKLRLLHTNKTVKDLKLPFSNGCFRERDWGIKVSAPYRVSSIEGEEEEREEGINGVIGIEGEETEFDPGAPPPFKLSDIREAIPKHCWVKDPWRSMSYVVRDVAVVFGLAAAAAYLNNWIVWPLYWAAQGTMFWALFVLGHDCGHGSFSHNPKLNSVVGHLLHSSILVPYHGWRISHRTHHQNHGHVENDESWQPLSEKIFRSLDYMTRTLRFTVPSPMLAYPFYLWNRSPGKTGSHFHPDSDLFGPNERKDVITSTVCWTAMAALLVGLSLVMGPIQLLKLYGMPYWIFVMWLDFVTYLHHHGHEEKLPWYRGNEWSYLRGGLTTLGRDYGWINNIHHDIGTHVIHHFFPQIPHYHLIDATEASKPVLGKYYREPDKSGPLSFHLIGYLIRSLKKDHYVSDTGDVVYYQTDPQLSGSSSE

SEQ ID NO: 4838 - protein, 451 aa, Vernicia fordii
MAVWALSDCGIRPLPKIYSKPRLAFTSNNPQPTKPPIPRPELRNGSSFKLSSAGLRDKWVVNLSAPLRGGLVEEDEDNFEGNRVISIDESGGEDFDPDAPPPDTLADIRAAIPKHRWTKNPEISLSYVVRNVAVVSGLAAVAAYFNDWAFWSPYWICQGTMLSALFVLGHDCGHGSFSNNPNLDSVVGHLLHYSILVPYHGWRISYRTHYRHHQHAENDESWHPLSEKIYKGLNNVTRTLRLSLPFSLLAYPSYLWSRSPGKKGFHFHPSSDLFVPSEKKDVITSTVCWTAMLALLVGSSFVMGLVQLLKPYGIPYLIFVMWLDLVTYLHHHGHENKIPWYRGEEWSYLRGRLTTVGRDYGWFNKIHHDIGIHVIHHLFPQIPHYHLIEATEAAKPVLGKYYREPKKSGPLPFHLLGSLIRSMKEDHYVSDAGDVVYYQKEPKLSGARCLS

SEQ ID NO: 4839 - protein, 387 aa, Vernicia fordii
MKQQQYKDTPILNGVNGFHAKEEEEEEDFDLSNPPPFNIGQIRAAIPKHCWVKNPWRSLTYVFRDVVVVFALAAAAFYFNSWLFWPLYWFAQGTMFWAIFVLGHDCGHGSFSNNSSLNNVVGHLLHSSILVPYHGWRISHRTHHQNHGNVEKDESWVPLPEKIYKEMDLSTRILRYSVPLPMFALPFYLWWRSPGKEGSHFNPNSDFFAPHERKAVLTSNFCFSIMALLLLYSCFVFGPVQVLKFYGIPYLVFVMWLDFVTYMHHHGHEEKLPWYRGKEWSYLRGGLQTVDRDYGWINNIHHDIGTHVIHHLFPQIPHYHLIEATKAAKPVLGKYYREPKKSGPFPFHLFSNLVRSMSEDHYVSDIGDIVFYQTDPDIYKVDKSKLN

SEQ ID NO: 4840 - protein, 383 aa, Vernonia galamensis
MGAGGRMSNPPKDEKKAEHEALQRVPYQKPPFTVGDIKKAIPPHCLNRSVIKSFSYVVYDLTISFIFYYLATNYIPLLPHPLSYVAWPVYWIFQGCVLTGVWVIAHECGHHAFSDYQWLDDTVGLILHSALLVPYFSWKYSHRRHHSNTGSIEHDEVFVPKLKSNVRSTARYLNNPPGRILTLLVTLTLGWPLYLMFNVSGRYYDRFACHFDPNSPIYSNRERAQIFISDAGILAVFYGLFKLAMAKGLTWVLCMYGGPLLVVNGFLVLITFLQHTHPSLPHYDTTEWDWLRGALATIDRDYGILNKVFHNITDTHVAHHLFSTMPHYHAMEATKVIKPILGEYYQFDGTSIFKAMYRETKECIYVDKDENVKDGVYWYRNKI

SEQ ID NO: 4841 - protein, 383 aa, Vernonia galamensis
MGAGGRMSNPPKDEKKAEHEALQRVPYQKPPFTVGDIKKAIPPHCFNRSVIRSFSYVVYDLTISFIFYYLATNYIPLLPHPLSYVAWPVYWIFQGCVLTGVWVIAHECGHHAFSDYQWLDDTVGLILHSALLVPYFSWKYSHRRHHSNTGSIEHDEVFVPKLKSNVRSTARYLNNPPGRILTLLVTLTLGWPLYLMFNVSGRYYDRFACHFDPNSPIYSNRERAQIFISDAGILAVFYGLFKLAMAKGLTWVLCMYGGPLLVVNGFLVLITFLQHTHPSLPHYDTTEWDWLRGALATIDRDYGILNKVFHNITDTHVAHHLFSTMPHYHAMEATKVIKPILGEYYQFDGTSIFKAMYRETKECIYVDKDENVKDGVYWYRNKI

SEQ ID NO: 4842 - protein, 420 aa, Aspergillus nidulans
MASDAGKGDLGKMLDTYGNEFKIPDYTIKDIRDAIPSHCYNRSAIRSLSYVFRDLAVLASVFYVFHKYVTPETVPSYPARVALWTLYTVVQGLFGTGIWVLAHECGHQAFSTSKVLNDTVGWILHSALLVPYFSWKISHGKHHKATGNLARDMVFVPKTREVYASRIKKTIYDLNEVMEETPLATATHSILQQLFGWPLYLLTNVTGHDNHERQPEGRGKGKRNGYFTGVNHFNPNSPLFEAKDAKLIILSDIGLAITASILYLIGSKFGWMNLLVWYGIPYLWVNHWLVAITYLQHTDPTLPHYQPESWTFARGAAATIDREFGFIGRHILHGIIETHVLHHYVSTIPFYHADEASEAIKKVMGSHYRSEAHTGPLGFLKALWTSARVCHWVEPTEGTKGENAGVLFFRNTNGIGVPPH

SEQ ID NO: 4843 - protein, 352 aa, Bacillus subtilis subsp. subtilis str. 168
MTEQTIAHKQKQLTKQVAAFAQPETKNSLIQLLNTFIPFFGLWFLAYLSLDVSYLLTLALTVIAAGFLTRIFIIFHDCCHQSFFKQKRYNHILGFLTGVLTLFPYLQWQHSHSIHHATSSNLDKRGTGDIWMLTVNEYKAASRRTKLAYRLYRNPFIMFILGPIYVFLITNRFNKKGARRKERVNTYLTNLAIVALAAACCLIFGWQSFLLVQGPIFLISGSIGVWLFYVQHTFEDSYFEADENWSYVQAAVEGSSFYKLPKLLQWLTGNIGYHHVHHLSPKVPNYKLEVAHEHHEPLKNVPTITLKTSLQSLAFRLWDEDNKQFVSFRAIKHIPVSLPPDSPEKQKLRKNA

SEQ ID NO: 4844 - protein, 444 aa, Betula pendula
MASWVVSECGLKPLPRILNPRLRDGVASSTTFPSKIRPPPICKSHCVGSSLRLSSGLRGNRWWALNVSAPFRVPSVGEEGENRERVNGVEDDGEFDPGSPPPFRLTDIRAAIPKHCWVKDPWKSMSYVVRDVVVVFGLAAIAAYFNNWIVWPLYWIAQGTMFWALFVLGHDCGHGSFSSNLNLNSVVGHLLHSSILVPYHGWRISHRTHHQNHGHVENDESWHPLSEKMYKKLDYVTRSLRFTLPFPMLAYPFYLWVRSPGKKGSHYHPNSDLFVPNERKDVITSTACWTAMAALLVYLSFAMGPVQLLKLYGIPYWIFVVWLDVVTYLHHHGHEDKLPWYRGKEWSYLRGGLTTLDRDYGVINNIHHDIGTHVIHHLFPQIPHYHLVEATEAARPVFGKYYREPKKSGPLPFHLLGTLIRSMKQDRYVSDAGDVVYYQSDKTI

SEQ ID NO: 4845 - protein, 386 aa, Betula pendula
MKEPVLEEMENAGGFGNGFHGVVEKDDFDPSAPPPFKIAEIRAAIPKHCWAKNPWRSLSYALRDVFVVIALAAAAIYFKAWIFWPLYWAAQGTMFWALFVLGHDCGHGSFSDNPELNNLVGHVLHSAILVPYHGWRISHRTHHQNHGNVENDESWVPLTEKLYKSLGYSTRLLRFTVPFPLFAYPIYLWSRSPGKEGSHFNPYSNLFSPNERKDVITSTLCWSLMAALLIYSSCAIGPIQMLKLYGVPHLIFVMWLDLVTYLHHHGYEQKLPWYRGKEWSYLRGGLTTVDRDYGWFNNIHHDIGTHVIHHLFPQIPHYHLVEATNAAKPVLGKYYREPKRSGPFPIHLIKNLVRSISEDHYVNDNGDIVYYQTDPELYKSSNTKSD

SEQ ID NO: 4846 - protein, 329 aa, Brassica napus
MSYVVRELAIVFALAAGAAYLNNWLVWPLYWIAQGTMFWALFVLGHDCGHGSFSNDPRLNSVVGHLLHSSILVPYHGWRISHRTHHQNHGHVENDESWHPMSEKIYKSLDKPTRFFRFTLPLVMLAYPFYLWARSPGKKGSHYHPDSDLFLPKERNDVLTSTACWTAMAVLLVCLNFVMGPMQMLKLYVIPYWINVMWLDFVTYLHHHGHEDKLPWYRGKEWSYLRGGLTTLDRDYGLINNIHHDIGTHVIHHLFPQIPHYHLVEATEAAKPVLGKYYREPDKSGPLPLHLLGILAKSIKEDHFVSDEGDVVYYEADPNLYGEIKVTAE

SEQ ID NO: 4847 - protein, 106 aa, Brassica rapa
RPGAPPPFNLADIRAAIPKHCWVKNPWKSMSYVVRDVAIVFGLAAVAAYFNSWLLWPLYWFAQGTMFWALFVLGHDCGHGSFSNDPKLNSVAGHLLHSSILVPYHG

SEQ ID NO: 4848 - protein, 164 aa, Arachis hypogaea
MGAGGRVTKIEAQKKPLSRVPHSNPPFSVGQLKKAIPPHCFERSLFISFSYVVYDLLMAYLLFYIATTYFHKLPYPFSFLAWPIYWAIQGCILTGVWVIAHECGHHAFSKYQLVDDMVGLTLHSCLLVPYFSWKISHRRHHSNTGSLRPRRSVCPETKIKGIMV

SEQ ID NO: 4849 - protein, 453 aa, Glycine max
MATWVLSECGLRPLPPVFPRSTRPISCQKPSKSRFLSTNKGVPDLNLQARGLTCCSFRDRKWELGVSAPLKVATNEGEEEERTNGANNGVGEEVSEFDPSAPPPFKLADIRAAIPKHCWVKDPWKSMSYVVRDVIVVFGLAAAAAYLNNWVVWPLYWAAQGTMFWALFVLGHDCGHGSFSNNPKLNSVAGHLLHSSILVPYHGWRISHRTHHQNHGHVENDESWHPLPEKIFKSLDNVTRILRFTLPFPLLAYPIYLWSRSPGKTGSHFNPDSDLFVPSERKDVITSTICWTAMAALLVGLGFVMGPVQLLKLYGIPYAIFVMWLDLVTYLHHHGHEDKLPWYRGEEWSYLRGGLTTIDRDYGWINNIHHDIGTHVIHHLFPQIPHYHLIEATEAAKPVLGQYYREPKKSSPLPIYLIGELLRSMKKDHFVSDSGDIVYYQTDPTLSSSSTSQ

SEQ ID NO: 4850 - protein, 454 aa, Glycine max
  unsure (1)..(454): unsure at all Xaa locations
MATWVLSECSLKPLAXPVIPRPRTGAVLSSTSKVGFLETNKVLEGSKFQPLRCNLRERNWGLKVSVPLRIASIEEEEQKSVDVINGSNGVEHEKLPEFDPGAPPPFNLADIRAAIPKHCWVKDPLKSMSYVVRDVIAVFGLASAAAYLNNWLVWPLYWAAQGTMFWALFVLGHDCGHGSFSNNPKLNSVVGHLLHSSILVPYHGWRISHRTHHQHHGHVENDESWHPLPEKLFRSLDTVTRMLRFTAPFPLLAYPVYLWGRSPGKTGSHFDPSSDLFVPNERKDVITSTACWAAMLGLLVGLGFVMGPIQLLKLYGVPYVIFVMWLDLVTYLHHHGHEDKLPWYRGKEWSYLRGGLTTLDRDYGLINNIHHDIGTHVIHHLFPQIPHYHLVEATEAAKPVFGKYYREPKKSSPLPFHLIGELIKSFKTDHFVSDKGDVVYYQTDSEINGSSKSE

SEQ ID NO: 4851 - protein, 452 aa, Glycine max
  unsure (1)..(452): unsure at all Xaa locations
MATWVLSECGLRXSLPPVFPRPKDPFSCQKPSKFRFLSINKGVADLNLQPITCYNSRERKWESGVSAPLKVATTEGEEEEGINGANGVVEEVPEFDPSAPPPFKLADIRASIPKHCWVKDPWKSMSYVVRDVIVVFGLAVAAAYLNNWVVWPLYWAAQGTMFWALFVLGHDCGHGSFSNNPKLNSVAGHLLHSSILVPYHGWRISHRTHHQNHGHVENDESWHPLPEKIFKSLDNVTRILRFTLPFPLLAYPIYLWSRSPGKTGSHFNPDSDLFVPSERKDVITSTVCWTAMAALLVGLGFVMGPVQLLKLYGIPYVIFVMWLDLVTYLHHHGHEDKLPWYRGEEWSYLRGGLTTIDRDYGWINNIHHDIGTHVIHHLFPQIPHYHLIEATEAAKPVLGLYYREPKKSSPLPIYLIGELLRSMKKDHFVSNTGDIVYYQTXDPTLSSSSTSQ

SEQ ID NO: 4852 - protein, 453 aa, Glycine max
MATWYHQKCGLKPLAPVIPRPRTGAALSSTSRVEFLDTNKVVAGPKFQPLRCNLRERNWGLKVSAPLRVASIEEEQKSVDLTNGTNGVEHEKLPEFDPGAPPPFNLADIRAAIPKHCWVKDPWRSMSYVVRDVIAVFGLAAAAAYLNNWLVWPLYWAAQGTMFWALFVLGHDCGHGSFSNNSKLNSVVGHLLHSSILVPYHGWRISHRTHHQHHGHAENDESWHPLPEKLFRSLDTVTRMLRFTAPFPLLAFPVYLFSRSPGKTGSHFDPSSDLFVPNERKDVITSTACWAAMLGLLVGLGFVMGPIQLLKLYGVPYVIFVMWLDLVTYLHHHGHEDKLPWYRGKEWSYLRGGLTTLDRDYGWINNIHHDIGTHVIHHLFPQIPHYHLVEATEAAKPVFGKYYREPKKSAAPLPFHLIGEIIRSFKTDHFVSDTGDVVYYQTDSKINGSSKLE

SEQ ID NO: 4853 - protein, 526 aa, Glycine max
  unsure (1)..(526): unsure at all Xaa locations
MTKYFSVLGLDILLLVAIFLFSFWFSSFVFFFVSHLSEDFSILVPGGTRNPDQINKPFFSSNFSEVSFFSPMATWXYYQNVGLKPLAPVIPRPRTGAALSSTSRVEFLDTNKVVAGPKFQPLRCNLRERNWGLKVSAPLRVASIEEEQKSVDLTNGTNGVEHEKLPEFDPGAPPPFNLADIRAAIPKHCWVKDPWRSMSYVVRDVIAVFGLAAAAAYLNNWLVWPLYWAAQGTMFWALFVLGHDCGHGSFSNNSKLNSVVGHLLHSSILVPYHGWRISHRTHHQHHGHAENDESWHPLPEKLFRSLDTVTRMLRFTAPFPLLAFPVYLFSRSPGKTGSHFDPSSDLFVPNERKDVITSTACWAAMLGLLVGLGFVMGPIQLLKLYGXVPYVIFVMWLDLVTYLHHHGHEDKLPWYRGKEWSYLRGGLTTLDRDYGWINNIHHDIGTHVIHHLFPQIPHYHLVEATEAAKPVFGKYYREPKKSAAPLPFHLIGEIIRSFKTDHFVSDTGDVVYYQTDSKINGSSKLE

SEQ ID NO: 4854 - protein, 380 aa, Glycine max
MVQAQPLQHVGNGAGKEDQAYFDPSAPPPFKIANIRAAIPKHCWEKNTLRSLSYVLRDVLVVTALVAAAIGFNSWFFWPLYWPAQGTMFWALFVLGHDCGHGSFSNSPLLNSIVGHILHSSILVPYHGWRISHRTHHQNHGHVEKDESWVPLTEKVYKNLDNMTRMMRFTLPFPIFAYPFYLWSRSPGKEGSHFNPYSNLFSPGERRDVLTSTLCWGIMLSVLLYLSLTMGPLFMLKLYGVPYLIFVMWLDFVTYLHHHGYKQKLPWYRGQEWSYLRGGLTTVDRDYGWINNIHHDIGTHVIHHLFPQIPHYHLIEATKAAKAVLGKYYREPQKSGPLPLHLIKYLLHSISQDHFVSDSGDIVYYQTDSQLHKDSWTQSN

SEQ ID NO: 4855 - protein, 380 aa, Glycine max; identical to SEQ ID NO: 4854

SEQ ID NO: 4856 - protein, 376 aa, Glycine max
MVKDTKPLAYAANNGYQKEAFDPSAPPPFKIAEIRVAIPKHCWVKNPWRSLSYVLRDVLVIAALMAAASHFNNWLLWLIYWPIQGTMFWALFVLGHDCGHGSFSDSPFLNSLVGHILHSSILVPYHGWRISHRTHHQNHGHIEKDESWVPLTEKIYKNLDSMTRLIRFTVPFPLFVYPIYLFSRSPGKEGSHFNPYSNLFPPSERKGIAISTLCWATMFSLLIYLSFITSPLLVLKLYGIPYWIFVMWLDFVTYLHHHGHHQKLPWYRGKEWSYLRGGLTTVDRDYGWINNIHHDIGTHVIHHLFPQIPHYHLVEATQAAKPVLGEYYREPERSAPLPFHLIKYLIQSMRQDHFVSDTGDVVYYQTDSLLLHSQRD

SEQ ID NO: 4857 - protein, 376 aa, Glycine max
MVKDTKPLAYAANNGYQKEAFDPSAPPPFKIAEIRVAIPKHCWVKSPWRSLSYVLRDVLVIAALMAAASHFNNWLLWLIYWPIQGTMFWALFVLGHDCGHGSFSDSPFLNSLVGHILHSSILVPYHGWRISHRTHHQNHGHIEKDESWVPLTEKIYKNLDNMTRLVRFTVPFPLFVYPIYLFSRSPGKEGSHFNPYSNLFPPSERKGIAISTLCWVTMFSMLIYLSFITSPVLLLKLYGIPYWIFVMWLDFVTYLHHHGHHQKLPWYRGKEWSYLRGGLTTVDRDYGWINNIHHDIGTHVIHHLFPQIPHYHLVEATQAAKSVLGEYYREPERSAPLPFHLIKYLIQSMRQDHFVSDTGDVVYYQTDSLHLHSHRD

SEQ ID NO: 4858 - protein, 376 aa, Glycine max
  unsure (1)..(376): unsure at all Xaa locations
MVKDTKPLAYAANNGYQKEAFDPSAPPPFKIAEIRVAIPKHCWVKNPWRSLSYVLRDVLVIAALMAAASHFNNWLLWLIYWPIQGTMFWALFVLGHDCGHGSFSDSPFLNSLVGHILHSSILVPYHGWRISHRTHHQNHGHIEKDESWVPLTEKIYKNLDNMTRLIRFTVPFPLFVYPIYLFSRSPGKEGSHFNPYSNLFPPSERKGIAISTLCWATMFSLLIYLSFITSPLLVLKLYGIPYWIFVMWLDFVTYLHHHGHHQKLPWYRGKEWSYLRGGLTTVDRDYGWINNIHHDIGTHVIHHLFPQIPHYHLVEAXXAAKSVLGEYYREPERSAPLPFHLIKYLIQSMRQDHFVSDTGDVVYYQTDSLLLHSQRD

SEQ ID NO: 4859 - protein, 380 aa, Glycine max
MVKDTKPLAYAANNGYQQKGSSFDFDPSAPPPFKIAEIRASIPKHCWVKNPWRSLSYVLRDVLVIAALVAAAIHFDNWLLWLIYCPIQGTMFWALFVLGHDCGHGSFSDSPLLNSLVGHILHSSILVPYHGWRISHRTHHQNHGHIEKDESWVPLTEKIYKNLDSMTRLIRFTVPFPLFVYPIYLFSRSPGKEGSHFNPYSNLFPPSERKGIAISTLCWATMFSLLIYLSFITSPLLVLKLYGIPYWIFVMWLDFVTYLHHHGHHQKLPWYRGKEWSYLRGGLTTVDRDYGWINNIHHDIGTHVIHHLFPQIPHYHLVEATQAAKPVLGDYYREPERSAPLPFHLIKYLIQSMRQDHFVSDTGDVVYYQTDSLLLHSQRD

SEQ ID NO: 4860 - protein, 380 aa, Glycine max
MVKDTKPLAYAANNGYQQKGSSFDFDPSAPPPFKIAEIRASIPKHCWVKNPWRSLSYVLRDVLVIAALVAAAIHFDNWLLWLIYCPIQGTMFWALFVLGHDCGHGSFSDSPLLNSLVGHILHSSILVPYHGWRISHRTHHQNHGHIEKDESWVPLTEKIYKNLDSMTRLIRFTVPFPLFVYPIYLFSRSPGKEGSHFNPYSNLFPPSERKGIAISTLCWATMFSLLIYLSFITSPLLVLKLYGIPYWIFVMWLDFVTYLHHHGHHQKLPWYRGKEWSYLRGGLTTVDRDYGWIYNIHHDIGTHVIHHLFPQIPHYHLVEATQAAKPVLGDYYREPERSAPLPFHLIKYLIQSMRQDHFVSDTGDVVYYQTDSLLLHSQRD

SEQ ID NO: 4861 - protein, 236 aa, Glycine max
  unsure (1)..(236): unsure at all Xaa locations
XHEGNPCSCLEKLFRSLDTVTRMLRFTAPFPLLAFPVYLFSRSPGKTGSHFDPSSDLFVPNERKDVITSTACWAAMLGLLVGLGFVMGPIQLLKLYGVPYVIFVMWLDLVTYLHHHGHEDKLPWYRGKEWSYLRGGLTTLDRDYGWINNIAHDIGTHVIHHLFPPIPHYHLVEATEAGKPVFGKYYREPKKSAAPFPFHLIGEIIRSFKTDPFVSDTGDVVFYQTDFKINGSSQLE

SEQ ID NO: 4862 - protein, 161 aa, Glycine max
  unsure (1)..(161): unsure at all Xaa locations
XLSFITSPVLLLKLYGIPYWIFVMWLDFVTYLHHHGHHQKLPWYRGKVTKINRKXEWSYLRGGLTTVDRDYGWINNIHHDIGTHVIHHLFPQIPHYHLVEATQAAKSVLGEYYREPERSAPLPFHLIKYLIQSMRQDHFVSDTGDVVYYQTDSLHLHSHRD

SEQ ID NO: 4863 - protein, 136 aa, Glycine max
  unsure (1)..(136): unsure at all Xaa locations
XKIFVMWLDLVTYLHHHGHEDKLPWYRGKEWSYLRGGLTTLDRDYGWINNIHHDIGTHVIHHLFPQIPHYHLVEATEAAKPVFGKYYREPKKSSPLPFHLIGELIKSFKTDHFVSDKGDVVYYQTDSEINGSSKSE

SEQ ID NO: 4864 - protein, 158 aa, Glycine max
  unsure (1)..(158): unsure at all Xaa locations
MVKDTKPLAYAANNGYQQKGSSFDFDPSAPPPFKIAEIRASIPKHCWVKNPWRSLSYVLRDVLVIAALVAAAIHFDNWLLWLIYCPIQGTMFWALFVLGHDCGHGSFSDSPLLNSLVGHILHSSILVPYHGWRISHRTHHQNHGHIEKDESWVPLTEX

SEQ ID NO: 4865 - protein, 361 aa, Rhizobium leguminosarum bv. viciae
MVLAQRDYSLVGRGSRAAVASGLAAAEWYHTDVPRKEMKALMQRSDAPAIRDTALWLGSMAVFAGLGIYFWGSWIALPFFLAYGVLYGSASDSRWHECGHGTAFKTRWMNAIVYQIACFMIMRNPVTWRWSHARHHTDTVIVGRDPEIAVMRPPDLLRLILDFFGILDVWHAVVDTLRNSAGNVSEEEKTFIPETEQRKVVRVARIWLASYAGTIALSMWLGSVLPLLLIGLPRLYGAWHAAMTGLLQHGGLADNVTDYRLNSRTVYMNPISRFIYWNMNYHVEHHMFPMVPYHALPKLHALIKHDLPAPNTSIIDGYREMIPAFIRQLRYEDYYVKRELPPTAKPYHEELHGAQRVSAAE

SEQ ID NO: 4866 - protein, 481 aa, Neurospora crassa
MASVSSALPEGNKPALRRTQTEATSDSYPGTADASPFDSPLERSASNTSLSSQASDNVKTDKAEFGKLLDTYGNEFEVPDFTIKDIRDAIPAHCFERSALHSLAHVVRDIIYLTVTFYVWNKYVTPEYIPMKAARVVLWGLYTFMQGLFGTGLWVLAHECGHQAFSPSRLINDTVGWVLHSALLVPYFSWKFSHSKHHKATGNIERDMVFVPRTREQFASRIGRFVHEISELTEETPIYTLIHLIGQQLIGWPNYLMTNVTGHNFHERQREGRGKGKKNGWFTGVNHFNPSSPLYEEREAPWIIVSDIGIAIAATALIYLGNTFGWSNMFVWYFLPYLWVNHWLVAITYLQHTDPSLPHYTPDQWNFVRGAAATIDREFGFIGRHLLHGIIETHVLHHYVSTIPFYHADEASEAIKKVMGRHYRADVQDGPIGFIKAMWKAARWCQWVEPTEGAEGKGKGVLFYRNQNGLGVKPAKLPKTN

SEQ ID NO: 4867 - protein, 429 aa, Neurospora crassa
MTVTTRSHKAAAATEPEVVSTGVDAVSAAAPSSSSSSSSQKSAEPIEYPDIKTIRDAIPDHCFRPRVWISMAYFIRDFAMAFGLGYLAWQYIPLIASTPLRYGAWALYGYLQGLVCTGIWILAHECGHGAFSRHTWFNNVMGWIGHSFLLVPYFSWKFSHHRHHRFTGHMEKDMAFVPATEADRNQRKLANLYMDKETAEMFEDVPIVQLVKLIAHQLAGWQMYLLFNVSAGKGSKQWETGKGGMGWLRVSHFEPSSAVFRNSEAIYIALSDLGLMIMGYILYQAAQVVGWQMVGLLYFQQYFWVHHWLVAITYLHHTHEEVHHFDADSWTFVKGALATVDRDFGFIGKHLFHNIIDHHVVHHLFPRIPFYYAEEATNSIRPMLGPLYHRDDRSFMGQLWYNFTHCKWVVPDPQVPGALIWAHTVQSTQ

SEQ ID NO: 4868 - protein, 421 aa, Chlamydomonas sp. W80
MAMAMPKLGGLRMRPAAPSAAGVPVLGARRCAVKVRTAAPAMTVSDPTKAGFMSDEDRAALAKELGYRQLGKELPDHVTLNTIVQSMPKEVFEIDHGKAWRAVLTSITAMAGCLYLISVSPWYLLPFAWALAGTAFTGFFVVGHDAGHRSFHKNNLIEDIVGTIMFAPLIYPFEPWRIKHNHHHAHTNKLEEDTAWVPIEQEKMKDWNGVTSALFKFFLGTPLKLWASVGHWAIWHFDLNKYTEKQRPRVIVSLLACAAFACTVLPWLVINHGVWGLVKYWLMPWLGYHFWMSTFTVIHHTAPHIPFKPAAEWNAAKAQLSGTVHCDFPAWVEFLTHDISVHVPHHVSSKIPWYNLRKAHASLKENWGEHMCETTFNWRMLKNIFTELHVYDEKTFGYKPFDWKKEEPLFAAQRAAYPNSM

SEQ ID NO: 4869 - protein, 395 aa, Punica granatum
MGADGTMSPVLTKRRPDQEINKLDIKPNHEVDIARRAPHSKPPFTLSDLRSAIPPHCFHRSLLMSSSYLIRDFALAFLFYHSAVTYIPLLPKPLACMAWPVYWFLQGSNMLGIWVIAHECGHQAFSNYGWVNDAVGFFLHTSLLVPYFPFKYSHRRHHSNTNSVEHDEVFVPRHKDGVQWYYRFFNNTPGRVLTLTLTLLVGWPSYLAFNASGRPYDGFASHYNPNAQIFNLRERFWVHVSNIGILAIYYILYRLATTKGLPWLLSIYGVPVLILNAFVVLITFLQHSHPALPHYNSDEWDWLRGALATVDRDYGFLNEVFHDITDTHVIHHLFPTMPHYNAKEATVSIRPILKDYYKFDRTPIWRALWREAKECLYVEADGTGSKGVLWFKSKF

SEQ ID NO: 4870 - protein, 374 aa, Punica granatum
MGADGTMSPVLTKRRPDQEINKLDIKPNHEVDIARRAPHSKPPFTLSDLRSAIPPHCFHRSLLMSSSYLIRDFALAFLFYHSAVTYIPLLPKPLACMAWPVYWFLQGSNMLGIWVIAHECGHQAFSNYGWVNDAVGFFLHTSLLVPYFPFKYSHRRHHSNTNSVEHDEVFVPRHKDGVQWYYRFFNNTPGRVLTLTLTLLVGWPSYLAFNASGRPYDGFASHYNPNAQIFNLRERFWVHVSNIGILAIYYILYRLATTKGLPWLLSIYGVPVLILNAFVVLITFLQHSHPALPHYNSDEWDWLRGALATVDRDYGFLNEVFHDITDTHVIHHLFPTMPHYNAKEATVSIRSILKDYYKFDRTPIWRALWREAKE

SEQ ID NO: 4871 - protein, 387 aa, Punica granatum
MGAGGRMTVPNKWEGEGDEKSQKPVQRVPSAKPPFTLSEIKKAIPPHCFKRSLLKSFSYVLYDLTLVAIFYYVATTYIDALPGPLRYAAWPVYWALQGCVLTGVWVIAHECGHHAFSDYQWVDDCVGLVLHSALLVPYFSWKYSHRRHHSNTGSLERDEVFVPKPKSKMPWFSKYLNNPPGRVMTLIVTLTLGWPLYLALNVSGRPYDRFACHFDPYGPIYTDRERLQIYISDVGIMAATYTLYKIAAARGLAWLVCVYGVPLLIVNAFLVTITYLQHTHPALPHYDSSEWDWLRGALATADRDYGILNKVFHNITDTHVAHHLFSTMPHYHAMEATKAIKPILGDYYQFDGTPVYKAMWREARECLYVEPDDGANSKGVFWYKKNL

SEQ ID NO: 4872 - protein, 387 aa, Punica granatum
  unsure (1)..(387): unsure at all Xaa locations
MGAGGRMTVPNKWEGEGDEKSQKPVQRVPSAKPPFTLSEIKKAIPPHCFKRSLLKSFSYVLYDLTLVAIFYYVATTYIDALPGPLRYAAWPVYWALQGCVLTGVWVIAHECGHHAFSDYQWVDDCVGLVLHSALLVPYFSWKYSHRRHHSNTGSXERDEVFVPKPKSKMPWFSKYLNNPPGRVMTLIVTLTLGWPLYLALNVSGWPYDRFACHFDPYGPIYTDRERLQIYISDVGIMAATYTLYKIAAARGLAWLVCVYGVPLLIVNAFLVTITYLQHTHPALPHYDSSEWDWLRGALATADRDYGILNKVFHNITDTHVAHHLFSTMPHYHAMEATKAIKPILGDYYQFDGTPVYKAMWREARECLYVEPDDGANSKGVFWYKKNL

SEQ ID NO: 4873 - protein, 396 aa, Mucor circinelloides
MATKRNVTSNAPAAEDISISNKAVIDEAIERNWEIPNFTIKEIRDAIPAHCFRRDTFRSFTHVLHDIIIMSILAIGASYIDSIPNTYARIALWPLYWIAQGIVGTGVWVIGHECGHQAFSPSKTINNSVGYVLHTALLVPYHSWRFSHSKHHKATGHMSKDQVFVPSTRKEYGLPPREQDPEVDGPHDALDEAPIVVLYRMFLQFTFGWPLYLFTNVSGQDYPGWASHFNPKCAIYDENQFWDVMSSTAGVLGMIGFLAYCGQVFGSLAVIKYYVIPYLNVNFWLVLITYLQHTDPKLPHYRENVWNFQRGAALTVDRSYGFLLDYFHHHISDTHVAHHFFSTMPHYHAEEATVHIKKALGKHYHCDNTPVPIALWKVWKSCRFVEDEGDVVFFKN

SEQ ID NO: 4874 - protein, 384 aa, Gossypium hirsutum
MGAGGRMSVPPSQRKQESGSMKRVPISKPPFTLSEIKKAIPPHCFQRSLIRSFSYLVYDFILVSIFYYVATTYFHNLPQPLSFVAWPIYWTLQGSVLTGVWVIAHECGHHAFSDYQWIDDTVGLILHSSLLVPYFSWKYSHRRHHSNTGSLERDEVFVPKKRSSIRWWAKYLNNPPGRFVTVTIQLTLGWPLYLAFNVAGRPYEGLACHYNPYGPIYNDRERLQIYISDVGVLAVTYGLYRLVLAKGLAWVICVYGVPLLIVNAFLVMITYLQHTHPALPHYDSSEWDWLRGALATVDRDYGILNKVFHNITDTHVAHHLFSTMPHYHAMEATKAIKPILGEYYSFDGTPVYKAIFREAKECIYVEPDEGEQSSKGVFWFRNKI

SEQ ID NO: 4875 - protein, 385 aa, Gossypium hirsutum
MGAGGRMPIDGIKEENRGSVNRVPIEKPPFTLGQIKQAIPPHCFRRSLLRSFSYVVHDLCLASFFYYIATSYFHFLPQPFSYIAWPVYWVLQGCILTGVWVIAHEWGHHAFRDYQWVDDTVGLILHSALLVPYFSWKISHRRHHSNTGSMERDEVFVPKPKSKLSCFAKYLNNPPGRVLSLVVTLTLGWPMYLAFNVSGRYYDRLASHYNPYGPIYSDRERLQVYISDTGIFAVIYVLYKIAATKGLAWLLCTYGVPLLIVNAFLVLITYLQHTHSALPHYDSSEWDWLRGALSTMDRDFGVLNKVFHNITDTHVAHHLFSTMPHYHAMEATKAIKPILGKYYPFDGTPIYKAMWREAKECLYVEPDVGGGGGGSKGVFWYRNKF

SEQ ID NO: 4876 - protein, 383 aa, Gossypium hirsutum
MGAGGRMSVPTSPKKPEFNSLKRVPYSKPPFTLSEIKKAIPPHCFQRSVLRSFSYLLYDFILASLFYHVATNYFPNLPQALSNVAWPLYWAMQGCILTGVWVIAHECGHHAFSDYQWLDDTVGLILHSSLLVPYFSWKYSHRRHHSNTGSLERDEVFVPKKKSGLRWWAKHFNNPPGRFLSITIQLTLGWPLYLAFNVAGRPYDRFACHYDPYGPIFSDRERLQIYISDAGVLAVAYALYRLVLAKGVGWVISVYGVPLLVVNAFLVMITYLQHTHPSLPHYDSSEWDWMRGALSTVDRDYGILNKVFHNITDTHVAHHLFSTMPHYHAMVATKAIKPILGEYYQFDGMPVYKAIWREAKECLYVEPDEGDKDKGVFWFRNKL

SEQ ID NO: 4877 - protein, 182 aa, Gossypium hirsutum
YEGLACHYNPYGPIYNDRERLQIYISDVGVLAVTYGLYRLVLAKGLAWVICVYGVPLLIVNAFLVMITYLQHTHPALPHYDSSEWDWLRGALATVDRDYGILNKVFHNITDTHVAHHLFSTMPHYHAMEATKAIKPILGEYYSFDGTPVYKAIFREAKECIYVEPDEGEQSSKGVFWFRNKI

SEQ ID NO: 4878 - protein, 377 aa, Calendula officinalis
MGAGGRMSDPSEGKNILERVPVDPPFTLSDLKKAIPTHCFERSVIRSSYYVVHDLIVAYVFYYLANTYIPLIPTPLAYLAWPVYWFCQASILTGLWVIGHECGHHAFSDYQLIDDIVGFVLHSALLTPYFSWKYSHRNHHANTNSLDNDEVYIPKRKSKVKIYSKLLNNPPGRVFTLVFRLTLGFPLYLLTNISGKKYGRFANHFDPMSPIFNDRERVQVLLSDFGLLAVFYAIKLLVAAKGAAWVINMYAIPVLGVSVFFVLITYLHHTHLSLPHYDSTEWNWIKGALSTIDRDFGFLNRVFHDVTHTHVLHHLISYIPHYHAKEARDAIKPVLGEYYKIDRTPIFKAMYREAKECIYIEPDEDSEHKGVFWYHKM

SEQ ID NO: 4879 - protein, 383 aa, Calendula officinalis
MGAGGRMQDPTNGGNKTEPEPIQRVPHEKPPFTVGDIKKAIPPHCFNRSVIRSFSYVFYDLTIASILYYIANNYISTLPSPLAYVAWPVYWAVQGCVLTGVWVIAHECGHHAFSDHQWLDDTVGLVLHSFLLVPYFSWKYSHRRHHSNTGSIEHDEVFVPKLKSGVRSTARYLNNPPGRILTLLVTLTLGWPLYLTFNVSGRYYDRFACHFDPNSPIYSKRERAQIFISDAGILAVVFVLFRLAMTKGLTWVLTMYGGPLLVVNGFLVLITFLQHTHPSLPHYDSTEWDWLRGALTTIDRDYGILNKVFHNITDTHVAHHLFSTMPHYHAMEATKVIKPILGDYYQFDGTSIFKAMYRETKECIYVDKDEEVKDGVYWYRNKI

SEQ ID NO: 4880 - protein, 374 aa, Calendula officinalis
MGKGASNKKVLERVPITKPPFEYNDLKKAVPPHCFSRPLFRSFYFLLHDIIVTCILFYVASNYIPMLPGFLSYIVWPVYWISQGVFLGRLWMIGHECGHHSFSNYRWVDDSVGFLIHTATLTPYFSFKYSHRNHHAHTNSMEYDEVHIPKRKSEALDLYFEFLGNNPMGLMITMLCKLTFGYAAYIMFNYTGKKHKSGGLASHFYPQSPLFNDSERNHVLFSDVGICIVLYACYRIVMVTGAMSAFYVYGIPWVIMSAILFAATYLQHTHPSIPHYDTTEWNWLRGALSTIDRDLGFFNMNKTHYHVIHHLFPVIPEYHAQEATEAIKPILGQYYKYDGTPFLKALWREMKDCIYVESDQGQKKQGIYWFKNKI

SEQ ID NO: 4881 - protein, 372 aa, Calendula officinalis
MGKAASAKKVLERVPISKPPFEYNDLKKAVPPHCFSRPLSRSLYFLFHDIIVTCILFYVASNYIHMLPRFLSCIVWPVYWISQGVFLGRLWMIGHECGHHSFSNYRWVDDTVGFLIHTATLTPYFSFKYSHRNHHAHTNSMEYDEVHIPKRKSEALYFEFLGNNPIGLMITMLCKLTFGYAAYIMFNYTGKKHKSGGLASHFYPQSPLFNDSERNHVLFSDIGICIVLYACYRIVTVTGAMPAFYVYGIPWVIMSAILFAATYLQHTHPSIPHYDTTEWNWLRGALSTIDRDLGFFNMNKTHYHVIHHLFPVIPEYHAQEATEAIKPILGQYYKYDGTPFLKALWREMKECIYVESDEGQKKQGIYWFKNKT

SEQ ID NO: 4882 - protein, 382 aa, Helianthus annuus
MGAGGRMSSPNGKEKDGPKPLERALHEKPPFTVGDIKKVIPPHCFKRSVIRSFSYVVYDLTIASIFYYLANNYIPLLPNSLAYVAWPVYWIFQGCVLTGVWVIAHECGHHAFSDYQWLDDTVGLILHSALLVPYFSWKYSHRRHHSNTGSIEHDEVFVPKLKSSVRSTAKYLNNPPGRILTLLVTLTMGWPLYLMFNVSGRYYDRFACHFDPNSPIYSNRERAQIFISDAGILTVFYILFRLASTKGLVWVLTMYGGPLLVVNGFLVLITFLQHTHPSLPHYDSTEWDWLRGALATVDRDYGILNKVFHNITDTHVTHHLFSTMPHYHAMEATKAIKPILGDYYQFDGTSIFKAMYRETKECIYVDKDEDVKDGVYWYRNKI

SEQ ID NO: 4883 - protein, 383 aa, Helianthus annuus
MGAGGRMSNPVNGEKKPNPDPLQRVPYQKPPFTVGDVKKAIPPHCFNRSVIRSFSYVVYDLTIASIFYYLANNYIALLPSPLAYVAWPVYWICQGCVLTGVWVIAHECGHHAFSDYQWLDDTVGLVLHSALLVPYFSWKYSHRRHHSNTGSIEHDEVFVPKLKSGVRSTARLLNNPPGRILTLLVTLTMGWPLYLMFNVSGRYYDRFACHFDPNSPIYSNRERAQIFISDAGILTVLFVLFRVAMTKGLTWVLTMYAGPLLVVNGFLVLITFLQHTHPSLPHYDSTEWDWLRGALATIDRDYGVLNKVFHNITDTHVAHHLFSTMPHYHAMEATKVIKPILGEYYQFDGTSIFKAMYRETKECIYVDKDEEVKDGVYWYRNKI

SEQ ID NO: 4884 - protein, 378 aa, Helianthus annuus
MGAGEYTSVTNENNPLDRVPHAKPPFTIGDLKKAIPPHCFQRSLTRSFSYVLSDLTITAVLYHIATTYFHHLPTPLSSIAWASYWVVQGCVLTGVWVIAHECGHHAFSDYQWVDDTVGFVLHSSLLVPYFSWKYSHHRHHSNTGSLERDEVFVPKSRSKVPWYSKYFNNTVGRIVSMFVTLTLGWPLYLAFNVSGRPYDRFACHYVPTSPMYNERKRYQIVMSDIGIVITSFILYRVAMAKGLVWVICVYGVPLMVVNAFLVLITYLQHTHPGLPHYDSSEWEWLKGALATVDRDYGVLNKVFHHITDTHVVHHLFSTMPHYNAMEAQKALRPVLGEYYRFDKTPFYVAMWREMKECLFVEQDDEGKGGVFWYKNKMN

SEQ ID NO: 4885 - protein, 786 aa, Dictyostelium discoideum
MGKGSGAPLKEKVYPSVMYGNIKPIRKQPKSLPKELTIDQILQSLPKEVFETSNFKSACSLLITILFIGLSATFITLMPSYLTPIGWMLMGASVTGLMVIGNDCIHKTFSKNPLVNSIIGTIVMLPLLYPFQSYKISEKNNAEKKSTAVLNGEQFKINAHTTTESTNPIRQWATGKFFWILSIINWSENYFSTKNLSDKKDKTKAIVSIAIVYIFGFIFFPMMFKFVGVSGFLNYWFAPWLVLHFLLSTASLLPSIPFYEELQVASKLEKSNNNNNNNKGDKKSSEVEKYLVHITYPQWFEFIVKDINFSLPRQIAVSIPHYNLRKAYNSFKKSWGEYIYECTFETELFKELIIRSENFSNEIFSPFDSAPLVPDQEKKAEATAEAVSNSRTSRTVKEFLKSINWLHVIILIGIPFIGLYGLINVECSLKTFIWSFIYYHFTGMGITAGYHRLWAHKAYSAVLPVRIILLLFGAGAVEGSCRWWSRDHRAHHRYLDTDKDPYSASLGFWHSHFIWLMFKQDPKKIGRANIDDLNADPWVMWQHKHYIKIATFMGLVFPTLVAGLGWGDWAGGYFYSGVLRLVTVQHSTFLVNSLAHYLGDSPYDDEHTPKDSVVTAILTFGEGYHNFHHEFPNDYRNAYKFYQYDPTKWLISAMYYLGLAYDLKTFSKNEIEKGMIQMHQKHLDAKKQSIYWGINKEDLPSMTIDEFNNLVEKENKKLMIINKTVLDVESFVNDHPGGLAYIKMGIGKDATSMFTGEVYAHSNAAKNLLCQFSIAKIVDNHDKKQQ

SEQ ID NO: 4886 - protein, 383 aa, Impatiens balsamina
MGEVGPTNRTKTKLDKQQESENRVPHEPPPFTLSDLKKAIPPHCFERSLVKSFYHVIHDIIILSFFYYVAANYIPMLPQNLRYVAWPIYWAIQGCVQLGILVLGHECGHHAFSDYQWVDDMVGFVLHSSQLIPYFSWKHSHRRHHSNTASIERDEVYPPAYKNDLPWFAKYLRNPVGRFLMIFGALLFGWPSYLLFNANGRLYDRFASHYDPQSPIFNNRERLQVIASDVGLVFAYFVLYKIALAKGFVWLICVYGVPYVILNGLIVLITFLQHTHPNLPRYDLSEWDWLRGALSTVDRDYGMLNKVFHNVTDTHLVHHLFTTMPHYRAKEATEVIKPILGDYYKFDDTPFLKALWKDMGKCIYVESDVPGKNKGVYWYNNDI

SEQ ID NO: 4887 - protein, 374 aa, Crepis palaestina
MGAGGRGRTSEKSVMERVSVDPVTFSLSELKQAIPPHCFQRSVIRSSYYVVQDLIIAYIFYFLANTYIPTLPTSLAYLAWPVYWFCQASVLTGLWILGHECGHHAFSNYTWFDDTVGFILHSFLLTPYFSWKFSHRNHHSNTSSIDNDEVYIPKSKSKLARIYKLLNNPPGRLLVLIIMFTLGFPLYLLTNISGKKYDRFANHFDPMSPIFKERERFQVFLSDLGLLAVFYGIKVAVANKGAAWVACMYGVPVLGVFTFFDVITFLHHTHQSSPHYDSTEWNWIRGALSAIDRDFGFLNSVFHDVTHTHVMHHLFSYIPHYHAKEARDAIKPILGDFYMIDRTPILKAMWREGRECMYIEPDSKLKGVYWYHKL

SEQ ID NO: 4888 - protein, 379 aa, Crepis palaestina
MGAGGRMQDPSNDKTTTERVPYQKPPFTVGELKKAIPPHCFNRSVIRSFSYVVYDLTIASIFYYIATNYIHTLPQPLTYFAWPIYWALQGCVLTGVWVIAHECGHHAFSDHQWLDDTVGLILHSFLLVPYFSWKYSHRRHHSNTGSIEHDEVFVPKLKSDLRSTAKYLNNPPGRILTLLVTLTLGWPLYLMFNVSGRYYDRFACHFDPNSPIYSNRERAQIFISDAGIFAVLYGLFRLATIKGLGWVLAMYGGPLLVVNGFLVLITFLQHTHASLPHYDSTEWDWLRGALATIDRDYGILNKVFHNITDTHVTHHLFSTMPHYHAMEATKAIKPILGDYYQFDGTSVFKAMYRETKECIYVDKDAEVKDGVYWYRNKIE

SEQ ID NO: 4889 - protein, 347 aa, Synechococcus sp.
MTSVTVRPSATTLLEKHPNLRLRDILDTLPRSVYEINPLKAWSRVLLSVAAVVGCYALLAIAPWYLLLPVWFLTGTTLTGFFVIGHDCGHRSFSRKNWVNNLVGHLAFLPLIYPFHSWRILHNHHHRYTNNMDEDNAWAPFTPELYDDSPAFIKAVYRAIRGKLWWLASVIHQLKLHFNWFAFEGKQREQVRFSALFVIIAGAIAFPVMFYTLGVWGVVKFWLMPWLGYHFWMSTFTLVHHTVPEIPFSYRDKWNEAIAQLSGTVHCDYPKWVEVLCHDINVHVPHHLSTGIPSYNLRKAYASIKQNWGEYLYETKFSWELMKAITEQCHLYDAEHNYISFAQHQKR

SEQ ID NO: 4890 - protein, 351 aa, Spirulina platensis
MTLSIVKSEDSSSRPSAVPSDLPLEEDIINTLPSGVFVQDRYKAWMTVIINVVMVGLGWLGIAIAPWFLLPVVWVFTGTALTGFFVIGHDCGHRSFSRNVWVNDWVGHILFLPIIYPFHSWRIGHNQHHKYTNRMELDNAWQPWRKEEYQNAGKFMQVTYDLFRGRAWWIGSILHWASIHFDWTKFEGKQRQQVKFSSLLVIGAAAIAFPTMILTIGVWGFVKFWVIPWLVFHFWMSTFTLLHHTIADIPFREPEQWHEAESQLSGTVHCNYSRWGEFLCHDINVHIPHHVTTAIPWYNLRTPTPVYRKIGGEYLYPECDFSWGLMKQVVDHAICMMRITIISQSLTTKRV

SEQ ID NO: 4891 - protein, 349 aa, Oceanobacillus iheyensis HTE831
MSKQKQAQLRKSVSAFAKSDKRTSIIQLINSILPFFLLWFLAYQSLSISIWLSLGVSVIAAGFVVRIFIIFHDCTHMSFFKNAKANRIVGTITGIITHFAFEKWKRDHAIHHATSSNLDKRGTGDVWVMTVDEYTEASFWGRLSYRLYRNPIIMFGLGPAYLFLISNRFNRKGAKRKERWNTYLINFSIVAIYGLLIWAIGWQAFLIVQLPILFIAGAAGIWLFYVQHQFEDSYFENEDEWDYVKAAVDGSSYYKLPKAIEWITGSIGYHHVHHLSPRVPNYHLEKAHESTPPLHKATTITLLTSLQSLRFRLYDENSKSFVSFKQFKQMENKKKLMHQSKPSRTSLQK

SEQ ID NO: 4892 - protein, 424 aa, Chlamydomonas reinhardtii
MAFALRSPGAVRAPACAQRASGVRAAKPGFLRSAAVARPQVQTNAAALSVPVNQLTDEERANLARELGYKSIGRELPDNVSLTDIIKSMPAEVFKLDHGKAWRACLTTIAACSACWYLISISPWYLLPAAWALAGTAFTGCFVIGHDCGHRSFHENNLIEDIVGHIFFAPLIYPFEPWRIKHNHHHAHTNKLVEDTAWHPVTEADMAKWDSTSAMLYKVFLGTPLKLWASVGHWLVWHFDLNKYTPKQRTRVVISLAVVYGFMATAFPALLYFGGPWAFVKYWLMPWLGYHFWMSTFTVVHHTAPHIPFKKAEEWNAAKAQLSGTVHCDFPNWVEFLTHDISWHVPHHVAPKIPWYNLRKATESLRENWGQYMTECTFNWRVVKNICTECHVYDEKVNYKPFDYKKEEALFAVQRRVLPDSAAF

SEQ ID NO: 4893 - protein, 376 aa, Chlorella vulgaris
MAATRRAPSAEGWTRQPVNTKPAFSVSTLRKAIPAHCWQRSLPRSCAYLAADLLALAALVWASTFIDAAPVPAAVRWLALWPAYWYLAGAVATGIWVIAHECGHQAFSDYQAVNDGVGLVLHSLLLVPYYSWKHSHRRHHSNTGNVVKDEVFVPPTREEVSDKWELEQAWPIRLVKLFITLTLGWPLYLAFNVASRPYEKSWVNHFDPWSPIFSKRELVEVAVSDAALVAVLCGLRQLAASFGWAWLVKTWLVPYLVVNFWLVTITMLQHSHPELPHYGEDEWDWLRGALTTVDRDYGWLLNSLHHHIADTHVAHHLFSQMPHYHAQEATEALKPVLGDYYRSDSRPLLQAIWQDFGSCRYVAPDTPGDGVLWFRK

SEQ ID NO: 4894 - protein, 387 aa, Trichosanthes kirilowii
MGGGEGIEVRSGSSSTKLAFGERITHAKPPFSISQIKKAIPPHCFQRSLYRSFSYVIFDFIFASTFYHIAATNFHRLPHPLHYLAWPLYWFCQGSVFTGLWVIAHECGHRAFSDYQLVDDVVGFLLHTSFLIPYFSFKISHRRHHSNTASLERDEVFVPKPKAKMPWYFKHLTNPPARVLIIFITLTLGWPMYLAFNISGRFYERFTSHFDPNSPIFSENEWLQVHISNAGIVAVWYLLYKLAAAKGIAWVIRMYVVPVTIMNAFVVLITSLQHTHPSFPYYDSTEWNWLRGNLVTLDRDYGILNKVFHNITDTHVVHHLFPSMPHYNAMEATRAVKQVLGEYYHFDGTPIFKAAWREFRECIYVEPDNDEGASSSSKGVFWFRNKL

SEQ ID NO: 4895 - protein, 369 aa, Trichosanthes kirilowii
MEKGVQERVPHAKPPFTLSQIKKVVPPHCFHRSLLRSFSYLLSDLAFVSLFFYLAIAYFPLLPHPFPYIAWPLYWIFQGCSLTGVWVIAHECGHHAFSDYQLIDDIVGLFFHSALLVPYFSWKYSHRRHHSNTGSLERDEVFVPKPKSQIPWYLKYFNNPPGRLISLIGTLTLGWPLYLAFNMSGRPYDRFACHYDPYSPIFTKREWIQVYISDAGILGMAFMLYRIGVEKGSFWVMRIYGIPLVIVNGFLVLITYLQHTHPALPHYESSEWDWLRGALATVDRDYGVLNRVFHNITDTHVVHHLFSTMPHYHAKEATEAVKPVLGEYYRLDRTPVLKAIWREAKECVYVEPDEDADSDKGVVWYRKKL

SEQ ID NO: 4896 - protein, 383 aa, Arabidopsis thaliana
MGAGGRMPVPTSSKKSETDTTKRVPCEKPPFSVGDLKKAIPPHCFKRSIPRSFSYLISDIIIASCFYYVATNYFSLLPQPLSYLAWPLYWACQGCVLTGIWVIAHECGHHAFSDYQWLDDTVGLIFHSFLLVPYFSWKYSHRRHHSNTGSLERDEVFVPKQKSAIKWYGKYLNNPLGRIMMLTVQFVLGWPLYLAFNVSGRPYDGFACHFFPNAPIYNDRERLQIYLSDAGILAVCFGLYRYAAAQGMASMICLYGVPLLIVNAFLVLITYLQHTHPSLPHYDSSEWDWLRGALATVDRDYGILNKVFHNITDTHVAHHLFSTMPHYNAMEATKAIKPILGDYYQFDGTPWYVAMYREAKECIYVEPDREGDKKGVYWYNNKL

SEQ ID NO: 4897 - protein, 383 aa, Arabidopsis thaliana
  unsure (1)..(383): unsure at all Xaa locations
MGAGGRMPVPTSSKKSETDTTKRVPCEKPPFSVGDLKKAIPPHCFKRSIPRSFSYLISDIIIASCFYYVATNYFSLLPQPLSYLAWPLYWACQGCVLTGIWVIAHECGHHAFSDYQWLDDTVGLIFHSFLLVPYFSWKYSHRRHHSNTGSLERDEVFVPKQKSAIKWYGKYLNNPLGRIMMLTVQFVLGWPLYLAFNVSGRPYDGFACHFFPNAPIYNDRERLQIYLSDAGILAVCFGLYRYAAAQGMASMICLYGVPLLIVNAFLVLITYLQHTHPSLPHYDSSEWDWLRGALATVDRDYXILNKVFHNITDTHVAHHLFSTMPHYNAMEATKAIKPILGDYYQFDGTPWYVAMYREAKECIYVEPDREGDKKGVYWYNNKL

SEQ ID NO: 4898 - protein, 384 aa, Brassica juncea
MGAGGRMQVSPSPKKSETDTLKRVPCETPPFTVGELKKAIPPHCFKRSIPRSFSYLIWDIIVASCFYYVATTYFPLLPHPLSYVAWPLYWACQGVVLTGVWVIAHECGHHAFSDYQWLDDTVGLIFHSFLLVPYFSWKYSHRRHHSNTGSLERDEVFVPKKKSDIKWYGKYLNNPLGRTVMLTVQFTLGWPLYWAFNVSGRPYPEGFACHFHPNAPIYNDRERLQIYVSDAGILAVCYGLYRYAAAQGVASMVCLYGVPLLIVNAFLVLITYLQHTHPSLPHYDSSEWDWLRGALATVDRDYGILNKVFHNITDTHVAHHLFSTMPHYHAMEVTKAIKPILGDYYQFDGTPWVKAMWREAKECIYVEPDRQGEKKGVFWYNNKL

SEQ ID NO: 4899 - protein, 377 aa, Brassica napus
MVVAMDQRSNANGDERFDPSAQPPFKIGDIRAAIPKHCWVKSPLRSMSYVARDIFAVVALAVAAVYFDSWFFWPLYWAAQGTLFWAIFVLGHDCGHGSFSDIPLLNTAVGHILHSFILVPYHGWRISHRTHHQNHGHVENDESWVPLPEKLYKNLSHSTRMLRYTVPLPMLAYPLYLWYRSPGKEGSHYNPYSSLFAPSERKLIATSTTCWSIMLATLVYLSFLVGPVTVLKVYGVPYIIFVMWLDAVTYLHHHGHDDKLPWYRGKEWSYLRGGLTTIDRDYGIFNNIHHDIGTHVIHHLFPQIPHYHLVDATKSAKHVLGRYYREPKTSGAIPIHLVESLVASIKKDHYVSDTGDIVFYETDPDLYVYASDKSKIN

SEQ ID NO: 4900 - protein, 383 aa, Brassica napus
MVVAMDQRSNVNGDSGARKEEGFDPSAQPPFKIGDIRAAIPKHCWVKSPLRSMSYVTRDIFAVAALAMAAVYFDSWFLWPLYWVAQGTLFWAIFVLGHDCGHGSFSDIPLLNSVVGHILHSFILVPYHGWRISHRTHHQNHGHVENDESWVPLPEKLYKNLPHSTRMLRYTVPLPMLAYPIYLWYRSPGKEGSHFNPYSSLFAPSERKLIATSTTCWSIMLATLVYLSFLVDPVTVLKVYGVPYIIFVMWLDAVTYLHHHGHDEKLPWYRGKEWSYLRGGLTTIDRDYGIFNNIHHDIGTHVIHHLFPQIPHYHLVDATRAAKHVLGRYYREPKTSGAIPIHLVESLVASIKKDHYVSDTGDIVFYETDPDLYVYASDKSKIN

SEQ ID NO: 4901 - protein, 384 aa, Brassica napus
MGAGGRMQVSPPSKKSETDTIKRVPCETPPFTVGELKKAIPPHCFKRSIPRSFSYLIWDIIIASCFYYVATTYFPLLPHPLSYFAWPLYWACQGCVLTGVWVIAHECGHHAFSDYQWLDDTVGLIFHSFLLVPYFSWKYSHRRHHSNTGSLERDEVFVPKKKSDIKWYGKYLNNPLGRTVMLTVQFTLGWPLYLAFNVSGRPYDGGFACHFHPNAPIYNDRERLQIYISDAGILAVCYGLFRYAAAQGVASMVCFYGVPLLIVNGLLVLITYLQHTHPSLPHYDSSEWDWLRGALATVDRDYGILNKVFHNITDTHVAHHLFSTMPHYHAMEATKAIKPILGEYYQFDGTPVVKAMWREAKECIYVEPDRQGEKKGVFWYNNKL

SEQ ID NO: 4902 - protein, 384 aa, Brassica rapa
MGAGGRMQVSPPSKKSETDNIKRVPCETPPFTVGELKKAIPPHCFKRSIPRSFSYLIWDIIIASCFYYVATTYFPLLPHPLSYFAWPLYWACQGCVLTGVWVIAHECGHHAFSDYQWLDDTVGLIFHSFLLVPYFSWKYSHRRHHSNTGSLERDEVFVPKKKSDIKWYGKYLNNPLGRTVMLTVQFTLGWPLYLAFNVSGRPYDGGFACHFHPNAPIYNDRERLQIYISDAGILAVCYGLYRYAAVQGVASMVCFYGVPLLIVNGFLVLITYLQHTHPSLPHYDSSEWDWLRGALATVDRDYGILNKVFHNITDTHVAHHLFSTMPHYHAMEATKAIKPILGEYYQFDGTPVVKAMWREAKECIYVEPDRQGEKKGVFWYNNKL

SEQ ID NO: 4903 - protein, 312 aa, Brassica rapa
IWDIIIASCFYYVATTYFPLLPHPLSYFAWPLYWACQGCVLTGVWVIAHECGHHAFSDYQWLDDTVGLIFHSFLLVPYFSWKYSHRRHHSNTGSLERDEVFVPKKKSDIKWYGKYLNNPLGRTVMLTVQFTLGWPLYLAFNVSGRPYDGGFACHFHPNAPIYNDRERLQIYISDAGILAVCYGLYRYAAVQGVASMVCFYGVPLLIVNGFLVLITYLQHTHPSLPHYDSSEWDWLRGALATVDRDYGILNKVFHNITDTHVAHHLFSTMPHYHAMEATKAIKPILGEYYQFDGTPVVKAMWREAKECIYVEP

SEQ ID NO: 4904 - protein, 206 aa, Brassica oleracea
SFLLVPYFSWKYSHRRHHSNTGSLERDEVFVPKKKSDIKWYGKYLNNPLGRTVMLTVQFTLGWPLYLAFNVSGRPYDGGFACHFHPNAPIYNDRERLQIYISDAGILAVCYGLYRYAAAQGVASMVCFYGVPLLIVNGFLVLITYLQHTHPSLPHYDSSEWDWLRGALATVDRDYGILNKVFHNITDTHVAHHLFSTMPHYHAMEA

SEQ ID NO: 4905 - protein, 222 aa, Brassica oleracea
  unsure (1)..(222): unsure at all Xaa locations
KQIGQDLPDNVTLKDIMDTLPKEVFEIDDVKAWKSVLISVTSYALGLFMIAKAPWYLLPLAWAWTGTAVTGFFVIGHDCAHKSFSKNKLVEXIVGTLAFLPLVYPYEPWRFKHDRHHAKTNMLVHDTAWQPVPPEEFDSSPVLRKAIIFGYGPIRPWLSIAHWVNWHFNLRKFRPSEVNRVKISLACVFAFMAVGWPLIIYKVGVLGWVKFWLMPWLGYHFW

SEQ ID NO: 4906 - protein, 387 aa, Glycine max
MGLAKETIMGGGGRVAKVEIQQKKPLSRVPNTKPPFTVGQLKKAIPPHCFQRSLLTSLSYVVYDLSLAFIFYIATTYFHLLPHPFSLIAWPIYWVLQGCILTGVWVIAHECGHHAFSKYPWVDDVMGLTVHSALLVPYFSWKISHRRHHSNTGSLDRDEVFVPKPKSKVAWYTKYLNNPLGRAASLLITLTIGWPLYLAFNVSGRPYDGFASHYHPYAPIYSNRERLLIYVSDVALFSVTYLLYRVATMKGLVWLLCVYGVPLLIVNGFLVTITYLQHTHYALPHYDSSEWDWLRGALATMDRDYGILNKVFHHITDTHVAHHLFSTMPHYHATEATNAMKPILGEYYRFDDTPFYKALWREARECLYVEPDEGTSEKGVYWYRNKY

SEQ ID NO: 4907 - protein, 387 aa, Glycine max
MGLAKETTMGGRGRVAKVEVQGKKPLSRVPNTKPPFTVGQLKKAIPPHCFQRSLLTSFSYVVYDLSFAFIFYIATTYFHLLPQPFSLIAWPIYWVLQGCLLTGVWVIAHECGHHAFSKYQWVDDVVGLTLHSTLLVPYFSWKISHRRHHSNTGSLDRDEVFVPKPKSKVAWFSKYLNNPLGRAVSLLVTLTIGWPMYLAFNVSGRPYDSFASHYHPYAPIYSNRERLLIYVSDVALFSVTYSLYRVATLKGLVWLLCVYGVPLLIVNGFLVTITYLQHTHFALPHYDSSEWDWLKGALATMDRDYGILNKVFHHITDTHVAHHLFSTMPHYHAMEATNAIKPILGEYYQFDDTPFYKALWREARECLYVEPDEGTSEKGVYWYRNKY

SEQ ID NO: 4908 - protein, 387 aa, Glycine max; identical to SEQ ID NO: 4907

SEQ ID NO: 4909 - protein, 383 aa, Glycine max
MGAGGRTAVPPANRKSEADPLKRVPFEKPQFSLSQIKKAIPPHCFQRSVLRSFSYVVYDLTIAFCLYYVATHYFHLLPGPLSFVAWPIYWAVQGCILTGVWVIAHECGHHAFSDYQLLDDIVGLILHSALLVPYFSWKYSHRRHHSNTGSLERDEVFVPKQKSSIMWYSKYLNNPPGRVLTLAVTLTLGWPLYLAFNVSGRPYDRFACHYDPYGPIYSDRERLQIYISDAGVLAVCYGLFCLAMAKGLAWVVCVYGVPLLVVNGFLVLITFLQHTHPALPHYTSSEWDWLRGALATVDRDYGILNKVFHNITDTHVAHHLFSTMPHYHAMEATKAIKPILGEYYRFDGTPFVKAMWREARECIYVEPDQSTQSKGVFWYNNKL

SEQ ID NO: 4910 - protein, 383 aa, Glycine max
MGAGGRTDVPPANRKSEVDPLKRVPFEKPPFSLSQIKKVIPPHCFQRSVFRSFSYVVYDLTIAFCLYYVATHYFHLLPSPLSFLAWPIYWAVQGCILTGVWVIAHECGHHAFSDYQLLDDIVGLVLHSGLLVPYFSWKYSHRRHHSNTGSLERDEVFVPKQKSCIKWYSKYLNNLPGRVLTLAVTLTLGWPLYLALNVSGRPYDRFACHYDPYGPIYSDRERLQIYISDAGVLAVCYGLFRLAMAKGLAWVVCVYGVPLLVVNGFLVLITFLQHTHPALPHYTSSEWDWLRGALATVDRDYGILNKVFHNITDTHVAHHLFSTMPHYHAMEATKAIKPILGEYYRFDETPFVKAMWREARECIYVEPDQSTESKGVFWYNNKL

SEQ ID NO: 4911 - protein, 383 aa, Glycine max
MGAGGRTDVPPANRKSEVDPLKRVPFEKPPFSLSQIKKVIPPHCFQRSVFRSFSYVVYDLTIAFCLYYVATHYFHLLPSPLSFLAWPIYWAVQGCILTGVWVIAHECGHHAFSDYQLLDDIVGLVLHSGLLVPYFSWKYSHRRHHSNTGSLERDEVFVPKQKSCIKWYSKYLNNPPGRVLTLAVTLTLGWPLYLALNVSGRPYDRFACHYDPYGPIYSDRERLQIYISDAGVLAVCYGLFRLAMAKGLAWVVCVYGVPLLVVNGFLVLITFLQHTHPALPHYTSSEWDWLRGALATVDRDYGILNKVFHNITDTHVAHHLFSTMPHYHAMEATKAIKPILGEYYRFDETPFVKAMWREARECIYVEPDQSTESKGVFWYNNKL

SEQ ID NO: 4912 - protein, 383 aa, Glycine max
MGAGGRTDVPPANRKSEVDPLKRVPFEKPQFSLSQIKKAIPPHCFQRSVLRSFSYVVYDLTIAFCLYYVATHYFHLLPGPLSFRGMAIYWAVQGCILTGVWVIAHECGHHAFSDYQLLDDIVGLILHSALLVPYFSWKYSHRRHHSNTGSLERDEVFVPKQKSCIKWYSKYLNNPPGRVLTLAVTLTLGWPLYLALNVSGRPYDRFACHYDPYGPIYSDRERLQIYISDAGVLAVVYGLFRLAMAKGLAWVVCVYGVPLLVVNGFLVLITFLQHTHPALPHYTSSEWDWLRGALATVDRDYGILNKVFHNITDTHVAHHLFSTMPHYHAMEATKAIKPILGEYYRFDETPFVKAMWREARECIYVEPDQSTESKGVFWYNNKL

SEQ ID NO: 4913 - protein, 383 aa, Glycine max; identical to SEQ ID NO: 4912

SEQ ID NO: 4914 - protein, 387 aa, Ricinus communis
MGGGGRMSTVITSNNSEKKGGSSHLKRAPHTKPPFTLGDLKRAIPPHCFERSFVRSFSYVAYDVCLSFLFYSIATNFFPYISSPLSYVAWLVYWLFQGCILTGLWVIGHECGHHAFSEYQLADDIVGLIVHSALLVPYFSWKYSHRRHHSNIGSLERDEVFVPKSKSKISWYSKYSNNPPGRVLTLAATLLLGWPLYLAFNVSGRPYDRFACHYDPYGPIFSERERLQIYIADLGIFATTFVLYQATMAKGLAWVMRIYGVPLLIVNCFLVMITYLQHTHPAIPRYGSSEWDWLRGAMVTVDRDYGVLNKVFHNIADTHVAHHLFATVPHYHAMEATKAIKPIMGEYYRYDGTPFYKALWREAKECLFVEPDEGAPTQGVFWYRNKY

SEQ ID NO: 4915 - protein, 362 aa, Oryza sativa (japonica cultivar-group)
MQRSPVDKPPFTLGDIKKAIPPHCFHRSVIKSFSYLLHDLAIAAGLLYFALVGIPALPSILRLVAWPLYWAAQGSVLTGVWVIGHECGHHAFSDYLLLDNLVGLVLHSALLTPFFSWKYSHRRHHANTGSMEKDEVYVAKKKSALPWYTPYVFGNPVGRLVYIALQLTLAWPLYLAFNLSGQPYPRLVTCHYDPYSPLFSDQERVQVLVSDAAILAVLLALHRLTAAYGLWWVVRVYGVPVMIVGALFVLITYLHHTHRALPHYDSSEWEWLRGSLATVDRDYGVLNRVLHNVTDTHVLHHLFPSMPHYHAMEATRAARPVLGEYYKFDRTPIIEATWREAKECMYVEPRERDGIYWYNNKF

SEQ ID NO: 4916 - protein, 390 aa, Oryza sativa (japonica cultivar-group)
MGTSSRPTTVKEGKKLEAPRRAGSHAAVKRSPVDKPPFTLGDIRKAIPPHCFHRSVIKSFSYLLHDLAIAAGLLYFALVVIPALPGVLRLVAWPFYWAAQGCFLFGVWIIAHECGHHAFSGHALLDDTLGLVLHSWLLAPYFSWKYTHQRHHSNTSSQERDEVFVPRFKSDLPWYSPYVYKYNNPVARLLLLVVQLTVGWPMYLVFNTWGRQYPRFASHFDPSGPIYKGRERVFIAISDIGMLAVSLALYRLAEGYGFWWVVRVYGVPLLVVNAWLVVVTYLHHTHRAIPHYDSSEWDWLRGALATVDRDYSFLNRVFHNITDTHVVHHLFPTIPHYHAVEATKAIRPILGEYYQFDPTPIVKAIWREAKECIYIQSEDHKGVFWYSNKF

SEQ ID NO: 4917 - protein, 382 aa, Petroselinum crispum
MGAGGRMPINPQGKNSEEVLQRVPVSKPPFTVGDIKKAIPPHCFKRSVIRSFSYVVYDLVIASILYFVATNYIQLLPHPLSYIAWPIHGFVQGCFLTGIWVIAHECGHHAFSDYQWLDDTVGLILHSSLLVPYFSWKYSHRRHHSNTGSLERDEVFVPKPKSELQSVAKYTNNPPGRVLTLLVTLTLGWPLYLLFNVSGRHYERFACHYDPKSPIYSDRERAQILVSDAGVLAVSYGLYRLAVAKGLTWVLCVYGGPLLVVNGFLVLITFLQHTHPALPHYNSSEWDWLRGALATVDRDYGILNKVLHNITDTHVAHHLFSTMPHYNAMEATKAIKPILGDYYRFDDTPVVKAMWREAKECLYVEPDEGDQGKGIFWYNNKL

SEQ ID NO: 4918 - protein, 383 aa, Petroselinum crispum
MGAGGRMSAPSNGKKTEAEALRRAPHEKPPFTIGDLKKAIPAHCFEKSLVTSFRYLIQDLIMAYALFYVATNYIDQYLPHPLNYLGWAAYIAVQGCVLTGAWVVGHECDHDAFSDYGWVNDLVGLVVHSSLMVPYFSWKISHRRHHANTQSLENDEVYVPRFKSSIRNYYKIMNNPPGRVLVWLITLLIGFPLYLMFNVSGHKYERWTSHYDPHSPLYTERERKQIIVSDIAILAVLYGLYNLVLAKGFAWVFCFYGGPLLVVNGWFTLITILNHTHPSLPYYDSSEWDWLRGALCTVDRDYGILNKVFHNVCNAHVCHHIFSMIPHYHGLEATEAMKPILGNYYQYDGTPILKAMYREMKECIYVEKDAGETKGVYWYRKEF

SEQ ID NO: 4919 - protein, 382 aa, Petroselinum crispum
MGAGGRMSAPNGKKTEAEALRRAPHEKPPFTIGDLKKAIPAHCFEKSLITSFRYLIQDLIMAYAIYYVATNYIDQYLPHPLNYLGWAAYIAVQGCVLTGAWVVGHECDHDAFSDYGWINDLVGLVVHSSLLVPYFSWKISHRRHHANTQSLENDEVYVPRFKSNIRNYYKMMNNPPGRVLIWLITLLVGFPLYLMFNVSGHKYERWTSHYDPHSPLYTERERTQIIVSDVAILAVLYGLYNLVLAKGFAWVFCVYGGPLLVVNMWFTLITILNHTHPSLPYYDSTEWDWLRGALCTVDRDYGILNKVFHNVCNAHVCHHIFSMIPHYHGLEATEAMKPLLGNYYQYDGTPIIKAMYREMKECIYVQKDEGETKGVYWYRKEF

SEQ ID NO: 4920 - protein, 384 aa, Petroselinum crispum
MGAGGRMSTAPPNGKKTQAEALKRAPHEKPPFTIGDLKKSIPAHCFEKSLVTSFRYLIQDLLMAYALYYVATNYIDQYLPHPINYLGWAAYIAVQGCVLTGAWVVGHECDHDAFSDYGWINDLVGLVVHSSLMVPYFSWKISHRRHHANTQSLENDEVYVPRFKSNIRNYYKILNNPPGRVLVWVITLLVGFPLYLMFNVSGHKYERWTSHYDPHSPLYTECERKQIIVSDVAILAVIYGLYRLVLIKGFAWVFCVYGGPLLVVNMWFTLITILNHTHPSVPYYDSTEWDWLRGALCTVDRDYGILNKVFHNVCNAHVCHHIFSMIPHYHGLEATEAMKPVLGDYYQYDGTPILKAMYREMKECIYVEKDEGETKGVYWYRKEI

SEQ ID NO: 4921 - protein, 384 aa, Petroselinum crispum
MGAGGRMSTAPSNGKKTQAEALKRAPHEKPPFTIGDLKKSIPAHCFEKTLVTSFRYLIQDLIMAYALYYVATNYIDQYLPHPINYLGWAAYIAVQGCVLTGAWVVGHECDHDAFSDYGWINDLVGLVVHSSLMVPYFSWKISHRRHHANTQSLENDEVYVPRFKSNIRNYYKILNNPPGRVLVWVITLLVGFPLYLMFNVSGHKYERWTSHYDPHSPLYTERERKQIIVSDVAILAVIYGLYRLVLIKGFAWVFCVYGGPLLVVNMWFTLITILNHTHPSVPYYDSTEWDWLRGALCTVDRDYGILNKVFHNVCNAHVCHHIFSMIPHYHGLEATEAMKPLLGDYYQYDGTPILKAMYREMKECIYVEKDEGETKGVYWYRKEI

SEQ ID NO: 4922 - protein, 384 aa, Petroselinum crispum
MGAGGRMSTAPPNGKKTQAEALKRAPHDKPPFTIGDLKKSIPAHCFEKSLVTSFRYLIQDLLMAYALYYVATNYIDQYLPHPVNYLGWAAYIAVQGCVLTGAWVVGHECDHDAFSDYGWINDLVGLVVHSSLMVPYFSWKISHRRHHANTQSLENDEVYVPRFKSNIRNYYKILNNPPGRVLVWVITLLVGFPLYLMFNVSGHKYERWTSHYDPHSPLYTERERKQIIVSDVAILAVIYGLYRLVLIKGFAWVFCVYGGPLLVVNMWFTLITILNHTHPSVPYYDSTEWDWLRGALCTVDRDYGILNKVFHNVCNAHVCHHIFSMIPHYHGLEATEAMKPVLGDYYQYDGTPILKAMYREMKECIYVEKDEGETKGVYWYRKEI

SEQ ID NO: 4923 - protein, 383 aa, Petroselinum crispum
MGAGGRMSDPPSGKKTAAEALKRAPHEKPPFTIGDLKKAIPAHCFQKSLVTSFRYLIQDLFMAYALFYVATNYIDQYLPTPFNYVAWAAYIAVQGCVLTGAWVVGHECDHDAFSNYNWINDLVGLVVHSSLLVPYFSWKISHRRHHANTQSLENDEVYVPRFKSNIRNYYKLLNNPPGRVLVWLTTLLIGFPLYLMFNVSGHKYERWTSHYDPHSPLYSDRERKEIIVSDIAILAVIYDLYQLVLAKGFAWVFCVYGGPLLVVNGWFVLYTILNHTHPSLPYYDSTEWDWLRGALCTVDRDYGILNKVFHNVCNAHVCHHIFSMIPHYHGLESTEAMKPILGEYYQYDGTPILKAMYREMKECIYVEKDEGETKGVYWYRNKF

SEQ ID NO: 4924 - protein, 383 aa, Petroselinum crispum
MGAGGRMSAPSNAKKSQAEALRRAPHEKPPFTIGDLKKAIPAHCFEKSLITSFRYLIQDLLMAYALYYVATNYINQYLPHPVNYLGWAAYIAVQGCVLTGAWVVGHECDHDAFSDYGWVNDLVGLVVHSSLMVPYFSWKISHRRHHANTQSLENDEVYVPRFRSNIRNYYKILNNPPGRVLVWVITLLVGFPLYLMFNVSGHKYERWTSHYDPHSPLYTERERKQIIVSDVAILAVIYGLYRLVLIKGFAWVFCVYGGPLLVVNMWFTLITILNHTHPSVPYYDSTEWDWLRGALCTVDRDYGILNKVFHNVCNAHVCHHIFSMIPHYHGLEATEAMKPLLGDYYQYDGTPIIKAMYREMKECIYVEKDEGETKGVYWYRKDI

SEQ ID NO: 4925 - protein, 384 aa, Petroselinum crispum
MGAGGRMSTAPSNGKKTQAEALKRAPHEKPPFTIGDLKKSIPAHCFEKSLVTSFRYLIQDLIMAYALYYVATNYIDQYLPHPINYLGWAAYIAVQGCVLTGAWVVGHECDHDAFSDYGWINDLVGLVVHSSLMVPYFSWKISHRRHHANTQSLENDEVYVPRFKSNIRNYYKILNNPPGRVLVWVITLLVGFPLYLMFNVSGHKYERWTSHYDPHSPLYTERERKQIIVSDVAILAVIYGLYRLVLIKGFAWVFCVYGGPLLVVNMWFTLITILNHTHPSVPYYDSTEWDWLRGALCTVDRDYGILNKVFHNVCNAHVCHHIFSMIPHCHGLEATEAMKPLLGDYYQYDGTPILKTMYREMKECIYVEKDEGETKGVYWYRKEI

SEQ ID NO: 4926 - protein, 376 aa, Petroselinum crispum
SAPSNTKKTQAEALRRAPHEKPPFTIGDLKKAIPAQCFEKSILTSFRYLIQDLIMAYALYYVATNYIDQYLPHPLNYLGWAAYIAVQGCVLTGAWVVGHECDHDAFSDYGWVNDLVGLVVHSSLMVPYFSWKISHRRHHANTQSLENDEVYVPRFRSSIRNYYKILNNPPGRVLVWVTTLLIGFPLYLMFNVSGHKYERWTSHYDPHSPLYTERERKQISVSDVAILAVIYGLYRLVLIKGFAWVFCVYGGPLLVVNGWFTLITILNHTHPSVPYYDSTEWDWLRGALCTVDRDYGILNKLFHNVCNAHVCHHIFSMIPHYHGLEATEAMKPLLGDYYQYDGTPILKAMYREMKECIYVEKDEGDTKGVYWYRKDI

SEQ ID NO: 4927 - protein, 383 aa, Petroselinum crispum
MGAGGRMSAPSNAKKSQAEALRRAPHEKPPFTIGDLKKAIPAHCFEKSLITSFRYLIQDLLMAYALYYVATNYINQYLPHPVNYLGWAAYIAVQGCVLTGAWVVGHECDHDAFSDYGWVNDLVALVVHSSLMVPYFSWKISHRRHHANTQSLENDEVYVPRFRSNIRNYYKILNNPPGRVLVWVITLLVGFPLYLMFNVSGHKYERWTSHYDPHSPLYTERERKQIIVSDVAILAVIYGLYRLVLIKGFAWVFCVYGGPLLVVNMWFTLITILNHTHPSVPYYDSTEWDWLRGALCTVDRDYGILNKVFHNVCNAHVCHHIFSMIPHYHGLEATEAMKPLLGDYYQYDGTPIIKAMYREMKECIYVEKDEGETKGVYWYRKDI

SEQ ID NO: 4928 - protein, 333 aa, Lycopersicon esculentum
MGGGGNMSAMTSKNEQKKNPLERVPSSKPPFTLGDVKKAIPPHCFERSLVKSFSFLIQDLILVYIFYYIANTYIHLIPTPYRYVAWTTYWIAQGCVCTGIWVIGHECGHHGFSDYQWVDDIVGLILHSALLTPYFAWKHSHRRHHANTGSLENDEIYIPRLKSKLRGKKYDRFACHYDPYSPIYSNRERLQIYISDVGVIATTYLLYRVTLTQGLAGFIVLITLMHHTHSSLPHYDSSEWDHLRGALATVDRDYGLLNKVFHNVTDTHVLHHIFSYISHYHAMEAKKAIKPLLGEYYKYDDTPILKAMWRDTKECIFVEKDKDKGVYWYKNKL

SEQ ID NO: 4929 - protein, 379 aa, Nicotiana tabacum
MGSLGISEIYDKNSFNEMEFEFDPSAPPPFRLAEIRNVIPKHCWVKDPLRSLSYVVRDVIFVATLIGIAIHLDSWLFYPLYWAIQGTMFWAIFVLGHDCGHGSFSDSQLLNNVVGHILHSAILVPYHGWRISHKTHHQNHGNVETDESWVPMPEKLYNKVGYSTKFLRYKIPFPLLAYPMYLMKRSPGKSGSHFNPYSDLFQPHERKYVVTSTLCWTVMAALLLYLCTAFGSLQMFKIYGAPYLIFVMWLDFVTYLHHHGYEKKLPWYRGKEWSYLRGGLTTVDRDYGLFNNIHHDIGTHVIHHLFPQIPHYHLREATKAAKPVLGKYYREPKKSGPIPFHLVKDLTRSMKQDHYVSDSGEIVFYQTDPHIFRSAPKDE

SEQ ID NO: 4930 - protein, 383 aa, Sesamum indicum
MGAGGRMSDPTTKDEQKKNPLQRVPYAKPPFTLGDIKKAIPPHCFERSVSRSFSYVVYDLVIVFLLYYIATSYFHLLPSPYCYLAWPIYWAVQGCVCTGIWVIAHECGHHAFSDYQWLDDTVGLILHSALLVPYFSWKYSHRRHHSNTGSLERDEVFVPKPKSRVSWYSKYLNNPLGRVITLVVTLTLGWPLYLLFNVSGRPYNRFACHFDPYGPIYNDRERLQIFISDAGIIAAVCVLYRVALVKGLAWLVCVYGVPLLIVNGFLVLITFLQHTHPSLPHYDSSEWDWLRGALATVDRDYGVLNKVFHNITDTHVTHHLFSTMPHYHAMEATKAIKPILGQYYQFDGTPFYKAMWREAKECLYVEPDESTPDKGVFWYKNKF

SEQ ID NO: 4931 - protein, 381 aa, Oryza sativa
MGAGGRMTEKEREEQQKRAAVQRSPTDKPPFTLGQIKKAIPPHCFQRSVIKSFSYVVHDLVIVAALLYFALVMIPVLPSGMEFAAWPLYWIAQGCVLTGVWVIAHECGHHAFSDYSVLDDIVGLVLHSSLLVPYFSWKYSHRRHHSNTGSLERDEVFVPKQKSAMAWYTPYVYHNPIGRLVHIFVQLTLGWPLYLAFNVSGRPYPRFACHFDPYGPIYNDRERVQIFISDVGVVSAGLALFKLSSAFGFWWVVRVYGVPLLIVNAWLVLITYLQHTHPALPHYDSSEWDWLRGALATVDRDYGILNKVFHNITDTHVAHHLFSTMPHYHAMEATKAIRPILGEYYQFDPTPVAKATWREAKECIYVEPEDNKGVFWYNNKF

SEQ ID NO: 4932 - protein, 332 aa, Oryza sativa
  unsure (1)..(332): unsure at all Xaa locations
MGAGGRMTEKEREEQQKRAAVQRSPTDKPPFTLGQIKKAIPPHCFQRSVIKSFSYVVHDLVIVAALLYFALVMIPVLPSGMEFAAWPLYWIAQGCVLTGVWVIAHECGHHAFSDYSVLDDIVGLVLHSSLLVPYFSWKYSHRRHHSNTGSLERDEVFVPKQKSAMAWYTPYVYHNPIGRLVHIFVQLTLGWPLYLAFNVSGRPYPRFACHFDPYGPIYNDRERVQIFISDHTHPALPHYDSSEWDWLRGALATVDRDYGILNKVFHNITDTHVAHHLFSTMPHYHAMEATKAIRPILGEYYQFDPTPVAKATWREAKECIYVEPEDNKGVFX

SEQ ID NO: 4933 - protein, 382 aa, Triticum aestivum
  unsure (1)..(382): unsure at all Xaa locations
MGAGGRMTEKEREKQELLGPYQRSPTDKPPFTLGQIKKAIPPHCFQRSIIKSFSYVVHDLVIVAALLYAALVWIPTLPTVLQLGAWPLYWVVQGCVMTGVWVIAHECGHHAFSDYSLLDDTVGLVLHSWLLVPYFSWKYSHRRHHSNTGSLERDEVFVPKQKEALAWYTPYIYNNXPVGRLVHIVVQLTLGWPLYLALNASGRPYPRFACHFDPYGPIYNDRERAQIFISDVGVLAVSLALLKLVSSFGFWWVVRVYGVPLLIVNAWLVLITYLQHTHPALPHYDSTEWDWLRGALATMDRDYGILNRVFHNITDTHVAHHLFSTMPHYHAMEATKAIKPILGEYYQFDPTPVAKATWREAKECIYVEPEDRKGVFWYSNKF

SEQ ID NO: 4934 - protein, 410 aa, Triticum aestivum
  unsure (1)..(410): unsure at all Xaa locations
MPPPPLPTHSYLSSRRPAQRGRSTARRVRALASVPSRRPAPPPSRRVVPPPSAAQAPRREDDGRAPVGAGGARAFPRSRXPSPARPTAKPVSPLGQTKKARAPQGYLRRVIGSFSLXCARDRLSRRSLLYAALRRCRRLAPGLPSGTWPPSWFVAGCATRRCWVIEDECAPPPFSDHSLLDDTIGRCLHXGLLVPYSSWKYSDRRRHSNTGSLERDEXVFVPKQKDALSWYTPYIYGXHFDPYGPIXDAGQRPGAFISDVGVLAVSLALLKLVSSFGFWWVVRVYGVPLLIVNGWLVLITYLQHTHPALPHYDSTEWDWLRGALATMDRDYGILNRVFHNITDTHVAHHLFSTMPHYHAMEATKAIKPILGEYYQFDPTPVAKATWREAKECIYVEPEDRKGVFWYSNKF

SEQ ID NO: 4935 - protein, 138 aa, Triticum aestivum
  unsure (1)..(138): unsure at all Xaa locations
MGAAARRAPEQEQSCKATEDFDAAKPPPFRIGDVRAAVPAHCWRKSPLRSLSYVARDVAVVAALAGAAWWLNSWAVWPLYWAAQGTMFWALFVLGHDCGHGSFSDSGTLNSVVGHLLHTFILVPYNGWRISHRTHHQX

SEQ ID NO: 4936 - protein, 283 aa, Triticum aestivum
  unsure (1)..(283): unsure at all Xaa locations
XPAGLGIKEIYNAIPKHCFQRSALKGYGYILRDIVLLATTFSIWYNYVTPEYIPSTPARAGLWAVYTVLQGLFGTGLWVIAHECGHGAFSDSRLINDITGWVLHSSLLVPYFSWQISHRKHHKATGNMERDMVFVPRTREQQATRLGKMTHELAHLTEETPVFTLIMLVLQQLVGWPNYLMTNVTGHNYHERQKEGRGKGKHNGLGGGVNHFDPRSPLYEHSDAKLIVLSDIGIGLMGTALYFLVQKFGFXHMXIWYFVPYLXVXHWLVAITFXQXHDPTFPT

SEQ ID NO: 4937 - protein, 196 aa, Triticum aestivum
  unsure (1)..(196): unsure at all Xaa locations
MGAGGRMTEKERXAARPRRRRRDLXQRSPTDKPPFTLAQIKKAIPPHCFERSVIKSFSYLVHDLVIVATLLYAALVWIPTLPSVLQLGAWPLYWVVQGCVMTGVWVIAHECGHHAFSDSSLLDDIVGLVLHSWLLVPYFSWKYSHRRHHSNTGSLERDEVFVPKQKEALAWYTPYIYNNPIGRLVHIVVQLTLGWX

SEQ ID NO: 4938 - protein, 229 aa, Triticum aestivum
  unsure (1)..(229): unsure at all Xaa locations
MGAGGRMTEKEREKQELREIFQRAPTDKPAFTLAQIKKAIPPHCFQRSVIKSFSYVVYDLVIIASLLYAALVWIPALPAMQQLGAWPLYWAAQGCVMTGVWVLAHECGHHAFSDYLLLDNILGLVLHSCLFVPYFSWKYSHRRHHANTGSLEHDEVYVPKKKEALPWYTPYIYNNXPVGRLGYIVVQLTPRWAMYLXLNTSGAPYPRFVCHYDPLXPMYSELERAQVFX

SEQ ID NO: 4939 - protein, 168 aa, Triticum aestivum
  unsure (1)..(168): unsure at all Xaa locations
MGAGGRMTEKEREKQEQRGAAYQRSPTDKPPFTLGQIKKAIPPHCFQRSIIKSFSYVVHDLVIVAALLYAALVWIPTLPTVLQLGAWPLYWIVQGCVMTGVWVIAHECGHHAFSDYSLLDDTVGLVLHSWLLVPYFSWKYSHRRHHSXNTGSLERDEVFVPKQKEALX

SEQ ID NO: 4940 - protein, 145 aa, Triticum aestivum
  unsure (1)..(145): unsure at all Xaa locations
XLMTVSRXSNSTLVREEPLIHTIGHRXXWLKSQSRSYLRGGLTTVDRDYGWINNIHHDIGTHVIHHLFPQIPHYHLVEATKAARPVLGRYYREPEKSGPLPVHLITVLLKSLRVDHFVSDVGDVVFYQTDPSLSGDKWTGADKQK

SEQ ID NO: 4941 - protein, 87 aa, Triticum aestivum
  unsure (1)..(87): unsure at all Xaa locations
XRDYGILNRVFHNITDTHVAHHLFSNMPHYHAMEATKAIKPILGEYYHFDATPFAKATWREAKECIYVEPXXDRKGVFWYSNKFSAP

SEQ ID NO: 4942 - protein, 186 aa, Zea mays
  unsure (1)..(186): unsure at all Xaa locations
DKYVRLEISSPQTKLPYPKTEELPFTLQELRNAIPADCFEPSVVRSLGYFFLDVGLIAGFYALAAYLDSWFFYPIFWLIQGTLFWSLFVVGHDCGHGSFSKSKTLNNWIGHLSHTPILVPYHGWRISHRTHHANTGNIDTDESWYPVSEQKYNQMAWYEKLLRFYLPLIAYPXIYLFRDPRYRDIX

SEQ ID NO: 4943 - protein, 381 aa, Zea mays
MGAGGRMTEKEREKQEQLAPMQRSPVEKPPFTLGQIKKAIPPHCFERSVLKSFSYVVHDLVIAAALLYFALAIIPALPSPLRYAAWPLYWIAQGCVCTGVWVIAHECGHHAFSDYSLLDDVVGLVLHSSLMVPYFSWKYSHRRHHSNTGSLERDEVFVPKKKEALPWYTPYVYNNPVGRLVHIVVQLTLGWPLYLATNASGRPYPRFACHFDPYGPIYNDRERAQIFVSDAGVVAVAFGLYKLAAAFGVWWVVRVYAVPLLIVNAWLVLITYLQHTHPSLPHYDSSEWDWLRGALATMDRDYGILNRVFHNITDTHVAHHLFSTMPHYHAMEATKAIRPILGDYYHFDPTPVAKATWREARECIYVEPEDRKGVFWYNKKF

SEQ ID NO: 4944 - protein, 381 aa, Zea mays
MGAGGRMTEKEREKQEQLAPMQRSPVEKPPFTLGQIKKAIPPHCFERSVLKSFSYVVHDLVIAAALLYFALAIIPALPSPLRYAAWPLYWIAQGCVCTGVWVIAHECGHHAFSDYSLLDDVVGLVLHSSLMVPYFSWKYSHRRHHSNTGSLERDEVFVPKKKEALPWYTPYVYNNPVGRVVHIVVQLTLGWPLYLATNASGRPYPRFACHFDPYGPIYNDRERAQIFVSDAGVVAVAFGLYKLAAAFGVWWVVRVYAVPLLIVNAWLVLITYLQHTHPSLPHYDSSEWDWLRGALATMDRDYGILNRVFHNITDTHVAHHLFSTMPHYHAMEATKAIRPILGDYYHFDPTPVAKATWREARECIYVEPEDRKGVFWYNKKF

SEQ ID NO: 4945 - protein, 381 aa, Zea mays; identical to SEQ ID NO: 4944

SEQ ID NO: 4946 - protein, 433 aa, Zea mays
  unsure (1)..(433): unsure at all Xaa locations
HWVPRGRPGLPSSILKASGCPKQSHLLFVAPNSWSNQLLNRQQDSRARRGEGCRMEQPTQQEGKGLTTMQRSIVDKPPFTLADLRKAIPPHCFQRSLIRSCSYLAHDLAIAAGLLYLALAVIPALPGVLLRAAAWPLYWAAQGSIMFGVWVIAHECGHSSFSRYGLLNDALGLVLHSCLLAPYFSWKYSHQRHHANTASLERDEVFVPKQRPEMPWYSPLVXQARQPPSRLVLLAVQLTVGWPMYLAFNTWGRRYSXRFACHFDPYSPIYGDRERAQIAVSDAGVLAVSFALYRLAAAHGLWPVVSVYGVPLLVTNAWLVVVTYLHHTHRALPHYDSSEWDWMRGALATVDRDYGVLNRVFHHIADTHIAHHLFPAIPHYHAMEATRAIRPVLGDYYRSDSTPIAEALWREAKECIYVQRDDQKGVFWYKNVF

SEQ ID NO: 4947 - protein, 384 aa, Zea mays
  unsure (1)..(384): unsure at all Xaa locations
MGAGGRMTEKEREEQEQEQAVQRSPVEKPPFTLGQIKKAIPPHCFERSVLRSFSYVAHDLATAAALLYLAVAVIPALPSPLRYAAWPLYWVAQGCVCTGVWVIAHECGHHAFSDHALLDDAVGLALHSALLVPYFSWKYSHRRHHSNTGSLERDEVFVPRTKEALPWYAPYVHGSPAGRLAHVAVQLTLGWPLYLATNASGRPYPRFACXHFDPYGPIYGDRERAQIFVSDAGVAAVAFGLYKLAAAFGLWWVVRVYAVPLLIVNAWLVLITYLQHTHPALPHYDSGEWDWLRGALATVDRDYGVLNRVFHHITDTHVAHHLFSTMPHYHAVEATRAIRPVLGDYYQFDPTPVAKATWREARECIYVEPEIRNSKGVFWYNSKF

SEQ ID NO: 4948 - protein, 385 aa, Zea mays
  unsure (1)..(385): unsure at all Xaa locations
MGAGGRMTEKEREKQEQLAPMQRSPVEKPPFTLGQIKKAIPPHCFERSVLKSFSYVVHDXLVIAAALLYFALAIIPALPSPLGYAAWPLYWIAQGCVCTGVWVIAHECGHHAFSDYSLLDDVVGLVLHSSLMVPYFSWKYSHRRHHSNTGSXLERDEVFVPKKKEALPWYTPYVYNNPVGRLVALVVQLTLGWPLYLATNASGRPYPRFACXHFXDPYGPIYNDRERAQIFVSDAGVVAVAFGLYKLAAAFGVWWVVRVYAVPLLIVNAWLVLITYLQHTHPSLPHYDSSEWDWLRGALATMDRDYGILNRVFHNITDTHVAHHLFSTMPHYHAMEATKAIRPILGDYYHFDPTPVAKATWREAGECIYVEPEDRKGVFWYNKKF

SEQ ID NO: 4949 - protein, 434 aa, Zea mays
MATTLRQRTAPATQSKKERRDSDVLSTSSDEDTSPVSHLENTFPPFEVPNFTTKEVLGAIPAECFERSAAISFAYVARDFAFVAALGYAASFIEPAPGFAAKWAAWAAYWTVQGWVMTGIWILGHECGHQAFSTSKTLNNTVGLFLHSFVLVPYHSWRISHAKHHAATGHLTRDEVFVPRTLSERKFKENPKKVEVDRSHELLEDAPIYRLGWLIVQQLFGWPAYLFTNASGQLSYPAWTNHFDPKSLIFDARHRADVLITDAFLIGMLTLLTLFGQKVGGLEVVKYYGIPYLAVNHWLVCITYLQHTDPSLPHYDATEWNFVRGALCTMDRNLLGPVGPYLMHGICETHVAHHLCSRIPHHNAYAATEALKKFLGPHYASTDESMFVSLWKSYKQCRYVDDEGSVRMYRDAYGRARRTVAPVEVPSDSGVDFE

SEQ ID NO: 4950 - protein, 388 aa, Zea mays
  unsure (1)..(388): unsure at all Xaa locations
MGAGGRMTEKEREKHEQEQVVQRSPVEKPPFTLGQIKKAIPPHCFERSVLRSFSYVAHDLSLAAALLYLAVAXVIPALPCPXLRYAAWPLYWVAPGVRVHGRVWVIAHECGHHAFSDHALLXDDAVGLALHSXALLVPYFSWKYSHRRHHSNTGSLERDEVFVPRTKGAVPWYAPYVHGSPAGRLAHVAVQLTLGWPLYLATNASGRPYPRFACHFDPYGPIYGDRERAQIFVSDAGVAAVAFGLYKLAAAFGLWWVVRVYAVPLLIVNAWLVLITYLQHTHPALPHYDSGEWDWLRGALATVDRDYGVLNRVFHHITDTHVAHHLFSTMPHYHAVEATRAIRPVLGEYYQFDPTPVAKATWREARECIYVEPENRNRKGVFWYNSKF

SEQ ID NO: 4951 - protein, 389 aa, Zea mays
  unsure (1)..(389): unsure at all Xaa locations
MRAGARLIETEEQDPSRRQPLQRAPVEKPPFTLGQIKKAIPPHCFERSVLKSFSYVLRDLVTAATLLYLALVTIPALPSPLQYAAWPLYWIAQGCVCTGLWVIGHECGHNAFSEYPLLDDIVGLVLHSSLMVPYFSWKYSHRRHHSNIGSLERDEVFVPKKKEALPWYTPYVCNSPVGRLLQIVVQLXTLGWPLYLATNASGSPXYPRFAXCHYDPXYGPIYSDRERAQVFVSDAGVVAAWFGLYKLAATFGFLXWVVRVYAVPLVIVNAWLVIVTFLQHTHPALPRYDSSEWGLGXLRGALATMXDRDYGAXLNRVFHNITDTHVVHHLLPTVPHYHAVEATKAIKPILGEYYQFDPPPIAKAMWREARECIYVEPENGRGILWYNKF

SEQ ID NO: 4952 - protein, 365 aa, Zea mays
  unsure (1)..(365): unsure at all Xaa locations
CMPAGWSSRRRRRHSKRAKASPPCSAARSXXRSCSYLAHDLAIAAGLLYLALAVIPALPGVLLRAAAWPLYWAAQGSIMFGVWVIAHECGHSSFSRYGLLNDALGLVLHSCLLAPYFSWKYSHQRHHANTASLERDEVFVPKQRPEMPWYSPLVYKRDNPVARLVLLAVQLTVGWPMYLAFNTWGRRYSRFACHFDPYSPIYGDRERAQIAVSDAGVLAVSFALYRLAAAHGLWPVVSVYGVPLLVTNAWLVVVTYLHHTHRALPHYDSSEWDWMRGALATVDRDYGVLNRVFHHIADTHIAHHLFPAIPHYHAMEATRAIRPVLGDYYRSDSTPIAEALWREAKECIYVQRDDQKGVFWYRNVF

SEQ ID NO: 4953 - protein, 283 aa, Zea mays
  unsure (1)..(283): unsure at all Xaa locations
GAVSXHASARSALPRRSCYDDVVGLVLHSSLMVPYFSWKYSHRRHHSNTGSLERDEVFVPKKKEALPWYTPYVYNNPVGRLVHIVVQLTLGWPLYLATNASGRPYPRFACHFDPYGPIYNDRERAQIFVSDAGVVAVAFGLYKLAAAFGVWWVVRVYAVPLLIVNAWLVLITYLQHTHPSLPHYDSSEWDWLRGALATMDRDYGILNRVFHNITDTHVAHHLFSTMPHYHAMEATKAIRPILGDYYHFDPTPVAKATWREARECIYVEPXXDRKGVFWYNKKF

SEQ ID NO: 4954 - protein, 391 aa, Perilla frutescens
MAVSSGARLSKSGADGEVFDGQQQYEGIGKRAADKFDPAAPPPFKIADIRAAIPAHCWVKNPWRSLSYVVWDVAAVFALLAAAVYINSWAFWPVYWIAQGTMFWALFVLGHDCGHGSFSDNTTLNNVVGHVLHSSILVPYHGWRISHRTHHQNHGHVEKDESWVPLPENLYKKLDFSTKFLRYKIPFPMFAYPLYLWYRSPGKTGSHFNPYSDLFKPNERGLIVTSTMCWAAMGVFLLYASTIVGPNMMFKLYGVPYLIFVMWLDTVTYLHHHGYDKKLPWYRSKEWSYLRGGLTTVDQDYGFFNKIHHDIGTHVIHHLFPQIPHYHLVEATREAKRVLGNYYREPRKSGPVPLHLIPALLKSLGRDHYVSDNGDIVYYQTDDELFPSKKI

SEQ ID NO: 4955 - protein, 390 aa, Perilla frutescens
MAVSSGARLSKSGADGEVFDGQQQYEGIGKRAADKFDPAAPPPFKIADIRAAIPAHCWVKSPWRSLSYVVWDVAAVSARPAAVYINSWAFWPVYWIAQGTMFWALFVLGHDCGHGSFSDNTTLNNVVGHVLHSSILVPYHGWRISHRTHHQNHGHVEKDESWVPLPENLYKKLDFSTKFLRYKIPFPMFAYPLYLWYRSPGKTGSHFNPYSDLFKPNERGLIVTSTMCWAAMGVFLHYATTIVGPNMMFKLYGVPYLIFVMWLDTVTYLHHHGYDKKLPWYRSKEWIYLRGGLTTVDQDYGFFNKIHHDIGTHVIHHLFPQIPHYHLVEATREAKRVLGNYYREPRKSGPVPLHLIPALLKSLGRDHYVSDNGDIVYYHTVDELFPSKKI

SEQ ID NO: 4956 - protein, 383 aa, Vernicia fordii
MGAGGRMSVPPPPKKLESEVLKRVPHSKPPFTLGQLKKAIPPHCFQRSVLRSFSYVVYDLTVAFIFYYIATNYFHLLPQPLSYVAWPIYWALQGCVLTGVWVIAHECGHHAFSDYQLLDDIVGLVLHSCLLVPYFSWKHSHRRHHSNTASLERDEVFVPKKKSSIRWFSKYLNNPPGRLFTLTITLTLGWPLYLAFNVSGRPYDRFACHYDPYGPIYTDRERTEIYISDAGVLAVTFGLYRLAAAKGLAWVICVYGVPLLIVNAFLVMITYLQHTHPSIPHYDSSEWDWLRGALATVDRDYGILNKVFHNITDTHVAHHLFSTMPHYHAMEATKAIKPILGEYYQFDGTPFYKAMWREAKECIYVEADDGDESKGVYWYNKKF

SEQ ID NO: 4957 - protein, 386 aa, Vernicia fordii
MGAGGRMSVAPNNSKCEKKESRSVKRVPHTKPPFTLGQLKQAIPSHCFKRSLLRSFSYVVYDLSLSFIFYSIATTYFHLLPSPITYIAWPVYWAFQGCILTSVWVLGHECGHHAFSEYNWLDDTIGLILHSSLLVPYFSFKISHRRHHSNIASLERDEVFVPRLKSAIPWYSKYLNNPPGRALTLVATLFIGWPLYLAFNVSGRYYDRFACHYDPYSPIYSDRERLQIYISDAMIFVAAYVLYKIAMAKGLAWLVCIYGVPLLIVNALVVTITSLQHTHVALPHYDSSEWDWLRGGLATVDRDYGVFNKIFHNATDTHVIHHLFSSMPHYHGVEATRAIKPILGDYYLFDDTPIHVALWREAKECLFVEPDEGDNNNGVFWYSNKF

SEQ ID NO: 4958 - protein, 255 aa, Vernicia fordii
KAIPPHCFQRSVLRSFSYVVYDLTVAFIFYYIATNYFHLLPQPLSYVAWPIYWALQGCVLTGVWVIAHECGHHAFSDYQLLDDIVGLVLHSCLLVPYFSWKHSHRRHHSNTASLERDEVFVPKKKSSIRWFSKYLNNPPGRLFTLTITLTLGWPLYLAFNVSGRPYDRFACHYDPYGPIYTDRERTEIYISDAGVLAVTFGLYRLAAAKGLAWVICVYGVPLLIVNAFLVMITYLQHTHPSIPHYDSSEWDWLRG

SEQ ID NO: 4959 - protein, 255 aa, Vernicia fordii
KAIPPHCFKRSLLRSFSYVVYDLSLSFIFYSIATTYFHLLPSPITYIAWPVYWAFQGCILTSVWVLGHECGHHAFSEYNWLDDTIGLILHSSLLVPYFSFKISHRRHHSNIASLERDEVFVPRLKSAIPWYSKYLNNPPGRALTLVATLFIGWPLYLAFNVSGRYYDRFACHYDPYSPIYSDRERLQIYISDAMIFVAAYVLYKIAMAKGLAWLVCIYGVPLLIVNALVVTITSLQHTHVALPHYDSSEWDWLRG

SEQ ID NO: 4960 - protein, 227 aa, Nilaparvata lugens
MSSVITFLLAFCMILLVECQNANDRCSIDMDDTLEKVEWKTMHSNCTLEVKDQIKMEYNAAMIYLSLGVHFSRDFVNRPGFAKFFFESASEERQHAIKLIEYLSMRGESVTDIAKLVKLDPETMPGMASVSLNGKEALEKALQQEVLVTNNILKVMKACENEEVKDAAWTLPNDYHLVDWLTAEFLDEQYKGQRDIAGKLSTLLKMGSSNYHLGEFLFDKKLLSNEA

SEQ ID NO: 4961 - protein, 137 aa, Hordeum vulgare subsp. vulgare
VEFNASYAYHSLFAYFDRDNVALKGFAKFFKESSDEERGHAEKLMEYQNKRGGRVRLQSIVTPLTEFDHPEKGDALYAMELALALEKLVNEKLHNLHSVATRCNDPQLTDFVESEFLQEQVDAIKKISEYVAQLRRV

SEQ ID NO: 4962 - protein, 173 aa, Thermoanaerobacter tengcongensis
MLSERMLEELNKQLNYEIYSAYLYVAMENYFQEKNLEGFANFFKVQMEEELSHARIFYEYIYRMGGKVTLYPIEKPEENFESILDVFKKALEHEKTVTQRIHKLVDLAIEERDHATNAFLQWFVNEQVEEEESFQKIINKLELIGDSMQPIFMLDSELAKRTFVLPAPLAKSE

SEQ ID NO: 4963 - protein, 223 aa, Liolophura japonica
MKVLLVLAFVGLAFVAAEDKRLTCTAFSDSLIEKMNDQINLELHASYLYHGYARYFDRDDVALSGFADFFKHASSEEKDHADKLMEYMNTRGCRFLLKDITYKDVCDKINEKKPAELSSACICEFTAAATGGDPSSCSANRPEWFNGKQAMENALTIEHHVNDELLKLHRSTNDPHFEKFLEDNYLDEQVNAIKELSDYITILKRTGDGLGEYLFDKDLDSKY

SEQ ID NO: 4964 - protein, 250 aa, Malus xiaojinensis
MALAPSKVSTFSGFSPKPSVGGAQKNPTCSVSLSFLNEKLGSRNLRVCASTVPLTGVIFEPFEEVKKSELAVPTAPQVSLARQNYADECESAINEQINVEYNASYVYHSLFAYFDRDNVALKGFAKFFKESSEEEREHAEKLMKYQNTRGGRVVLHAIKNVPSEFEHVEKGDALYAMELALSLEKLVNEKLLNVHSVADRNNDPQMADFIESEFLSEQVESIKKISEYVAQLRRVGKGHGVWHFDQRLLD

SEQ ID NO: 4965 - protein, 142 aa, Clostridium sordellii
AYFVENNLDGFANFFNVQVKEERDHAYKFFNYISRAGGKIVLQAIEKPKSDFESPLDVFEAALEHEKIISNSIHELVDLAISEKDHTTSSFLRWFVDEQSEEEENMEKVVRKLRLLKNDPAGLLIIDQELAQRAYVPPVQNA

SEQ ID NO: 4966 - protein, 134 aa, Branchiostoma belcheri tsingtaunese
MAVSQVRQNFHEDSEAGINKQINLELYASYVYHSMATYFDRDDVALKGFAKFFRHQSDEEREHAEKLMKYQNMRGGRVVLQHIQKPDHDEWGTGLDAMQAALALEKSVNQSLLDLHKTADTCSDPRRSPTTSPT

SEQ ID NO: 4967 - protein, 212 aa, Apriona germari
MKFFAFAVFVVCSIAFVSAEIECRGENVNVPTDWLDMQQFCVSSVRNQIEEELKAAMQYMAMGAHFSKDIVNRPGFAKMFFEAASEERQHAIKLISYLLMRGELTSKVSELIRSRKLVPQKTYWDSGVEALKDALNLEASVTKKIRKVIKNCEEDSFNDYHIVDYLTGDFLTEQYQGQRDIAGKVSTLEKLKVKHGALGEFLFDKKLLNGEL

SEQ ID NO: 4968 - protein, 166 aa, Staphylococcus aureus subsp. aureus Mu50
MLSKNLLEALNDQMNHEYFAAHAYMAMAAYCDKESYEGFANFFIQQAKEERFHGQKIYNYINDRGAHAEFRAVSAPKIDFSSILETFKDSLSQEQEVTRRFYNLSEIARQDKDYATISFLNWFLDEQVEEESMFETHINYLTRIGDDSNALYLYEKELGARTFDEE

SEQ ID NO: 4969 - protein, 166 aa, Staphylococcus epidermidis ATCC 12228
MLSKELLAALNEQMNQEYFAAHAYMAMAAYCDKESYDGFANFYIEQAKEERFHGKKIYDYINDRGEHAIFDTIKAPKVEFSSILETFKDSLAQERDVTQRFYNLSELARNDKDYATISFLNWFLDEQVEEESTFETHIDYLTRIGDDCNTLYLYEKELAARSFNEQ

SEQ ID NO: 4970 - protein, 168 aa, Anopheles gambiae str. PEST
MISTKVESLINEQIAKEQYAAQYYLAMSAWFETQDLEGLANYFRVQSKEELMHADKMFDYLNDVGGKVILQTIPAPPSEFADALNIFEKALAHEKEVTKSIFNIVKVATEENDFATTSFLQWFINEQVEEEATASQYVSKIKMVKDNPSALYLFDQELGQRVFNADAE

SEQ ID NO: 4971 - protein, 217 aa, Anopheles gambiae str. PEST
EMMKSIFFGIVALMFAAVVMQQDQASAQVTDTDAPSSTDEWNYMNRSCSAKLQDQINKEFDAAIFYMQYGAYFAQYQVNLPGFEKFFFNAASEEREHGMKLIEYALMRGQKPIDRNTFSLNFANPAARVDAEQGSVALTALKAALAKEQEVTKSIRELIKICEEDHNDYHLVDYLTGEFLEEQHQGQRDLAGKITMLSKLLRTNPKLGEFMFDKQNM

SEQ ID NO: 4972 - protein, 172 aa, Araneus ventricosus
MSKGSQIRQNYHEESEAGVNKQINMELYASYVYAAMAFHFDRDDVALPNISQFFKENSDEEKEHANKLMKFQNQRGGTIVLKDIKAPPKAKWGSPLEAFQDALELEKTVNQALLDLHKVASSHDDAQMCDFLESEYLTEQVEAIKKLGDYVTNLKRVGSGLGEFIFDKEFKS

SEQ ID NO: 4973 - protein, 174 aa, Pyrococcus furiosus DSM 3638
MLSERMLKALNDQLNRELYSAYLYFAMAAYFEDLGLEGFANWMKAQAEEEIGHALRFYNYIYDRNGRVELDEIPKPPKEWESPLKAFEAAYEHEKFISKSIYELAALAEEEKDYSTRAFLEWFINEQVEEEASVKKILDKLKFAKDSPQILFMLDKELSARAPKLPGLLMQGGE

SEQ ID NO: 4974 - protein, 206 aa, Yersinia pestis KIM
MFFINNNVNRASLFCFYLGIIHQVNYFLPISKSKGIIMLKKEMAQKLNEQLNLEFYSANLYLQMSAWCSDKGFEGAAAFLKKHSQEEMQHMERLFEYLSGTGSMPVLGTITAPPVDFASLADVFKLTYEHEQLITTQINELAHVAMTTHDYSTFNFLQWYVAEQHEEEKLFKSILDKLALVGNSGNSLFFVDKDLKTMAAQGYTSA

SEQ ID NO: 4975 - protein, 171 aa, Methanothermobacter thermautotrophicus str. Delta H
MVSERMQEALNRQLNAELYSAYLYLSMAAYYEASDLPGFANWMRVQAQEELSHAMKFYDYLVQRGARVVLDEIEKPPFEWESPLEVAKHVLEHEKKVTGLINDLVDLAISERDHATNNFLQWFVAEQVEEEESAGSLLQRVRLASDSPSGLLMLDAELAKRVYNPPADKGE

SEQ ID NO: 4976 - protein, 167 aa, Methanosarcina acetivorans C2A
MLNEKMEEALNEQINKELYSSYLYLSMAAYSSSIGLPGFAHWFKVQVKEETIHGMKIFDYVNEGGRARLKEIKEPPMEFGTPMEMFQKTLQHEQFITRSINDLVELAHSEKDEATASFLQWYVEEQVEEEENDNEIIDKLKIVGENKDALSTLDAELAKRLPPDDEE

SEQ ID NO: 4977 - protein, 168 aa, Bacillus anthracis str. A2012
MLSKKLHDALNDQMNFEFYSAHAYMAMAAYCTAESYDGFANFFLVQAEEERFHAMKLYNYINDRGERAIITGFDNPNNEYESVLNAFEVALEHEREVTKRIYNLSDIAWDEREHATITFLKWFVDEQVEEEASFDSIIQKLKRITSDSNALFMLDAELEKRTFTPPAE

SEQ ID NO: 4978 - protein, 170 aa, Clostridium perfringens str. 13
MLSENLLQRLNEQVNFEFYSSYTYLAMAAYAESVDLSGFANFFRVQAQEELFHAMKFYDYIFQKNGVVELEQIDKPKFNFANIIEAFEKGYEHEQLVTSKIYGLADVAFEEKEHATMSLLKWFIDEQVEEENNFHSLLKKVRRSDGNPAALYMMDDELAARVFTPPTTTK

SEQ ID NO: 4979 - protein, 172 aa, Clostridium thermocellum ATCC 27405
MKDTNKGYREDEKMSKLYDNLNEQMNFELESAYIYATMSAYLDSLNMKGMTHFFDEQVKEEMEHAGKIKKFLQDTGYGIKYRPLNPGDGKFDSIEDVFKKALAHEKTVTSRINDLVKQAREEGDQRVLNLLAWFVDEQIEEENMFGVLVERLERINGHWNGLYILDKELGER

SEQ ID NO: 4980 - protein, 178 aa, Shewanella oneidensis MR-1
MLSATMIEKLNEQINMEFFSSNLYLQMSAWCEDQGFEGAAKFMREHADEEMGHMRRLFTYVSETGGLPLLGAIEAPQSQFNSLLALFELTYEHEQLITRQINALAHTAFSNQDYSTFNFLQWYVAEQHEEEKLFKSIVDKIRLVGEDGKALFFIDKDLAKLASKGGESIMNAQSQPQA

SEQ ID NO: 4981 - protein, 169 aa, Clostridium tetani E88
MISEKLNKAINDQINFEMESENIYLAMRAYCKSIDLDGFANFFDAQVKEERFHCMKFFDYVNQVGGRVEIGAIKGPKNDFDSLVDVFEAAYAHEQIVTKKIYALMDLAMDERDHATISFLKWFIDEQVEEEDTFSTLVSRLERVKDNPTAIYMLDKELEQRVFTAPVVE

SEQ ID NO: 4982 - protein, 169 aa, Yersinia pestis CO92
MLKKEMAQKLNEQLNLEFYSANLYLQMSAWCSDKGFEGAAAFLKKHSQEEMQHMERLFEYLSGTGSMPVLGTITAPPVDFASLADVFKLTYEHEQLITTQINELAHVAMTTHDYSTFNFLQWYVAEQHEEEKLFKSILDKLALVGNSGNSLFFVDKDLKTMAAQGYTSA

SEQ ID NO: 4983 - protein, 164 aa, Methanosarcina barkeri
MLSEKMEEALNEQINKEMYSSYLYLAMSAYSSSVGLSGFAHWFRVQVEEENIHAMKLFDYVNNQGGKVKLKEIKEPPMGFGTAMDMFQQTLKHEQFITRSIHELVELANAEKDKATASFLQWYVEEQVEEEENDNEVIAKLRGVDKNEYVISSVDQELAKRSPP

SEQ ID NO: 4984 - protein, 173 aa, Archaeoglobus fulgidus DSM 4304
MASISEKMVEALNRQINAEIYSAYLYLSMASYFDSIGLKGFSNWMRVQWQEELMHAMKMFDFVSERGGRVKLYAVEEPPSEWDSPLAAFEHVYEHEVNVTKRIHELVEMAMQEKDFATYNFLQWYVAEQVEEEASALDIVEKLRLIGEDKRALLFLDKELSLRQFTPPAEEEK

SEQ ID NO: 4985 - protein, 168 aa, Bacillus cereus ATCC 14579
MLSKKLHDALNEQMNFEFYSAHAYMAMAAYCTAESYDGFANFFLVQAEEERFHAMKLYNYINDRGERAIITGFDNPNNEYESVLNAFEVALEHEREVTKRIYNLSDIAWDEREHATITFLKWFVDEQVEEEASFDSIIQKLKRITSDSNALFMLDAELEKRTFTPPAE

SEQ ID NO: 4986 - protein, 164 aa, Thermotoga maritima
MMVISEKVRKALNDQLNREIYSSYLYLSMATYFDAEGFKGFAHWMKKQAQEELTHAMKFYEYIYERGGRVELEAIEKPPSNWNGIKDAFEAALKHEEFVTQSIYNILELASEEKDHATVSFLKWFVDEQVEEEDQVREILDLLEKANGQMSVIFQLDRYLGQRE

SEQ ID NO: 4987 - protein, 249 aa, Chlamydomonas reinhardtii
MALCARVFGAPAKLAKQQVITPRRTSAPRAVARHATVDKITGIVVQPAVQFSEVQSELATVDKTNQNIQSLARVDFHPACEAAINEQVNIEYNVSYLYHALWAYFDRDNVALPGLAAFFKAGSEEEREHAELLMEYQNRRGGRVVLGAISMPDLDLSASEKGDALYAMELALSLEKLNFQKLRQLHSVADEHGDASMADFVEGELLNEQVEAVKKVSEYVSQLRRVGQGLGVYQFDKQLAAEVAAGAAA

SEQ ID NO: 4988 - protein, 256 aa, Auxenochlorella protothecoides
MSTIATPRVMLARPTTSHTRAPRRAVIRAAGGKDKTEAITGVVFQPFEEVAPVLKDTSKSGALNDPRPEHSFARYSTWTETVEAAVNEQINVEYNISYVYHAISTYFDRDNVSLHGIAEYFRNESEEEKSHAQYLIDLQNTRGGRVKFNALVPPEANYDHPEKGDALYAFELALALEKLNYSKLLGLWEVADKNFRTRRPPSSFEDMLHEQVKDIKQVSDYVAQLRRIGKGHAVWHWDRALAEGKVDHRAVESPKA

SEQ ID NO: 4989 - protein, 132 aa, Pinus taeda
ASDEERGHAEKLMKYQNIRGGKVKLQSILLPAVMEFDNAEKGDALYAMELTLSLEKLTNQKLLNLHAVAQEANDGQDDGFHRGRFSHRQVEAIKKYQICVSVRGLEGHAVWHFDQMLLNGDNVADAGALAAA

SEQ ID NO: 4990 - protein, 253 aa, Paragonimus westermani
MVRKNSRILVPFSSFTDFLACTVKPCSEVFTWMSSGPYPSCNMHSARINYTPETEHAVNKAIQLHQQAVLTYDHLAATCATEEISMPGFCKFFRLCSQRHRELVEHWINFQTMRGGKLNVPEVKPLVQVNDLSKTDLEKIVVIALKTEKTVEQYLRELHKIARSKEDVAMSEYIEKKLILPQLHVIKMMVNHVNGLRVSGNEYLYDRTTMLPLAKKLHCEIIRREGSEYCEETREKKFHPHTSTGVAAFIYPF

SEQ ID NO: 4991 - protein, 253 aa, Arabidopsis thaliana
MLLKASPALSLLSSGSTGGGNLFPPSRNSSNRLFSPSGSKFSVQAAKGTNTKSLTGVVFEPFEEVKKELDLVPTTPFVSLARHKFSDDAESAINDQINVEYNVSYVYHALYAYFDRDNVGLKGFAKFFNDSSLEERGHAEMFMEYQNKRGGRVKLQSILMPVSEFDHEEKGDALHAMELALSLEKLTNEKLLKLQSVGVKNNDVQLVDFVESEFLGEQVEAIKKISEYVAQLRRIGKGHGVWHFDQMLLNDEV

SEQ ID NO: 4992 - protein, 259 aa, Arabidopsis thaliana
MLLKTVSSSSSSALSLVNFHGVKKDVSPLLPSISSNLRVSSGKSGNLTFSFRASKSSTTDALSGVVFEPFKEVKKELDLVPTSSHLSLARQKYSDECEAAINEQINVEYNVSYVYHAMYAYFDRDNIALKGLAKFFKESSLEEREHAEKLMEYQNKRGGRVKLQSIVMPLSEFEHVDKGDALYGMELALSLEKLVNEKLLNLHSVASKNNDVHLADFIESEFLTEQVEAIKLISEYVAQLRRVGKGHGTWHFNQMLLEG

SEQ ID NO: 4993 - protein, 253 aa, Arabidopsis thaliana
MLHKASPALSLLSSGYTGGGNLFPPSRNSSNLLFSPSGSRFSVQAAKGTNTKSLTGVVFEPFEEVKKEMELVPTTPFVSLARHKFSDDSESAINDQINVEYNVSYVYHALYAYFDRDNVGLKGFAKFFNDSSLEERGHAEMFMEYQNKRGGRVKLQSILMPVSEFDHEEKGDALHAMELALSLEKLTNEKLLKLQSVGVKNNDVQLVDFVESEFLGEQVEAIKKISEYVAQLRRIGKGHGVWHFDQMLLNDEV

SEQ ID NO: 4994 - protein, 259 aa, Arabidopsis thaliana
MLLKAASTFSLLNIHGEKKDISPLFSSSSSISSPVSSGKSGNLSFPLRASKSSTTTTSTLSGVVFEPFEEVKKEMDLVPSGQQLSLARHLYSPECEAAVNEQINVEYNVSYVYHALYAYFDRDNVALKGLAKFFKESSVEEREHAELLMEYQNKRGGRVKLQPMVLPQSEFDHPEKGDALYAMELALSLEKLVNEKLLNLHSVASKNDDVQLADFIESVFLNEQVEAIKKISEYVSQLRRLGKGHGTWHFDQELLGAAA

SEQ ID NO: 4995 - protein, 255 aa, Arabidopsis thaliana
MASNALSSFTAANPALSPKPLLPHGSASPSVSLGFSRKVGGGRAVVVAAATVDTNNMPMTGVVFQPFEEVKKADLAIPITSHASLARQRFADASEAVINEQINVEYNVSYVYHSMYAYFDRDNVAMKGLAKFFKESSEEERGHAEKFMEYQNQRGGRVKLHPIVSPISEFEHAEKGDALYAMELALSLEKLTNEKLLNVHKVASENNDPQLADFVESEFLGEQIEAIKKISDYITQLRMIGKGHGVWHFDQMLLN

SEQ ID NO: 4996 - protein, 255 aa, Arabidopsis thaliana
MASNALSSFTAANPALSPKPLLPHGSASPSVSLGFSRKVGGSRAVVVAAATVDTNNMPMTGVVFQPLEEVKKADLAIPITSHASLARQRFADASEAVINEQINVEYNVSYVYHSMYAYFDRDNVAMKGLAKFFKESSEEERGHAEKFMEYQNQRGGRVKLHPIVSPISEFEHAEKGDALYAMELALSLEKLTNEKLLNVHKVASENNDPQLADFVESEFLGEQIEAIKKISDYITQLRMIGKGHGVWHFDQMLLN

SEQ ID NO: 4997 - protein, 160 aa, Arabidopsis thaliana
MSRSMLSITCRMCITLCMHISIVTTLPSRVSPSFFKESSVEEREHAELLMEYQNKRGGRVKLQPMVLPQSEFDHPEKGDALYAMELALSLEKLVNEKLLNLHSVASKNDDVQLADFIESVFLNEQVEAIKKISEYVSQLRRLGKGHGTWHFDQELLGAAA

SEQ ID NO: 4998 - protein, 217 aa, Arabidopsis thaliana
MELVPGYSGSKSLRVKLEWRQKDLEDSAFPRYNVYAENVKSTDLRPRKVLEKPRSETVFLGVAHVPSYYIAELVVESDVKGVRFVFKPVLKMLRFTYHGGAGRNRNCHFLLSMILLVGIDVEYNVSYVYHALDAYIERDNVGLKGFNANRFFNDSSLEERGYAEKFMEYQMHCLVGVKNNDVKLVDFVESEFLGELVEAIKKISEYIDGTKIRSMQW

SEQ ID NO: 4999 - protein, 254 aa, Brassica napus
MASKALSSFTAKPAVSLLPHGVSSSASPSVMSLSFSRHTGGRGVVAASSTVDTNNMPMTGVVFQPFEEVKKADLAIPITSNASLARQRYADSSEAAINEQINVEYNVSYVYHSMYAYFDRDNVALKGLAKFFKESSDEEREHAEKFMEYQNQRGGRVTLHPIVSPISDFEHAEKGDALYAMELALSLEKLTNEKLLNLHRVASENNDPQLADFVESEFLGEQIEAIKKISDFITQLRMVGKGHGVWHFDQMLLN

SEQ ID NO: 5000 - protein, 256 aa, Glycine max
MLLRTASSFSLLKANADHILPLPNSSSSGIIRYSQSLGKNLVPCATKDTNNRPLTGVVFEPFEEVKKELDLVPTVPQASLARQKYTDDCEATINEQINVEYNVSYVYHAMFAYFDRDNVALKGLAKFFKESSEEEREHAEKLMEYQNKRGGKVKLQSIVMPLTEFDHEEKGDALYAMELALSLEKLTNEKLLNLHSVASKNNDVQLADFIESEFLGEQVEAIKKISEYVAQLRRVGKGHGVWHFDQMLLHEEGVAA

SEQ ID NO: 5001 - protein, 256 aa, Glycine max
MLLRTASSFSLLKANADHILPLPNSSSSGIIRYSQSLGKNLVPCATKDTNNRPLTGVVFEPFEEVKKELDLVPTVPQASLARQKYTDDCEATINEQINVEYNVSYVYHAMFAYFDRDNVALKGLAKFFKESSEEEREHAEKLMEYQNKRGGKVKLQSIVMPLSEFDHEEKGDALYAMELALSLEKLTNEKLLNLHSVASKNNDVQLADFIESEFLGEQVEAIKKISEYVAQLRRVGKGHGVWHFDQMLLHEEGVAA

SEQ ID NO: 5002 - protein, 256 aa, Glycine max
  unsure (1)..(256): unsure at all Xaa locations
MLLRTASSFSLLKANADHILPLPNSSSSGIIRYSQSLGKNLVPCATKDTNNRPLTGVVFEPFEEVKKELDLVPTVPQASLARQKYTDDCEATINEQINVEYNVSYVYHAMFAYFDRDNVALKGLAKFFKESSEEEREHAEKLMEYQNKRGGKVKLQSIVMPLSEFDHEEKGDALYAMELALSLEKLTNEKLLNLHSVASKNNDVQLAXFIESEFLGEQVEAIKKISEYVAQLRRVGKGHGVWHFDQMLLHEEGVAA

SEQ ID NO: 5003 - protein, 249 aa, Glycine max
MLLRTAASAASASSLSLFSPTSEPLRSVPARGLVVRAAKGSTNHRALTGVIFEPFEEVKKELDLVPTVPQASLARQKYVDESEAAVNEQINVEYNVSYVYHAMFAYFDRDNVALRGLAKFFKESSEEEREHAEKLMEYQNKRGGRVKLQSIVMPLSEFDHADKGDALHAMELALSLEKLTNEKLLNLHSVATKNGDVQLADFVETEYLGEQVEAIKRISEYVAQLRRVGKGHGVWHFDQILLHEGGDAA

SEQ ID NO: 5004 - protein, 248 aa, Glycine max
MLLRTASSFSLFNANGDHILLPSSVRYSQGKHLVPCATKNSNNRPLTGVVFEPFEEVKKELDLVPTVPQASLARQKYTDESEATINEQINVEYNVSYVYHAMFAYFDRDNVALKGLAKFFKESSEEEREHAEKLMEYQNKRGGKVKLQSIVMPLTEFDHEEKGDALYAMELALSLEKLTNEKLLNLHSVASKNNDVQLADFIESEFLGEQVEAIKKISEYVAQLRRVGKGHGVWHFDQMLLHEEGVAA

SEQ ID NO: 5005 - protein, 248 aa, Glycine max; identical to SEQ ID NO: 5004

SEQ ID NO: 5006 - protein, 247 aa, Glycine max
MLLRTAAASASSLSLFSPNAEPPRSVPARGLVVRAAKGSTNHRALTGVIFEPFEEVKKELDLVPTVPQASLARQKYVDESESAVNEQINVEYNVSYVYHAMFAYFDRDNVALRGLAKFFKESSEEEREHAEKLMEYQNKRGGKVKLQSIVMPLSDFDHADKGDALHAMELALSLEKLTNEKLLNLHSVATKNGDVQLADFVETEYLGEQVEAIKRISEYVAQLRRVGKGHGVWHFDQMLLHEGGDAA

SEQ ID NO: 5007 - protein, 247 aa, Glycine max
MLLRTAAASASSLSLFSPNAEPPRSVPARGLVVRAAKGSTNHRALTGVIFEPFEEVKKELDLVPTVPQASLARQKYVDESESAVNEQINVEYNVSYVYHAMFAYFDRDNVALRGLAKFFKESSEEEREHAEKLMEYQNKRGGKVKLQSIVMPLSDFDHADKGDALHAMELALSLEKLTNEKLLNLHSVATKNGDVQLADFVETEYLGEQVEAIKRISEYVAQLRKSWQGHGVWHFDQMLLHEGGDAA

SEQ ID NO: 5008 - protein, 250 aa, Glycine max
MALAPSKVSSFSGFSPKPSVGDALKNPTCSVSLSFANVKLGSRNLRVCASTVPLSGVIFEPFEEVKKGELAVPTAPQVSLARQNYADECESAINEQIKVEYNASYAYHSLFAYFDRDNVALKGFAKFFKESSEEEREHAEKLMKYQNTRGGRVVLHAIKNVPSEFEHVEKGDALYAMELALSLEKLVNEKLLNVHSVADRNNDPQLADFIESEFLSEQVESIKKISEYVAQLRRVGKGHGVWHFDQRLLD

SEQ ID NO: 5009 - protein, 250 aa, Glycine max
MALAPSKVSTFSGFSPKPSVGGAQKNPTCSVSLSFLNEKLGSRNLRVCASTVPLTGVIFEPFEEVKKSELAVPTAPQVSLARQNYADECESAINEQINVEYNASYVYHSLFAYFDRDNVALKGFAKFFKESSEEEREHAEKLMKYQNTRGGRVVLHPIKNAPSEFEHVEKGDALYAMELALSLEKLVNEKLLNVHSVADRNNDPQMADFIESEFLSEQVESIKKISEYVAQLRRVGKGHGVWHFDQRLLD

SEQ ID NO: 5010 - protein, 250 aa, Glycine max
MALAPSKVSTFSGFSPKPSVGGAQKNPTCSVSLSFLNEKLGSRNLRVCASTVPLTGVIFEPFEEVKKSELAVPTAPQVSLARQNYADECESAINEQINVEYNASYVYHSLFAYFDRDNVALKGFAKFFKESSEEEREHAEKLMKYQNTRGGRVVLHPIKNVPSEFEHVEKGDALYAMELALSLEKLVNEKLLNVHSVADRNNDPQMADFIESEFLSEQVESIKKISEYVAQLRRVGKGHGVWHFDQRLLD

SEQ ID NO: 5011 - protein, 250 aa, Glycine max
GALAPSKVSTFSGFSPKPSVGGAQKNPTCSVSLSFLNEKLGSRNLRVCASTVPLTGVIFEPFEEVKKSELAVPTAPQVSLARQNYADECESAINEQINVEYNASYVYHSLFAYFDRDNVALKGFAKFFKESSEEEREHAEKLMKYQNTRGGRVVLHPIKNVPSEFEHVEKGDALYAMELALSLEKLVNEKLLNVHSVADRNNDPQMADFIESEFLSEQVESIKKISEYVAQLRRVGKGHGVWHFDQRLLD

SEQ ID NO: 5012 - protein, 256 aa, Glycine max
  unsure (1)..(256): unsure at all Xaa locations
MALAPSKVSSXFSGFSPKPSVGDALKNPTCSVSLSXFANVKLGSRNXLRVCASTVPLSGVIFEPFEEVKKGELAVPTAPQVSLARQNYADECESAINEQINVEYNASYAYHSLFAYFDRDNVALKGFAXKFFKESSEEEREHAEKXLMKYQNTRGGRVVLHAIKNVPSEFEHVEKGDALYAMELALSLEKLVNEKLLNVHSVXADRNNDPQLADFIESEFLSEQVESIKKISEYVAQLRRVGKGHGVWHFDQRLLD

SEQ ID NO: 5013 - protein, 257 aa, Glycine max
  unsure (1)..(257): unsure at all Xaa locations
MALSCSKVLSFYLSPVVGGGDVPKKLTFSSFLGLSKGVGGSRSSRVCAASNAPAPLAGVIFEPFQELKKDYLAVPIAHNVSLARQNYADDSESAINEQINVEYNVSYVYHALFAYFDRDNIALKGLAKFFKESSEEEREHAEQLIKYQNIRGGRVVLHPITSPPSEFEHSEKGDALYAMELALSLEKLTNEKLLHVHSVAERNNDPQXADFIESEFLYEQVKSIKKIAEYVAQLRLVGKGHGVWHFDQKLLHDEDHV

SEQ ID NO: 5014 - protein, 254 aa, Glycine max
  unsure (1)..(254): unsure at all Xaa locations
MALAPSKVSTFSGFSPKPSVGGAQKNPTCSVSLSFLNEKLGSRNLRVCASTVPLTGVIFXNPFEEVKKSEXLAVPTAPQVSLXARQNYADECESAINEQIXNVEYNASYVYHSLFAYFDRDNVALKGFAKFFKESSEEEREHAEKLMKYQNTRGGRVVLHPIKNVPSEFEHVEKGDALYAMELALSLEKLVNEKLLNVHSVADRNNDPQMADFIESEFLSEQVESIKKISEYVAQLRRVGKGHGVWHFDQRLLD

SEQ ID NO: 5015 - protein, 257 aa, Glycine max
  unsure (1)..(257): unsure at all Xaa locations
MALSCSKVLSFYLSPVVGGGDVPKKLTFSSFLGLSKGVGGSRSSRVCAASNAPAPLAGVIFEPFQELKKDYLAVPIAHNVXLARQNYADDSESAINEQINVEYNVSYVYHALFAYFDRDNIALKGLAKFFKESSEEEREHAEQLIKYQNIRGGRVVLHPITSPPSEFEHSEKGDALYAMELALSLEKLTNEKLLHVHSVAERNNDPQXADFIESEFLYEQVKSIKKIAEYVAQLRLVGKGHGVWHFDQKLLHDEDHV

SEQ ID NO: 5016 - protein, 249 aa, Glycine max
MALAPSKVSSFSGFSPKPSVGDALKNPTCSVSLSFANVKLGSRNLRVCASTVPLSGVIFEPFEEVKKGELAVPTAPQVSLARQNYADECESAINEQINVEYNASYAYHSLFAYFDRDNVALKGIWQSSSKDEEEREHAEKLMKYQNTRGGRVVLHAIKNVPSEFEHVEKGDALYAMELALSLEKLVNEKLLNVHSVADRNNDPQMADFIESEFLSEQVESIKKISEYVAQLRRVGKGHGVWHFDQRLLD

SEQ ID NO: 5017 - protein, 249 aa, Glycine max; identical to SEQ ID NO: 5016

SEQ ID NO: 5018 - protein, 233 aa, Glycine max
  unsure (1)..(233): unsure at all Xaa locations
MALAPSKVSTFSGFSPKPSVGGAQKNPTCSVSLSFLNEKLGSRNLRVCASTVPLTGVIFEPFEEVKKSELAVPTAPQVSLARQNYADECESAINEQIXXDNVALKGFAKFFKESSEEEREHAEKLMKYQNTRGGRVVLXPIKNVPSEFEHVEKGDALYAMELALSLEKLVNEKLXNVXSVADXNNDPQMADFIESEFLXEQVESIKKISEYVAQXRRVGKGXGVWXFDQRLXD

SEQ ID NO: 5019 - protein, 189 aa, Glycine max
GALAPSKVSTFSGFSPKPSVGGAQKNPTCSVSLSFLNEKLGSRNLRVCASTVPLTGVIFEPFEEVKKSELAVPTAPQVSLARQNYADECESAINEQINVEYNASYVYHSLFAYFDRDNVALKGFAKFFKESSEEEREHAEKLMKYQNTRGGRVVLHPIKNVPSEFEHVEKGDALYAMELALSLEKLVNE

SEQ ID NO: 5020 - protein, 128 aa, Glycine max
KESSEEEREHAEKLMEYQNKRGGKVKLQSIVMPLTEFDHEEKGDALYAMELALSLEKLTNEKLLNLHSVASKNNDVQLADFIESEFLGEQVEAIKKISEYVAQLRRVGKGHGVWHFDQMLLHEEGVAA

SEQ ID NO: 5021 - protein, 151 aa, Glycine max
  unsure (1)..(151): unsure at all Xaa locations
STAQTKSHSHNFRNSKRAAAAAVGQLSGAGLTAGSVRLPVPSAAGSAVCCRAAAKGKEVLSGVMFQPFEELKGELSLVPQGKDQSLARHKFVDECEAALNEQINVEYNASYAYHSLFAYFDRDNVALKGFAKFFKESSDEERGHAEKLMEX

SEQ ID NO: 5022 - protein, 175 aa, Glycine max
MLLRTASSFSLFNANGDHILLPSSVRSSQGKHLVPCASKDTNDRPLTGVVFEPFQDVKKELHLVPTVPHASLARQRYTDDCEAAMNEQINVEYNVSYVYHAMFAYFDRDNVALKGLAKFFKESSEEDRKHAEKLMGYHVTRGVEVKWLCMVKPFAECDHEENGDALDAMEPSFGL

SEQ ID NO: 5023 - protein, 250 aa, Medicago sativa
MALSASKVSIFSPSPIVGHFSKNTTFSSLNLPMDGDKRKNVKVHAAAANAPTALTGVIFEPFEEVKKDVLAVPIAHNVSLARQNYQDEVESAINEQINVEYNVSYVYHSLFAYFDRDNVALKGLAKFFKESSEEEREHAEKLMKYQNIRGGRVVLHPIVSPPSEFDHAEKGDALYAMELALSLEKLVNEKLLNVHSVADRNNDPQLANFIESEFLVEQVESIKKISEYVTQLRLVGKGHGVWHFDQTLLH

SEQ ID NO: 5024 - protein, 254 aa, Phaseolus vulgaris
MALAPSKVSPFSGFSLSDGVGAVRNPTCSVSLSFLNKKVGSRNLGVSASTVPLTGVIFEPFEEVKKEELAVPTAGQVSLARQYYADECESAINEQINVEYNASYVYHSLFAYFDRDNVALKGFARFFKESSEEEREHAEKLMKYQNTRGGRVVLHPIKNVPSEFEHVEKGDALYAMELALSLEKLVNEKLRSVHSVADRNKDPQLADFIESEFLSEQVEAIKKISEYVAQLRMVGKGHGVWHFDQSLLHDGHAA

SEQ ID NO: 5025 - protein, 254 aa, Phaseolus vulgaris
  unsure (1)..(254): unsure at all Xaa locations
MALAPSKVSPFSGFSLSDGVGAVRNPTCSVSLSFLNKKVGSRNLGVSASTVPLTGVIFEPFEEVKKEELXVPTAGQVSLARQYYADECESAINEQINVEYNASYVYHSLFAYFDRDNVALKGFARXFKESSEEEREHAEKLMKYQNTRGGRVVLHPIKNVPSEFEHVEKGDALYAMELALSLEKLVNEKLRSVHSVADRNKDPQLADFIESEFLSEQVEAIKKISEYVAQLRMVGKGHGVWHFDQSLLHDGHAA

SEQ ID NO: 5026 - protein, 206 aa, Pisum sativum
TTAPLTGVIFEPFEEVKKDYLAVPSVPLVSLARQNFADECESVINEQINVEYNASYVYHSLFAYFDRDNVALKGFAKFFKESSEEHREHAEKLMKYQNTRGGRVVLHPIKDVPSEFEHVEKGDALYAMELALSLEKLTNEKLLNVHSVAERNNDLEMTHFIEGEYLAEQVEAIKKISEYVAQLRRVGKGHGVWHFDQRLLHGVHGA

SEQ ID NO: 5027 - protein, 253 aa, Pisum sativum
MALSSSKFSSFSGFSLSPVSGNGVQKPCFCDLRVGEKWGSRKFRVSATTAPLTGVIFEPFEEVKKDYLAVPSVPLVSLARQNFADECESVINEQINVEYNASYVYHSLFAYFDRDNVALKGFAKFFKESSEEHREHAEKLMKYQNTRGGRVVLHPIKDVPSEFEHVEKGDALYAMELALSLEKLTNEKLLNVHSVAERNNDLEMTHFIEGEYLAEQVEAIKKISEYVAQLRRVGKGHGVWHFDQRLLHGVHGA

SEQ ID NO: 5028 - protein, 253 aa, Pisum sativum
MALSSSKFSSFSGFSLSPVSGNGVQKPCFCDLRVGEKWGSRKFRVCATTAPLTGVIFEPFEEVKKDYLAVPSVPLVSLARQNFADECESVINEQINVEYNVSYVYHSMFAYFDRDNVALKGFAKFFKESSEEEREHAEKLMKYQNTRGGRVVLHPIKDVPSEFEHVEKGDALHAMELALSLEKLTNEKLLNVHSVAERNNDLEMTHFIEGEYLAEQVEAIKKISEYVAQLRRVGKGHGVWHFDQRLLHGVHGA

SEQ ID NO: 5029 - protein, 250 aa, Vigna unguiculata
MLLRTAAASSLSLFNPNAEPSRSVPVLANNASRLVVRAAKGSTNHRALTGVIFEPFEEVKKELDLVPTVPQASLARQKYVDESEAAVNEQINVEYNVSYVYHALFAYFDRDNVALRGLAKFFKESSEEEREHAEKLMEYQNRRGGKVKLQSIVMPLSEFDHADKGDALHAMELALSLEKLTNEKLLHLHSVATKNGDVQLADFVESEFLGEQVESIKRISEYVAQLRRVGKGHGVWHFDQMLLHEGGHLA

SEQ ID NO: 5030 - protein, 256 aa, Vigna unguiculata
MALSCSKVLTFSLSSVVGGDDAKKKLSLCSSSSLSASVNGGGSRNMRVCAAASNAPAPLTGVIFEPFQELKKDYLAVPIAPNVSLSRQNYSDEAEAAINEQINVEYNVSYVYHSLFAYFDRDNIALKGLAKFFKESSEEEREHAEKLIKYQNIRGGRVVLHPITSPPSEFEHPEKGDALYAMELALSLEKLTNEKLLYVHSVADRNNDAQLADFIESEFLNEQVESIKKIAEYVTQLRLVGKGHGVWHFDQRLLHD

SEQ ID NO: 5031 - protein, 71 aa, Vigna unguiculata
FEPFEEVKKEELAVPTAPQVSLARQYYADECESAINEQINVEYNASYVYHSLFAYFDRDNVALKGFAKFFK

SEQ ID NO: 5032 - protein, 72 aa, Vigna unguiculata
FEPFEEVKKEELNVPTAPQVSLARQYYADECESAINEQINVEYNASYVYHSLFAYFDRDNVRLKGFAKFFKE

SEQ ID NO: 5033 - protein, 71 aa, Vigna unguiculata
FEPFEEVKKELDLVPTVPQASLARQKYVDESEAAVNEQINVEYNVSYVYHALFAYFDRDNVALRGLAKFFK

SEQ ID NO: 5034 - protein, 72 aa, Vigna unguiculata
FEPFEEVKKELDLVPTVPQVSLARQKYVDESEAAVNEQINVEYNVSYVYHALFAYFDRDNVRLRGLAKFFKE

SEQ ID NO: 5035 - protein, 72 aa, Vigna unguiculata
FEPFEEVKKELLVIPTELHASLARQKYTDQSEAALNAQINVEYNVSYVYHAMYAYFDRDNVRLKGLAKFFKE

SEQ ID NO: 5036 - protein, 71 aa, Vigna unguiculata
FEPFEEVKKELLVIPTELHASLARQKYTDQSEAALNAQINVEYNVSYVYHAMYAYFDRDNVALKGLAKFFK

SEQ ID NO: 5037 - protein, 251 aa, Oryza sativa (japonica cultivar-group)
MLPPRVAPAAAAAAPTYLAAAASTPASVWLPVPRGAGPGAVCRAAGKGKEVLSGVVFQPFEELKGELSLVPQAKDQSLARQKFVDECEAAINEQINVEYNASYAYHSLFAYFDRDNVALKGFAKFFKESSDEERDHAEKLIKYQNMRGGRVRLQSIVTPLTEFDHPEKGDALYAMELALALEKLVNEKLHNLHSVASRCNDPQLTDFVESEFLEEQVEAIKKISEYVAQLRRVGKGHGVWHFDQKLLEEEA

SEQ ID NO: 5038 - protein, 255 aa, Oryza sativa (japonica cultivar-group)
MLPPRVAPSSLAAAAAAAPTYLAAAASTPASVWLPVPRGAGAVAVCRAAGKGKEVLSGVVFQPFEELKGELSLVPQAKDQSLARQKFVDECEAAISEQINVEFNASYAYHSLFAYFDRDNVALKGFAKFFKESSDEERDHAEKLMKYQNMRGGRVRLQSIVTPLTEFDHPEKGDALYAMELALALEKLVNEKLHNLHSVASRCNDPQLTDFVESEFLEEQVEAIKKISEYVAQLRRVGKGHGVWHFDQKLLEEEA

SEQ ID NO: 5039 - protein, 251 aa, Nicotiana tabacum
MLLKAAPAFALLNTQGENLSPLFSSSKSFSPKNGNRFVVSASKATNHKPLTGVVFEPFEELKKELMLVPAVPDTSLCRQKYSDDCEAAINEQINVEYNNSYVYHAMFAYFDRDNVALKGLAKFFKESSLEEREHAEKLMEFQNKRGGRVKLLSICAPPTEFDHCEKGDALYAMELALCLEKLTNQRLLNLHAVASRSNDVHLADFLESEFLVEQVDAIKKISEYVAQLRRVGQGHGVWQFDQMLLNEGAAA

SEQ ID NO: 5040 - protein, 259 aa, Nicotiana tabacum
MLLKLAPAFTLLNSHGENLSPMLSTSSQGFVLKNFSTKSRNGLLVVCASKGSNTKPLTGVVFEPFEEVKKELMLVPTVPQVSLARHKYSDQCEAAVNEQINVEYNVSYVYHGMYAYFDRDNVALKGLARFFKESSEEERGHAEKLMEYQNKRGGKVKLQSILMPLSEFDHAEEGDALYAMELALSLAKLTNQKLLNLHAVATRNNDVQLADFVESKYLREQVEAIKMISEYVAQLRRVGKGHGVWHFDQMLLQEEEVVA

SEQ ID NO: 5041 - protein, 86 aa, Nicotiana tabacum
QINVEYNNSYVYHAMFAYFDRDNVALKGLAKFFKESSLEEREHAEKLMEFQNKRGGRVKLLSICAPPTEFDHCEKGDALYAMELAL

SEQ ID NO: 5042 - protein, 205 aa, Solanum tuberosum
HEATSDVSLTGVVFEPFDEVNKDEFMVPITPHTSLARQRYADECEGAINEQINVEYNISYVYHAMFAYFDRDNVALKGLAKFFKESSEEEKEHAEKLMHYQNIRGGRVKLHSIMMPPSEFDHVDKGDALYAMELALSLEKLTKEKLLTLHSVADRNNDSEMQDFVEREFLAEQVEAIKKIAEYVSQLRRVGKGHGVWHFDQMLLH

SEQ ID NO: 5043 - protein, 251 aa, Oryza sativa; identical to SEQ ID NO: 5037

SEQ ID NO: 5044 - protein, 254 aa, Oryza sativa
MLPPRVAPSSLAAAAAAPTYLAAAASTPASVWLPVPRGAGAGAVCRAAGKGKEVLSGVVFQPFEELKGELSLVPQAKDQSLARQKFVDECEAAINEQINVEFNASYAYHSLFAYFDRDNVALKGFAKFFKESSDEERDHAEKLIKYQNMRGGRVRLQSIVTPLTEFDHPEKGDALYAMELALALEKLVNEKLHNLHSVASRCNDPQLTDFVESEFLEEQVEAIKKISEYVAQLRRVGKGHGVWHFDQKLLEEEA

SEQ ID NO: 5045 - protein, 255 aa, Oryza sativa
  unsure (1)..(255): unsure at all Xaa locations
MLPPRVAPSSLAAAAAAAPTYLAAAASTPASVWLPVPRGAGAVAVCRAAGKGKEVLSGVVFQPFEELKGELSLVPQAKDQSLARQKFVDECEAAINEQINVEFNASYAYHSLFAYFDRDNVALKGFAKFFXESSDEERDHAEKLXKYQNMRGGRVRLQSIVTPLTEFDHPEKGDALYAMELALALEKLVNEKLHNLHSVASRCNDPQLTDFVESEFLEEQVEAIKKISEYVAQLRRVGKGHGVWYFDQKLLEEEA

SEQ ID NO: 5046 - protein, 255 aa, Oryza sativa
  unsure (1)..(255): unsure at all Xaa locations
MLPPRVAPSSLAAAAAAAPTYLAAAASTPASVWLPVPRGAGAVAVCRAAGKGKEVLSGVVFQPFEELKGELSLVPQAKDQSLARQKFVDECEAAINEQINVEFNASYAYHSLFAYFDRDNVALKGFAKFFXESSDEERDHAEKLXKYQNMRGGRVRLQSIVTXLTEFDHPEKGDALYAMELALALEKLVNEKLHNLHSVASRCNDPQLTDFVESEFLEEQVEAIKKISEYVAQLRRVGKGHGVWYFDQKLLEEEA

SEQ ID NO: 5047 - protein, 253 aa, Triticum aestivum
  unsure (1)..(253): unsure at all Xaa locations
MLLRIASSPAAVAAASQLSASSPAHGYARLXXPLAKVSSTACRAAGKGKKVLSGVMFQPFEELKGELSLVPQAEGQSLARQKFVDECEAAINEQINVEYNASYAYHSLYAYFDRDNVALKGFAKFFRESSDEEREHAEMLMEYQNRRGGRVRLQSIVTPLTEFDHSEKGDALYAMELALALEKLVNEKLHNLHSVATRCNDPQLSDFVESQFLXEEQVDAVNKVSKYVAQLRRVGNKGHGVWHFDQMLLQEGA

SEQ ID NO: 5048 - protein, 282 aa, Triticum aestivum
VRPPAPHKPNPAPTISGIASAPPPFGFEMLPRVAPSPATAAAAAAVGQLSGAGLTAGSVRLPVPSAAGSAVCCRAAAKGKEVLSGVMFQPFEELKGELSLVPQGKDQSLARHKFVDECEAALNEQINVEYNASYAYHSLFAYFDRDNVALKGFAKFFKESSDEERGHAEKLMEYQNKRGGRVRLQSIVTPLTEFDHPEKGDALYAMELALALEKLVNEKLHNLHSVATRCNDPQLTDFVESEFLQEQVDAIKKISEYVSQLRRVGKGHGVWHFDQMLLEEAA

SEQ ID NO: 5049 - protein, 276 aa, Triticum aestivum
PHKPNPAPTISGIASAPPPFGFEMLPRVAPSPATAAAAAVGQLSGAGLTAGSVRLPVPSAAGSAVCCRAAAKGKEVLSGVMFQPFEELKGELSLVPQGKDQSLARHKFVDECEAALNEQINVEYNASYAYHSLFAYFDRDNVALKGFAKFFKESSDEERGHAEKLMEYQNKRGGRVRLQSIVTPLTEFDHPEKGDALYAMELALALEKLVNEKLHNLHSVATRCNDPQLTDFVESEFLQEQVDAIKKISEYVSQLRRVGKGHGVWHFDQMLLEEAA

SEQ ID NO: 5050 - protein, 255 aa, Triticum aestivum
MLPRVAPSPATAAAAAAAVGQLSGAGLTAGSVRLPVPSAAGSAVCCRAAAKGKEVLSGVMFQPFEELKGELSLVPQGKDQSLARHKFVDECEAALNEQINVEYNASYAYHSLFAYFDRDNVALKGFAKFFKESSDEERGHAEKLMEYQNKRGGRVRLQSIVTPLTEFDHPEKGDALYAMELALALEKLVNEKLHNLHSVATRCNDPQLTDFVESEFLQEQVDAIKKISEYVSQLRRVGKGHGVWHFDQMLLEEAA

SEQ ID NO: 5051 - protein, 254 aa, Triticum aestivum
MLPRVAPSPATAAAAAAVGQLSGAGLAAGSVRLPVPSAAGSAVCCRAAAKGKEVLSGVMFQPFEELKGELSLVPQGKDQSLARHKFVDECEAALNEQINVEYNASYAYHSLFAYFDRDNVALKGFAKFFRESSDEERGHAEKLMEYQNKRGGRVRLQSIVTPLTEFDHAEKGDALYAMELALALEKLVNEKLHNLHSVATRCNDPQLTDFVESEFLQEQVDAIKKISEYVSQLRRVGKGHGVWHFDQMLLEEAA

SEQ ID NO: 5052 - protein, 260 aa, Triticum aestivum
  unsure (1)..(260): unsure at all Xaa locations
HSPPSSSLRELLRIASSPAAVAAASQLSAPGPAHGSARLPPLAKVSSTACRAAGKGKKVLSGVMFQPFEELKGELSLVPQAEGQSLARQKFVDECEAAINEQINVEYNASYAYHSLYAYFDRDNVALKGFAKFFRESSDEEREHAEMLMEYQNRRGGRVRLQSIVTPLTEFDHSEKGDALYAMELALALEKLVNEKLHNLHSVATRCNDPQLSDFVESQFLQEQVVAXVKKISEYVTQLRRIGKGHGVWHFDRMLLEEEA

SEQ ID NO: 5053 - protein, 234 aa, Triticum aestivum
  unsure (1)..(234): unsure at all Xaa locations
XYYSAPDAQNSRERTRPPPPPVPIQMMLRVSASPAAAVANQLSGGAAAXXAPARVTAQRSGVSLSAAAAGKGKEVLSGVVFQPFEEIKGELALVPQSPDRSLARHKFVDDCEAAINEQINVEYNASYAYHSLFAYFDRDNVALKGFAKFFKESSDEEREHAEKLMEYQNKRGGRVRLQSIVAPLTEFDHPEKGDALYAMELXLCLIQLFWTSLHSLHYMGNACDDTQVLXVLIV

SEQ ID NO: 5054 - protein, 218 aa, Triticum aestivum
  unsure (1)..(218): unsure at all Xaa locations
XVRNPTPTISGIASAPPPFGFEMFQPFEELKGELSLVPQGKDQSLARHKFVDECEAALNEQINVEYNASYAYHSLFAYFDRDNVALKGFAKFFKESSDEERGHAEKLMEYQNKRGGRVRLQSIVTPLTEFDHPEKGDALYAMELALALEKLVNEKLPNLHSVATRCNDPQLTDFVESQFLQEQVDAVKKISEYVTQLRRIGKGHGVWHFDRMLLEEEA

SEQ ID NO: 5055 - protein, 170 aa, Suberites domuncula
MADNVRQNYAASSEEGVNKQINLEFYAMYSYLSMANYFERHDVALHGFAKYFRKAGHEELEHAEKLQKFQIQRGGRVVLQDIKKPSKDDWEGPLEAMEAALALERMVNQALLDLHKIADDNGDFQMSDFIEGNYLHEQVEAIKEISDHITNIKRVGTGHGIYHFDKCLGE

SEQ ID NO: 5056 - protein, 168 aa, Suberites domuncula
MSACRQNYHQDCEDGVNAQINLELYAMYVYQSLATYFERHDVALPNIAATFRKASKEELGHAELLMRFQNDRGGKVVLSDIKAPANTEWGSALKAMEAASDLEKTVNQALLDLHKISDKHNDSQMSDFIENNFLTEQVEAIKELGDHITNLKRVGPGHGEYHFDKELK

SEQ ID NO: 5057 - protein, 176 aa, Encephalitozoon cuniculi
MDPKTKQASSDEWNVEAGLLLSSQLLLEYNAYYFYSACAAHFSRSDVCLKGLASFFRKKSLDENAQAQKIIGFMNMRELDIEFRAIEAPDIKKYGKTSGVLKACKEFEQTVLSNISTISEIARKAGDGAIVQFLEDFIAEQVRSISELSDLCANCARCGDGGVGLFLFDQSLISQH

SEQ ID NO: 5058 - protein, 173 aa, Schistosoma japonicum
MSLCRQNYHEECEAGINKQINMELYASYVYMTMAFHFHRDDVALNGFYKFFLNESEEERQHAIKLMTYQNMRGGRIVLQDISAPPQLSWTSGLHAMQDALELEKKVNQSLMDLVAVGERHRDTHFCDFIGNEYLETQIQSMKKLADYITNLNRVGTGLGEYTFDKETLHGESD

SEQ ID NO: 5059 - protein, 173 aa, Schistosoma japonicum
MSLCRQNYHEECEAGINKQIIMELYASYVYMTMASHSHRDDVALNGFYKLSLNESEEERQHAIKLMTPQNMRGGRIVLQDISAPPQLSWTSGLHAMQDALELEKKVNQSLMDLVAVGERHRDTHFCDFIGNEYLETQIQSMKKLADYITNLNRVGTGLGEYTFDKETLHGESD

SEQ ID NO: 5060 - protein, 192 aa, Schistosoma japonicum
MKIMMLMTVLATWILAVYAPIQTNGEVRDPLALHSQIEEGLNDQILYEYEAFYIYDHMASYLSRPEVGLSGFAKFFRECANEELEHARKFSEFVNKRNSKVVLKNILLAPGVPMEFKNIHEVIDTAIGKELEVSAQINELHKAASKMSDAITQDFLDEFLREQMNSVSRLREMRARLHLDSSAVYLMDKELR

SEQ ID NO: 5061 - protein, 173 aa, Taenia saginata
MNMIRQNFHDECEVGINRQINMELYASYLYLAMSQHFDREDVALPGFKKFFAKASEEEREHAIKLMCYQCKRGGRIVYQDIAKPQKSEWATGLEAMETALKIEREVNESLLALCDVAVKHSDNHFSDFLENEYLGEQVDAIKQLADYVTNLRRCGPGLGEYLFDKETLNGGED

SEQ ID NO: 5062 - protein, 211 aa, Manduca sexta
MKAILLSVAGLLAVLAPAIATQCHVNPVNIQREWITMHRSCRDSMRRQIQMEVGASLQYLAMGAHFSKDKINRPGFAKLFFDAAGEEREHAMKLIEYLLMRGELTNDVTSLIQVRAPQRNKWEGGVDALEHALKMESDVTKSIRTVIKACEDDPEFNDYHLVDYLTGEFLEEQYKGQRDLAGKASTLKKMLDRNSALGEFIFDKKLMGMDI

SEQ ID NO: 5063 - protein, 211 aa, Galleria mellonella
MKAILVAVLGLLAVCAPAFATQCTVNPVNIPKEWITMQRPCRDSMRRQIQMEVAASLQYLAMGAHFSKDTINRPGFAKLFFDAGSEERGHAMKLIEYLLMRGELTSDVTSLIQIRPPERKSWSSGVEALEHAVKMESDVTKSIRTVISDCESDPNFNDYHLVDYLTGEFLEEQYKGQRDLAGKASTLKKMMDRHASLGEFIFDKKLLGIDV

SEQ ID NO: 5064 - protein, 165 aa, Haemophilus influenzae Rd
MLSENVVKLLNDQMNLEFYSSNLYLQMSAWCDQQGFEGTAKFLSVHAAEEMQHMRKLFTYLNETGSLAVISAIEAPAHEYKSLKEVIETTYEHEKLITSKINELVGKTFEEKDYSAFNFLQWYVEEQHEEEKLFSSILDKLNFLGEDGKGLFLIDKDLGNLSTKA

SEQ ID NO: 5065 - protein, 182 aa, Haemophilus influenzae Rd
MIAANYALLHFINQNGKELVMLNQIIINKLNDQINLEFYSSNVYLQMSAWCSKHGYEGAATFLLRHADEELEHMQKLFNYVSETSGMPILGKIDAPKHDYSSLREVFEITLEHEKLVTSKINELVEVTFESKDYSTFNFLQWYVAEQHEEEKLFSGIIDRFNLVGEDGKGLFFIDRELATLE

SEQ ID NO: 5066 - protein, 209 aa, Aedes aegypti
MMKSVFFGVVAITVAILSIYQETAQAQEQTVGATDNYQWDSVDDQCLAALHRQINKEFDASIIYLKYAAYFAQEKINLPGFEKFFFHAAAEEREHGIKLIEYALMRGKAPVDKHFKLNYDHEVPTVTTGESALETALQKEVEVTRSIRGVIKACEDGSNDFHLADYLTGEYLDEQHKGQRELAEKIATLKKMKKSAPKLGEFLFDKNHM

SEQ ID NO: 5067 - protein, 209 aa, Aedes aegypti
MMKSVFFGVVAITVAILSIYQETAQAQEQTVGATDNYQWDSVDDQCLAALHRQINKEFDASIIYLKYAAYFAQEKINLPGFEKFFFHAAAEEREHGIKLIEYALMRGKAPVDKHFKLNYDHEVPTVTTGESALETALQKEVEVTKSIRGVIKACEDGSNDFHLADYLTGEYLDEQHKGQRELAEKIATLKKMKKSAPKLGEFLFDKNHM

SEQ ID NO: 5068 - protein, 209 aa, Aedes aegypti
MMKSVFFGVVAITVAILSIYQETAQAQEQTVGATDNYQWDSVDDQCLAALHRQINKEFDASIIYLKYAAYFAQEKINLPGFEKFFFHAAAEEREHGIKLIEYALMRGKAPADKHFKLNYDHEVPTVTTGESALETALQKEVEVTKSIRGVIKACEDGSNDFHLADYLTGEYLDEQHKGQRELAEKIATLKKMKKSAPKLGEFLFDKNHM

SEQ ID NO: 5069 - protein, 186 aa, Drosophila melanogaster
MAWCFRDIRRHMCMLVRQNFAKSCEKKLNDQINMELKASHQYLAMAYHFDRSDISSPGMHRFFLKASVEEREHAEKIMTYMNKRGGLIILSSVPQPLPCFASTLDALKHAMKMELEVNKHLLDLHALAGKEADPNLCDFIEANFLQEQVDGQKILADYISQLEKAQNQVGEFLFDKYMGSGMHPAK

SEQ ID NO: 5070 - protein, 205 aa, Drosophila melanogaster
MVKLIASLLLLAVVAQAYGDFKCSLAVPEITKDWVDMKDACIKGMRNQIQEEINASYQYLAMGAYFSRDTVNRPGFAEHFFKAAKEEREHGSKLVEYLSMRGQLTEGVSDLINVPTVAKQEWTDGAAALSDALDLEIKVTKSIRKLIQTCENKPYNHYHLVDYLTGVYLEEQLHGQRELAGKLTTLKKMMDTNGELGEFLFDKTL

SEQ ID NO: 5071 - protein, 180 aa, Drosophila melanogaster
AVPEITKDWVDMKDACIKGMRNQIQEEINASYQYLAMGAYFSRDTVNRPGFAEHFFKAAKEEREHGSKLVEYLSMRGQLTEGVSDLINVPTVAKQEWTDGAAALSDALDLEIKVTKSIRKLIQTCENKPYNHYHLVDYLTGVYLEEQLHGQRELAGKLTTLKKMMDTNGELGEFLFDKTL

SEQ ID NO: 5072 - protein, 121 aa, Drosophila melanogaster
MVKLIASLLLLAVVAQAYGDFKCSLAVPEITKDWVDMKDACIKGMRNQIQEEINASYQYLAMGAYFSRDTVNRPGFAEHFFKAAKEEREHGSKLVEYLSMRGQLTEGVSDLINVPVSRRLA

SEQ ID NO: 5073 - protein, 162 aa, Haemophilus influenzae
MLNQIIINKLNDQINLEFYSSNVYLQMSAWCSKHGYEGAATFLLRHADEELEHMQKLFNYVSETSGMPILGKIDAPKHDYSSLREVFEITLEHEKLVTSKINELVEVTFESKDYSTFNFLQWYVAEQHEEEKLFSGIIDRFNLVGEDGKGLFFIDRELATLE

SEQ ID NO: 5074 - protein, 216 aa, Calpodes ethlius
MKSFLLTLLTTLALSASTFGTQCNVNPVTIPTDWITMTSGCRTSVRHQIQMEVAASLQYLAMGAHFSRDGINRPGFAKLFFDASSEERGHALKLIEYLLMRGELTSNISSLITIRPPERKSWESGQEALEHALRMETAVTKSIKNVIVNCEHDREANGRDDNDYHLVDYLTGEFLDEQYKGQRDLAGKAATLKKMMDRHSALGEFIFDKRLLGMDI

SEQ ID NO: 5075 - protein, 213 aa, Prochlorococcus marinus str. MIT 9313
MHICLVANPSSPLCAISTRQIMALPTSTKAVALTTGPAGRAIAQSMEASLVEALHQHLTMERNASAAYFAIAIWFAERELRGFSHYFKQEAIQEQEHAAHFADYLIARGQAVVLQDVPSPRQEWISTDEIMAASFQMEADVTTSLHQLYAMAERASDMRTTVFLDPLVDNQVDSENEFAHLLGRVRFAQNQPSAMLIIDGELSDGKHSPAKLA

SEQ ID NO: 5076 - protein, 165 aa, Pasteurella multocida
MLSQNVINLLNEQMNLEFYSSNLYLQMSAWCEQNGFDGTAKFLAAHAAEEMQHMRKLFTYLNETGALAIIGEIAAPAHQYGSLKEVLEITYQHEKLITAKINELVGKTFEEKDYSAFNFLQWYVAEQHEEEKLFSGILDKLNLLGEDGKGLFLIDKDLGNLANSK

SEQ ID NO: 5077 - protein, 171 aa, Asterias forbesii
MATIRQNYNETSEAGVNKQINLELYASYTYLSMAFYFDNTTVALPGAHKYFKKASDEEREHAMLLMKFQNQRGGTIVLQDIKKPENDSWGSLKDAVQAALALEKHVNQSLLDLHKLADSKGDAQMCDWIETHFLTEQVEAIKELGDHITQLTRVGPGLGEYTYDKENLGED

SEQ ID NO: 5078 - protein, 172 aa, Branchiostoma belcheri
MAVSQVRQNFHEDSEAGINKQINLELYASQVYMSMASYFGRDDVALHNFQKFFNHASDEVREHARKLQRYQAMRGGRVILQTVQNPERDEWGSGLDAMRAALALEKNINQALLDLHKVAGSRNDPQMQDFLEGEYLKEQVESIKEIADHVTNLKRVGSGLGEYIFDHETLGD

SEQ ID NO: 5079 - protein, 175 aa, Scyliorhinus canicula
MASQIRQNYHQECEAAMNRQINMELYASYVYISMYAFDRDDVALKNFAKFFKDQSHEEREHAEKLMKFQNQRGGRVILQDVSKPDRDEWSNGLEAMKCALHLERTVNQSLLDLHKLASDKFDARMCDFLETHYLDEQVQSIKKLGDSVTNLVRLGASQNGMAEYLFDKHSLEESS

SEQ ID NO: 5080 - protein, 118 aa, Oryzias latipes
EKEHADKLLSFQNKRGGRIFLQDVKKPERDEWGSGLEAMQCALQLEKNVNQALLDLHKVASDHKDLIVCDFLETHYLNEQVESIKKIGDYITNLTRMDAHTNKMAEYLFDKHTLGSQS

SEQ ID NO: 5081 - protein, 159 aa, Bacteroides fragilis
MISEKLQNAINEQISAEMWSSNLYLSMSFYFEREGFSGFAHWMKKQSQEEMGHAYAMADYIIKRGGIAKVDKIDVVPTGWGTPLEVFEHVFEHERHVSKLVDALVDIAAAEKDKATQDFLWGFVREQVEEEATAQGIVDKIKRAGDAGIFFIDSQLGQR

SEQ ID NO: 5082 - protein, 160 aa, Porphyromonas gingivalis
MKISENVTKAINDQIKAEMWSSNLYLSMSVHFAQVGYNGFAHWLKKQSLEEMEHAYDMMDYLLKRGGEVKIEAIDAVPQKFGSVLEVFQQVYEHECKVTEMIEAVVRAASEAGDMASQDFFWKYIREQVEEEATAAEIVETIRLSQEQNLIFIDHQLARR

SEQ ID NO: 5083 - protein, 229 aa, Artemia salina
ATEGARNIGQSAPEGKVQMDCPSRHNFDPECEKAFVEHIHLELASSYHAWSMWAFYARDCKAAVGMTRLCEWASHVSAQRARRMAAYVLTRGGHVDYKEIPAPKKQGWDNFEDAFSHCVANKKRILTSLQSLYQCCQSKDAHCSNFIQTDMMDEVIAWNKFLSDCLSNLHCIGSQGMGPWVFDRWLARIVMSKFKHPKIPSLSTSDLESNIPNELFDAEGDMVRAIKKL

SEQ ID NO: 5084 - protein, 169 aa, Bacillus halodurans
MLNEKLLQALNKQMNYEMYAAHSYLAMAAYCSAESLDGFANFFMVQAEEERFHGMKFYNFINAMGERARFEGFESPNNEFSSVLDCFEKSLEQEKLVTKQIYDLSDLAWDAREHATINFLKWFIDEQVEEEDMFDTIIQKLKRIDNDSNAFFMMDNEFSKRSFNPEDEA

SEQ ID NO: 5085 - protein, 149 aa, Macaca mulatta
YLSMSYYFDRDDVALKNFAKYFLHQSHEEREHAEKLMKLQNQRGGRIFLQDIKKPDYDDWESGLNAMECALHLEKNVNQSLLELHKLATDKNDPHLCDFIETHYLNEQVKAIKELGDHVTNLRKMGAPESGLAEYLFDKHTLGDSDNES

SEQ ID NO: 5086 - protein, 181 aa, Sus scrofa
MTTSCSSQVRQNYHQDSEAAINRQINLELYASYVYLSMSYYFDRDDVALKNFAKYFLHQSHGGRGHAEKLMKLQTQRGARIFLQDIMKPERDDWENGLTAMEFALHVVKNVYQSLLELHKLATDKNDPHLCDFIETHYLHEQVKAIKELGDHITNLHRMGAPEYGMAEYLFDKHTLGSSES

SEQ ID NO: 5087 - protein, 160 aa, Sus scrofa
SSQVRQNYSTEVEAFVNRLINMHLQASYTYLSLGFYFNRDDVALEGVSHFFRELAEEKREGSERLLKMQNQRGGRALFQDVQKPSQDEWGKTQDAMEAALHLEKGLNQALVDLHALGSARADPHLCDFLENHFLDEEVKLIKKMGDHLTNLRRLSGPQAG

SEQ ID NO: 5088 - protein, 164 aa, Oryctolagus cuniculus
AINRQINLELYASYVYLSMSYYFDRDDVALKNFAKYFLHQSHEEREHAEKLMKLQNQRGGRIFLQDIKKPEYDDWESGLNAMECALHLEKSVNQSLLELHKLATDKNDPHLCDFIETHYLNEQVKSIKELGDHVTNLRKMGAPESGMAEYLFDKHTLGHSDNES

SEQ ID NO: 5089 - protein, 175 aa, Oryctolagus cuniculus
MTSQIRQNYSPEVEAAVNHLVNLHLRASYTYLSLGFYFDRDDVALEGVSHFFRELAEEKREAAERLLKMQNQRGGRALFQDVQKPSQDEWGKTLNAMEAALALEKNLNQALLDLHALGSAHTDPHLCDFLENHFLDEEVKLLKKMGDHLTNIRRLSGPQASLGEYLFERLTLKHD

SEQ ID NO: 5090 - protein, 181 aa, Mycobacterium tuberculosis H37Rv
MTEYEGPKTKFHALMQEQIHNEFTAAQQYVAIAVYFDSEDLPQLAKHFYSQAVEERNHAMMLVQHLLDRDLRVEIPGVDTVRNQFDRPREALALALDQERTVTDQVGRLTAVARDEGDFLGEQFMQWFLQEQIEEVALMATLVRVADRAGANLFELENFVAREVDVAPAASGAPHAAGGRL

SEQ ID NO: 5091 - protein, 110 aa, Chloroflexus aurantiacus
FDYLNDRGGRVTLGAIDEPQNEYASPLDAFEHALAHEQRVTAAIHAIYALAAQENDYATMSMLKWFIDEQVEEEKSADEIIQHLKLIGNDGVGLLMLDRKLAEREEEEDE

SEQ ID NO: 5092 - protein, 170 aa, Clostridium acetobutylicum
MLENNLLKLLNDQVTKEFYSAYFYLDIHNYFISKGLDGFGNWFYIQTQEEKDHAMLFLKYVEINSEDITLGNIPAPSLNFSDISTPLETTLKHERGITASINKIYEAAFSVKDFRTMQFLDWFVKEQGEEEKNTEDLVRKYELFGSDSKGLYLLDSELKTRVYTPATLVL

SEQ ID NO: 5093 - protein, 165 aa, Escherichia coli O157:H7 EDL933
MLKPEMIEKLNEQMNLELYSSLLYQQMSAWCSYHTFEGAAAFLRRHAQEEMTHMQRLFDYLTDTGNLPRINTVESPFAEYSSLDELFQETYKHEQLITQKINELAHAAMTNQDYPTFNFLQWYVSEQHEEEKLFKSIIDKLSLAGKSGEGLYFIDKELSTLDTQN

SEQ ID NO: 5094 - protein, 167 aa, Campylobacter jejuni subsp. jejuni NCTC 11168
MLSKEVVKLLNEQINKEMYAANLYLSMSSWCYENSLDGAGAFLFAHASEESDHAKKLITYLNETDSHVELQEVKQPEQNFKSLLDVFEKTYEHEQFITKSINTLVEHMLTHKDYSTFNFLQWYVSEQHEEEALFRGIVDKIKLIGEHGNGLYLADQYIKNIALSRKK

SEQ ID NO: 5095 - protein, 203 aa, Chlorobium tepidum TLS
MLSKTILDKLNHQVNFEAASAHLYLQMSAWLLTQSLDSTAAFFRAHAEEEKAHMMKLFDYINETGSLALIGEVATPAPEWKSHIELLEAAYNHELAITQSINDLVDTALREKDYSTFQFLQWYVAEQHEEEYLFSSMLHKARIINTMDGRALFRFDEEVRKSVLHHEHHQQKPMFLQVGPAPKHHDGHDGLHAHQHSSHWSGH

SEQ ID NO: 5096 - protein, 162 aa, Corynebacterium efficiens YS-314
MAINERLAHTMNSQVTAELEASLVYLQLSYVLDDLGLVGMRDWMKTQSEEELEHAHKFSQHLLDRGYVPQIGDIAPPKLDISTAVDAFEAALAHEQKISGLIRELAAVQDAERDYDSRALINWFLEEQVEEEAAVGEILDRLRIAGNSGSGLLHLDAELGAR

SEQ ID NO: 5097 - protein, 162 aa, Corynebacterium glutamicum ATCC 13032
MTINEKIASAFNNQVTAELEASMVYLQLSYVLDDLGLTGMRDWMKAQSKEELEHAQKFAQHLLDRDYTPQIGDIAPPKLDVTSAIEAFEASLAHEQKISGLIRELAAIQDAEKDYDSRALIDWFLNEQIEEEATVGEIIDRLRIAGDSGSGILRIDGELGSR

SEQ ID NO: 5098 - protein, 189 aa, Thermosynechococcus elongatus BP-1
MRLTVSSTIRMEDELMLSSAMINRLNAQINLEMFSARLYLQMSSWCAHKALEGCATFLGQHADEEMAHMRRLLSYMHETGALAILEGLEAPPHNFGSLKEMFSQVYSHEQLVTRKINELVHLANSEPDYSTLQFLQWYVAEQHQEEFLFKSILDKIDLIGTEGQGLFFIDQEIGKLASTSGSKTLSTIG

SEQ ID NO: 5099 - protein, 170 aa, Shigella flexneri 2a str. 301
MWSTIMLKPEMIEKLNEQMNLELYSSLLYQQMSAWCSYHTFEGAAAFLRRHAQEEMTHMQRLFDYLTDTGNLPRINTVESPFAEYSSLDELFQETYKHEQLITQKINELAHAAMTNQDYPTFNFLQWYVSEQHEEEKLFKSIIDKLSLAGKSGEGLYFIDKELSTLDTQN

SEQ ID NO: 5100 - protein, 161 aa, Haemophilus somnus 129PT
MLNQAIITKLNEQINLEFYSSNVYLQMSSWCAHNGYEGAAAFLLRHADEEMQHMHKLFTYVSETSGMPLLGKIEAPKNDYKSLKEIFEIILEHEKFVTSKINELVEITFATKDYSTFNFLQWYVAEQHEEEKLFTGIIDKFNLMGEDGRSLYFIDRDLLTL

SEQ ID NO: 5101 - protein, 165 aa, Haemophilus somnus 129PT
MLSANVIKLLNDQMNLEFYSSNLYLQMSAWCEQNGFDGTAKFLAAHAVEEMQHMRKLFTYLNETGASAIITAIDEPPHEFDSLKQVIELTYEHEKLITCKINELVGKTFEEKDYSAFNFLQWYVAEQHEEEKLFSGILDKLNLLGEDGKCLYLIDKDLGDLVSKV

SEQ ID NO: 5102 - protein, 167 aa, Helicobacter pylori
MLSKDIIKLLNEQVNKEMNSSNLYMSMSSWCYTHSLDGSGLFLFDHAAEEYEHAKKLIVFLNENNVPVQLTSISAPEHKFESLTQIFQKAYEHEQHISESINNIVDHAIKGKDHATFNFLQWYVSEQHEEEVLFKDILDKIELIGNENHGLYLADQYIKGIAKSRKS

SEQ ID NO: 5103 - protein, 167 aa, Helicobacter pylori
MLSKDIIKLLNEQVNKEMNSSNLYMSMSSWCYTHSLDGAGLFLFDHAAEEYEHAKKLIVFLNENNVPVQLTSISAPEHKFEGLTQIFQKAYGHEQHISESINNIVDHAIKNKDHATFNFLQWYVAEQHEEEVLFKDILDKIELIGNENHGLYLADQYVKGIAKSRKS

SEQ ID NO: 5104 - protein, 167 aa, Helicobacter pylori
MLSKDIIKLLNEQVNKEMNSSNLYMSMSSWCYTHSLDGSGLFLFDHAAEEYEHAKKLIVFLNENNVPVQLTSISAPEHKFESLTQIFQKAYEHEQHISESINNIVDHAIKSKDHATFNFLQWYVAEQHEEEVLFKDILDKIELIGNQNHGLYLADQYVKGIAKSRKS

SEQ ID NO: 5105 - protein, 167 aa, Helicobacter pylori
MLSKDIIKLLNEQVNKEMNSSNLYMSMSSWCYTHSLDGAGLFLFDHAAEEYEHAKKLIVFLNENNVPVQLTSISAPEHKFEGLTQIFQKAYEHEQHISESINNIVDHAIKSKDHATFNFLQWYVAEQHEEEVLFKDILDKIELIGNENHGLYLADQYVKGIAKSRKS

SEQ ID NO: 5106 - protein, 167 aa, Helicobacter pylori
MLSKDIIKLLNEQVNKEMNSSNLYMSMSSWCYTHSLDGSGLFLFDHAAEEYEHAKKLIVFLNENNVPVQLTSISAPEHKFEGLTQIFQKAYEHEQHISESINNIVDHAIKGKDHATFNFLQWYVSEQHEEEVLFKDILDKIELIGNENHGLYLADQYVKGIAKSRKS

SEQ ID NO: 5107 - protein, 175 aa, Vibrio vulnificus CMCP6
MLSQTMVEQLNAQINLEFFSSNLYLQMSAWCEDKGFDGAAQFLRVHAVEEMQHMQRLFTYVSETGALPILGAIAAPKHDFASLGEVFRETYEHEQMITQQINKLAHVAFTSQDYSTFNFLQWYVAEQHEEEKLFKGILDKIELVGEDGKALFFIDKDLAQMAKEGSSSIMDAPAA

SEQ ID NO: 5108 - protein, 175 aa, Vibrio parahaemolyticus RIMD 2210633
MLSQTMVEQLNEQINLEFFSSNLYLQMSAWCEDKGFEGAAEFLRAHAVEEMEHMQRLFTYVSETGSMPILGAIEAPKHDFASLGDVFRETYEHEQMITEKINKLAHVAFTSQDYSTFNFLQWYVSEQHEEEKLFKGILDKIELVGEDGKALFFIDKDLAQMAKEGSSSIMGAPAA

SEQ ID NO: 5109 - protein, 159 aa, Bacteroides thetaiotaomicron VPI-5482
MISEKLQKAINEQITAEMWSSNLYLAMSFYFEKEGFSGFAHWMKKQSQEEMGHAYAMADYIIKRGGTAIVDKIDVVPNGWGTPLEVFEHVYKHECHVSALVDKLVDVAAAEKDKATQDFLWGFVREQVEEEATAQGIVDKIKKAGDTGIFFVDSQLGQR

SEQ ID NO: 5110 - protein, 160 aa, Bacteroides thetaiotaomicron VPI-5482
MTEKLQNALNEQITAELWSANLYLSMSFYLEREGFSGMARWMQKQSAEETGHAYAIAGYMIKREATPKVDKVDVVPQGWGNPVEVFEHALEHEKHVSKLIDELVQVASEEKDNATQDFLWQFVREQVEDEANVLNIVSHLRKAGDCAILFMDAKLGERES

SEQ ID NO: 5111 - protein, 164 aa, Wigglesworthia glossinidia endosymbiont of Glossina brevipalpis
MIKQEMVVNLNKQLNLELFSSNLYLQMSSWCNSNKLEGSSKFFKQQSIEETSHMHRLFDYLIDSGNTPKISSIDSPPEHFPSLKEIVQFSYEHEKMISKKIKNLSFQAIDTKDYLTFHFLKWYVEEQCEEEKMFKSILDRIELVNEDPSGLYFVDQILKKINNS

SEQ ID NO: 5112 - protein, 188 aa, Triticum aestivum
PRVRNMSPKQNFANQSEEALNQQVNTELQASQVYLSMSAWAQHTSVALPGLEKYFREAAHEEREHAQKLIDYINTRGGRVVLRALQAPETDWKSAKNAVESALQLEKDVNKSLLNLHKIADSNGDPQMCDFIEAEYLGEQVEAIKKLADMVTQLNRVGEGLGVYLWDQQLYRDGTGAGSRATGNVKHG

SEQ ID NO: 5113 - protein, 131 aa, Erwinia chrysanthemi
RSTFLKSHSREEMEHMQRLFDYLDDTGSMPVLGAIAAPPVDFSSLQDVFKLTYEHEQLITSKINELAHAAMTLQDYSTFNFLQWYVAEQHEEEKLFKSILDKMGMVNAQEGGLFFIDQDLKKMAASATPSA

SEQ ID NO: 5114 - protein, 181 aa, Vibrio cholerae
MNQEFFMLSQAMVEHLNEQINLEFFSSNLYLQMSAWCEDKGFDGAAEFLRAHAVEEMQHMQRLFTYVSETGALPILGAIAAPRHDFASLGEVFRETYQHEQKITQQINKLAHVAFTSQDYSTFNFLQWYVAEQHEEEKLFKGILDKLELVGEDGKALFFIDKDLAALAKKGSSSVMDAPAE

SEQ ID NO: 5115 - protein, 181 aa, Pacifastacus leniusculus
MASQIRHNYHEDCEPINKQINLEFYASYVYMSMGHYFDRDDISLPGASKFFKDSSDEEREHGQKLMKYQNKRGARIVLQAIAAPSLQEWGNLHDALQAALDLENEVNQSLLDLDATASKINDPHLTNMLEGEFLEEQVESIEKIGNLITRLKRAGTSGLGEFLFDKELKQRFLPSLTSHPN

SEQ ID NO: 5116 - protein, 177 aa, Prochlorococcus marinus str. MIT 9313
MNDLTKAINLHLACEFQASHTYLAMSIWLREKDLAGFSSYMQIKSQEERGHADRLIAYLVDCDEQVELPAVEAPQRNWGSTQDLFDQVYELEKDVTASINRIYSIAEQAGERSATAMLDWFIAEQLQEEAEARFVRKRLRLAGDNTAALLLLDQQFLDGTALTTVKGGLTGLKQSEN

SEQ ID NO: 5117 - protein, 161 aa, Pasteurella multocida
MLSQAIAEKLNEQINLEFYSSNVYLQMSAWCAHHGYEGAAAFLLRHADEEMEHMQKLFNYVSETSGMPLLGKIEAPKNDYKTLKEIFEITLEHEKFVTSKINELVEVTFAHKDYSTFNFLQWYVAEQHEEEMLFNSIIDKFNLLGEDGRSLYFIDRDLATL

SEQ ID NO: 5118 - protein, 167 aa, Helicobacter pylori 26695
MLSKDIIKLLNEQVNKEMNSSNLYMSMSSWCYTHSLDGAGLFLFDHAAEEYEHAKKLIVFLNENNVPVQLTSISAPEHKFEGLTQIFQKAYEHEQHISESINNIVDHAIKGKDHATFNFLQWYVSEQHEEEVLFKDILDKIELIGNENHGLYLADQYVKGIAKSRKS

SEQ ID NO: 5119 - protein, 167 aa, Helicobacter pylori J99
MLSKDIIKLLNEQVNKEMNSSNLYMSMSSWCYTHSLDGAGLFLFDHAAEEYEHAKKLIIFLNENNVPVQLTSISAPEHKFEGLTQIFQKAYEHEQHISESINNIVDHAIKSKDHATFNFLQWYVAEQHEEEVLFKDILDKIELIGNENHGLYLADQYVKGIAKSRKS

SEQ ID NO: 5120 - protein, 165 aa, Salmonella enterica subsp. enterica serovar Typhi
MLKTEMIDKLNEQMNLELYSSLLYQQMSAWCSYHSFEGAAAFLRRHAQEEMTHMQRLFDYLTDTGSLPRINSVSSPFAEYTSLDELFRATYEHEQLITQKINELAHAAMTSQDYPTFNFLQWYVAEQHEEEKLFKSIIDKLTLAGKSGEGLYFIDKELSTLDTQN

SEQ ID NO: 5121 - protein, 179 aa, Cytophaga hutchinsonii
MKDLVRLRTSLKEEIEIILNAQCKMEAEASNKYLAMASWLERNGFLQSAEYLYHQAEEERSHFLKIFKYINDVGGTAITPFVSDVAQEYNSIKDVFEMALQGEIAVSNSINKIVAKCRESNDYATEEFIMWFVKEQREEEANARRALELFELIDVNSDSGKFLLDKEIGKISGKKIIES

SEQ ID NO: 5122 - protein, 165 aa, Salmonella typhimurium LT2
MLKTEMIDKLNEQMNLELYSSLLYQQMSAWCSYHSFEGAAAFLRRHAQEEMTHMQRLFDYLTDTGSLPRIHTVSSPFAEYASLDELFRATYEHEQLITQKINELAHAAMTSQDYPTFNFLQWYVAEQHEEEKLFKSIIDKLTLAGKSGEGLYFIDKELSTLDTQN

SEQ ID NO: 5123 - protein, 353 aa, Mus musculus
MNGNQKLDAYNQEKQNFIQHFSQIVKVLTEKELGHPEIGDAIARLKEVLEYNALGGKYNRGLTVVQAFQELVEPKKQDAESLQRALTVGWCVELLQAFFLVSDDIMDSSLTRRGQICWYQKPGIGLDAINDALLLEASIYRLLKFYCREQPYYLNLLELFLQSSYQTEIGQTLDLMTAPQGHVDLGRYTEKRYKSIVKYKTAFYSFYLPIAAAMYMAGIDGEKEHANALKILMEMGEFFQVQDDYLDLFGDPSVTGKVGTDIQDNKCSWLVVQCLLRASPQQRQILEENYGQKDPEKVARVKALYEALDLQSAFFKYEEDSYNRLKSLIEQCSAPLPPSIFMELANKIYKRRK

SEQ ID NO: 5124 - protein, 220 aa, Mus musculus
MNGNQKLDVYNQEKQNFIQHSSQIVKVLTEKELGHPEIGDAIAWLKEVLEYNDLGGKYNRGLTVVQAFQELVERKKQDAESLQRALTVGWCVELLQAFFLVSDDIMDSSLTRPGQICWYQKPGIGLDAINDALLLEASIYRLLKFYCREQPYYLNLLELFLQSSYQTEIGHTLDLMTAPQSPMWILVRYTEKRYKSIVKYKTAFYSFLPAYRGRHVHGRH

SEQ ID NO: 5125 - protein, 185 aa, Mus musculus
MNGNQKLDAYNQEKQNFIQHFSQIVKVLTEKELGHPEIGDAIARLKEVLEYNALGGKYNRGLTVVQAFQELVEPKKQDAESLQQALTVGWCVELLQAFFLVSDDIMDSSLTRRGQICWYQKPGIGLDAINDALLLEASIYRLLKFYCREQPYYLNLLELSAEFLSDRDQADSRPHDSTPGPCGSW

SEQ ID NO: 5126 - protein, 309 aa, Mus musculus
MVLERQIRVKVADDHDESEENFCPPDHGQIMSMCHFQACSVTEKECLLLHSIESRGSAVWELTLRSSCIWRGQVISTAEKKTVVEPLDGCFYYRKSIAQSGIPKVYAFWLKHFSLGKMKSVKITYRLIQCFGDAEKQNFIQHFSQIVKVLTEEELGHRETRDAITQLKEVLHCNVVGGKYSWGLTTVQAFQELVEPRKQDAESLQRALTAQDYLDLFGDPSVTGKVGTDIQDNKCIWLRQILEENYGQKDPEKVAQVKALYEALDLQSVFFKNKEDSKNRLKSLIEQCSVSLPPSIFLELANKIYKLRK

SEQ ID NO: 5127 - protein, 353 aa, Rattus norvegicus
MNGDQKLDVHNQEKQNFIQHFSQIVKVLTEDELGHPEKGDAITRIKEVLEYNTVGGKYNRGLTVVQTFQELVEPRKQDAESLQRALTVGWCVELLQAFFLVLDDIMDSSYTRRGQICWYQKPGIGLDAINDALLLEAAIYRLLKFYCREQPYYLNLLELFLQSSYQTEIGQTLDLITAPQGQVDLGRYTEKRYKSIVKYKTAFYSFYLPIAAAMYMAGIDGEKEHANALKILLEMGEFFQIQDDYLDLFGDPSVTGKVGTDIQDNKCSWLVVQCLLRATPQQRQILEENYGQKDPEKVARVKALYEELDLRSVFFKYEEDSYNRLKSLIEQCSAPLPPSIFLELANKIYKRRK

SEQ ID NO: 5128 - protein, 353 aa, Rattus norvegicus
MNGDQKLDVHNQEKQNFIQHFSQIVKVLTEDELGHPEKGDAITRIKEVLEYNTVGGKYNRGLTVVQTFQELVEPRKQDAESLQRALTVGWCVELLQAFFLVLDDIMDSSHTRRGQICWYQKPGIGLDAINDALLLEAAIYRLLKFYCREQPYYLNLLELFLQSSYQTEIGQTLDLITAPQGQVDLGRYTEKRYKSIVKYKTAFYSFYLPIAAAMYMAGIDGEKEHANALKILLEMGEFFQIQDDYLDLFGDPSVTGKVGTDIQDNKCSWLVVQCLLRATPQQRQILEENYGQKDPEKVARVKALYEELDLRSVFFKYEEDSYNRLKSLIEQCSAPLPPSIFLELANKIYKRRK

SEQ ID NO: 5129 - protein, 344 aa, Rattus norvegicus
MNGDQKLDVHNQEKQNFIQHFSQIVKVLTEDELGHPEKGDAITRIKEVLEYNTVGGKYNRGLTVVQTFQELVEPRKQDAESLQRALTVGWCVELLQAFFLVLDDIMDSSYTRRGQICWYQKPGIGLDAINDALLLEAAIYRLLKFYCREQPYYLNLLELFLQSSYQTEIGQTLDLITAPQGQVDLGRYTEKRYKSIVKYKTAFYSFYLPIAAAMYMAGIDGEKEHANALKILLEMGEFFQIQDDYLDLFGDPSVTGKVGTDIQDNKCSWLVVQCLLRATPQQRQILEENYGQKDPEKVARVKALYEELDLRSVFFKYEEDSLQPPQESHRAVVARPCPHPSSWN

SEQ ID NO: 5130 - protein, 339 aa, Rattus norvegicus
MNGDQKLDVYNQEKQNFIQHFSQIVKVLTEDELGHSEKRDAITRLKEVLEYNTVGGKYNRGLTVVQTFQELVELRKQDAESLQRALMAGWCVGLLQAFFLISDDIMDSSHSLRGQICWYQKPGIGLDAINNALLLEASIYHLLKFYCRDTYQTEIGQTLDLIAAPQGQVDLGRYTEKRYKSIVKYKTAFYSFYLPIAAAMYMAGFDREKEHANALKILLEMGEFFQIQDDYLDLFGDPSVTGKVDTDIQDNKCSWPVVQCLLRATSQQRQKVEENYGQKDPEKVAQVKALYEALDLQNVFFKYEEDSYNHLKSLIEQCSVPLSPSIFLELAKKIYKWRK

SEQ ID NO: 5131 - protein, 288 aa, Rattus norvegicus
MVVQAFQELVELRKQDAERLQWALTVGCCVELLHAFFLVSDDIMDSSHTRRAQICWYQKPGIGLDAINDALLLEASIYRLLKFYCREQPYYLNLLELFLQSSYQTEIGQTLDLITAPQGHVDLGRYTEKRCKSIVKYKRALYAFYLPTGLSCTWQGLMKESDNALEILLEMGEFFQVWDDYLDLFADPNVTGKVGTDIQDDKCSWLVVQCLLRATPQQRQILENYGQKDPEKVARVKALYEELDLQSVFFKYEEDSYNRLKSLIEQCSAPLPPSIFLELANKIYKRRK

SEQ ID NO: 5132 - protein, 291 aa, Rattus norvegicus
MNGEQELHVYNQEKQNFISHFSQTVKEVLEYNTVGGKYNRGLTVVQAFQELVERRKQDAERLQWALAVAWCVELLQAFFLICWYQKLGIGLDSVNDALLLEASIYRLLEFYCREQPSYLNPLELFLQSSYQTEIGQTLDLITAPQGHVDLGRYTEKRYKSIVKYKTALYTFHLPTGLLCSWQGLMKEHANALKILLEMGEFFQIQDDYLDLFGDPSVTGKRQILEENYGQKDPEKGARVRALYEALDLQNVFFKYEEDSYNGLKRLIEQCSAPLPPSIFLELANKIYKRRK

SEQ ID NO: 5133 - protein, 310 aa, Rattus norvegicus
MNGDQKLDAYNQEKQNFIQHFSQIVKVLTEDELGHPETITRLKEVLACSAVGGKFTRGLTVVQAFKELLEPRKQDAENLEWALAVGWCVGLLQAFPHKPGIGLAINDALLLEASIYRLLKFSCREQPYSFCRVTSNRPGRLSLITAPQGHADLGRHTEKRYKSIVKYKTASLYSFYLPITAAVCLAGISGEKEHANAMKILLEMGEFFQVQDDSLDPHGDTCVTRKVSTDIQDNRCSWLAVQCLLQTTPQLQQVLDENSGQKDPEKVAQVKALLYGRQTEPPQHLTEQCSALSTFLELADKIYKRRNCRG

SEQ ID NO: 5134 - protein, 140 aa, Rattus norvegicus
MYMAGFDREKEHANALKILLEMGKFFQIQDDYLDLFGDPSVTGKVDTDIQDNKCSWPVVQCLLRATSQQHQKVEENYGQKDPEKVAQVKALYEALDLQNVFFKYEEDSYNHLKSLIEQCSVPLSPSIFLELAKKIYKWRK

SEQ ID NO: 5135 - protein, 334 aa, Rattus norvegicus
MLAVVVIDEGYGSASTKGKSKQGQDSPPEPEDASPSRARSMAPSGIRGPRRAAQRHGLAGVFGEVRTGDPRKAAGNGPGPTDASSPMQHQLRESGPGSSSAVTESLSLRRNRWLRPPRRFAWGGIAARPPARTWLASRGRWAEKQSFIRHFSHIVKVLPEEELGHPEIGVLLPRSRRQVQLGSNGCPGLSGAGGAEETGCSESSAGPDCIRSHQQFSAPGASIYCLLKFCCREQPYSLNLLERCLRSCYQAETWQSVDLITAPQGHGHLAAVYMAGIDGEEEHANALKILLEMGEFFQVQDDYLDLFADPSVTGKVSTDIQDNKCSWLVVQCLL

SEQ ID NO: 5136 - protein, 329 aa, Sulfolobus tokodaii
MSFEDYFNRIVENVNINIEKYLKGDIQELYEASFYLFKAGGKRLRPLILVSSADLLGGDLNRAYLAGASVEVLHTFTLIHDDIMDEDTTRRGMPTVHVKWGIPMAILAGDLLHAKAFEILNEAFRGMSSNKITRAFEIFTKAIIIISEGQALDMQFEDKVTVSEEEYLDMIKRKTAMLFSSSAALGGLIATDNEKEIQALADYGLNLGISFQIVDDILGLIADEKELGKPVYSDIREGKKTLLVIKTMKEATDEEKKILLKALGNKNASKDELITAAEIIRKYSLEYAYNKAEEYARKAIEALESIDWKNDEAGKALKYLAEFTVKRRK

SEQ ID NO: 5137 - protein, 136 aa, Taraxacum japonicum
YFLVLDDIMDESHTRRGQPCWFRLPKVGMIAANDGIILRNHVPRILKKHFRGKPYYIDLVDLFNEVEFQTASGQMIDLITTLVGEKDLSKYSLSIHRRIVQYKTAYYSFYLPVACALLMFGEDLEKHVEVKDVLVE

SEQ ID NO: 5138 - protein, 341 aa, x Citrofortunella mitis
MSDLKSRFIDVYGVLKQELLYDPAFEFDHDSRQWVDRMLDYNVPGGKLNRGLSVVDSYRLLKEGKTTDDEFFLSSALGWCIEWLQAYFLVLDDIMDGSHTRRGQPCWFRVPKVGMIAANDGVLLRNHISRILKNHFRDKPYYVDLLDLFNEVEFQTASGQMIDLITTIEGEKDLSKYSLPLHRRIVQYKTAYYSFYLPVACALLMAGENLDKHVEVKDILVQMGIYFQVQDDFLDCFGSPEVIGKVGTDIEDYKCSWLVVKALELCNEEQKNVVHENYGKVDPACVAKVKELYKTLDLEGAFVEYEKESYEKLTKSIEAHPTKEVQAVLKSFLAKIYKRQK

SEQ ID NO: 5139 - protein, 482 aa, Anopheles gambiae str. PEST
AGYSEGQKNKATTRTAAEYCVPAFFDTATTNHNKSQAASMSLFNLARFGVGVALEAAITRTAAPITATSGVVQLRRSISKSSEVNNSDFMTIRTENQNHPHHHQKGSSRNCDSKQQIRLKKVSRTLSTLNSSVPEAATQTAVPKSESREFMAVFPDVVRDLTAYASKYDKNVATKWFVKALQYNVPQGKKNRGLACVLAYRMLARSEDLTPENIRRAQYLGWAIEMLHSMFLIMDDVMDGSVTRRGQPCWHTLDDVKLSGVNDAIMIEAAIAHLVKIQYGNEPYYPRLLELFNEMKFITTIGQSLDLRSAKLDVTDYSMDLYKSIVFHKTAYYTFYLPVAMAMHLTGYTDPEMFRQAKTILLEIGQFYQTQDDFFDCFGDPAVIGKVGTDIAEGKCSWLAVVAMQRATEEQKEVMKACYGSTDPENIARVKKLYEQLGLPTTYSIYEEESYNMIKTHIQQISRGLPHELFFKIMEKIYRREA

SEQ ID NO: 5140 - protein, 407 aa, Giardia lamblia ATCC 50803
MASYTVSNYVKLDAHKRQKCIKDFATEKVDSFLETFIPVYLPNLFSTGLLRDHIVEVIKYNVVGGKMTRGTLAADIFLQTVRFLFSGLLEDSNFSEELFNLAIDICLVQEILQGAFLMIDDVIDHSTIRRGKPSWRAVVGDEQAVNDGLILWQIADSLVLYLEDKCGKTLKIFEVYHQAKANTTLGQHLDTFTKTYSQRHTMGHLNDTYILKTAYYTFYLPLIMGYRSGVLFGNMAIGTTAASEKGYTMQKVDSILNLQQRLDTDIEQQIHKISMDLGRLYQMQDDFLDFYAPEILHKESSDYLENKATWPLVRALELSASEEARGKGVSPQTILTIYGKRASEKESIQKLFDALDLKSIYIHEASALLKQCKEEAASMPPYISDSIEDVFDMLSSRINVEIIRPSK

SEQ ID NO: 5141 - protein, 332 aa, Chlorobium tepidum TLS
MSSPITQAQVESKYRQYHAKINEALAACFPKEKPATLYDPARYILEGKGKRIRPFLTLLAAEAVSGKSDNALGVALGIEVLHNFTLMHDDIMDQADLRHGRPTVHKQWNVNAAILSGDMMIAYAYELALKAISSRHAEIIHIFNDANITICEGQALDMELEQRKDVTIADYLDMISKKTGRLISAALEAGGVAGDGTPEQIAALVTFGEKIGRAFQIQDDYLDIMAGDGKSGKVPGGDVINGKKTWLLLRSLELAEGADRELLQSIFDNNGTSPDNVPAVKAIFEKCGVLNETRAKINEDTEAALAALDALPFEEGRGYLRGFANILMKRDF

SEQ ID NO: 5142 - protein, 372 aa, Bifidobacterium longum NCC2705
MCSSNPVDKLLGMCTTANNREIIEPRIIQLVRELTAAPATDEVADALKPVMEQVVDQAASSSQGGKRLRALLALDAFDILAGDVTPDRRDAMIDLACAIEVFQTAALVHDDIIDESDLRRGKPSAHHALEQAVHSGAIGRGLGLMLGDILATACIEITRRSASRLPNTDALNEAFLTMQREVEIGQVLDLAVEMTPLSNPEALANASLNVFRWKTASYTTIAPLLLALLAAGESPDQARHCALAVGRPLGLAFQLADDLLDVVGSSRNTGKPVGGDIREGKRTVLLADALSAADTADKADLIAIFEEDCRNDNQVARTIELFTSTGALDRSRERIAALWGESRKAIAGLELNSEAQRRLTEACARFVPESLR

SEQ ID NO: 5143 - protein, 324 aa, Bacteroides thetaiotaomicron VPI-5482
MFTASQLLDKINNHLSEIQITRTPEGLYEPIEYILSLGGKRIRPVLMLMAYNLYKEDVSSIYDPATGIEVYHNHTLLHDDLMDRSDMRRGKPTVHKVWNDNTAILSGDTMLILAFRYVAGCAPEHLKEVIDLFSLTALEICEGQQLDMEFESRNDVAEDEYIEMIRLKTAVLLAASLKIGAILAGASAADAENLYNFGMQIGVAFQLQDDLLDVYGDPEVFGKKIGGDILCNKKTYMLIKALERANGEQLEELNRWLNADNCQPAEKIAAVTEIYNQLTIRSVCENKMREYYTLAMESLEAVAVAEEKKKELKNLVKLLMYREM

SEQ ID NO: 5144 - protein, 344 aa, Thermus thermophilus
MVPAPETIRQALQERLIARLDHTDPLYRDLLQDYPRRGGKMLRGLLTVYSALAHGAPLEAGLETATALELFQNWVLVHDDIEDGSEERRGRPALHRLHPMPLALNAGDAMHAEMWGLLAEGLARGLFPPEVLLEFHEVVRRTAYGQHLDLLWTLGGTFDLRPEDYFRMVAHKAVYYTAVVPLRLGVLLVGKTPPAAYEEGGLRLGTAFQIVDDVLNLEGGEAYGKERTGDLYEGKRTLILLRFLEETPPEERAREAKPEAEVGWLLERLLASRALAWDKAEAKRLQAEGLALLEAAFQDLPGRRPGPPPRSPRRFGGAQGIMGPCRGCASGSSPPTTPTSSKSA

SEQ ID NO: 5145 - protein, 349 aa, Kluyveromyces lactis
MSDNRAQFLEVFPSLVQELRDILAGYGMPEEAIEWYEKSLNYNTPGGKLNRGLSVVDTYALLKGYKSVSELSAEEYKKVAILGWCIELLQAYFLVADDMMDQSITRRGQPCWYKVENVGDIAINDAFMLEGAIYCLLKKHFRTEPYYVDLLELFHDVTFQTELGQLLDLITAPEDKVDLSKFSLEKHSFIVIFKTAYYSFYLAVALAMFAAGITDSKDLKQASDVLIPLGEYFQIQDDFLDCFGKPEDIGKIGTDIQDNKCSWVINVALKNATKEQRDILDENYGRKDSEKEQKCRAVFNELNIQDIYHKYEEETASNLREKIANIDESRGFKAEVLTLFLNKIYHRKK

SEQ ID NO: 5146 - protein, 342 aa, Gossypium arboreum
MADLRSAFLNVYSQLKSELLQDPSFELTDESRQWVERMLDYNVPGGKLNRGLSVIDSYRLLKDGKELTQDEIFLTSALGWCIEWLQAYFLVLDDIMDSSHTRRGQPCWFRLPKVGMIAVNDGVILRNHITRILKNHFRGKPYYVDLLDLFNEVEFQTASGQMIDLITTLEGEKDLSKYSLQQHRRIVQYKTAYYSFYLPVACALVMCGENLDNHIDVKNILVDMGIYFQVQDDYLDCFGNPETIGKIGTDIENFKCSWLVVKALEFCNEEHNKVLYENYGETRPANVAKVKALYNELNLKGVFEDYESKSYERLVTSIEAHPSKPVQAVLKSFLGKIYKRQK

SEQ ID NO: 5147 - protein, 352 aa, Rhizomucor racemosus
MVAVKLQKEENRQAFLKVFPTLADEVLLELRKYNMPEDAYEWTKKMLYYNVPGGKLNRGISVVDTVRILKGDAVTEDDIFKATVLGWLIEFLQAFFLVSDDIMDASITRRGQPCWYKSEGVGMVAINDAFILESCIYIFLKKYFKKTDYYIELVELFHEVTFQTELGQLCDLITAPEDDVDLSKFSIKKHQFIVIYKTAYYSFYLPVALAMHMVGIKNEEAFKQSHDILIPLGEYFQVQDDYLDCYGAPEVIGKIGTDIMDNKCSWLINQALALANPEQRKILDENYGQKNAESEAKVKQLYLDLNIESVYKAYEEKSFNDLNALIEKLDESVGVKKMIFTEFMDKIYKRTK

SEQ ID NO: 5148 - protein, 349 aa, Mentha x piperita
MANLNGAASDLRKTFLGVYSTLKSELLNDPAFEWTDGSRQWVERMLDYNVPGGKLNRGLSVIDSYQLLKEGKDLTDDEVFLASALGWCIEWLQAYFLVLDDIMDNSHTRRGQPCWFKVPKVGMIAINDGIILRNHIPRILKKHFRSKPYYVDLLDLFNEVEFQTASGQMIDLITTIEGEKDLSKYSLPLHRRIVQYKTAYYSFYLPVACALLMAGENLENHPTVKDVLIDMGIYFQVQDDYLDCFGEPEKIGKIGTDIEDFKCSWLVVKALELCNEEQKKTLFEHYGKENPADVAKIKALYNDINLQGMFADFESKSYEKITSSIEAHPSKSVQAVLKSFLGKIYKRQK

SEQ ID NO: 5149 - protein, 342 aa, Humulus lupulus
MSGLRSKFMEVYSILKSELLNDPAFEFTDDSRQWVERMLDYNVPGGKLNRGLSVIDSYQLLKGGKELTEEEIFLTSALGWCIEWLQAYFLVLDDIMDNSVTRRGQPCWFRVPKVGLIAANDGILLRNHIPRILKKHFKGKSYYVDLLDLFNEVEFQTASGQMIDLITTIEGEKDLSKYSIPLHHRIVQYKTAYYSFYLPVACALVMAGENLDNHVDVKNVLIEMGTYFQVQDDYLDCFGHPDVIGKIGTDIEDFKCSWLVVKALEIATEEQKKMLFEHYGKGDEASVKKVKELYKALDLEGVFADYENASYQKLIKSIEAHPKEEVQAVLKSFLAKIYKRQK

SEQ ID NO: 5150 - protein, 342 aa, Humulus lupulus
MSGLRLKFMEVYSILKSELLNDPAFEFTDDSRQWVERMLDYNVPGGKLNRGLSVIDSYQLLKGGKELTEEEIFLTSALGWCIEWLQAYFLVLDDIMDNSVTRRGQPCWFRVPKVGLIAANDGILLRNHIPRILKKHFKGKSYYVDLLDLFNEVEFQTASGQMIDLITTIEGEKDLSKYSIPLHHRIVQYKTAYYSFYLPVACALVMAGENLDNHVDVKNVLIEMGTYFQVQDDYLDCFGHPDVIGTIGTDIEDFKCSWLVVKALEIATEEQKKMLFEHYGKGDEASVKKVKELYKALDLEGVFADYENASYQKLIKSIEAHPKEEVQAVLKSFLAKIYKRQK

SEQ ID NO: 5151 - protein, 343 aa, Artemisia annua
MSSTDLKSKFLKVYDTLKSELINDPAFEFDDDSRQWIEKMLDYNVPGGKLNRGLSVVDSYQLLKGGELSDDEIFLSSALGWCIEWLQAYFLVLDDIMDESHTRRGQPCWFRLPKVGMIAANDGILLRNHVPRILKKHFRGKPYYVDLVDLFNEVEFQTASGQMIDLITTLVGEKDLSKYSLSIHRRIVQYKTAYYSFYLPVACALLMFGEDLDKHVEVKNVLVEMGTYFQVQDDYLDCFGAPEVIGKIGTDIEDFKCSWLVVKALELPNEEQKKTLHENYGKKDPASVAKVKEVYHTLNLQAVFEDYEATSYKKLITSIENHPSKAVQAVLKSFLGKIYKRQK

SEQ ID NO: 5152 - protein, 343 aa, Artemisia annua
MSSIDLKSKFLKVYDTLKSELINDPAFEFDDDSRQWIEKMLDYNVPGGKLNRGLSVVDSYQLLKGGELSDDEIFLSSALGWCIEWLQAYFLVLDDIMDESHTRRGQPCWFRLLKVGMIAANDGILLRNHVPRILKKHFRGKPYYVDLVDLFNEVEFQTASGQMIDLITTLVGEKDLSKYSLSIHRRIVQYKTAYYSFYLPVACALLMFGEDLDKHVEVKNMLVEMGTYFQVQDDYLDCFGAPEVIGKIGTDIEDFKCSWLVVKALELANEEQKKVLHENYGKKDPASVAKVKEVYHTLNLQAVFEDYEATSYKKLITSIENRPSKAVQAVLKSFLGKIYKRQK

SEQ ID NO: 5153 - protein, 343 aa, Artemisia annua
MSSIDLKSKFLKVYDTLKSELINDPAFEFDDDSRQWIEKMLDYNVPGGKLNRGLSVVDSYQLLKGGELSDDEIFLSSALGWCIEWLQAYFLVLDDIMDESHTRRGQPCWFRLLKVGMIAANDGILLRNHVPRILKKHFRGKPYYVDLVDLFNEGVIQTASGQMIDLIPTLVGEKDLSKYSLSIHRRIVQYKTAYYSFYLPVACALLMFGEDLDKHVEVKNMLVEMGTYFQVQDDYLDCFGAPEVIGKIGTDIEDFKCSWLVVKALELANEEQKKVLHENYGKKDPASVAKVKEVYHTLNLQAVFEDYEATSYKKLITSIENRPSKAVQAVLKSFLGKIYKRQK

SEQ ID NO: 5154 - protein, 149 aa, Artemisia annua
  unsure (1)..(149): unsure at all Xaa locations
DDIMDESHTRRGQPCWFRLPKVGMIAANDGILLRNHVPRILKKHFRGKPYXVDLVDLFNEVEFQTASGQMIDLITTLVGEKDLSKYSLSIHRRIVQYKTAYYSFYLPVACALLMFGEDLDKHVEVKNVLVEMGTYFQVQDDYLDCFGAP

SEQ ID NO: 5155 - protein, 342 aa, Parthenium argentatum
MSTDIRSKFLQVYDTLKSELINDPAFEFDDDSRQWIEKMLDYNVPGGKLNRGLSVIDSYQLLKGGKLTDDEIFHASALGWCVEWLQAYFLVLDDIMDESHTRRGQPCWFRLPKVGMIAANDGIILRNHVPRILKKHFRGKPYYVDLVDLFNEVEFQTASGQMIDLITTLVGEKDLSKYSLSIHRRIVQYKTAYYSFYLPVACALLMFGEDLEKHVEVKNVLVEMGTYFQVQDDYLDCFGAPEVIGKIGTDIEDFKCSWLVVKALELANEEQKKVLHENYGKKDPSPVAKVKELYNTLNLQGVFEDYENTSYKKLITSIEGHPSKAVQAVLKSFLGKIYRRQK

SEQ ID NO: 5156 - protein, 342 aa, Parthenium argentatum
MSSDLKSRFLQVYDTLKSELINDPAFEFDDDSRQWVEKMLDYNVPGGKLNRGLSVIDSYQLLKGGELTDNEIFLAAALGWCIEWLQAYFLVLDDIMDESHTRRGQPCWFRLPKVGMIAANDGIILRNNVPRILKKHFRGKPYYVDLLDLFNEVEFQTASGQMIDLITTLVGEKDLSKYSLSIHRRIVQYKTAYYSFYLPVACALLMFGEDLEKHEEVKNVLVEMGTYFQVQDDYLDCFGAPEVIGKIGTDIEDFKCSWLVVKALELSNEEQKKILHENYGKKDPSSVAKVKELYHTLNLQGVFEDYENTSYKKLITSIEGHPSKAVQAVLKSFLGKIYKRQK

SEQ ID NO: 5157 - protein, 105 aa, Parthenium argentatum
FNEVEFQTASGQMIDLITTLVGEKDLSKYLLPIHRRIVQYKTAYYSFYLPVACALLMAGESLDNHVNVKNILIEMGIYFQVQDDYLDCFADPEVLGKIGTDIQEF

SEQ ID NO: 5158 - protein, 369 aa, Plasmodium falciparum 3D7
MYDRYRDVFINHINDYVLEDDIKIIISKYYKLLFDYNCLGGKNNRGILVILIYEYVKNRDINCNEWEKVACIAWCIEILQASFLVADDIMDKGETRRNKHCWYLLKDVEIKNAVNDVFLLYNAIYKLLDVYLRNDNCYLDLITSFREATLKTIVGQHLDTNIFSDKYSHIDKDIDVNNINISQENKININMLNFKVYQNIIIHKTAYYSFFLPIVCGMQMGGISLDNLLYKKVENIAILMGEYFQVHDDYIDTFGDSKKTGKVGSDIQNNKLTWPLIKAFELCSQPEKEDIIRNYGKDNVTCIKFINDIYEHYNIRDHYVEYEKKQKMKILEYRICLEIRNGHFVYRRLRDNNLNNFCLNMIKFKKKKK

SEQ ID NO: 5159 - protein, 342 aa, Arabidopsis thaliana
MADLKSTFLDVYSVLKSDLLQDPSFEFTHESRQWLERMLDYNVRGGKLNRGLSVVDSYKLLKQGQDLTEKETFLSCALGWCIEWLQAYFLVLDDIMDNSVTRRGQPCWFRKPKVGMIAINDGILLRNHIHRILKKHFREMPYYVDLVDLFNEVEFQTACGQMIDLITTFDGEKDLSKYSLQIHRRIVEYKTAYYSFYLPVACALLMAGENLENHTDVKTVLVDMGIYFQVQDDYLDCFADPETLGKIGTDIEDFKCSWLVVKALERCSEEQTKILYENYGKAEPSNVAKVKALYKELDLEGAFMEYEKESYEKLTKLIEAHQSKAIQAVLKSFLAKIYKRQK

SEQ ID NO: 5160 - protein, 384 aa, Arabidopsis thaliana
MSVSCCCRNLGKTIKKAIPSHHLHLRSLGGSLYRRRIQSSSMETDLKSTFLNVYSVLKSDLLHDPSFEFTNESRLWVDRMLDYNVRGGKLNRGLSVVDSFKLLKQGNDLTEQEVFLSCALGWCIEWLQAYFLVLDDIMDNSVTRRGQPCWFRVPQVGMVAINDGILLRNHIHRILKKHFRDKPYYVDLVDLFNEVELQTACGQMIDLITTFEGEKDLAKYSLSIHRRIVQYKTAYYSFYLPVACALLMAGENLENHIDVKNVLVDMGIYFQVQDDYLDCFADPETLGKIGTDIEDFKCSWLVVKALERCSEEQTKILYENYGKPDPSNVAKVKDLYKELDLEGVFMEYESKSYEKLTGAIEGHQSKAIQAVLKSFLAKIYKRQK

SEQ ID NO: 5161 - protein, 343 aa, Arabidopsis thaliana
METDLKSTFLNVYSVLKSDLLHDPSFEFTNESRLWVDRMLDYNVRGGKLNRGLSVVDSFKLLKQGNDLTEQEVFLSCALGWCIEWLQAYFLVLDDIMDNSVTRRGQPCWFRVPQVGMVAINDGILLRNHIHRILKKHFRDKPYYVDLVDLFNEVELQTACGQMIDLITTFEGEKDLAKYSLSIHRRIVQYKTAYYSFYLPVACALLMAGENLENHIDVKNVLVDMGIYFQVQDDYLDCFADPETLGKIGTDIEDFKCSWLVVKALERCSEEQTKILYENYGKPDPSNVAKVKDLYKELDLEGVFMEYESKSYEKLTGAIEGHQSKAIQAVLKSFLAKIYKRQK

SEQ ID NO: 5162 - protein, 343 aa, Arabidopsis thaliana
METDLKSTFLNVYSVLKSDLLHDPSFEFTNESRLWVDRMLDYNVRGGKLNRGLSVVDSFKLLKQGNDLTEQEVFLSCALGWCIEWLQAYFLVLDDIMDNSVTRRGQPCWFRVPQVGMVAINDGILLRNHIHRILKKHFRDKPYYVDLVDLFNEVELQTACGQMIDLITTFEGEKDLSKYSLSIHRRIVQHKTAYYSFYLPVACALLMAGENLENHIDVKNVLVDMGIYFQVQDDYLDCFADPETLGKIGTDIEDFKCSWLVVKALERCSEEQTKILYENYGKTDPSNVAKVKDLYKELDLEGVFMEYESKSYEKLTGAIEGHQSKAIQAVLKSFLAKIYKRQK

SEQ ID NO: 5163 - protein, 342 aa, Malus x domestica
MADLKSKFLKVYSVLKSELLEDPAFDFTNDSRQWVERMLDYNVPGGKLNRGLSVIDSYQLLQQGRELTEDEIFLASALGWCIEWLQAFFLVLDDIMDGSHTRRGQPCWFRLPKVGMIAVNDGVVLRNHIPRILRKYFREKPYYVDLLDLFNEVEFQTASGQMIDLITTIEGEKDLSKYSLSIHRRIVQYKTAYYSFYLSVACALLMSGEELEKHIDVKNILVEMGIYFQVQDDYLDCFGDPETIGKIGTDIEDFKCSWLVVKALELCNEEQKKVLHENYGKPDPENVATVKALYKELDIEGVFADYESKSYKKLTSWIEGHPSKAVQSVLKSFLGKIYKRQK

SEQ ID NO: 5164 - protein, 342 aa, Glycine max
MADLKSTFLNVYSVLKSELLHDPAFEFSDDARNWVDRMLDYNVPGGKLNRGLSVIDSYRLLKEGQALNDDEIFHASALGWCIEWLQAYFLVLDDIMDNSHTRRGQPCWFRVPKVGMIAANDGVLLRNHIPRILKKHFRGKPYYVDLLDLFNEVEFQTASGQMIDLITTLEGEKDLSKYTLTLHRRIVQYKTAYYSFYLPVACALLMAGEDLDNHVDVKNILVEMGTYFQVQDDYLDCFGDPQTIGKIGTDIEDFKCSWLVVKALELSNEQQKKVLHENYGKADPENVAKVKALYNELNLQAVFEEYENGSYAKLVSSIEAHPSKAVQAVLKSFLAKIYKRQK

SEQ ID NO: 5165 - protein, 342 aa, Glycine max
MADLKSTFLNVYSVLKSELLHDPAFEFSDDARHWVDRMLDYNVPGGKLNRGLSVIDSYRLLKEGQALNDDEIFLASALGWCIEWLQAYFLVLDDIMDNSHTRRGQPCWFRVPKVGMIAANDGVLLRNHIPRILRKHFRGKPYYIDLLDLFNEVEFQTASGQMIDLITTLEGEKDLSKYTLTLHRRIVQYKTAYYSFYLPVACALLMAGEDLDKNVDVKNILVEMGTYFQVQDDYLDCFGDPQTIGKIGTDIEDFKCSWLIVKALELSNEQQKKVLQENYGKPDPENVAKVKALYNELNLQGVFEEYESGSYAKLVSSIEAHPIKAVQAVLKSFLAKIYKRQK

SEQ ID NO: 5166 - protein, 187 aa, Glycine max
  unsure (1)..(187): unsure at all Xaa locations
XARGVLQLQAYFLVLDDIMDNSHTRRGQPCWFRVPKVGMIAANDGVLLRNHIPRILKKHFRGKPYYVDLLDLFNEVEFQTASGQMIDLITTLEGEKDLSKYTLTLHRRIVQYKTAYYSFYLPVACALLMAGEXDLDNHVDVKNILVEMGTYFQVQDDYLDCFGDPHTTGKVSISDNGFXKHQFLFTX

SEQ ID NO: 5167 - protein, 159 aa, Glycine max
RRIVQYKTAYYSFYLPVACALLMAGEDLDKNVDVKNILVEMGTYFQVQDDYLDCFGDPQTIGKIGTDIEDFKCSWLIVKALELSNEQQKKVLQENYGKPDPENVAKVKALYNELNLQGVFEEYESGSYAKLVSSIEAHPIKAVQAVLKSFLAKIYKRQK

SEQ ID NO: 5168 - protein, 179 aa, Glycine max
  unsure (1)..(179): unsure at all Xaa locations
MADLKSTFLNVYSVLKSEXLHDPAFEFSDDARNWVDRMLDYNVPGGKLNRGLSVIDSYRLLKEGQALNDDEIFHASALGWCIEWLQAYFLVLDDIMDNSHTRRGQPCWFRVPKVGMIAANDGVLLRNHIPRILKKHFRGKPYYVDLLDLFNEVEFQTASGQMIDLITTXEGEKDLSEYY

SEQ ID NO: 5169 - protein, 221 aa, Glycine max
  unsure (1)..(221): unsure at all Xaa locations
MADLKSTFLNVYSVLKSELLHDPAFEFSDDARHWVDRMLDYNVPGGKLNRGLSVIDSYRLLKEGQALNDDEIFLASALGWCIEWLQAYFLVLDDIMDNSHTRRGQPCWFRVPKVGMIAANDGVLLRNHIPRILRKHFRGKPYYVDLLDLFNEVEFQTASGQMIDLITTLEGEKDLSKYTLTLXVLKKKKKRTIRXKYYXWAAFLINMKCRLICECDYSNYX

SEQ ID NO: 5170 - protein, 116 aa, Glycine max
  unsure (1)..(116): unsure at all Xaa locations
XRDDRRALGWCIEWLQAYFLVLDDIMDNSHTRRGQPCWFRVPKVGMIAANDGVLLRNHIPRILKKHFRGKPXYYVDLLDLFNEVEFQTASGQMIDLIITLEGEKDLSKYTLTLXVL

SEQ ID NO: 5171 - protein, 130 aa, Glycine max
  unsure (1)..(130): unsure at all Xaa locations
XAGKLNRGLSVIDSYRLLKEGQALNDDEIFLASALGWCIEWLQAXXXXXXXXXXNSHTRRGQPCWFRVPKVGMIAANDGVLLRNHIPRILRKHFRGKPYYIDLLDLFNEVEMPKFKLCGVHLVSMLIVDX

SEQ ID NO: 5172 - protein, 177 aa, Glycine max
  unsure (1)..(177): unsure at all Xaa locations
IXLPAYPHEFDDVMNNSHTTLGTSCCIRTSKEVMIVSNAAFLLRNQIMQSLKKHLGREPYNEHLMDMLKQAQLLTAEEQMIDLMTSLXGXIDLSTYTLTLCQHIVQNKTAYSSFHRSVACALHMAGDDNDNHVTVTNIRAEIGTYLRVQDDYMDTGGDPXTIEEMCTYIEHVMCSCX

SEQ ID NO: 5173 - protein, 134 aa, Glycine max
  unsure (1)..(134): unsure at all Xaa locations
MAAAXQGEASTGATTTATFRRVYETLKAELLRDGYFHFNDDALRWLDAMLDYNVLGGXLNRGXXXVESXKSLKAGSEPSEEEEFLACVLGWGIEWLQAYFLILDDIMDNSQTRRGKPCWYRLPKFCLXYLEXXG

SEQ ID NO: 5174 - protein, 119 aa, Glycine max
  unsure (1)..(119): unsure at all Xaa locations
MADLKSTFLNVYSVLKSELLHDPAFEFSDDARNWVDRMLDYNVPGGKLNRGLSVIDSYRLLKERQALNDDEIFHASALGWSIEWLQAYFLVLDDIMXMIAANDGVLLRNHIPRILKKHF

SEQ ID NO: 5175 - protein, 167 aa, Glycine max
  unsure (1)..(167): unsure at all Xaa locations
XDCFGDPQTNGNIGPEIEAFQCSWLVVKALEFSNEQPKXVLHEHSGKADPQHVGQLKALYNELNPQGQFREYXNRSYPKLVSSSEGHPNKPVQAELKSLLGQISKRHKQSRVKVRARTVAHAIQTSVVISIYPRIRFPGMEIFEKMILLPVTLFNISFLRIRSCGFL

SEQ ID NO: 5176 - protein, 342 aa, Lupinus albus
MADLRSTFLNVYSVLKSELLHDPAFEFSPDSRQWLDRMLDYNVPGGKLNRGLSVIDSYRLLKDGHELNDDEIFLASALGWCIEWLQAYFLVLDDIMDNSHTRRGQPCWFRVPKVGMIAANDGVLLRNHIPRILKKHFRGKPYYADLLDLFNEVEFQTASGQMIDLITTLEGEKDLSKYTLSLHRRIVQYKTAYYSFYLPVACALLMVGENLDNHIDVKNILVDMGTYFQVQDDYLDCFGAPETIGKIGTDIEDFKCSWLVVKALELSNDEQKKVLYDNYGKPDPANVAKVKALYDELNLQGVFTEYESKSYEKLVTSIEAHPSKAVQALLKSFLGKIYKRQK

SEQ ID NO: 5177 - protein, 342 aa, Lupinus albus
MADPKSSFLNVYSILKSELLQDPAFEFSTDSRQWVERMLDYNVPGGKLNRGLSVIDSYKLLKDGQELNDEEIFLASALGWCIEWLQAYFLVLDDIMDNSHTRRGHPCWFRVPKVGMIAPNDGVVLRNHIPRILKKHFRGKPYYVDLLDLFNEVEFQTASGQMIDLITTLEGEKDLSKYTLSLHRRIVQYKTAYYSFYLPVACALLMVGENLDNHTDVKNILVEMGTYFQVQDDYLDCFGAPETIGKIGTDIEDFKCSWLVVKALELSNEEQKKVLYENYGKPDPANVAKVKTLYNELNLEGAYADYESKSYEKLVTCIEGHPSKAVQGVLKSFWAKIYKRQK

SEQ ID NO: 5178 - protein, 279 aa, Phaseolus lunatus
ITPSSKLTLTKGNKSWSSTAVAAALELVDPPGCRNSAAADPEDEIFLASALGWCIEWLQAYFLVLDDIMDNSHTRRGQPCWFRVPKVGMIAANDGVLLRNHIPRILKKHFRGKPYYVDLLDLFNEVEFQTASGQMIDLITTLQGEKDLSKYTLTLHRRIVQYKTAYYSFYLPVACALLMAGDNLDNHVDVKNILVEMGTYFQVQDDYLDCFGDPETIGKIGTDIEDFKCSWLVAKALELSNEQQKKVLYDNYGNPDPENVAKVKALYNELNLQGAFEEV

SEQ ID NO: 5179 - protein, 342 aa, Hevea brasiliensis
MADLKSTFLKVYSVLKQELLEDPAFEWTPDSRQWVERMLDYNVPGGKLNRGLSVIDSYKLLKEGQELTEEEIFLASALGWCIEWLQAYFLVLDDIMDSSHTRRGQPCWFRVPKVGLIAANDGILLRNHIPRILKKHFRGKAYYVDLLDLFNEVEFQTASGQMIDLITTLEGEKDLSKYTLSLHRRIVQYKTAYYSFYLPVACALLIAGENLDNHIVVKDILVQMGIYFQVQDDYLDCFGDPETIGKIGTDIEDFKCSWLVVKALELCNEEQKKVLYEHYGKADPASVAKVKVLYNELKLQGVFTEYENESYKKLVTSIEAHPSKPVQAVLKSFLAKIYKRQK

SEQ ID NO: 5180 - protein, 351 aa, Oryza sativa (japonica cultivar-group)
MAAAGAGASGPAAETAAATFRRVYGTLKAELLKDPSFDFNDDAIQWLESMLDYNVLGGKLNRGLAVVESYKILKAASATEPSEEELFLACILGWGIEWLQAYFLVLDDIMDNSQTRRGKPCWFRLPKVGLIAINDGLVLRSQISRIFRRYFRGKSYYVDLLDLFNEVEIQTTSGQLLDQITTNEGRKDLNKYRRIVEYKTAYYSFYLPVACALLLFDESLDNYAQVKHILVEMGVYFQSQDDYLDCFGEPEIIGKIGSDIEDFKCSWLFVQALERADEKQKGVLFENYGKSDPACVAKVKDLYNELHLQRVFSEYERESYEKLISAIEAQPNEAVRAVLKSFLHKIYKRSK

SEQ ID NO: 5181 - protein, 186 aa, Oryza sativa (japonica cultivar-group)
TASGQLLDLITTHEGEKDLNKYNIGVHRRIVQYKTSYYSFYLPVACALLLSGEDLTKYGAVEDILVKMGIYFQVQDDYLDCYGDPKFIGKIGTDIEDYKCSWLVVQALERADESQKSVLFENYGKKDPACVAKVKSLYRELNLEAVFLDYENESYKKLIADIEAQPSIAVQNVLKSFLHKIYKRQK

SEQ ID NO: 5182 - protein, 342 aa, Capsicum annuum
MSDFKSKFMEAYYVLKSELLNDPGFEFTDDSREWVDKMLEYNVPGGKLNRGLSVIDSYSLVDDGKELTRDEIFKASALGWCIEWLQAYFLVLDDIMDNSHTRRGQPCWYKVEKVGMIAVNDGILLRNHISRILKNHFRPKSYYVDLLDLFNEVEFQTASGQMIDLITTHVGEKDLSKYSLPIHCRIVQYKTAYYSFYLPVACALLMAGENLDNHVDVKNILIEMGIYFQVQDDYLDCFADPEVLGKIGTDIQDFKCSWLVVKALELCNEEQKKILYENYGKDDAACIAKIKTLYNDLKLEEVFLEYEKKTYEKLANSIAAHPSKAVQAVQLSFLGKIYKRQK

SEQ ID NO: 5183 - protein, 342 aa, Lycopersicon esculentum
MADLKKKFLDVYSVLKSDLLEDTAFEFTDDSRKWVDKMLDYNVPGGKLNRGLSVIDSLSLLKDGKELTADEIFKASALGWCIEWLQAYFLVLDDIMDGSHTRRGQPCWYNLEKVGMIAINDGILLRNHITRILKKYFRPESYYVDLLDLFNEVEFQTASGQMIDLITTLVGEKDLSKYSLSIHRRIVQYKTAYYSFYLPVACALLMVGENLDKHVDVKKILIDMGIYFQVQDDYLDCFADPEVLGKIGTDIQDFKCSWLVVKALELCNEEQKKILFENYGKDNAACIAKIKALYNDLKLEEVFLEYEKTSYEKLTTSIAAHPSKAVQAVLLSFLGKIYKRQK

SEQ ID NO: 5184 - protein, 138 aa, Nicotiana tabacum
AFFLVLDDIMDGSHTRRGQPCWFRLPKVGMIAANDGILLRNHIPRILKNHFRGKPYYVDLLELFNEVEFQTASGQMIDLITTLVGEKDLSKYLLPIHRRIVQYKTAYYSFYLPVACALLMAGESLDNHVNVRTYLLKW

SEQ ID NO: 5185 - protein, 341 aa, Helianthus annuus
MASDLKSKFLHVYQTLKSELLNDPAFEFHHDSRQWIDKMLDYNVPGGKLNRGLSVVDSYQLLKGAELTDDEIFLASALGWCIEWLQAYFLVLDDIMDGSHTRRGQPCWFRLPKVGMIAANDGLILRNHVPRILKKHFRGKPYYVDLVDLFNEVEFQTASGQMIDLITTLVGEKDLSKYSLSIHRRIVQYKTAYYSFYLPVACALLMFGEDLDNHVEVKNVLVEMGTYFQVQDDYLDCFGAPEVIGKIGTDIEDFSSWLVVKALELANEEQKKVLHENYGKKDPSSVAKVKELYNTLNLQGVFEDYESTSYKKLITSIEGHPSKAVQAVLKSFLGKIYKRQK

SEQ ID NO: 5186 - protein, 348 aa, Eucommia ulmoides
MAELKKEFLNVYSVLKKELLHDPAFSLTEDSRNWVERMLDYNVPGGKLNRGLSVVDSYKLLKELSSSKKGAQLTESEIFHSSVLGWCIEWLQACALVLDDIMDSSHTRRGQMCWYKLPKVGMIAINDGLILRNHVPRILKKHFRSKPYYLELLDLFHEVECQTVGGQMIDLITTLVGEIDLSEYSLPTHRQITVSKTSYYSFYLPVACALLMTGEKLESHSGMKDILIEMGSYFQVQDDYLDCFGDPEVIGKIGSDIEDFKCTWLVVKALELCNEEQKKILYDNYGKKDPESVARVKDLYKTLKLQDVFEEYEKKTHEKLNKSIDAYPSKAVQAVLQSFLAKIHRRLK

SEQ ID NO: 5187 - protein, 342 aa, Eucommia ulmoides
MSDLKSKFLEVYSVLKSELLNDPAFDFTDDSRLWVERMLDYNVPGGKLNRGLSVIDSFKLLKEGKEPTDEEIFLACVLGWCIEWLQAYFLVLDDIMDSSHTRRGQPCWFRLPKVGMIAVNDGLILRNHIPRILKKHFKGKPYYVDLLDLFNEVEFQTASGQMIDLITTLVGEKDLSKYSLPLHHRIVQYKTAYYSFYLPVACALVMSGENLDNHVDVKNILVEMGTYFQVQDDYLDCFGDPKFIGKIGTDIEDFKCSWLVVKALELANDEQKKLLHENYGKEDPECVAKVKKLYETLNLQDVFGEYERQSHGKLIKAIEGHSNKAVQFVLKSSLEKIYQRQK

SEQ ID NO: 5188 - protein, 319 aa, Eucommia ulmoides
MAELKKEFLNVYSVLKKELLHDPAFSLTEDSRNWVERMLDYNVPGGKLNRGLSVVDSYKLLKELSSSKKGAQLTESEIFHSSVLGWCVEWLQACALVLDDIMDSSHTRRGQMCWYKLPKVGMIAINDGLILRNHVPRILKKHFRSKPYYLELLDLFHEVECQTVGGQMIDLITTLVGEIDLSEYSLPTHRQITVSKTSYYSFYLPVACALLMTGEKLESHSGMKDILIEMGSYFQVQDDYLDCFGDPEVIGKIGSDIEDFKCTWLVVKALELCNEEQKKILYDNYGKKDPESVARVKDLYKTLKLQDVFEETRKRRTRS

SEQ ID NO: 5189 - protein, 305 aa, Eucommia ulmoides
MLDYNVPGGKLNRGLSVVDSYKLLKELSSSKKGAQLTESEIFHSSVLGWCIEWLQACALVLDDIMDSSHTRRGQMCWYKLPKVGMIAINDGLILRNHVPRILKKHFRSKPYYLELLDLFHEVECQTVGGQMIDLITTLVGEIDLSEYSLPTHRQITVSKTSYYSFYLPVACALLMTGEKLESHSGMKDILIEIQDDYLDCFGDPEVIGKIGSDIEDFKCTWLVVKALELCNEEQKKILYDNYGKKDPESVARVKDLYKTLKLQDVFEEYEKKTHEKLNKSIDAYPSKAVQAVLQSFLAKIHRRLK

SEQ ID NO: 5190 - protein, 135 aa, Eucommia ulmoides
FLVLDDIMDSSHTRRGQPCWFRLPKVGMIAVNDGLILRNHIPRILKKHFKGKPYYVDLLDLFNEVEFQTASGQMIDLITTLVGEKDLSKYSLPLHHRIVQYKTAYYSFYLPVACALVMSGENLDNHVDVKNILVE

SEQ ID NO: 5191 - protein, 382 aa, Dictyostelium discoideum
MNNQSLQRAAMISEHLAPTSELNMNQTSAPIKTAKEELADFVEIFPILTNEILKELPGMDMPPQTIAWVEKMINVNVSGGKMNRGLTVLHSLQLLVEGRQLSRSEIFLANVLGWCVEWLQAFFLVADDIMDQSITRRGQPCWYRQANPISNNGTIGSIAINDSFILESCIYILIKKYFRNEPYYADILDIFHETSYQTELGQLLDLTTQPNRGDFSLFTLNTYRRIVKYKTAYYSFYLPVALAMLMAGITSTPAFSTAKDILLPMGEFFQVQDDFLDCYGSPAVIGKIGRDIEENKCSWMICQAILNGTPEQINLLKKHYGLDNPTDVELVKKIYGEIGLKKIFKDYEDESYAFLISKIKSVRIMPQEVFIKLLSKIYKRDL

SEQ ID NO: 5192 - protein, 353 aa, Oryza sativa; identical to SEQ ID NO: 430

SEQ ID NO: 5193 - protein, 353 aa, Oryza sativa; identical to SEQ ID NO: 430

SEQ ID NO: 5194 - protein, 355 aa, Oryza sativa
MAAANGSACGGGGVDKEKEEFKQIYGVLKEELLRDPAFEFTDSSRQWIDRMLDYNVPGGKCNRGLSVVDSYKLLKGTNVLSQEDMFLASTLGWCVEWLQAYFLVLDDIMDDSHTRRGQPCWFRVPQVGSIAINDGIILRNHITRMLRLHFRGKLYYADLLDLFNEVEFKTASGQLLDLITTHEGEKDLNKYNIGVHRRIVQYKTSYYSFYLPVACALLLSGEDLTKYGAVEDILVKMGIYFQVQDDYLDCYGDPKFIGKIGTDIEDYKCSWLVVQALERADESQKSVLFENYGKKDPACVAKVKSLYRELNLEAVFLDYENESYKKLIADIEAQPSIAVQNVLKSFLHKIYKRQK

SEQ ID NO: 5195 - protein, 354 aa, Oryza sativa
MAAAGAGASGPAAETAAATFRRVYGTLKAELLKDPSFDFNDDAIQWLESMLDYNVLGGKLNRGLAVVESYKILKGATEPSEEELFLACILGWGIEWLQAYFLVLDDIMDNSQTRRGKPCWFRLPKVGLIAINDGLVLRSQISRIFRRYFRGKSYYVDLLDLFNEVEIQTTSGQLLEPITTNEGRKDLNKYNVHVYRRIVEYKTAYYSFYLPVACALLLFGESLDNYAQVKHILVEMGVYFQSQDDYLDCFGEPEIIGKIGSDIEDFKCSWLFVQALERADEKQKGVLFENYGKSDPACVAKVKDLYNELHLQRVFSEYERESYEKLISAIEAQPNEAVRAVLKSFLHKIYKRSK

SEQ ID NO: 5196 - protein, 408 aa, Oryza sativa
  unsure (1)..(408): unsure at all Xaa locations
MGALAASIASHLPSGVSAAVAALAASPGEVVRRAAGLEDELRELLRLNGGGRGRGGAAAEQGQGEQTRDRFVRAYERLKSELLNDRAFNFDFTEETRQWVAKMMDYNVPGGKLNRGLSVVDSYMLLRQGTEVDDEDFYLACVLGWCVEWLQASALVLDDITDNAYTRRDNLCWYKLPTVGMSAINDGVLLKCHVQAIIKRYFKEKFYFLDLMELXWNEIGLQTAMGQMLDLITTHTGAKDLARYRIQGYRRIVKYKTSYYSFYLPVACALLLNGARLSDYVELKNVLIEMGVYFQIQDDYLDCFGDPEVIGKVGTDIEDYKCSWLIVQAMELANENEMKILYENYGKSDPKCVAEVKSVYRELDLQDIFLEYESRVYKHLVSTIDAETDRAIRDILKSFLKKIYRRKK

SEQ ID NO: 5197 - protein, 495 aa, Oryza sativa
MTMRTTRLTATVPINIWIHTNTNGIVVLARLLPRDYKNGSFAAAPAAPPPPVHLGRRRCRCRDRDPRLDRLPQEPAAAAAGVAWHRGRPARAFSLFCAAAAAAGRSVFLAQAASMAAANGSACGGGGVDKEKEEFKQIYGVLKEELLRDPAFEFTDSSRQWIDRVMLFSPSPFSSCVADRMCFSSRIVSSGFSVGFRSGKCNRGLSVVDSYKLLKGTNVLSQEDMFLASTLGWCVEWLQAYFLVLDDIMDDSHTRRGQPCWFRVPQVGSIAINDGIILRNHITRMLRLHFRGKLYYADLLDLFNEVEFKTASGQLLDLITTHEGEKDLNKYNIGVHRRIVQYKTSYYSFYLPVACALLLSGEDLTKYGAVEDILVKMGIYFQVQDDYLDCYGDPKFIGKIGTDIEDYKCSWLVVQALERADESQKSVLFENYGKKDPACVAKVKSLYRELNLEAVFLDYENESYKKLIADIEAQPSIAVQNVLKSFLHKIYKRQK

SEQ ID NO: 5198 - protein, 495 aa, Oryza sativa; identical to SEQ ID NO: 5197

SEQ ID NO: 5199 - protein, 367 aa, Oryza sativa
  unsure (1)..(367): unsure at all Xaa locations
XGRGKSQATSPQIDRDSRFVQAYGRLRDDLVGDDSCELTDEARRWLAQMIDYNVPGGKLNRGLSVIDSYLLLKQGSEVTEDDFFLACVLGWCVEWFQACALLLDDIMDDSHTRRDQICWYRRPEVGLRGINDGIILKCHILIMIKKYFREKPYFLDILEIWSEIALQTSLGQMLDLYSTHTGADDLAKYSIEGYRRIVKYKTAYYSFYLPVANALLLSGAKLEDFSGLKDILIEMGIYFQIQDDYLDCFADPNTIGKIGTDIEDHKCSWLIVQALGHADNNQIEVLHRNYGKKDSSSVSEVKRTYAALDLKDIFSEFERRCYNHLDQQIIPLPAFSFTGIGDGHAAEAQKRHGFSLRAHPPLRPCVA

SEQ ID NO: 5200 - protein, 338 aa, Oryza sativa
MAAAVVANGASGDSSKAAFAEIYSRLKEEMLEDPAFEFTDESLQWIDRMLDYNVLGGKCNRGISVIDSFKMLKGTDVLNKEETFLACTLGWCIEWLQAYFLVLDDIMDNSQTRRGQPCWFRVPQVGLIAVNDGIILRNHISRILQRHFKGKLYYVDLIDLFNEVEFKTASGQLLDLITTHEGEKDLTKYNLTVHRRIVQYKTAYYSFYLPVACALLLSGENLDNFGDVKNILVEMGTYFQVQIGTDIEDYKCSWLVVQALERADENQKHILFENYGKPDPECVAKVKDLYKELNLEAVFHEYERESYNKLIADIEAHPNKAVQNVLKSFLHKIYKRQK

SEQ ID NO: 5201 - protein, 463 aa, Oryza sativa
MTMRTTRLTATVPINIWIHTNTNGIVVLARLLPRDYKNGSFAAAPAAPPPPVHLGRRRCRCRDRDPRLDRLPQEPAAAAAGVAWHRGRPARAFSLFCAAAAAAGRSVFLAQAASMAAANGSACGGGGVDKEKEEFKQIYGVLKEELLRDPAFEFTDSSRQWIDRVMLFSPSPFSSCVADRMCFSSRIVSSGFSVGFRSGKCNRGLSVVDSYKLLKGTNVLSQEDMFLASTLGWCVEWLQAYFLVLDDIMDDSHTRRGQPCWFRVPQVGSIAINDGIILRNHITRMLRLHFRGKLYYADLLDLFNEVEFKTASGQLLDLITTHEGEKDLNKYNIGVHRRIVQYKTSYYSFYLPDDYLDCYGDPKFIGKIGTDIEDYKCSWLVVQALERADESQKSVLFENYGKKDPACVAKVKSLYRELNLEAVFLDYENESYKKLIADIEAQPSIAVQNVLKSFLHKIYKRQK

SEQ ID NO: 5202 - protein, 471 aa, Oryza sativa
MGALAASIASHLPSGVSAAVAALAASPGEVVRRAAGLEDELRELLRLNGGGRGRGGAAAEQGQGEQTRDRFVRAYERLKSELLNDRAFNFDFTEETRQWVAKMMDYNVPGGKLNRGLSVVDSYMLLRQGTEVDDEDFYLACVLGWCVEWLQASALVLDDITDNAYTRRDNLCWYKLPTVGMSAINDGVLLKCHVQAIIKRYFKEKFYFLDLMELWNETAMGQMLDLITTHTGAKDLARYRIQGYRRIVKYKTSYYSFYLPVACALLLNGARLSDYVELKNDDYLDCFGDPEVIGKAMELANENEMKILYENYGKSDPKCVAEVKSVYRELDLQDIFLEYESRVYKHLVSTIDAETDRAIRDILKSFLKKIYRRKNGASGGRQKRAGRSGIGRRDGPHRGSTLPSESMMSDKLQMLKRGMCPVIASHGPTDRLAIVAFSGAAKRLLPLRRMTRQIVDRLRRPGPGTAAGRLH

SEQ ID NO: 5203 - protein, 900 aa, Oryza sativa
MRPSPALAGGGRTVANLLSATEWMLPSPATQVHTISVLPSHSPPSPPHHFAFSNLTTAPKRNGGKGEEEGRPRFEVVRDDLLHPLANGNKARKLDALLPLLRRRGATDVVRAHRCIPLHPALITSCFSNLMVSSLFWTSDCRDEMLYNHARKVAGTGGTVLWADDISKEDFVLDEDNGCEIGSRRVVIIKEGAGDVQALLGVIRLVEYLYNLSSFHKHENVHVVVDAGTGTTAVGLALGAVCLGLHWRVTAVMLADTLERYKEREKSLISDFKKLCHNNYHEMVGENDIGDSLVEWVERFSPRRFGKVLNGEIALCRQIAQQTGILLDPMYTLAGWEQAVDLCVGDSRTKVVMIHTGGTLGFCGLAQRRRERRRRQRRRRRPHESAAAGVARSSPPTHARTARWRAHGVTNRRNRSKFLDATRHDVYVTTPTARDRLGRARARHARTPDATQRKPPAPSRRRHRDGWAARCSSVLRRSSALPAARGRGSARRSGGLGSMAAAGAGASGPAAETAAATFRRVYGTLKAELLKDPSFDFNDDAIQWLESMLDYNVLGGKLNRGLAVVESYKILKGATEPSEEELFLACILGWGIEWLQAYFLVLDDIMDNSQTRRGKPCWFRLPKVGLIAINDGLVLRSQISRIFRRYFRGKSYYVDLLDLFNEVACALLLFDESLDNYAQVKHILVEMGVYFQSQDDYLDCFGEPEIIGKIGSDIEDFKCSWLFVQALERADEKQKGVLFRVFSEYERESYEKLISAIEAQPNEAVRAVLKSFLHKIYKRSNINTRSDRSARHGFDPAGRMRGTAVPRNHSAAPTSGTAEPSRGTGADQRSRMPVPVPRHGYAGPRSPPRSRVTGQRDRPYSALPTCGTEAMSRVCNGPTFPSCGRDSAADATEPNDADGL

SEQ ID NO: 5204 - protein, 172 aa, Oryza sativa
  unsure (1)..(172): unsure at all Xaa locations
XADDLAKYSIEVRRRIVKYKTAYYSFYLPVANALLLSGAKLEDFSGLKDILIEMGIYFQIQDDYLDCFADPNTIGKIGTDIEDHKCSWLIVQALGHADNNQIEVLHRNYGKKDSSSVSEVKRTYAALDLKDIFSEFERRCYNHLVTSIEAQKDHAAREILISFLKKIHQRKK

SEQ ID NO: 5205 - protein, 240 aa, Oryza sativa
  unsure (1)..(240): unsure at all Xaa locations
MAAANGSACGGGGVDKEKEEFKQIYGVLKEELLRDPAFEFTDSSRQWIDRMLDYNVPGGKCNRGLSVVDSYKLLKGTNVLSQEDIFKLTFSCLMISWMILTLDVVSLXLVSGASEENFTMLISLIYSXEDDYLDCYGDPKFIGKIGTDIEDYKCSWLVVQALERADESQKSVLFENYGKKDPACVAKVKSLYRELNLEAVFLDYENESYKKLIADIEAQPSIAVQNVLKSFLHKIYKRQK

SEQ ID NO: 5206 - protein, 167 aa, Oryza sativa
  unsure (1)..(167): unsure at all Xaa locations
TLGAGFXLSSCRRMGVYFQIXDDYLDCFGDPXKXIXXVGTNXEXNYNCPWLIXQAXXXXXXNEMKXLFENXGXSDPXCXPKLKIXXGELDLQDIFLEYEXRVYKHLVSTIDAETDRXXRDILKSFLKXIYXRKKXNXFXPWLLEFXHNRLASWTXGXCDXXLNDXHX

SEQ ID NO: 5207 - protein, 108 aa, Oryza sativa
  unsure (1)..(108): unsure at all Xaa locations
XDCCGDPSFIGKIGSGIQGVKCSWLVGQALQRAYEGQKSVLFANYANKDPACVPTVKSLFRVLTLWAVFVGYETESCKQFLPHIGAQPSIAVQNVLKPFLHEICQTHT

SEQ ID NO: 5208 - protein, 345 aa, Triticum aestivum
QKKKQKTFLSVFPTLRDEVLAELKKYNMPEDAYEWTKRNLEYNVPGGKLNRGISVVDTVRILKGDSVTEDDIFKATVLGWLIEFLQAFFLVSDDIMDASITRRGQPCWYKSSGVGMVAINDAFILESCIYIFLKKYFKGTDYYVELIELFHEVTFQTELGQLCDLITAPEDHVDLSKFSVKKHQFIVIYKTAYYSFYLPVALAMHMVGVKNEEAFKSAHDILIPLGEYFQVQDDYLDCYGAPEVIGKIGTDIMDNKCSWLINQALDKANPEQRKVLDENYGKKDAEAEAKIKQLYIELDIEGVYKAYEEKSYNELSALIEKLDESVGVKKQVFVEFMDKIYKRTK

SEQ ID NO: 5209 - protein, 276 aa, Triticum aestivum
  unsure (1)..(276): unsure at all Xaa locations
MAKQTTLDEFNAVFPKLEEVLLDHARSYKLPQEQLDWYKKSLEANPLGGKCNRGMSVPDSVSLLLEKPLTEEQYFQAATLGWMTELLQAFFLVSDDIMDSSITRRGQPCWYRQEGVGMIAINDAFMLEMAIYTLLXTYFRTHPAYVDLIELFHETTFQTELGQLCDLLTAPEDNVNLDNFSLEEYSFIVIYKTAYYSFYLPVALALHQLNLATPSNLKQAEDILIPLGEYFQIQDDYLDNFGKPEHIGKIGTDIKDNQCSWLEKQALAVAHPQQRK

SEQ ID NO: 5210 - protein, 350 aa, Triticum aestivum
MAAAANGGGGETKAAFARIYDALKAELLRDPAFEYTESSHQWIDRMLDYNVLGGKCNRGLSVVDSYKLLKGVDVLTEEEMFLASTLGWCIEWLQAFFLVLDDIMDDSHTRRGQPCWFRVPQVGLIAVNDGILLRNHISRMLRLHFKKKPYYADLLDLFNEVEFKTASGQMLDLITTHEGEKDLTKYNIGVHRRIVQFKTAYYSFYLPVACALLLSGESLENYGAVENILVEMGTYFQVQDDYLDCYGDPEFIGKIGTDIEDYKCSWLVVQALERADESQKSILFENYGKKDPACVAKVKDLYKELNLEAVFHEYESESYKKLIADIEAQPSDAVQKVLKSFLHKIYKRQK

SEQ ID NO: 5211 - protein, 357 aa, Triticum aestivum
  unsure (1)..(357): unsure at all Xaa locations
MAAAAVALSNGSGGDSKAEFAEIYSRLKEEMLEDPAFEFTDESLQWIDRMLDYNVLGGKCNRGLSVIDSYKTLKGVDVLRKEETFLACTLGWCIEWLQAYFLVLDDIMDNSQTRRGQPCWFRVPQVGLIAVNDGIILRNHISRILQRHFRGKPYYVDLIDLFNEVEFKTASGQLLDLITTHEGEKDLTKYNLNVHRRIVQYKTAYYSFYLPVACALLLSGENLDNFGXDVKNIXLVEMGTYFQXVQDDYLDCFGDPESIGKIGTDIEDYKCSWLVVQALEHADESQKGILLENYGKSDPESVAKVKDLYKELDLETAFHKYERESYNKLIADIEAQPSKAVQKVLMSFLEKIYKRQK

SEQ ID NO: 5212 - protein, 318 aa, Triticum aestivum
  unsure (1)..(318): unsure at all Xaa locations
WRLIFQKNFVSRMLDYNVPGGKLNRGLSVIDSYMLLREGTEVDEEDFYLACVLGWCIEWLQASALVMDDITDNAYTRRDNLCWYKLPTVGLSAINDGVLLKCHVQAIIKRYFKEKFYFMELMELWNEIGLQTAMGQMLDLITTHTGAKDLARYRIQGYRRIVKYKTSYYSFYXLPVACALLLNGAKLSDYVELKNVLIEMGVYFQIQDDYLDCFGDPQVIGKVGTDIEDYKCSWLIVQAMELANENEMKILYENYGKSCPECVAAVKNVYKELDLQDIFLEYESRVYKHLVSTIDAEPDRAIREILKIFLKKIYRRKK

SEQ ID NO: 5213 - protein, 174 aa, Triticum aestivum
  unsure (1)..(174): unsure at all Xaa locations
LFRANGACFNXLCSYRRIVEYKTAYYSFYLPVGCALLLSGGSLDDYVQVKHILVEMGIYFQIQDDYLDCFGDPEVMGKIGTDIEDFKCSWLFVQALVRVDERQKDILFENYGKSDPACVAKVKALYKELNLEAVFSEYEREIYEKLISDIEAQPNEAVQAVLKSFLHKIYRRMK

SEQ ID NO: 5214 - protein, 305 aa, Triticum aestivum
  unsure (1)..(305): unsure at all Xaa locations
ASSLKHSGSSTSIDHGGAGGVDRVARAVGDAERGAGGAGGAAEPRRAGAEGGAAGGRAEGAAPAERPWRRGGGGAGGRQPGAADARAXFLRAYERLKDELLKDRAFNFDFTEETRQWVAKMLDYNVPGGKLNRGLSVIDSYMLLREGTEVDEEDFYLACVLGWCIEWLQASALVMDDITDNAYTRRDNLCWYKLPTVGLSAINDGVLLKCHVQAIIKRYFKEKFYFMELMELWNEIGLQTAMGQMLDLITTHTGAKDLARYRIQGYRRIVKYKTSYYSFYPAGACALLLNGAKLSDYVELKNVLX

SEQ ID NO: 5215 - protein, 138 aa, Triticum aestivum
  unsure (1)..(138): unsure at all Xaa locations
LLSGRNLDDYVQVKHILVEMGVYFQSQDDYLDCFGDPEVMGKVGTDIEDFKCSWLFVQALVRVDERQKDILFENYGKSDPACVAKVKALYKELNLERVFSEYESETYXKLISDIEAQPNEAVQAVLKSFLHKIYRRRK

SEQ ID NO: 5216 - protein, 165 aa, Triticum aestivum
  unsure (1)..(165): unsure at all Xaa locations
SHSDTSLAQDQQLFNERFPSLIXQLLGSLPADEFSAEATDRLRHMLHYNVLGGKLNRALTVFTAMKACLHPAQPTEQQIQDGLVLGWCMELIQAAFLMADDVMDNSDLRRLKPSWHKEVGPMAINDAFIIEGIVYHMIRKYFRSRSWYIDVLEMIQKITLVTELG

SEQ ID NO: 5217 - protein, 188 aa, Triticum aestivum
  unsure (1)..(188): unsure at all Xaa locations
RSGFCFCTRQQAGPRESVSGNRMNGDQNSDVYAQEKQDFVQHFSQIVRVLTEDEMGHPEIGDAIARLKEVLEYNAIGGKYNRGLTVVISFRELVEPRKQDADSLQRAWTVGWCVELLQAFFLVADDIMDSCLTRRGQICWYQKPGVGLDAINDANLLEACIYRLLKLYCREQPYYLNLIELFLQSSYX

SEQ ID NO: 5218 - protein, 154 aa, Triticum aestivum
  unsure (1)..(154): unsure at all Xaa locations
MAAAAQGEASTGATTTATFRRVYETLKAELLRDGYFHFNDDALRWLDAMLDYNVLGGKLNRGLAVVESYKSLKAGSEPSEEEEFLACVLGWGIEWLQAYFLILDDIMDNSQTRRGKPCWYRLPKVGLIAINDGLLLRSQISRIFKRYFYGKPYX

SEQ ID NO: 5219 - protein, 244 aa, Triticum aestivum
  unsure (1)..(244): unsure at all Xaa locations
MGALAESIASHVPSGMLSAGLAALAALPNPGELVRKAARLEDELRELLRLNGRGAGAGAEQGGGNRAQQTRERFLRAYERLKDELLKDRAFNFDFTEETRQWVAKMLDYNVPGGKLNRGLVXIDSYMLLREGTEVDEEDFYLARRLRSRIVRLQASALVMDDITDNAYTRRDNLCWYKLPTVGLSAINDGVLLKCHVQAIIKRYFKEKFYFMELMELWNEVCTSAPSNQFPDLLSVPLLSSSRS

SEQ ID NO: 5220 - protein, 140 aa, Triticum aestivum
  unsure (1)..(140): unsure at all Xaa locations
XEMGEFFXIQDDSLALFGAPSVTGKIGAAIQDHKCRGGVVXCLERAIPKQSQFFKENYGQKEVKKVARVKGLYEEMDLPTVFFXYXEDSCTPIMVFIEQYEAPLPPPVFLGVGGKIYKRRKCPKNCKGGERRFSINICVP

SEQ ID NO: 5221 - protein, 57 aa, Triticum aestivum
  unsure (1)..(57): unsure at all Xaa locations
VQDDYLDCFGDPESIGKIGTDIEDYKCSWLVVQALEHADEXXPPQKXKXKXKGGXGX

SEQ ID NO: 5222 - protein, 288 aa, Zea mays
IRLEILGRPLTEEEYFKAATLGWMTELLQAFFLVSDDIMDGSITRRGQPCWYRQEGVGMIAINDSFLLEAGIYIILKKYFRDHPRYIELVELFHESSFQTELGQLCDLLTAPEDVVNLDNFSMEKYSFIVIHKTAYYSFYLPIALALYMLDIASPENLQTAKDILIPLGEYFQIQDDYLDNFGLPEHIGKIGTDIKDNKCSWLVNQALLLATPEQRKILEENYGQKDDAKEQVIKKLYDDMKLKEKYEAFEEKRAAELMELINKIDESQGLKKQVFEVFLSKIYKRSK

SEQ ID NO: 5223 - protein, 350 aa, Zea mays
MAAGGNGAGGDTRAAFARIYKTLKEELLTDPAFEFTEESRQWIDRMVDYNVLGGKCNRGLSVVDSYKLLKGADALGEEETFLACTLGWCIEWLQAFFLVLDDIMDDSHTRRGQPCWFRVPQVGLIAANDGIILRNHISRILRRHFKGKPYYADLLDLFNEVEFKTASGQLLDLITTHEGEKDLTKYNITVHGRIVQYKTAYYSFYLPVACALLLSGENLDNYGDVENILVEMGTYFQVQDDYLDCYGDPEFIGKIGTDIEDYKCSWLVVQALERADESQKRILFENYGKKDPACVAKVKNLYKELDLEAVFQEYENESYKKLIADIEAQPSIAVQKVLKSFLHKIYKRQK

SEQ ID NO: 5224 - protein, 350 aa, Zea mays
MAAGGNGAGGDTRAAFARIYKTLKEELLTDPAFEFTEESRQWIDRMVDYNVLGGKCNRGLSVVDSYKLLKGADALGEEETFLACTLGWCIEWLQAFFLVLDDIMDDSHTRRGQPCWFRVPQVGLIAANDGIILRNHISRILRCHFKGKPYYADLLDLFNEVEFKTASGQLLDLITTHEGEKDLTKYNITVHGRIVQYKTAYYSFYLPVACALLLSGENLDNYGDVENILVEMGTYFQVQDDYLDCYGDPEFIGKIGTDIEDYKCSWLVVQALERADESQKRILFENYGKKDPACVAKVKNLYKELDLEAVFQEYENESYKKLIADIEAQPSIAVQKVLKSFLHKIYKRQK

SEQ ID NO: 5225 - protein, 356 aa, Zea mays
  unsure (1)..(356): unsure at all Xaa locations
MATVEVVVANGLGGADTKTVFKETYSKLKEEMLDDPAFEFTDESLQWIDRMLDYNVLGGKCNRGLSVIDSYRILKGVDVLSKEETFLACTLGWCIEWLQAYFLVLDDIMDNSQTRRGQPCWFRVPQVGLIAVNDGIILRNHISRILQRHFKGKPYYVDVIDLFNEVEFKTASGQMLDLITTHEGEKDLTKYNLTVRRHIVQYKTAYYSFYLPVACAXLLLAGENLDNFGDVKNILVEMGTYFQVQDDYLDCFGDPEFIGKIGTDIEDYKCSWLVVQALEHADEKQKNILFESYGKSDPACVAKVKDLYKELKLEEVFQAYERESYNKLIADIEAQPSKAVQSVLKSFLHKIYKRDK

SEQ ID NO: 5226 - protein, 358 aa, Zea mays
  unsure (1)..(358): unsure at all Xaa locations
MATAEVVVANGSGGADTKTAFKEIYSKLKQEMLEDPAFEFTDESLQWIDRMLDYNVLGGKCNRGLSVVDSYKILKGVDVLSKEETFLACTLGWCIEWXLQAYFLVLDDIMDNSQTRRGQPCWFRVPQVGLIAVNDGIILRNHISRILQRHFKGKPYYVDIIDLFNEVEFKTASGQMLDLITTXTRGEKDLTKYNLTVHRRIVQYKTAYYSFYLPVACALXLLAGENLENFVDVKNILVEMGTYFQVQDDYLDCFGDPEFIGKIGTDIEDYKCSWLVVQALERAAENQKSILFENYGKSDPACVAKVKDLYKELKLEEVFHEYERESYNKLIADIEAQPSKAVQTVLKSFLHKIYKRDK

SEQ ID NO: 5227 - protein, 321 aa, Zea mays
  unsure (1)..(321): unsure at all Xaa locations
QCXYMKFLYLPPFKQMVDYNVLGGKCNRGLSVVDSYKLLKGADALGEEETFLACTLGWCIEWLQAFFLVLDDIMDDSHTRRGQPCWFRVPQVGLIAANDGIILRNHISRILRRHFKGKPYYADLLDLFNEVEFKTASGQLLDLITTHEGEKDLTKYNITVHGRIVQYKTAYYSFYLPVACALLLSGENLDNYGDVENILVEMGTYFQVQDDYLDCYGDPEFIGKIGTDIEDYKCSWLVVQALERADESQKRILFENYGKKAAAVVAXLKTLCKARHLXEAVFHESDNERSKKLITVREGHPSIAVQKVVISHLAKSIKRQK

SEQ ID NO: 5228 - protein, 264 aa, Zea mays
  unsure (1)..(264): unsure at all Xaa locations
HSYGRMGPSRPAGDNSQTRRGQPCWFRVPQVGLIAVNDGIILRNHISRILQRHFKGKPYYVDIIDLFNEVEFKTASGQMLDLITTHEGEKDLTKYNLTVHRRIVQYKTAYYSFYLPVACALLLAGENLENFVDVKNILVEMGTYFQVQDDYLDXCFGDPELIGKIGTDIEDYKCSWXLVVQAXLERAAENQKSILFENYGKSDPSXCVAKXVKDLYKELNLEGVFHEYERESYNKLIADIEAQPSKAVQTVLKSFLHKIYKRDK

SEQ ID NO: 5229 - protein, 207 aa, Zea mays
  unsure (1)..(207): unsure at all Xaa locations
MAAAAVALSNGSGGDSKAEFAEIYSRLKEEMLEDPAFEFTDESLQWIDRMLDYNVLGGKCNRGLSVIDSYKTLKGVDVLRKEETFLACTLGWCIEWLQAYFLVLDDIMDNSQTRRGQPCWFRVPQVGLIAVNDGIILRNHISRILQRHFRGKPYYVDLIDLFNEVEFKTASGQLLDLITTHEGEKDLTKYNLNVHRRIVQYKTAYYX

SEQ ID NO: 5230 - protein, 146 aa, Zea mays
  unsure (1)..(146): unsure at all Xaa locations
MAAAENGGGGESKAAFARIYDALKAELLRDPAFEYTESSHEWIDRMLDYNVLGGKCNRGLSVVDSYKLLKGVDVLSEEEMFLASTLGWCIEWLQAFFLVLDDIMDDTHTRRGQPCWFRVSRVGLIAVXDGILLRNHISRMLRLHFK

SEQ ID NO: 5231 - protein, 108 aa, Zea mays
  unsure (1)..(108): unsure at all Xaa locations
XDCFGDPEFIGKIGTDIEDYKCSWLVVQALERAAENQKSILFENYGKSDPACVAKVKDLYKELKLEEVFHEYERESYNKLIADIEAQPSKAVQTVLKSFLHKIYKRDK

SEQ ID NO: 5232 - protein, 74 aa, Zea mays
  unsure (1)..(74): unsure at all Xaa locations
XIELFLQSSYQTEIGQTLDLLTAPQGNVDLVRFTEKRYKSIVKYKTAFYSFYLPIAAAMYMAGIDGEKEHANAK

SEQ ID NO: 5233 - protein, 236 aa, Zea mays
  unsure (1)..(236): unsure at all Xaa locations
XQRVSMLAGQLAWPMEWFAAGFLGPGRSIDHSYTLAGQDXCWFSGAEGGLHPVNNGIHGLSRIWDLILRRXHCEGKHPYRCIVLDVXINDGIRSQTVSGGIQMXTLIRTHSEEIERPNKPITVAGXADXDVAHYNTAIFSFYSXTDAMCTWWSDGENLDTDXDVKNIIIFMGPYFQVQDDYLVCYCDPEFMAKIATDIVDYXXLXLVVHALERADESQTRILFEYYXGLKDLACVX

SEQ ID NO: 5234 - protein, 116 aa, Zea mays
  unsure (1)..(116): unsure at all Xaa locations
AANCVTGPVTLYEPKTTLSLQGTTLDWNGLDQESQQINVNTQFKXXYDYLDCYGDPEFIGKIGTDIEDYKCSWLVVQALDRADXSQKHILFVGHLQTSLKXLELYCLKVYTIDGSA

SEQ ID NO: 5235 - protein, 153 aa, Zea mays
  unsure (1)..(153): unsure at all Xaa locations
YFNCTLTVACALLVGGEYLNNXGLVKNILVXLGTYFQVQDXDYXHCVCGPEFIXGKIGTDIEXDYKCFWLVMHALEHPDEMHXNILLDCYGQSDSACVALVMDXCTELKLDEVFHACYTESYNMLIVYIEAHSNKEVQSVNKSLLDNIYTRDK

SEQ ID NO: 5236 - protein, 357 aa, Musa acuminata
MAAAGTNGAVVVVVGEGDLKATFRQIYDRLKSELLQDDAFDCTDEARQWIDRMLDYNVPGGKLNRGLSVIDSYKLLKEGNQLNDEEVFLGCALGWCIEWLQAYFLVLDDIMDNSHTRRGQLCWFRVPKVGLIAVNDGILLRNHIPRILKRHFKGKPYYVDLLDLFNEVEFQTASGQMLDLITTHEGEKDLSKYTLPVYNRIVQYKTAYYSFYLPVACALLMAGENLDTFVDVKNILVEMGTYFQVQDDFLDCFGDPEVIGKIGTDIEDFKCSWLVVQALQRANENQMKTLSEIYGKSDPTCVAKVKSIYKDLDLQNVFAEYERTSYEQLISSIEAQPSKAVQGVLKSFLQKIYKREK

SEQ ID NO: 5237 - protein, 347 aa, Schizosaccharomyces pombe
MSAVDKRAKFESALPVFVDEIVNYLKTINIPDDVTEWYKNSLFHNTLGGKYNRGLSVIDSYEILLGHPLDEAAYMKAAVLGWMVELLQSFFLIADDIMDASKTRRGQPCWYLMPGVGNIAINDAFMVESAIYFLLKKHFRQESCYVDLIELFHDVTFQTELGQQLDLLTAPEDSVDLSKFSLQKHSFIVIYKTAFYSFYLPVALAMHLAGVATPENLKCAQDILIILGKYFQVQDDYLDCYGDPTVTGKIGTDILDNKCSWIINLALAKCTPEQRVILDDNYGRKDSESEKRVKAVFEELNIRGEFENYEESEVSEIKKLIDGVDESTGLKKSIFTTFLGKIYKRNK

SEQ ID NO: 5238 - protein, 339 aa, Schizosaccharomyces pombe
VFVDEIVNYLKTINIPDDVTEWYKNSLFHNTLGGKYNRGLSVIDSYEILLGHPLDEAAYMKAAVLGWMVELLQSFFLIADDIMDASKTRRGQPCWYLMPGVGNIAINDAFMVESAIYFLLKKHFRQESCYVDLIELFHDVTFQTELGQQLDLLTAPEDSVDLSKFSLQKHSFIVIYKTAFYSFYLPVELAMHLAGVATPENLKCAQDILIILGKYFQVQDDYLDCYGDPTVTGKIGTDILDNKCSWIINLALAKCTPEQRVILDDNYGRKDSESEKRVKAVFEELNIRGEFENYEESEVSEIKKLIDGVDESTGLRKSIFTTFLGKIYKRISKFLVLCF

SEQ ID NO: 5239 - protein, 351 aa, Schizosaccharomyces pombe
MVNDFNEKNGIKKRLLDFFPVVLEGIREILESMQYFPEETEKLLYSIKRNTLGGKNNRGLAVLQSLTSLINRELEEAEFRDAALLGWLIEILQGCFLMADDIMDQSIKRRGLDCWYLVVGVRRAINESQLLEACIPLLIRKYFRNMPYYVDLLDTFREVTFLTELGQQEDLLSSRDGEASLRSFDLMKYDFIITYKTSFYSFYLPIKCALLLSRNSNQKAYDTTIKLSKLLGYYFQVQDDYLDCFGDYTVLGKVGMDIQDNKCTWLVCYAEKFASADQLNLLRAHYGKAGSENIAVIKQLYHELQIPELYHKFEDDMVDSISKEIDLIDESTGLKKCIFTKFFQLIYKRSR

SEQ ID NO: 5240 - protein, 212 aa, Sphaceloma manihoticola
GGKCNRGMSVVDTSSFLLGRPLSKDEYFKSATLGWMIELLQAFFLVSDDIMDSSKTRRGSPCWYLMPQVGMVAINDAFMLETSIYLLLKKYFRQSKHYVDLIELFHEVSFQTEMGQQCDLLTAPEDKVDLDNFSLEKYSFIVIYKTAFYSFYLPVALALYYCELATEKNLKQAKDILIPMGEYFQVQDDYLDNYADPETLGKIGTDIQGNKC

SEQ ID NO: 5241 - protein, 352 aa, Saccharomyces cerevisiae
MASEKEIRRERFLNVFPKLVEELNASLLAYGMPKEACDWYAHSLNYNTPGGKLNRGLSVVDTYAILSNKTVEQLGQEEYEKVAILGWCIELLQAYFLVADDMMDKSITRRGQPCWYKVPEVGEIAINDAFMLEAAIYKLLKSHFRNEKYYIDITELFHEVTFQTELGQLMDLITAPEDKVDLSKFSLKKHSFIVTFKTAYYSFYLPVALAMYVAGITDEKDLKQARDVLIPLGEYFQIQDDYLDCFGTPEQIGKIGTDIQDNKCSWVINKALELASAEQRKTLDENYGKKDSVAEAKCKKIFNDLKIEQLYHEYEESIAKDLKAKISQVDESRGFKADVLTAFLNKVYKRSK

SEQ ID NO: 5242 - protein, 222 aa, Saccharomyces cerevisiae
MLEAAIYKLLKSHFRNEKYYIDITELFHEVTFQTELGQLMDLITAPEDKVDLSKFSLKKHSFIVTFKTAYYSFYLPVALAMYVAGITDEKDLKQARDVLIPLGEYFQIQDDYLDCFGTPEQIGKIGTDIQDNKCSWVINKALELASAEQRKTLDENYGKKDSVAEAKCKKIFNDLKIEQLYHEYEESIAKDLKAKISQVDESRGFKADVLTAFLNKVYKRSK

SEQ ID NO: 5243 - protein, 136 aa, Sonchus oleraceus
YFLVLDDIMDESHTRRGQPCWFRLPIVGMIAANDGIILRNHIPRILKKHFRGKPYYIDLVDLFNEVEFQTASGQMIDLITTLVGEKDLSKYSLSIHKRIVQYKTAYYSFYLPVACALLMFGEDLEKHVEVKDVLVE

SEQ ID NO: 5244 - protein, 212 aa, Claviceps purpurea
GGKCNRGMSVPDSVSLLLGRPLQEEEYFHAATLGWMTELLQAFFLVSDDIMDGSITRRRKPCWHRQDGVGMIAINDAFLIESAIYALLKKYFRSHPAYVDMLELFHEATFQAELGQLCDLITGPVDKVDLGNFSMDKYRFIVIYKTAYYSFYLPVALALHQLNLATPRNLKVAEDILIPLGEYFQVQDDYLDNFGRPEHIGKIGTDIQDNKC

SEQ ID NO: 5245 - protein, 211 aa, Claviceps purpurea
GGKCNRGMSVPDSVSLLLGRPLQEEEYFHAATLGWMTELLQAFFLVSDDIMDGSITRRRKPCWHRQDGVGMIAINDAFLIESAIYALLKKYFRSHPAYVDMLELFHEATFQAELGQLCDLITGPVDKVDLGNFSMDKYRFIVIYKTAYYSFYLPVALALHQLNLATPRNLKVAEDILIPLGEYFQVQDDYLDNFGRPEHIGKIGTDIQDNK

SEQ ID NO: 5246 - protein, 347 aa, Gibberella fujikuroi
MAQQTTLQEFNSVYPKLEEALLDHARSYKLPQEQLDWYKRSLEVNPLGGKCNRGMSVPDSVSLLLEKPLTEEQYFQAATLGWMTELLQAFFLVSDDIMDSSITRRGQPCWYRQEGVGMIAINDAFMLESAIYTLLKKYFRSHPAYFDLIESFHETTFQTELGQLCDLLTAPEDNVNLDNFSLEKYSFIVIYKTAYYSFYLPVALALHQLNLATPSNLKQAEDILIPLGEYFQIQDDYLDNFGKPEHIGKIGTDIKDNKCSWLVNQALAVATPEQRKILEENYGRKDDEKEKVVKKLYDDLNLEQRYLDYEEKVVGQIRERIANIDENDGLKKTVFEAFLAKIYKRSK

SEQ ID NO: 5247 - protein, 347 aa, Neurospora crassa
MAKTTTLKEFESVFPKLEEALLEYAKAYKLPEQMLSWYKQSLEVNTLGGKCNRGMSVPDSASILLGRPLTEEEYFQAATLGWMTELLQAFFLVSDDIMDSSITRRGKPCWYRQEGVGMVAINDAFMLESAIYTLLKKYFRSHPRYVDFLELFHEVTFQTEMGQLCDLLTAPEDKVDLDNFSMDKYTFIVIYKTAYYSFYLPVALAMYMLDIATPENLKQAEDILIPLGEYFQVQDDYLDNFGLPEHIGKIGTDIQDNKCSWLVNKALSIVTPEQRKTLEENYGRKDKAKEAVIKQLYDDLKLEDHYKQYEEERVGEIRKMIDAIDESKGLKKQVFEAFLGKIYKRSK

SEQ ID NO: 5248 - protein, 347 aa, Neurospora crassa
MAKTTTLKEFESVFPKLEEALLEYAKAYKLPEQMLSWYKQSLEVNTLGGKCNRGMSVPDSASILLGRPLTEEEYFQAATLGWMTELLQAFFLVSDDIMDSSITRRGKPCWYRQEGVGMVAINDAFMLESAIYTRLKKYFRSHPRYVDFLELFHEVTFQTEMGQLCDLLTAPEDKVDLDNFSMDKYTFIVIYKTAYYSFYLPVALAMYMLDIATPENLKQAEDILIPLGEYFQVQDDYLDNFGLPEHIGKIGTDIQDNKCSWLVNKALSIVTPEQRKTLEENYGRKDKAKEAVIKQLYDDLKLEDHYKQYEEERVGEIRKMNDAIDESKGLKKQVFEAFLGKIYKRSK

SEQ ID NO: 5249 - protein, 427 aa, Agrotis ipsilon
MFSTKKSLDRFLQMYKKEIRRQISKTTSVTNSDAMVPRLDQAVSKSPQNDDAGPKKLLKLQKYHRYLSTLTTQEMPMATRGLSVSKDQSREFMACFPDIVRDLTETGKHIDVPEASKWLAKLLQYNVPNGKKNRGLATVLAYKMLEKKENLTPENIHLANMMGWSIEMFHTHQLLLNDIMEGAEMRRGAPCWYKHPEVGLSGINDAALIQAAMFSTLKRHFNNKFFYKSVLETFNEMLLKCSIGHFLENQMAKTDKPDLTLFTMEKYEAITKYKTSYHTFQMPVTLALLMTGVEDPETHRQAKNILLKMGEFFQIQDDFLDCFGDPAVTGKNGTDIQDGKCTWLAVVALQRATPKQKQFMEENYGSSDPEAVNKIKQLYEELQLPHTYSVFEEATHDLLRTQIQQVTRGLPHELFFKILDNIFRRSV

SEQ ID NO: 5250 - protein, 362 aa, Trypanosoma cruzi
MASMERFLSVYDEVQAFLLDQLQSKYEIDPNRARYLRIMMDTTCLGGKYFRGMTVVNVAEGFLAVTQHDEATKERILHDACVGGWMIEFLQAHYLVEDDIMDGSVMRRGKPCWYRFPGVTTQCAINDGIILKSWTQIMAWHYFADRPFLKDLLCLFQKVDYATAVGQMYDVTSMCDSNKLDPEVAQPMTTDFAEFTPAIYKRIVKYKTTFYTYLLPLVMGLFVSEAAASVEMNLVERVAHLIGEYFQVQDDVMDCFTPPEQLGKVGTDIEDAKCSWLAVTFLGKANAAQVAEFKANYGDKDPAKVAVVKRLYSEANLQADFAAYEAEVVREVESLIEQLKVKSPTFAESVAVVWEKTHKRKK

SEQ ID NO: 5251 - protein, 425 aa, Trypanosoma cruzi
MTAFACFPHSLFYSTRLPFFFFFFCVCVHCCLRYLCLLKCAYCCSDKNYFRPLNYFFYCLYLAMASMERFLSVYDEVQAFLLDQLQSKYEIDPNRARYLRIMMDTTCLGGKYFRGMTVVNVAEGFLAVTQHDEATKERILHDACVGGWMIEFLQAHYLVEDDIMDGSVMRRGKPCWYRFPGVTTQCAINDGIILKSWTQIMAWHYFADRPFLKDLLCLFQKVDYATAVGQMYDVTSMCDSNKLDPEVAQPMTTDFAEFTPAIYKRIVKYKTTFYTYLLPLVMGLLVSEAAASVEMNLVERVAHLIGEYFQVQDDVMDCFTPPEQLGKVGTDIEDAKCSWLAVTFLGKANAAQVAEFKANYGEKDPAKVAVVKRLYSKANLQADFAAYEAEVVREVESLIEQLKVKSPTFAESVAVVWEKTHKRKK

SEQ ID NO: 5252 - protein, 316 aa, Trypanosoma cruzi
GKYFRGMTVVNVAEGFLAVTQHDEATKERILHDACVGGWMIEFLQAHYLVEDDIMDGSVMRRGKPCWYRFPGVTTQCAINDGIILKSWTQIMAWHYFADRPFLKDLLCLFQKVDYATAVGQMYDVTSMCDSNKLDPEVAQPMTTDFAEFTPAIYKRIVKYKTTFYTYLLPLVMGLFVSEAAASVEMNLVERVAHLIGEYFQVQDDVMDCFTPPEQLGKVGTDIEDAKCSWLAVTFLGKANAAQVAEFKANYGDKDPAKVAVVKRLYSEANLQADFAAYEAEVVREVESLIEQLKVKSPTFAESVAVVWEKTHKRKK

SEQ ID NO: 5253 - protein, 362 aa, Plasmodium falciparum
MENEQNNQDSENGLDYFRSMYDRYRDVFINHINDYVLEDDIKIIISKYYKLLFDYNCLGGKNNRGILVILIYEYVKNRDINCNEWEKVACIAWCIEILQASFLVADDIMDKGETRRNKHCWYLLKDVEIKNAVNDVFLLYNAIYKLLDVYLRNDNCYLDLITSFREATLKTIVGQHLDTNIFSDKYSHIDKDIDVNNINISQENKININMLNFKVYQNIIIHKTAYYSFFLPIVCGMQMGGISLDNLLYKKVENIAILMGEYFQVHDDYIDTFGDSKKTGKVGSDIQNNKLTWPLIKAFELCSQPEKEDIIRNYGKDNVTCIKFINDIYEHYNIRDHYVEYEKKQKMKILEAINQLHHEGNI

SEQ ID NO: 5254 - protein, 292 aa, Encephalitozoon cuniculi
MIKEIVKSRILQMSSEYSKPEVLFLLDYNLGGGKELRYKAYVHVLKALNGEVSMENLIMGYSVELLQAVLLIVDDIMDNSKIRRGKPCYYLKRGMKTVKDAFFLLGAIRKLLSEKMKKPYSDSVFKTCLGQTHDTIRKTRSEYSLETYVAIAESKTGAYTFYLPAVLGYVAANKAEPACLWDFCNLGALIFQMQDDYLNFLPEKSSKSMNDLEEMKCTWFTSRMSQMDNPAVEKYFLDGAVCSELLTIIRSLFGEYSSTLDKLLKKLLSMVGEDQKEVFRVFISFLDARREI

SEQ ID NO: 5255 - protein, 352 aa, Caenorhabditis elegans
MFASRKLVETALGEVKKKFVRVVAAKLPADGMEYDLVQYRCRNLFDNTVIGGKYSRASLCVDTIRALQPHLRDETQELQAVCEAAATLEIIQSFYLIADDIMDNSETRRGKPCWFRREGVGMSAINDAFIMDSFVEDILRLALPGHVNLDRLCEAYRKSKQKTLIGQFLDTSSVNQISSFTWDRYELMVENKTSHYTVFHPIQMALIISDVLAYHGSVKKVAYQIGFLFQSQDDFLDVYGDPKITGKIGTDIQDGKCTWLAVRALQKMHKTPEKWGAKLIEEFKTSFGSVDPEKVEKIKRIYDELQLKQEFRRFEKHFSGEIKKSISEIPDVINPLRPVLDGFVTKLVNRNA

SEQ ID NO: 5256 - protein, 289 aa, Caenorhabditis elegans
MDNSETRRGKPCWFRREGVGMSAINDAFIMDSFVEDILRLALPGHVNLDRLCEAYRKSKQKTLIGQFLDTSSVNQISSFTWDRYELMVENKTSHYTVFHPIQMALIISDVLAYHGSVKKVAYQIGFLFQSQDDFLDVYGDPKITGKIGTDIQDGKCTWLAVRALQKMHKTPEKWGAKLIEEFKTSFGSVDPEKVEKIKRIYDELQLKQEFRRFEKHFSGEKKKKVDFADFSREKSLKIEENCFFFQKFTTKKLKKKSPEAENLTKNSSLFQVFQVKKCRFLPIFPVKNC

SEQ ID NO: 5257 - protein, 427 aa, Bombyx mori
MFSTKKSLEKFMQAYKNEVRRHISKTTSVTNSDAMAPRLDQSASKSPQAEETGPKRLLKLQKYHRFLSTLTPQEMPMATRGLAVSKDQSREFMAVFPDIVRDLTETGKHIDVPEASKWLAKLLQYNVPNGKKNRGLATILAYKMLEKKENLTPENILLANVMGWCVEMFHTHQLLLNDIMEGTTMRRGVPCWHRRPDVGLNGINDAALIQSAMYTSLKRHFNTKPYYNYVLETFNEMLMKCSMGHYVQKLMLKTDKPDLSLFTMEKYEAITKYKTSYYTFQMPVSLALLMTGVDDPETHRQAKTILLKMGEFFQIQDDFLDCFGDPTVTEKYGTDIQDGKCTWLAVVALQRATPAQKQIMEDNYGVNKPEAIARIKDLYEELQLPHTYSVFEETTYDLLRTQIQQVTRGLPHELFFKILDNIFRRSV

SEQ ID NO: 5258 - protein, 419 aa, Drosophila melanogaster
MFKLARMLLPQQRILASPLRLQRLISTSDEVNAEPIIKSMDTIGGLPTELVNEQKLKKTSRTLSTLQNHSVPIAARVTVSKDESRDFMAVFPDLVRDITTVTKAYNCSDAAKWFAQVLQYNVPRGKKNRGILTVLTYKNLVPTQDLTPENIKLAQYLGWCVEMLQSFFIISDDVMDNSTTRRGQPCWHKVENVGLTAINDALMIENAMYAILKKHFSHLDCYVALMELFHEITYITTCGQSLDQLNSNRCVSEFTMENYKAIVENKTAYYSFYLPFALALHLAGYKDAEAFRQSKTILLEMGNFFQVQDDFLDCFGNPEVTGKIGTDIQDNKCSWLAVVAMQRANVEQKQIMVDCYGKEEPAKVERVKELYKELGLPSTYAIFEEESYNMIKTHIQQTSRGVPHQTFLQILNKIYQRDS

SEQ ID NO: 5259 - protein, 380 aa, Drosophila melanogaster
MDTIGGLPTELVNEQKLKKTSRTLSTLQNHSVPIAARVTVSKDESRDFMAVFPDLVRDITTVTKAYNCSDAAKWFAQVLQYNVPRGKKNRGILTVLTYKNLVPTQDLTPENIKLAQYLGWCVEMLQSFFIISDDVMDNSTTRRGQPCWHKVENVGLTAINDALMIENAMYAILKKHFSHLDCYVALMELFHEITYITTCGQSLDQLNSNRCVSEFTMENYKAIVENKTAYYSFYLPFALALHLAGYKDAEAFRQSKTILLEMGNFFQVQDDFLDCFGNPEVTGKIGTDIQDNKCSWLAVVAMQRANVEQKQIMVDCYGKEEPAKVERVKELYKELGLPSTYAIFEEESYNMIKTHIQQTSRGVPHQTFLQILNKIYQRDS

SEQ ID NO: 5260 - protein, 151 aa, Plasmodium yoelii yoelii
MCIYICTYIHSMQLSGIAMDNLLYKKIEDISIMMGEYFQAHDDYLDIFGDFTQTGKMGSDIQNNKLTWLLIKAFELCSESDKEKIIKNYGKNNVASVKIIDNIYEKYNIKEHYNIYEQTQKDKIIEYRHSVYVLIYSNFNLKYMFNLFLSC

SEQ ID NO: 5261 - protein, 135 aa, Youngia japonica
TSLCLMTSWTSLIHAEVSPVGSDSKVGMIAANDGIILRNHVPRILKKHFRGKPYYIDLVDLFNEVEFQTASGQMIDLITTLVGEKDLSKYSLSIHRRIVQYKTAYYSFYLPVACALLMFGEDLEKHVEVKDVLVE

SEQ ID NO: 5262 - protein, 348 aa, Gallus gallus
SPVVVEREREEFVGFFPQIVRDLTEDGIGHPEVGDAVARLKEVLQYNAPGGKCNRGLTVVAAYRELSGPGQKDAESLRCALAVGWCIELFQAFFLVADDIMDQSLTRRGQLCWYKKEGVGLDAINDSFLLESSVYRVLKKYCRQRPYYVHLLELFLQTAYQTELGQMLDLITAPVSKVDLSHFSEERYKAIVKYKTAFYSFYLPVAAAMYMVGIDSKEEHENAKAILLEMGEYFQIQDDYLDCFGDPALTGKVGTDIQDNKCSWLVVQCLQRVTPEQRQLLEDNYGRKEPEKVAKVKELYEAVGMRAAFQQYEESSYRRLQELIEKHSNRLPKEIFLGLAQKIYKRQK

SEQ ID NO: 5263 - protein, 367 aa, Gallus gallus
MHKFTGVNAKFQQPALRNLSPVVVEREREEFVGFFPQIVRDLTEDGIGHPEVGDAVARLKEVLQYNAPGGKCNRGLTVVAAYRELSGPGQKDAESLRCALAVGWCIELFQAFFLVADDIMDQSLTRRGQLCWYKKEGVGLDAINDSFLLESSVYRVLKKYCRQRPYYVHLLELFLQTAYQTELGQMLDLITAPVSKVDLSHFSEERYKAIVKYKTAFYSFYLPVAAAMYMVGIDSKEEHENAKAILLEMGEYFQIQDDYLDCFGDPALTGKVGTDIQDNKCSWLVVQCLQRVTPEQRQLLEDNYGRKEPEKVAKVKELYEAVGMRAAFQQYEESSYRRLQELIEKHSNRLPKEIFLGLAQKIYKRQK

SEQ ID NO: 5264 - protein, 367 aa, Gallus gallus
MHKFTGVNAKFQQPALRNLSPVVVEREREEFVGFFPQIVRDLTEDGIGHPEVGDAVARLKEVLQYNAPGGKCNRGLTVVAAYRELSGPGQKDAESLRCALAVGWCIELFQAASLVADDIMDQSLTRRGQLCWYKKEGVGLDAINDSFLLESSVYRVLKKYCRQRPYYVHLLELFLQTAYQTELGQMLDLITAPVSKVDLSHFSEERYKAIVKYKTAFYSFYLPVAAAMYMVGIDSKEEHENAKAILLEMGEYFQIQDDYLDCFGDPALTGKVGTDIQDNKCSWLVVQCLQRVTPEQRQLLEDNYGRKEPEKVAKVKELYEAVGMRAAFQQYEESSYRRLQELIEKHSNRLPKEIFLGLAQKIYKRQK

SEQ ID NO: 5265 - protein, 367 aa, Gallus gallus
MHKFTGVNAKFQQPALRNLSPVVVEREREEFVGFFPQIVRDLTEDGIGHPEVGDAVARLKEVLQYNAPGGKCNRGLTVVAAYRELSGPGQKDAESLRCALAVGWCIELFQAASLVADDIMDQSLTRRGQLCWYKKEGVGLDAINDSFLLESSVYRVLKKYCRQRPYYVHLLELFLQTAYQTELGQMLDLITAPVSKVDLSHFSEERYKAIVKYKTAFYSFYLPVAAAMYMVGIDSKEEHENAKAILLEMGEYFQIQDDYLDCFGDPALTGAVGTDIQDNKCSWLVVQCLQRVTPEQRQLLEDNYGRKEPEKVAKVKELYEAVGMRAAFQQYEESSYRRLQELIEKHSNRLPKEIFLGLAQKIYKRQK

SEQ ID NO: 5266 - protein, 353 aa, Homo sapiens [sequence omitted]

SEQ ID NO: 5267 - protein, 419 aa, Homo sapiens
MPLSRWLRSVGVFLLPAPYWAPRERWLGSLRRPSLVHGYPVLAWHSARCWCQAWTEEPRALCSSLRMNGDQNSDVYAQEKQDFVQHFSQIVRVLTEDEMGHPEIGDAIARLKEVLEYNAIGGKYNRGLTVVVAFRELVEPRKQDADSLQRAWTVGWCVELLQAFFLVADDIMDSSLTRRGQICWYQKPGVGLDAINDANLLEACIYRLLKLYCREQPYYLNLIELFLQSSYQTEIGQTLDLLTAPQGNVDLVRFTEKRYKSIVKYKTAFYSFYLPIAAAMYMAGIDGEKEHANAKKILLEMGEFFQIQDDYLDLFGDPSVTGKIGTDIQDNKCSWLVVQCLQRATPEQYQILKENYGQKEAEKVARVKALYEELDLPAVFLQYEEDSYSHIMALIEQYAAPLPPAVFLGLARKIYKRRK

SEQ ID NO: 5268 - protein, 346 aa, Homo sapiens
DVYAQEKQDFVQHFSQIVRVLTEDEMGHPEIGDAIARLKEVLEYNAIGGKYNRGLTVVVAFRELVEPRKQDADSLQRAWTVGWCVELLQAFFLVADDIMDSSLTRRGQICWYQKPGVGLDAINDANLLEACIYRLLKLYCREQPYYLNLIELFLQSSYQTEIGQTLDLLTAPQGNVDLVRFTEKRYKSIVKYKTAFYSFYLPIAAAMYMAGIDGEKEHANAKKILLEMGEFFQIQDDYLDLFGDPSVTGKIGTDIQDNKCSWLVVQCLQRATPEQYQILKENYGQKEAEKVARVKALYEELDLPAVFLQYEEDSYSHIMALIEQYAAPLPPAVFLGLARKIYKRRK

SEQ ID NO: 5269 - protein, 353 aa, Homo sapiens
MNGDQNSDVYAQEKQDFVQHFSQIVRVLTEDEMGHPEIGDAIARLKEVLEYNAIGGKYNRGLTVVVAFRELVEPRKQDADSLQRAWTVGWCVELLQAFFLVADDIMDSSLTRRGQICWYQKPGVGLDAINDANLLEACIYRLLKLYCREQPYYLNLIELFLQSSYQTEIGQTLDLLTAPQGNVDLVRFTEKRYKSIVKYKTAFYSFYLPIAAAMYMAGIDGEKEHANAKKILLEMGEFFQIQDDYLDLFGDPSVTGKIGTDIQDNKCSWLVVQCLQRATPEQYQILKENYGQKEAEKVARVKALYEELDLPAVFLQYEEDSYSHIMALIEQYAAPLPPAVFLGLARKIYKRRK

SEQ ID NO: 5270 - protein, 348 aa, Homo sapiens
  unsure (1)..(348): unsure at all Xaa locations
NSDVYAQEKQDFVQHFSQIVRVPTEDEMGHPEIGDAIARLKEVLEYNAIGGKYNRRLTVAVAFRELVDPRKQDADSLQRAWTVGWCVELLQAFFLVADDIMDSSLTRRGQICWYQKPGVGLDAIDDANLLEACIYPLLKLYCREQPYYLNLIELFLQSSYQTEIGQTLDLLTXPQGNVDLVRFTEKRYISIVKYKTALSSSYLPIAAAXXXXGIVXEKEHANAXKILLEMGEFSQIQDDYLELFGDPSVTGKIGTDIQDXKCNCLXVQCLXRATPEQYQILKENYGQKEAEKVPRVKALYEELDLPAVFLQYEEDSYSHIMALIEQYAAPLPPAVFLGLARQIYKRXK

SEQ ID NO: 5271 - protein, 184 aa, Homo sapiens
MDSSFTCRGQICWYQKPGMDLDAINDVILLEACIYHLLKIYCIYHLLKIYCREQPYYLNLTVLFLQSSYQTEIRQTLDLITAPQGNVDLGRFTEKRHKSIVKYKTAFYSFYLPVAAAMYMAGIDGKKEHANAKKILLGMGEFLQVQDDYLDLFGDPSVTGKVGTDIQDNKCSWLVVQCLQQATP

SEQ ID NO: 5272 - protein, 258 aa, Homo sapiens
MNGDQKSDAYAQEKQDFIQHFSRIVRVLTEDEMGHPETGDAIAQLKEVLEYNAIGGKLSPGFDAFRELVEPRKQDADSFQRALMVGWCVELLQAFFLVVDDITDSSLTHWGQICWYQKLGVGLDAVNDAMLLEACIYCLLKLCCWEQPYYLNLIELFLQSSYQTEIGQTLDPITAPPGQCGSSQIQGKELQIVKYKTVFYSFYLPIAAAMHMAGIDGEKAHTNAKKILLEMGEFFKIQDDHFDLFGDSTVTDKVGTAI

SEQ ID NO: 5273 - protein, 265 aa, Homo sapiens
MNGDQKSDVYAQEKQDFFQHFSQIVGVLTEDEMGHSEIGDAIARLKDVLEYNAIGGKYHRGLTVLVAFQELDAINYAILLEACIYYLLKLYCQAQPYYLNLIELFLQISCQPEIGQTLDLITAPRTMWILADSLKTARQCLEDPTGDREFFQIQDGYLDLFGDPTVTRKVGTDIQDNKCSWLVVQCLQRSTLEQYQILKENYGQKKAKKVVQVKALYEELDLPAVFLQYEEDGYSHIMGLTEQYAAPLLPAMFLGLVYKIYKQKK

SEQ ID NO: 5274 - protein, 266 aa, Homo sapiens
MNGDQKSDVYAQEKQDFVQHFPQIIRVLSEDEMGHSETGDAVDRLKEVLEYNAIGGKYHQDLMVLVAFWELVEPRKQDADSLQQALTVGWCVELLQAFFLVADDIMDSSVSRRGQIWWYQKPGMGLDAINDAMLLELQPCTAGIDGDKEHANGKKILLEMGEFFQIQDDYLDLFGDPSVTSKVGTDIQDNKCGWLYQILKENYRQKKAKKVAQVKALSEELNLLAVFLQYEEDSYSHIMGLIEQYAAPLTPAIFLGLVRKIYKQKK

SEQ ID NO: 5275 - protein, 285 aa, Homo sapiens [sequence omitted]

SEQ ID NO: 5276 - protein, 325 aa, Cytophaga hutchinsonii
MLLTTERLTKDISKAISKAEFGKEPTELYEPIRYIMDLGGKRMRPLLTILSNYIFTEDTNNVMNAAIAVEVFHNFTLMHDDIMDNAPLRRGKATVHAKWNTNIAILSGDVMLVEAYKQLMTIDEKYLKQVLDRFNETAAGVCEGQQFDMNFESLPTISVDDYINMIRLKTAVLLGFSMELGGILGDADEKSCTYLNTVGISAGIGFQLKDDLLDVYGDAATFGKQVGGDILANKKTFLLIRALEKAAGKTKKDLEKLLTDKTISDKAKIEGVTNIYDQLGIKEETEALIQQHFNTAIESLGKVKGSIFRKHYIKDYLLALIGREQ

SEQ ID NO: 5277 - protein, 353 aa, Bos taurus
MNGDQKLDAYAQERQDFIQHFSQIVKVLTEEDIGHPEIGDAITRLKEVLEYNAIGGKYNRGLTVVITFRELVEPGKQDPDSLQRALTVGWCVELLQAFFLVSDDIMDSSLTRRGQTCWYQKPGIGLDAINDAFLLESSIYRLLKLYCREQPYYLDLIELFLQSSYQTEIGQTLDLITAPQGNVDLGRFTEKRYKSIVKYKTAFYSFYLPVAAAMYMAGIDGEKEHAHAKKILLEMGEFFQIQDDYLDLFGDPSMTGKIGTDIQDNKCSWLVVQCLQRASPEQRQILQENYGQKEAEKVARVKALYEEMNLSAVYMQYEEDSYNHIMGLIEQYAAPLPPAIFLGLAQKIYKRKK

SEQ ID NO: 5278 - protein, 148 aa, Xanthoceras sorbifolium
SFYLPVACALLMAGENLDNHVDVKNTLVDMGIYFQVQDDYLDCFGAPEVIGKVGTDIEDFKCSWLVVKAVERCNEEQRKSLNENYGKADQACVAKVKELYNALDLQGAFTQFESESYEKLIKSIEAHPSKAVQAVLKSFSGKIYKWQK

SEQ ID NO: 5279 - protein, 142 aa, Mus musculus
MNGNQKLDVYNQEKQNFIQHFSQIVKVLTEKVLVHPDIGDAIARLKEVLEYNALGGKYNRGLAMVQAFQELVEPKKQDTESLQRALTVGWCVEMLQAFFFVSDDIMDSSLTRGARSAGIRSQALAWMPSTTLCFWKPPSIVC

SEQ ID NO: 5280 - protein, 329 aa, Deinococcus radiodurans
MRPELLARVLSLLPETSATPELARFYALLRDYPQRGGKGIRSELLLASARAHGLSESDTGWESALWLAAALELFQNWVLVHDDIEDDSEERRGRPALHHLCGMPVALNVGDALHAYMWAAVGKANVPGAFEEFLQMVYRTAEGQHLDLAWVEGREWGLRPADYLQMVGLKTAHYTVIVPLRLGALAAGMAPQDAFTPAGLALGTAFQIRDDVLNLAGDPVKYGKEIGGDLLEGKRTLIVLDWLTTAPDDRKAIFLDQMRRHRADKDPAVIDEIHRWLLESGSVEAAQDYAQAQAAEGLDLLEKALADAPDAQAAAALLASVRELATREK

SEQ ID NO: 5281 - protein, 375 aa, Fagus sylvatica
MCGGAIISDFIAPTGSRRLTADYLWGDRKKPISGKRFSKPVVDLDDEFELDFQGFKDEEESDIDEEEVLVQDVKPFTFSAPPSSGSKPVKSVEFNGQAEKSAKRKRKNQYRGIRQRPWGKWAAEIRDPRKGVRVWLGTFNTAEEAARAYDAEARRIRGKKSKGNFPMRLPVPKRSVKANLQKPLAKANLNSVQPNLNQNFNFMNSDQDYTMGLMEEKPFTNQYGYMDSIPVNADVGLKSFASNNTAPYFNSDQGSNSFDCSDYGWGEQGSKTPEISSVLSATLEGDESQFVEDAVPTKKLKSDSGNAVFIENNTAKTLSEELSAFESQMNFQMPFLEGSWESNMEALFSGDTTQDGNSMDLWSFDDLPVMAGGVL

SEQ ID NO: 5282 - protein, 240 aa, synthetic construct
MNSFSAFSEMFGSDYEPQGGDYCPTLATSCPKKPAGRKKFRETRHPIYRGVRQRNSGKWVSEVREPNKKTRIWLGTFQTAEMAARAHDVAALALRGRSACLNFADSAWRLEFSRGRTRNNYGSTIEGLLDLPDDDDAPAEAGLVAPRMSFLSAGQRPRRLSTTAPITDVSLVDELRLDGEEVDMTPADALDDFDLEMLGDVESPSPGMTHDPVSYGALDVDDFEFEQMFTDALGIDDFGG

SEQ ID NO: 5283 - protein, 240 aa, Atriplex hortensis
MSYSYPPPLPSNTLNNFLSPKPVTMKTTGGPPKPTKLYRGVRQRHWGKWVAEIRLPKNRTRLWLGTFDTAEEAALAYDKAAYKLRGDFARLNFPNLRHEGSHIGGEFGEYKPLHSSVNAKLEAICESLAKQGNEKQGKSGKSKKKDVANNNNNTSSSSSSSCCTTATAAADAPQQQQRMPENGGDVKTESTSDSEVGSGGSSPLSDLTFGDNEEMGSENFLLESCPSHEIDWDAILSSES

SEQ ID NO: 5284 - protein, 282 aa, Mesembryanthemum crystallinum
MSLIANFESDFAVLESIRRHLLEDWDPRAGAPAITTGSGPVYHRNSSFSSLYPCLTDNWGELPLKEDDSEDMVLFGVLRDAVHTGWSPQSGSESGSGSPAPVTVKPEPVDSPVSSPAPVRVAGGEAPVAAAPARGKHYRGVRRRPWGKFAAEIRDPAKNGARVWLGTFETAEDAALAYDRAAFRMRGSKALLNFPLRVNSGEPDPVRITSKRSSPERSVSSSSSESASPKRRKKEEVVVGPVAGQARPGLQQVGNVVEGMQVGVGCQVGVGTMPLGDQLLVT

SEQ ID NO: 5285 - protein, 280 aa, Prunus armeniaca
EKSAKRKRKNQYRGIRQRPWGKWAAEIRDPRKGVRVWLGTFNTAEEAARAYDSEARRIRGKKAKVNFPDETPRSSAKRSVKANPQKMQPKTNMNAIQPNLNQNINFVNDPNQDYYNAMGFLDEKPPTNNFGFMSTFPANDVALKSSTPSDAVPLYFGSDQGSNSFDCSDFGWGEQGSKTPEISSVLSSVMEESDDSLFLEDASPTKKLRSNPEDLVPVQDNAGKTLTDELSAFEMKYFQTPYLDGSWDASVDAFLSGDATQDGGNSVDLWCFDDLVGGGF

SEQ ID NO: 5286 - protein, 266 aa, Arabidopsis thaliana
MTADSQSDYAFLESIRRHLLGESEPILSESTASSVTQSCVTGQSIKPVYGRNPSFSKLYPCFTESWGDLPLKENDSEDMLVYGILNDAFHGGWEPSSSSSDEDRSSFPSVKIETPESFAAVDSVPVKKEKTSPVSAAVTAAKGKHYRGVRQRPWGKFAAEIRDPAKNGARVWLGTFETAEDAALAYDRAAFRMRGSRALLNFPLRVNSGEPDPVRIKSKRSSFSSSNENGAPKKRRTVAAGGGMDKGLTVKCEVVEVARGDRLLVL

SEQ ID NO: 5287 - protein, 268 aa, Arabidopsis thaliana
MSMTADSQSDYAFLESIRRHLLGESEPILSESTASSVTQSCVTGQSIKPVYGRNPSFSKLYPCFTESWGDLPLKENDSEDMLVYGILNDAFHGGWEPSSSSSDEDRSSFPSVKIETPESFAAVDSVPVKKEKTSPVSAAVTAAKGKHYRGVRQRPWGKFAAEIRDPAKNGARVWLGTFETAEDAALAYDRAAFRMRGSRALLNFPLRVNSGEPDPVRIKSKRSSFSSSNENGAPKKRRTVAAGGGMDKGLTVKCEVVEVARGDRLLVL

SEQ ID NO: 5288 - protein, 225 aa, Arabidopsis thaliana
GQSIKPVYGRNPSFSKLYPCFTESWGDLPLKENDSEDMLVYGILNDAFHGGWEPSSSSSDEDRSSFPSVKIETPESFAAVDSVPVKKEKTSPVSAAVTAAKGKHYRGVRQRPWGKFAAEIRDPAKNGARVWLGTFETAEDAALAYDRAAFRMRGSRALLNFPLRVNSGEPDPVRIKSKRSSFSSSNENGAPKKRRTVAAGGGMDKGLTVKCEVVEVARGDRLLVL

SEQ ID NO: 5289 - protein, 243 aa, Arabidopsis thaliana
MYGQCNIESDYALLESITRHLLGGGGENELRLNESTPSSCFTESWGGLPLKENDSEDMLVYGLLKDAFHFDTSSSDLSCLFDFPAVKVEPTENFTAMEEKPKKAIPVTETAVKAKHYRGVRQRPWGKFAAEIRDPAKNGARVWLGTFETAEDAALAYDIAAFRMRGSRALLNFPLRVNSGEPDPVRITSKRSSSSSSSSSSSTSSSENGKLKRRRKAENLTSEVVQVKCEVGDETRVDELLVS

SEQ ID NO: 5290 - protein, 243 aa, Arabidopsis thaliana
MYGQCNIESDYALLESITRHLLGGGGENELRLNESTPSSCFTESWGGLPLKENDSEDMLVYGLLKDAFHFDTSSSDLSCLFDFPAVKVEPTENFTAMEEKPKKAIPVTETAVKAKHYRGVRQRPWGKFAAEIRDPAKNGARVWLGTFETAEDAALAYDIAAFRMRGSSALLNFPLRVNSGEPDPVRITSKRSSSSSSSSSSSTSSSENGKLKRRRKAENLTSEVVQVKCEVGDETRVDELLVS

SEQ ID NO: 5291 - protein, 188 aa, Arabidopsis thaliana
MLVYGILNDAFHGGWEPSSSSSDEDRSSFPSVKIETPESFAAVDSVPVKKEKTSPVSAAVTAAKGKHYRGVRQRPWGKFAAEIRDPAKNGARVWLGTFETAEDAALAYDRAAFRMRGSRALLNFPLRVNSGEPDPVRIKSKRSSFSSSNENGAPKKRRTVAAGGGMDKGLTVKCEVVEVARGDRLLVL

SEQ ID NO: 5292 - protein, 226 aa, Arabidopsis thaliana
MSSSDSVNNGVNSRMYFRNPSFSNVILNDNWSDLPLSVDDSQDMAIYNTLRDAVSSGWTPSVPPVTSPAEENKPPATKASGSHAPRQKGMQYRGVRRRPWGKFAAEIRDPKKNGARVWLGTYETPEDAAVAYDRAAFQLRGSKAKLNFPHLIGSCKYEPVRIRPRRRSPEPSVSDQLTSEQKRESHVDDGESSLVVPELDFTVDQFYFDGSLLMDQSECSYSDNRI

SEQ ID NO: 5293 - protein, 226 aa, Arabidopsis thaliana
MSSSDSVNNGVNSRMYFRNPSFSNVILNDNWSDLPLSVDDSQDMAIYNTLRDAVSSAWTPSVPPVTSPAEEDKPPATKASGSHAPRQKGMQYRGVRRRPWGKFAAEIRDPKKNGARVWLGTYETPEDAAVAYDRAAFQLRGSKAKLNFPHLIGSCKYEPVRIRPRRRSPEPSVSDQLTSEQKRESHVDDGKSSLVVPELDFTVDQFYFDGSLLMDQSECSYSDNRI

SEQ ID NO: 5294 - protein, 70 aa, Arabidopsis thaliana
AKGKHYRGVRQRPWGKFAAEIRDPAKNGARVWLGTFETAEDAALAYDRAAFRMRGSRALLNFPLRVNSGE

SEQ ID NO: 5295 - protein, 63 aa, Arabidopsis thaliana
KHYRGVRQRPWGKFAAEIRDPAKNGARVWLGTFETAEDAALAYDRAAFRMRGSRALLNFPLRV

SEQ ID NO: 5296 - protein, 329 aa, Arabidopsis thaliana
MSTIDESVIRSNGSESTKHATKCFLKILSMATPNEVSALWFIEKHLLDEASPVATDPWMKHESSSATESSSDSSSIIFGSSSSSFAPIDFSESVCKPEIIDLDTPRSMEFLSIPFEFDSEVSVSDFDFKPSNQNQNQFEPELKSQIRKPPLKISLPAKTEWIQFAAENTKPEVTKPVSEEEKKHYRGVRQRPWGKFAAEIRDPNKRGSRVWLGTFDTAIEAARAYDEAAFRLRGSKAILNFPLEVGKWKPRADEGEKKRKRDDDEKVTVVEKVLKTEQSVDVNGGETFPFVTSNLTELCDWDLTGFLNFPLLSPLSPHPPFGYSQLTVV

SEQ ID NO: 5297 - protein, 300 aa, Arabidopsis thaliana
MATPNEVSALWFIEKHLLDEASPVATDPWMKHESSSATESSSDSSSIIFGSSSSSFAPIDFSESVCKPEIIDLDTPRSMEFLSIPFEFDSEVSVSDFDFKPSNQNQNQFEPELKSQIRKPPLKISLPAKTEWIQFAAENTKPEVTKPVSEEEKKHYRGVRQRPWGKFAAEIRDPNKRGSRVWLGTFDTAIEAARAYDEAAFRLRGSKAILNFPLEVGKWKPRADEGEKKRKRDDDEKVTVVEKVLKTEQSVDVNGGETFPFVTSNLTELCDWDLTGFLNFPLLSPLSPHPPFGYSQLTVV

SEQ ID NO: 5298 - protein, 221 aa, Arabidopsis thaliana
MASSHQQQQEQDQSALDLITQHLLTDFPSLDTFASTIHHCTTSTLSQRKPPLATIAVPTTAPVVQENDQRHYRGVRRRPWGKYAAEIRDPNKKGVRVWLGTFDTAMEAARGYDKAAFKLRGSKAILNFPLEAGKHEDLGDNKKTISLKAKRKRQVTEDESQLISRKAVKREEAQVQADACPLTPSSWKGFWDGADSKDMGIFSVPLLSPCPSLGHSQLVVT

SEQ ID NO: 5299 - protein, 201 aa, Arabidopsis thaliana
METFEESSDLDVIQKHLFEDLMIPDGFIEDFVFDDTAFVSGLWSLEPFNPVPKLEPSSPVLDPDSYVQEILQMEAESSSSSSTTTSPEVETVSNRKKTKRFEETRHYRGVRRRPWGKFAAEIRDPAKKGSRIWLGTFESDIDAARAYDYAAFKLRGRKAVLNFPLDAGKYDAPVNSCRKRRRTDVPQPQGTTTSTSSSSSN

SEQ ID NO: 5300 - protein, 221 aa, Arabidopsis thaliana
MASSHQQQQEQDQSALDLITQHLLTDFPSLDTFASTIHHCTTSTLSQRKPPLATIAVPTTAPVVQENDQRHYRGVRRRPWGKYAAEIRDPNKKGVRVWLGTFDTAMEAARGYDKAAFKLRGSKAILNFPLEAGKHEDLGDNKKTISLKAKRKRQVTEDESQLISHKAVKREEAQVQADACPLTPSSWKGFWDGADSKDMGIFSVPLLSPCPSLGHSQLVVT

SEQ ID NO: 5301 - protein, 212 aa, Arabidopsis thaliana
MVSALSRVIENPTDPPVKQELDKSDQHQPDQDQPRRRHYRGVRQRPWGKWAAEIRDPKKAARVWLGTFETAEEAALAYDRAALKFKGTKAKLNFPERVQGPTTTTTISHAPRGVSESMNSPPPRPGPPSTTTTSWPMTYNQDILQYAQLLTSNNEVDLSYYTSTLFSQPFSTPSSSSSSSQQTQQQQLQQQQQQREEEEKNYGYNYYNYPRE

SEQ ID NO: 5302 - protein, 201 aa, Arabidopsis thaliana
METFEESSDLDVIQKHLFEDLMIPDGFIEDFVFDDTAFVSGLWSLEPFNPVPKLEPSSPVLDPDSYVQEILQREAESSSSSTTTTSPEVETVSNRKKTKRFEETRHYRGVRRRPWGKFAAEIRDPAKKGSRIWLGTFESDIDAARAYDYAAFKLRGRKAVLNFPLDAGKYDAPVNSCRKRRRTDLPQPQGTTTSTSSSSSN

SEQ ID NO: 5303 - protein, 207 aa, Arabidopsis thaliana
MASFEESSDLEAIQSHLLEDLLVCDGFMGDFDFDASFVSGLWCIEPHVPKQEPDSPVLDPDSFVNEFLQVEGESSSSSSPELNSSSSTYETDQSVKKAERFEEEVDARHYRGVRRRPWGKFAAEIRDPAKKGSRIWLGTFESDVDAARAYDCAAFKLRGRKAVLNFPLDAGKYEAPANSGRKRKRSDVHEELQRTQSNSSSSSCDAF

SEQ ID NO: 5304 - protein, 218 aa, Arabidopsis thaliana
MDPFLIQSPFSGFSPEYSIGSSPDSFSSSSSNNYSLPFNENDSEEMFLYGLIEQSTQQTYIDSDSQDLPIKSVSSRKSEKSYRGVRRRPWGKFAAEIRDSTRNGIRVWLGTFESAEEAALAYDQAAFSMRGSSAILNFSAERVQESLSEIKYTYEDGCSPVVALKRKHSMRRRMTNKKTKDSDFDHRSVKLDNVVVFEDLGEQYLEELLGSSENSGTW

SEQ ID NO: 5305 - protein, 281 aa, Arabidopsis thaliana
MATPNEVSALFLIKKYLLDELSPLPTTATTNRWMNDFTSFHQTGFEFSEFETKPEIIDLVTPKPEISDFEVKSEISIESNDSFTFQSNPPRVTVQSNRKPPLKIAPPNRTKWIQFATGNPKPELPEPVVAAEEKRHYRGVRMRPWGKFAAEIRDPTRRGTRVWLGTFETAIEAARAYDKEAFRLRGSKAILNFPLEVDKWNPRAEDGRGLYKRKRDSEEEEVKVVKKVLKKEESYAVSDGENVESGLTAIDDWDLTEFLSMPLLSPLSPHPPFGYPQLTVV

SEQ ID NO: 5306 - protein, 250 aa, Arabidopsis thaliana
MASSHQQQQEQDQSALDLITQHLLTDFPSLDTFASTIHHCTTSTLSQRKPPLATIAVPTTAPVVQENDQRHYRGVRRRPWGKYAAEIRDPNKKGVRVWLGTFDTAMEAARGYDKAAFKLRGSKAILNFPLEAGKHEDLGDNKKTISLKAKRKRQVTEDESQLISRKAVKREEAQITINVQPKEIQNVQDAQIEEKTNAPPELRLPDVLDAKVVTCSRHTTWQDYVDYFKSPNQRKQPERNTEDESVLIAF

SEQ ID NO: 5307 - protein, 218 aa, Arabidopsis thaliana
MDPLLIQSPFSGFSPEYSIGSSPESFSSSSSNNYSLPFNENDSEEMFLYGLIEQSTQQTYIDSELQDLPIKSVSSRKSEKSYRGVRRRPWGKFAAEIRDSTRNGIRVWLGTFESAEEAALAYDQAAFSMRGSSAILNFSAERVQESLSEIKCTYEDGCSPVVALKRKHSMRRRMTNKKTKDSDFDHRSVKLDNVVVFEDLGEQYLEELLGSSENSGTW

SEQ ID NO: 5308 - protein, 241 aa, Arabidopsis thaliana
MATKQEALAIDFISQHLLTDFVSMETDHPSLFTNQLHNFHSETGPRTITNQSPKPNSTLNQRKPPLPNLSVSRTVSTKTEKEEEERHYRGVRRRPWGKYAAEIRDPNKKGCRIWLGTYDTAVEAGRAYDQAAFQLRGRKAILNFPLDVRVTSETCSGEGVIGLGKRKRDKSSPPEEEKAARVKVEEEESNTSETTEAEVEPVVPLTPSSWMGFWDVGAGDGIFSIPPLSPTSPNFSVISVT

SEQ ID NO: 5309 - protein, 241 aa, Arabidopsis thaliana
MATKQEALAIDFISQHLLTDFVSMETDHPSLFTNQLHNFHSETGPRTITNQSPKPNSTLNQRKPPLPNLSVSRTVSTKTEKEEEERHYRGVRRRPWGKYAAEIRDPNKKGCRIWLGTYDTAVEAGRAYDQAAFQLRGRKAILNFPLDVRVTSETCSGEGVIGLGKRKRDKGSPPEEEKAARVKVEEEESNTSETTEAEVEPVVPLTPSSWMGFWDVGAGDGIFSIPPLSPTSPNFSVISVT

SEQ ID NO: 5310 - protein, 282 aa, Arabidopsis thaliana
MATPNEVSALFLIKKYLLDELSPLPTTATTNRWMNDFTSFDQTGFEFSEFETKPEIIDLVTPKPEIFDFDVKSEIPSESNDSFTFQSNPPRVTVQSNRKPPLKIAPPNRTKWIQFATGNPKPELPVPVVAAEEKRHYRGVRMRPWGKFAAEIRDPTRRGTRVWLGTFETAIEAARAYDKEAFRLRGSKAILNFPLEVDKWNPRAEDGRGLYNKRKRDGEEEEVTMVEKVLKTEESYDVSGGENVESGLTAIDDWDLTEFLSMPLLSPLSPHPPFGYPQLTVV

SEQ ID NO: 5311 - protein, 282 aa, Arabidopsis thaliana
MATPNEVSALFLIKKYLLDELSPLPTTATTNRWMNDFTSFDQTGFEFSEFETKPEIIDLVTPKPEIFDFDVKSEIPSESNDSFTFQSNPPRVTVQSNRKPPLKIAPPNRTKWIQFATGNPKPELPVPVVAAEEKRHYRGVRMRPWGKFAAEIRDPTRRGTRVWLGTFETAIEAARAYDKEAFRLRGSKAILNFPLEVDKWNPRAEDGRGLYNKRKRDGEEEEVTVVEKVLKTEESYDVSGGENVESGLTAIDDWDLTEFLSMPLLSPLSPHPPFGYPQLTVV

SEQ ID NO: 5312 - protein, 241 aa, Arabidopsis thaliana
MATKQEALAIDFISQHLLTDFVSMETDHPSLFTNQLHNFHSETGPRTITNQSPKPNSTLNQRKPPLPNLSVSRTVSTKTEKEEEERHYRGVRRRPWGKYAAEIRDPNKKGCRIWLGTYDTAVEAGRAYDQAAFQLRGRKAILNFPLDVRVTSETCSGEGVIGLGKRKRDKGSPPEEEKAARVKVEEEESNTSETTEAEVEPVVPLTSSSWMGFWDVGAGDGIFSIPPLSPTSPNFSVISVT

SEQ ID NO: 5313 - protein, 603 aa, Arabidopsis thaliana
MATPNEVSALFLIKKYLLDELSPLPTTATTNRWMNDFTSFDQTGFEFSEFETKPEIIDLVTPKPEIFDFDVKSEIPSESNDSFTFQSNPPRVTVQSNRKPPLKIAPPNRTKWIQFATGNPKPELPVPVVAAEEKRHYRGVRMRPWGKFAAEIRDPTRRGTRVWLGTFETAIEAARAYDKEAFRLRGSKAILNFPLEVDKWNPRAEDGRGLYNKRKRDGEEEEVTVVEKVLKTEESYDVSGGENVESGLTAIDDWDLTEFLSMPLLSPLSPHPPLLYADVELCYIFCLFYVHIRAKFIHSFICFLIQLLIFLNSNQSPYLAATETKIAFSLPTNPILLDSHEERNGSIVTLNWDIVCKMWVPTLSSSSCSSDERDESSGEAALTPVYLNVYDLTPVNNYLYWFGIGIFHSGIEDFTCYFSYYSLLSLTQLFNFNVAHNLEYCYGAHEYPTSGVYEVEPRNCPGFIFRRSVLLGTTSMSRSDFRSYMEKLSRKYHGDTYHLIAKNCNHFTEEVCLQLTGKPIPGWINRLARVGSFCNCLLPESIQLTAVSALPERLEFSDEDESNSEASSVSDEEGSEQHLINVADREIVYLQNKPVRLTREEIP

SEQ ID NO: 5314 - protein, 218 aa, Arabidopsis thaliana
MHSGKRPLSPESMAGNREEKKELCCCSTLSESDVSDFVSELTGQPIPSSIDDQSSSLTLQEKSNSRQRNYRGVRQRPWGKWAAEIRDPNKAARVWLGTFDTAEEAALAYDKAAFEFRGHKAKLNFPEHIRVNPTQLYPSPATSHDRIIVTPPSPPPPIAPDILLDQYGHFQSRSSDSSANLSMNMLSSSSSSLNHQGLRPNLEDGENVKNISIHKRRK

SEQ ID NO: 5315 - protein, 244 aa, Arabidopsis thaliana
MEYQTNFLSGEFSPENSSSSSWSSQESFLWEESFLHQSFDQSFLLSSPTDNYCDDFFAFESSIIKEEGKEATVAAEEEEKSYRGVRKRPWGKFAAEIRDSTRKGIRVWLGTFDTAEAAALAYDQAAFALKGSLAVLNFPADVVEESLRKMENVNLNDGESPVIALKRKHSMRNRPRGKKKSSSSSTLTSSPSSSSSYSSSSSSSSLSSRSRKQSVVMTQESNTTLVVLEDLGAEYLEELMRSCS

SEQ ID NO: 5316 - protein, 139 aa, Arabidopsis thaliana
MESSNRSSNNQSQDDKQARFRGVRRRPWGKFAAEIRDPSRNGARLWLGTFETAEEAARAYDRAAFNLRGHLAILNFPNEYYPRMDDYSLRPPYASSSSSSSSGSTSTNVSRQNQREVFEFEYLDDKVLEELLDSEERKR

SEQ ID NO: 5317 - protein, 133 aa, Arabidopsis thaliana
MDQGGRSSGSGGGGAEQGKYRGVRRRPWGKYAAEIRDSRKHGERVWLGTFDTAEDAARAYDRAAYSMRGKAAILNFPHEYNMGTGSSSTAANSSSSSQQVFEFEYLDDSVLDELLEYGENYNKTHNINMGKRQ

SEQ ID NO: 5318 - protein, 122 aa, Arabidopsis thaliana
MESSNRSSNNQSQDDKQARFRGVRRRPWGKFAAEIRDPSRNGARLWLGTFETAEEAARAYDRAAFNLRGHLAILNFPNEYYPRMDDYSLRPPYASSSSEVFEFEYLDDKVLEELLDSEERKR

SEQ ID NO: 5319 - protein, 131 aa, Arabidopsis thaliana
MDQGGRGVGAEHGKYRGVRRRPWGKYAAEIRDSRKHGERVWLGTFDTAEEAARAYDQAAYSMRGQAAILNFPHEYNMGSGVSSSTAMAGSSSASASASSSSRQVFEFEYLDDSVLEELLEEGEKPNKGKKK

SEQ ID NO: 5320 - protein, 128 aa, Arabidopsis thaliana
MKYRGVRKRPWGKYAAEIRDSARHGARVWLGTFNTAEDAARAYDRAAFGMRGQRAILNFPHEYQMMKDGPNGSHENAVASSSSGYRGGGGGDDGREVIEFEYLDDSLLEELLDYGERSNQDNCNDANR

SEQ ID NO: 5321 - protein, 243 aa, Arabidopsis thaliana
MEYSQSSMYSSPSSWSSSQESLLWNESCFLDQSSEPQAFFCPNYDYSDDFFSFESPEMMIKEEIQNGDVSNSEEEEKVGIDEERSYRGVRKRPWGKFAAEIRDSTRNGIRVWLGTFDKAEEAALAYDQAAFATKGSLATLNFPVEVVRESLKKMENVNLHDGGSPVMALKRKHSLRNRPRGKKRSSSSSSSSSNSSSCSSSSSTSSTSRSSSKQSVVKQESGTLVVFEDLGAEYLEQLLMSSC

SEQ ID NO: 5322 - protein, 358 aa, Arabidopsis thaliana
MCGGAIISDFIPPPRSRRVTSEFIWPDLKKNLKGSKKSSKNRSNFFDFDAEFEADFQGFKDDSSIDCDDDFDVGDVFADVKPFVFTSTPKPAVSAAAEGSVFGKKVTGLDGEAEKSANRKRKNQYRGIRQRPWGKWAAEIRDPREGARIWLGTFKTAEEAARAYDAAARRIRGSKAKVNFPEENLKANSQKRSVKANLQKPVAKPNPNPSPALVQNSNISFENMCFMEEKHQVSNNNNNQFGMTNSVDAGCNGYQYFSSDQGSNSFDCSEFGWSDQAPITPDISSAVINNNNSALFFEEANPAKKLKSMDFETPYNNTEWDASLDFLNEDAVTTQDNGANPMDLWSIDEIHSMIGGVF

SEQ ID NO: 5323 - protein, 139 aa, Arabidopsis thaliana
MERIESYNTNEMKYRGVRKRPWGKYAAEIRDSARHGARVWLGTFNTAEDAARAYDRAAFGMRGQRAILNFPHEYQMMKDGPNGSHENAVASSSSGYRGGGGGDDGREVIEFEYLDDSLLEELLDYGERSNQDNCNDANR

SEQ ID NO: 5324 - protein, 236 aa, Arabidopsis thaliana
MYSSPSSWSSSQESLLWNESCFLDQSSEPQAFFCPNYDYSDDFFSFESPEMMIKEEIQNGDVSNSEEEEKVGIDEERSYRGVRKRPWGKFAAEIRDSTRNGIRVWLGTFDKAEEAALAYDQAAFATKGSLATLNFPVEVVRESLKKMENVNLHDGGSPVMALKRKHSLRNRPRGKKRSSSSSSSSSNSSSCSSSSSTSSTSRSSSKQSVVKQESGTLVVFEDLGAEYLEQLLMSSC

SEQ ID NO: 5325 - protein, 379 aa, Arabidopsis thaliana
MCGGAIISDFIPPPRSLRVTNEFIWPDLKNKVKASKKRSNKRSDFFDLDDDFEADFQGFKDDSAFDCEDDDDVFVNVKPFVFTATTKPVASAFVSTGIYLVGSAYAKKTVESAEQAEKSSKRKRKNQYRGIRQRPWGKWAAEIRDPRKGSREWLGTFDTAEEAARAYDAAARRIRGTKAKVNFPEEKNPSVVSQKRPSAKTNNLQKSVAKPNKSVTLVQQPTHLSQQYCNNSFDNSFGDMSFMEEKPQMYNNQFGLTNSFDAGGNNGYQYFSSDQGSNSFDCSEFGWSDHGPKTPEISSMLVNNNEASFVEETNAAKKLKPNSDESDDLMAYLDNALWDTPLEVKAMLGADAGAVTQEEENPVELWSLDEINFMLEGDF

SEQ ID NO: 5326 - protein, 375 aa, Arabidopsis thaliana
MCGGAIISDFIPPPRSLRVTNEFIWPDLKNKVKASKKRSNKRSDFFDLDDDFEADFQGFKDDSAFDCEDDDDVFVNVKPFVFTATTKPVASAFVSTVGSAYAKKTVESAEQAEKSSKRKRKNQYRGIRQRPWGKWAAEIRDPRKGSREWLGTFDTAEEAARAYDAAARRIRGTKAKVNFPEEKNPSVVSQKRPSAKTNNLQKSVAKPNKSVTLVQQPTHLSQQYCNNSFDNSFGDMSFMEEKPQMYNNQFGLTNSFDAGGNNGYQYFSSDQGSNSFDCSEFGWSDHGPKTPEISSMLVNNNEASFVEETNAAKKLKPNSDESDDLMAYLDNALWDTPLEVEAMLGADAGAVTQEEENPVELWSLDEINFMLEGDF

SEQ ID NO: 5327 - protein, 379 aa, Arabidopsis thaliana
MCGGAIISDFIPPPRSLRVTNEFIWPDLKNKVKASKKRSNKRSDFFDLDDDFEADFQGFKDDSAFDCEDDDDVFVNVKPFVFTATTKPVASAFVSTGIYLVGSAYAKKTVESAEQAEKSSKRKRKNQYRGIRQRPWGKWAAEIRDPRKGSREWLGTFDTAEEAARAYDAAARRIRGTKAKVNFPEEKNPSVVSQKRPSAKTNNLQKSVAKPNKSVTLVQQPTHLSQQYCNNSFDNSFGDMSFMEEKPQMYNNQFGLTNSFDAGGNNGYQYFSSDQGSNSFDCSEFGWSDHGPKTPEISSMLVNNNEASFVEETNAAKKLKPNSDESDDLMAYLDNALWDTPLEVEAMLGADAGAVTQEEENPVELWSLDEINFMLEGDF

SEQ ID NO: 5328 - protein, 248 aa, Arabidopsis thaliana
MYGKRPFGGDESEEREEDENLFPVFSARSQHDMRVMVSALTQVIGNQQSKSHDNISSIDDNYPSVYNPQDPNQQVAPTHQDQGDLRRRHYRGVRQRPWGKWAAEIRDPKKAARVWLGTFETAESAALAYDEAALKFKGSKAKLNFPERVQLGSNSTYYSSNQIPQMEPQSIPNYNQYYHDASSGDMLSFNLGGGYGSGTGYSMSHDNSTTTAATTSSSSGGSSRQQEEQDYARFWRFGDSSSSPHSGY

SEQ ID NO: 5329 - protein, 358 aa, Arabidopsis thaliana
MCGGAIISDFIPPPRSRRVTSEFIWPDLKKNLKGSKKSSKNRSNFFDFDAEFEADFQGFKDDSSIDCDDDFDVGDVFADVKPFVFTSTPKPAVSAAAEGSVFGKKVTGLDGDAEKSANRKRKNQYRGIRQRPWGKWAAEIRDPREGARIWLGTFKTAEEAARAYDAAARRIRGSKAKVNFPEENMKANSQKRSVKANLQKPVAKPNPNPSPALVQNSNISFENMCFMEEKHQVSNNNNNQFGMTNSVDAGCNGYQYFSSDQGSNSFDCSEFGWSDQAPITPDISSAVINNNNSALFFEEANPAKKLKSMDFETPYNNTEWDASLDFLNEDAVTTQDNGANPMDLWSIDEIHSMIGGVF

SEQ ID NO: 5330 - protein, 317 aa, Arabidopsis thaliana
RSNFFDFDAEFEADFQGFKDDSSIDCDDDFDVGDVFADVKPFVFTSTPKPAVSAAAEGSVFGKKVTGLDGDAEKSANRKRKNQYRGIRQRPWGKWAAEIRDPREGARIWLGTFKTAEEAARAYDAAARRIRGSKAKVNFPEENMKANSQKRSVKANLQKPVAKPNPNPSPALVQNSNISFENMCFMEEKHQVSNNNNNQFGMTNSVDAGCNGYQYFSSDQGSNSFDCSEFGWSDQAPITPDISSAVINNNNSALFFEEANPAKKLKSMDFETPYNNTEWDASLDFLNEDAVTTQDNGANPMDLWSIDEIHSMIGGVF

SEQ ID NO: 5331 - protein, 164 aa, Arabidopsis thaliana
REEFSLPPQPLITGSAVTKECESSMSLERPKKYRGVRQRPWGKWAAEIRDPHKATRVWLGTFETAEAAARAYDAAALRFRGSKAKLNFPENVGTQTIQRNSHFLQNSMQPSLTYIDQCPTLLSYSRCMEQQQPLVGMLQPTEEENHFFEKPWTEYDQYNYSSFG

SEQ ID NO: 5332 - protein, 192 aa, Arabidopsis thaliana
MVSMLTNVVSGETEPSASATWTMGHKREREEFSLPPQPLITGSAVTKECESSMSLERPKKYRGVRQRPWGKWAAEIRDPHKATRVWLGTFETAEAAARAYDAAALRFRGSKAKLNFPENVGTQTIQRNSHFLQNSMQPSLTYIDQCPTLLSYSRCMEQQQPLVGMLQPTEEENHFFEKPWTEYDQYNYSSFG

SEQ ID NO: 5333 - protein, 263 aa, Arabidopsis thaliana
MANSGNYGKRPFRGDESDEKKEADDDENIFPFFSARSQYDMRAMVSALTQVIGNQSSSHDNNQHQPVVYNQQDPNPPAPPTQDQGLLRKRHYRGVRQRPWGKWAAEIRDPQKAARVWLGTFETAEAAALAYDNAALKFKGSKAKLNFPERAQLASNTSTTTGPPNYYSSNNQIYYSNPQTNPQTIPYFNQYYYNQYLHQGGNSNDALSYSLAGGETGGSMYNHQTLSTTNSSSSGGSSRQQDDEQDYARYLRFGDSSPPNSGF

SEQ ID NO: 5334 - protein, 268 aa, Arabidopsis thaliana
MHYPNNRTEFVGAPAPTRYQKEQLSPEQELSVIVSALQHVISGENETAPCQGFSSDSTVISAGMPRLDSDTCQVCRIEGCLGCNYFFAPNQRIEKNHQQEEEITSSSNRRRESSPVAKKAEGGGKIRKRKNKKNGYRGVRQRPWGKFAAEIRDPKRATRVWLGTFETAEDAARAYDRAAIGFRGPRAKLNFPFVDYTSSVSSPVAADDIGAKASASASVSATDSVEAEQWNGGGGDCNMEEWMNMMMMMDFGNGDSSDSGNTIADMFQ

SEQ ID NO: 5335 - protein, 314 aa, Arabidopsis thaliana
MADLFGGGHGGELMEALQPFYKSASTSASNPAFASSNDAFASAPNDLFSSSSYYNPHASLFPSHSTTSYPDIYSGSMTYPSSFGSDLQQPENYQSQFHYQNTITYTHQDNNTCMLNFIEPSQPGFMTQPGPSSGSVSKPAKLYRGVRQRHWGKWVAEIRLPRNRTRLWLGTFDTAEEAALAYDRAAFKLRGDSARLNFPALRYQTGSSPSDTGEYGPIQAAVDAKLEAILAEPKNQPGKTERTSRKRAKAAASSAEQPSAPQQHSGSGESDGSGSPTSDVMVQEMCQEPEMPWNENFMLGKCPSYEIDWASILS

SEQ ID NO: 5336 - protein, 391 aa, Arabidopsis thaliana
MCVLKVANQEDNVGKKAESIRDDDHRTLSEIDQWLYLFAAEDDHHRHSFPTQQPPPSSSSSSLISGFSREMEMSAIVSALTHVVAGNVPQHQQGGGEGSGEGTSNSSSSSGQKRRREVEEGGAKAVKAANTLTVDQYFSGGSSTSKVREASSNMSGPGPTYEYTTTATASSETSSFSGDQPRRRYRGVRQRPWGKWAAEIRDPFKAARVWLGTFDNAESAARAYDEAALRFRGNKAKLNFPENVKLVRPASTEAQPVHQTAAQRPTQSRNSGSTTTLLPIRPASNQSVHSQPLMQSYNLSYSEMARQQQQFQQHHQQSLDLYDQMSFPLRFGHTGGSMMQSTSSSSSHSRPLFSPAAVQPPPESASETGYLQDIQWPSDKTSNNYNNSPSS

SEQ ID NO: 5337 - protein, 246 aa, Arabidopsis thaliana
MCGGAIISDYAPLVTKAKGRKLTAEELWSELDASAADDFWGFYSTSKLHPTNQVNVKEEEAVKKEQATEPGKRRKRKNVYRGIRKRPWGKWAAEIRDPRKGVRVWLGTFNTAEEAAMAYDVAAKQIRGEKAKLNFPDLDHHPSTPPPSSTSLRLSDQPPAKKVCVVSQSELAQPSFPVECVGFGKGEEFQNLMYGFEPDYDLKQQISSLESFLELDGTTAEQPSQLDESVCDVDMWMLDDVIASYE

SEQ ID NO: 5338 - protein, 189 aa, Arabidopsis thaliana
MASTTCAREVHYRGVRKRPWGRYAAEIRDPWKKTRVWLGTFDTPEEAALAYDGAARFLRGIKAKTNFPSPLSLDLNHLPSAPSAATAAANNQPHQHQQLWFAAPPPVPPSSDHHHQHHRIFLRTGVLNDKTSDYSSTEAPLYFTSSPNTATSSPGYQVVGFPMMNSSPSPVTVRRGLAIDLNEPPPLWL

SEQ ID NO: 5339 - protein, 200 aa, Arabidopsis thaliana
MAPRQANGRSIAVSEGGGGKTMTMTTMRKEVHFRGVRKRPWGRYAAEIRDPGKKTRVWLGTFDTAEEAARAYDTAAREFRGSKAKTNFPLPGESTTVNDGGENDSYVNRTTVTTAREMTRQRFPFACHRERKVVGGYASAGFFFDPSRAASLRAELSRVCPVRFDPVNIELSIGIRETVKVEPRRELNLDLNLAPPVVDV

SEQ ID NO: 5340 - protein, 308 aa, Arabidopsis thaliana
MAIISTRDYVSIPMPQVQSKRRPIFLSSSTPTCNNLSAYHRHITQQQKIERQQIKIDNRQKKPRITGVLKRPYKHTSCSLNSLTLSLIWVKRANKAKPLSSLLHFLSRFSHISPLESLTMASTTCAREVHYRGVRKRPWGRYAAEIRDPWKKTRVWLGTFDTPEEAALAYDGAARFLRGIKAKTNFPSPLSLDLNHLPSAPSAATAAANNQPHQHQQLWFAAPPPVPPSSDHHHQHHRIFLRTGVLNDKTSDYSSTEAPLYFTSSPNTATSSPGYQVVGFPMMNSSPSPVTVRRGLAIDLNEPPPLWL

SEQ ID NO: 5341 - protein, 287 aa, Arabidopsis thaliana
METEKKVSLPRILRISVTDPYATDSSSDEEEEVDFDALSTKRRRVKKYVKEVVLDSVVSDKEKPMKKKRKKRVVTVPVVVTTATRKFRGVRQRPWGKWAAEIRDPSRRVRVWLGTFDTAEEAAIVYDNAAIQLRGPNAELNFPPPPVTENVEEASTEVKGVSDFIIGGGECLRSPVSVLESPFSGESTAVKEEFVGVSTAEIVVKKEPSFNGSDFSAPLFSDDDVFGFSTSMSESFGGDLFGDNLFADMSFGSGFGFGSGSGFSSWHVEDHFQDIGDLFGSDPVLTV

SEQ ID NO: 5342 - protein, 248 aa, Arabidopsis thaliana
MCGGAIISDYAPLVTKAKGRKLTAEELWSELDASAADDFWGFYSTSKLHPTNQVNVKEEAVKKEQATEPGKRRKRKNVYRGIRKRPWGKWAAEIRDPRKGVRVWLGTFNTAEEAAMAYDVAAKQIRGDKAKLNFPDLHHPPPPNYTPPPSSPRSTDQPPAKKVCVVSQSESELSQPSFPVECIGFGNGDEFQNLSYGFEPDYDLKQQISSLESFLELDGNTAEQPSQLDESVSEVDMWMLDDVIASYE

SEQ ID NO: 5343 - protein, 354 aa, Arabidopsis thaliana
MDEYIDFRPLKYTEHKTSMTKYTKKSSEKLSGGKSLKKVSICYTDPDATDSSSDEDEEDFLFPRRRVKRFVNEITVEPSCNNVVTGVSMKDRKRLSSSSDETQSPASSRQRPNNKVSVSGQIKKFRGVRQRPWGKWAAEIRDPEQRRRIWLGTFETAEEAAVVYDNAAIRLRGPDALTNFSIPPQEEEEEEEPEPVIEEKPVIMTTPTPTTSSSESTEEDLQHLSSPTSVLNHRSEEIQQVQQPFKSAKPEPGVSNAPWWHTGFNTGLGESDDSFPLDTPFLDNYFNESPPEMSIFDQPMDQIFCENDDIFNDMLFLGGETMNIEDELTSSSIKDMGSTFSDFDDSLISDLLVA

SEQ ID NO: 5344 - protein, 315 aa, Arabidopsis thaliana
MERRTRRVKFTENRTVTNVAATPSNGSPRLVRITVTDPFATDSSSDDDDNNNVTVVPRVKRYVKEIRFCQGESSSSTAARKGKHKEEESVVVEDDVSTSVKPKKYRGVRQRPWGKFAAEIRDPSSRTRIWLGTFVTAEEAAIAYDRAAIHLKGPKALTNFLTPPTPTPVIDLQTVSACDYGRDSRQSLHSPTSVLRFNVNEETEHEIEAIELSPERKSTVIKEEEESSAGLVFPDPYLLPDLSLAGECFWDTEIAPDLLFLDEETKIQSTLLPNTEVSKQGENETEDFEFGLIDDFESSPWDVDHFFDHHHHSFD

SEQ ID NO: 5345 - protein, 211 aa, Arabidopsis thaliana
MNTTSSKSKKKQDDQVGTRFLGVRRRPWGRYAAEIRDPTTKERHWLGTFDTAEEAALAYDRAARSMRGTRARTNFVYSDMPPSSSVTSIVSPDDPPPPPPPPAPPSNDPVDYMMMFNQYSSTDSPMLQPHCDQVDSYMFGGSQSSNSYCYSNDSSNELPPLPSDLSNSCYSQPQWTWTGDDYSSEYVHSPMFSRMPPVSDSFPQGFNYFGS

SEQ ID NO: 5346 - protein, 220 aa, Arabidopsis thaliana
MSAMVSALTQVVSARSQTEAEGAHSQTEAEGAHSSSSSAGHKRGWLGIDSAPIPSSFARVDSSHNPIEEAREKKRRYRGVRQRPWGKWAAEIRDPHRAARVWLGTFDTAEAAARAYDEAALRFRGNKAKLNFPEDVRILPPPPPLLRSPADTVANKAEEDLINYWSYTKLLQSSGQRSFLERGQEESSNIFEHSPMEQPLPPSSSGPSSSNFPAPSLPNT

SEQ ID NO: 5347 - protein, 388 aa, Arabidopsis thaliana
MITPIHTQHSLILVYINIYSPPILSKLRTGFILWTNTQKTNKKRNMEDQFPKIETSFMHDKLLSSGIYGFLSSSTPPQLLGVPIFLEGMKSPLLPASSTPSYFVSPHDHELTSSIHPSPVASVPWNFLESFPQSQHPDHHPSKPPNLTLFLKEPKLLELSQSESNMSPYHKYIPNSFYQSDQNRNEWVEINKTLTNYPSKGFGNYWLSTTKTQPMKSKTRKVVQTTTPTKLYRGVRQRHWGKWVAEIRLPRNRTRVWLGTFETAEQAAMAYDTAAYILRGEFAHLNFPDLKHQLKSGSLRCMIASLLESKIQQISSSQVSNSPSPPPPKVGTPEQKNHHMKMESGEDVMMKKQKSHKEVMEGDGVQLSRMPSLDMDLIWDALSFPHSS

SEQ ID NO: 5348 - protein, 185 aa, Arabidopsis thaliana
KLYRGVRQRHWGKWVAEIRLPRNRTRLWLGTFDTAEEAALAYDKAAYKLRGDFARLNFPNLRHNGSHIGGDFGEYKPLHSSVDAKLEAICKSMAETQKQDKSTKSSKKREKKVSSPDLSEKVKAEENSVSIGGSPPVTEFEESTAGSSPLSDLTFADPEEPPQWNETFSLEKYPSYEIDWDSILA

SEQ ID NO: 5349 - protein, 334 aa, Arabidopsis thaliana
MAAAMNLYTCSRSFQDSGGELMDALVPFIKSVSDSPSSSSAASASAFLHPSAFSLPPLPGYYPDSTFLTQPFSYGSDLQQTGSLIGLNNLSSSQIHQIQSQIHHPLPPTHHNNNNSFSNLLSPKPLLMKQSGVAGSCFAYGSGVPSKPTKLYRGVRQRHWGKWVAEIRLPRNRTRLWLGTFDTAEEAALAYDKAAYKLRGDFARLNFPNLRHNGSHIGGDFGEYKPLHSSVDAKLEAICKSMAETQKQDKSTKSSKKREKKVSSPDLSEKVKAEENSVSIGGSPPVTEFEESTAGSSPLSDLTFADPEEPPQWNETFSLEKYPSYEIDWDSILA

SEQ ID NO: 5350 - protein, 225 aa, Arabidopsis thaliana
MRRGRGSSAVAGPTVVAAINGSVKEIRFRGVRKRPWGRFAAEIRDPWKKARVWLGTFDSAEEAARAYDSAARNLRGPKAKTNFPIDSSSPPPPNLRFNQIRNQNQNQVDPFMDHRLFTDHQQQFPIVNRPTSSSMSSTVESFSGPRPTTMKPATTKRYPRTPPVVPEDCHSDCDSSSSVIDDDDDIASSSRRRNPPFQFDLNFPPLDCVDLFNGADDLHCTDLRL

SEQ ID NO: 5351 - protein, 204 aa, Arabidopsis thaliana
MPLSSPRPRAKLTAEELWSELDASAADDFWGNYSTSKLHPTNQVNVKEEAVKKEQATEPGKRRKRKNVYRGIRKRPWGKWAAEIRDPRKGVRVWLGTFNTAEEAAMAYDVPAKQIRGDKAKLNFPDLHHPPPPNYTPPPSSPRSTDQPPAKKVCVVSQSESELSQPSFPVECIGFGNGDEFQNLSYGFEPDYDLKQQIAPSSSS

SEQ ID NO: 5352 - protein, 303 aa, Arabidopsis thaliana
MAFGNIQELDGEILKNVWANYIGTPQTDTRSIQVPEVSRTWEALPTLDDIPEGSREMLQSLDMSTEDQEWTEILDAIASFPNKTNHDPLTNPTIDSCSLSSRVSCKTRKYRGVRKRPWGKFAAEIRDSTRNGVRVWLGTFQTAEEAAMAYDKAAVRIRGTQKAHTNFQLETVIKAMEMDCNPNYYRMNNSNTSDPLRSSRKIGLRTGKEAVKAYDEVVDGMVENHCALSYCSTKEHSETRGLRGSEETWFDLRKRRRSNEDSMCQEVEMQKTVTGEETVCDVFGLFEFEDLGSDYLETLLSSF

SEQ ID NO: 5353 - protein, 343 aa, Arabidopsis thaliana
MEAEKKMVLPRIKFTEHKTNTTTIVSELTNTHQTRILRISVTDPDATDSSSDDEEEEHQRFVSKRRRVKKFVNEVYLDSGAVVTGSCGQMESKKKQKRAVKSESTVSPVVSATTTTTGEKKFRGVRQRPWGKWAAEIRDPLKRVRLWLGTYNTAEEAAMVYDNAAIQLRGPDALTNFSVTPTTATEKKAPPPSPVKKKKKKNNKSKKSVTASSSISRSSSNDCLCSPVSVLRSPFAVDEFSGISSSPVAAVVVKEEPSMTTVSETFSDFSAPLFSDDDVFDFRSSVVPDYLGGDLFGEDLFTADMCTDMNFGFDFGSGLSSWHMEDHFQDIGDLFGSDPLLAV

SEQ ID NO: 5354 - protein, 330 aa, Arabidopsis thaliana
MNLYTCSRSFQDSGGELMDALVPFIKSVSDSPSSSSAASASAFLHPSAFSLPPLPGYYPDSTFLTQPFSYGSDLQQTGSLIGLNNLSSSQIHQIQSQIHHPLPPTHHNNNNSFSNLLSPKPLLMKQSGVAGSCFAYGSGVPSKPTKLYRGVRQRHWGKWVAEIRLPRNRTRLWLGTFDTAEEAALAYDKAAYKLRGDFARLNFPNLRHNGSHIGGDFGEYKPLHSSVDAKLEAICKSMAETQKQDKSTKSSKKREKKVSSPDLSEKVKAEENSVSIGGSPPVTEFEESTAGSSPLSDLTFADPEEPPQWNETFSLEKYPSYEIDWDSILA

SEQ ID NO: 5355 - protein, 343 aa, Arabidopsis thaliana
MEAEKKMVLPRIKFTEHKTNTTTIVSELTNTHQTRILRISVTDPDATDSSSDDEEEEHQRFVSKRRRVKKFVNEVYLDSGAVVTGSCGQMESKKRQKRAVKSESTVSPVVSATTTTTGEKKFRGVRQRPWGKWAAEIRDPLKRVRLWLGTYNTAEEAAMVYDNAAIQLRGPDALTNFSVTPTTATEKKAPPPSPVKKKKKKNNKSKKSVTASSSISRSSSNDCLCSPVSVLRSPFAVDEFSGISSSPVAAVVVKEEPSMTTVSETFSDFSAPLFSDDDVFDFRSSVVPDYLGGDLFGEDLFTADMCTDMNFGFDFGSGLSSWHMEDHFQDIGDLFGSDPLLAV

SEQ ID NO: 5356 - protein, 334 aa, Arabidopsis thaliana
MAAAMNLYTCSRSFQDSGGELMDALVPFIKSVSDSPSSSSAASASAFLHPSAFSLPPLPGYYPDSTFLTQPFSYGSDLQQTGSLIGLNNLSSSQIHQIQSQIHHPLPPTHHNNNNSFSNLLRPKPLLMKQSGVAGSCFAYGSGVPSKPTKLYRGVRQRHWGKWVAEIRLPRNRTRLWLGTFDTAEEAALAYDKAAYKLRGDFARLNFPNLRHNGSHIGGDFGEYKPLHSSVDAKLEAICKSMAETQKQDKSTKSSKKREKKVSSPDLSEKVKAEENSVSIGGSPPVTEFEESTAGSSPLSDLTFADPEEPPQWNETFSLEKYPSYEIDWDSILA

SEQ ID NO: 5357 - protein, 166 aa, Arabidopsis thaliana
MAPTVKTAAVKTNEGNGVRYRGVRKRPWGRYAAEIRDPFKKSRVWLGTFDTPEEAARAYDKRAIEFRGAKAKTNFPCYNINAHCLSLTQSLSQSSTVESSFPNLNLGSDSVSSRFPFPKIQVKAGMMVFDERSESDSSSVVMDVVRYEGRRVVLDLDLNFPPPPEN

SEQ ID NO: 5358 - protein, 204 aa, Arabidopsis thaliana
MMSSQTSSHNKLIKLPQRFFFLHKQFFLHKQILLFVVVMAPTVKTAAVKTNEGNGVRYRGVRKRPWGRYAAEIRDPFKKSRVWLGTFDTPEEAARAYDKRAIEFRGAKAKTNFPCYNINAHCLSLTQSLSQSSTVESSFPNLNLGSDSVSSRFPFPKIQVKAGMMVFDERSESDSSSVVMDVVRYEGRRVVLDLDLNFPPPPEN

SEQ ID NO: 5359 - protein, 222 aa, Arabidopsis thaliana
MAKMGLKPDPATTNQTHNNAKEIRYRGVRKRPWGRYAAEIRDPGKKTRVWLGTFDTAEEAARAYDTAARDFRGAKAKTNFPTFLELSDQKVPTGFARSPSQSSTLDCASPPTLVVPSATAGNVPPQLELSLGGGGGGSCYQIPMSRPVYFLDLMGIGNVGRGQPPPVTSAFRSPVVHVATKMACGAQSDSDSSSVVDFEGGMEKRSQLLDLDLNLPPPSEQA

SEQ ID NO: 5360 - protein, 261 aa, Arabidopsis thaliana
MTTSMDFYSNKTFQQSDPFGGELMEALLPFIKSPSNDSSAFAFSLPAPISYGSDLHSFSHHLSPKPVSMKQTGTSAAKPTKLYRGVRQRHWGKWVAEIRLPRNRTRLWLGTFDTAEEAALAYDKAAYKLRGDFARLNFPDLRHNDEYQPLQSSVDAKLEAICQNLAETTQKQVRSTKKSSSRKRSSTVAVKLPEEDYSSAGSSPLLTESYGSGGSSSPLSELTFGDTEEEIQPPWNENALEKYPSYEIDWDSILQCSSLVN

SEQ ID NO: 5361 - protein, 213 aa, Arabidopsis thaliana
MAKMGLKPDPATTNQTHNNAKEIRYRGVRKRPWGRYAAEIRDPGKKTRVWLGTFDTAEEAARAYDTAARDFRGAKAKTNFPTFLELSDQKVPTGFARSPSQSSTLDCASPPTLVVPSATAGNVPPQLELSLGGGGGGSCYQIPMSRPVYFLDLMGIGNVGRGQPPPVTSAFRSPVVHVATKMACGAQSDSDSSSVVDFEGGMEKRSQTVRSRS

SEQ ID NO: 5362 - protein, 292 aa, Arabidopsis thaliana
MDFDEELNLCITKGKNVDHSFGGEASSTSPRSMKKMKSPSRPKPYFQSSSSPYSLEAFPFSLDPTLQNQQQQLGSYVPVLEQRQDPTMQGQKQMISFSPQQQQQQQQYMAQYWSDTLNLSPRGRMMMMMSQEAVQPYIATKLYRGVRQRQWGKWVAEIRKPRSRARLWLGTFDTAEEAAMAYDRQAFKLRGHSATLNFPEHFVNKESELHDSNSSDQKEPETPQPSEVNLESKELPVIDVGREEGMAEAWYNAITSGWGPESPLWDDLDSSHQFSSESSSSSPLSCPMRPFF

SEQ ID NO: 5363 - protein, 229 aa, Arabidopsis thaliana
LPPTHHNNNNSFSNLLSPKPLLMKQSGVAGSCFAYGSGVPSKPTKLYRGVRQRHWGKWVAEIRLPRNRTRLWLGTFDTAEEAALAYDKAAYKLRGDFARLNFPNLRHNGFHIGGDFGEYKPLHSSVDAKLEAICKSMAETQKQDKSTKSSKKREKKVSSPDLSEKVKAEENSVSIGGSPPVTEFEESTAGSSPLSDLTFADPEEPPQWNETFSLEKYPSYEIDWDSILA

SEQ ID NO: 5364 - protein, 171 aa, Arabidopsis thaliana
MCGGAIISDFIWSKSESEPSQLGSVSSRKKRKPVSVSEERDGKRERKNLYRGIRQRPWGKWAAEIRDPSKGVRVWLGTFKTADEAARAYDVAAIKIRGRKAKLNFPNTQVEEEADTKPGGNQNELISENQVESLSEDLMALEDYMRFYQIPVADDQSATDIGNLWSYQDSN

SEQ ID NO: 5365 - protein, 244 aa, Arabidopsis thaliana
MRKGRGSSVVGPALPVTAGGSVKEPRYRGVRKRPWGRFAAEIRDPLKKSRVWLGTFDSAVDAARAYDTAARNLRGPKAKTNFPIDCSPSSPLQPLTYLHNQNLCSPPVIQNQIDPFMDHRLYGGGNFQEQQQQQIISRPASSSMSSTVKSCSGPRPMEAAAASSSVAKPLHAIKRYPRTPPVAPEDCHSDCDSSSSVIDDGDDIASSSSRRKTPFQFDLNFPPLDGVDLFAGGIDDLHCTDLRL

SEQ ID NO: 5366 - protein, 330 aa, Arabidopsis thaliana
MAVYEQTGTEQPKKRKSRARAGGLTVADRLKKWKEYNEIVEASAVKEGEKPKRKVPAKGSKKGCMKGKGGPDNSHCSFRGVRQRIWGKWVAEIREPKIGTRLWLGTFPTAEKAASAYDEAATAMYGSLARLNFPQSVGSEFTSTSSQSEVCTVENKAVVCGDVCVKHEDTDCESNPFSQILDVREESCGTRPDSCTVGHQDMNSSLNYDLLLEFEQQYWGQVLQEKEKPKQEEEEIQQQQQEQQQQQLQPDLLTVADYGWPWSNDIVNDQTSWDPNECFDINELLGDLNEPGPHQSQDQNHVNSGSYDLHPLHLEPHDGHEFNGLSSLDI

SEQ ID NO: 5367 - protein, 211 aa, Arabidopsis thaliana
MSQSFELYPWLGSASDGKKKQSSRYKGIRRRPWGRWAAEIRDPIKGVRVWLGTFNTAEEAARAYDLEAKRIRGAKAKLNFPNESSGKRKAKAKTVQQVEENHEADLDVAVVSSAPSSSCLDFLWEENNPDTLLIDTQWLEDIIMGDANKKHEPNDSEEANNVDASLLSEELLAFENQTEYFSQMPFTEGNCDSSTSLSSLFDGGNDMGLWS

SEQ ID NO: 5368 - protein, 262 aa, Arabidopsis thaliana
MCGGAVISDYIAPEKIARSSGKSSWRSNGVFDCSIYDFDGNFDELESDEPFVFSSTHKHHASGSASDGKKKQSSRYKGIRRRPWGRWAAEIRDPIKGVRVWLGTFNTAEEAARAYDLEAKRIRGAKAKLNFPNESSGKRKAKAKTVQQVEENHEADLDVAVVSSAPSSSCLDFLWEENNPDTLLIDTQWLEDIIMGDANKKHEPNDSEEANNVDASLLSEELLAFENQTEYFSQMPFTEGNCDSSTSLSSLFDGGNDMGLWS

SEQ ID NO: 5369 - protein, 334 aa, Arabidopsis thaliana
MMDEFMDLRPVKYTEHKTVIRKYTKKSSMERKTSVRDSARLVRVSMTDRDATDSSSDEEEFLFPRRRVKRLINEIRVEPSSSSTGDVSASPTKDRKRINVDSTVQKPSVSGQNQKKYRGVRQRPWGKWAAEIRDPEQRRRIWLGTFATAEEAAIVYDNAAIKLRGPDALTNFTVQPEPEPVQEQEQEPESNMSVSISESMDDSQHLSSPTSVLNYQTYVSEEPIDSLIKPVKQEFLEPEQEPISWHLGEGNTNTNDDSFPLDITFLDNYFNESLPDISIFDQPMSPIQPTENDFFNDLMLFDSNAEEYYSSEIKEIGSSFNDLDDSLISDLLLV

SEQ ID NO: 5370 - protein, 336 aa, Arabidopsis thaliana
MATAKNKGKSIRVLGTSEAEKKDEMELEEEFQFSSGKYKDSGPGSDMWLGDASSTSPRSLRKTRTFDRHNPYLVSSYATPQPPTTTTCSVSFPFYLPPAIQNQQRFLHPNDPSGQRQQQMISFDPQQQVQPYVAQQQQQQQHLLQYWRDILKLSPSGRMMMMNMLRQESDLPLTRPPVQPFSATKLYRGVRQRHWGKWVAEIRKPRNRTRLWLGTFDTAEEAAMAYDREAFKLRGETARLNFPELFLNKQEPTPVHQKQCETGTTSEDSSRRGEDDSSTALAVGGVSEETGWAEAWFNAIPEEWGPGSPLWDDYHFPISNHKDDLDATQNSSSDTI

SEQ ID NO: 5371 - protein, 245 aa, Arabidopsis thaliana
MTTEKENVTTAVAVKDGGEKSKEVSDKGVKKRKNVTKALAVNDGGEKSKEVRYRGVRRRPWGRYAAEIRDPVKKKRVWLGSFNTGEEAARAYDSAAIRFRGSKATTNFPLIGYYGISSATPVNNNLSETVSDGNANLPLVGDDGNALASPVNNTLSETARDGTLPSDCHDMLSPGVAEAVAGFFLDLPEVIALKEELDRVCPDQFESIDMGLTIGPQTAVEEPETSSAVDCKLRMEPDLDLNASP

SEQ ID NO: 5372 - protein, 335 aa, Arabidopsis thaliana
MEESNDIFQNNFSPKISEIRASLSQIILAGGPNTLDSIFSLLTPSSVESATTSFNTHNPPPPPQLGSSVYLRQRDIIEKFHLQNRAISTPHPPLFSSTYDHHQTSELMLQAAAGSPAAAFAAALAAGRVTKKKKLYRGVRQRHWGKWVAEIRLPQNRMRVWLGTYDTAEAAAYAYDRAAYKLRGEYARLNFPNLKDPSELLGLGDSSKLIALKNAVDGKIQSICQRVRKERAKKSVKVSKNSSATADSSCLSSPEILSSSPVTTTTTAVTSEDSYWVSPMGLCNSENSSPVSVSVPSEVPATAEEEAMMGVDTDGFLLARMPSFDPELIWEVLAN

SEQ ID NO: 5373 - protein, 272 aa, Arabidopsis thaliana
MAAIDMFNSNTDPFQEELMKALQPYTTNTDSSSPTYSNTVFGFNQTTSLGLNQLTPYQIHQIQNQLNQRRNIISPNLAPKPVPMKNMTAQKLYRGVRQRHWGKWVAEIRLPKNRTRLWLGTFDTAEEAAMAYDLAAYKLRGEFARLNFPQFRHEDGYYGGGSCFNPLHSSVDAKLQEICQSLRKTEDIDLPCSETELFPPKTEYQESEYGFLRSDENSFSDESHVESSSPESGITTFLDFSDSGFDEIGSFGLEKFPSVEIDWDAISKLSES

SEQ ID NO: 5374 - protein, 185 aa, Arabidopsis thaliana
MPNITMGLKPDPVAPTNPTHHESNAAKEIRYRGVRKRPWGRYAAEIRDPVKKTRVWLGTFDTAQQAARAYDAAARDFRGVKAKTNFGVIVGSSPTQSSTVVDSPTAARFITPPHLELSLGGGGACRRKIPLVHPVYYYNMATYPKMTTCGVQSESETSSVVDFEGGAGKISPPLDLDLNLAPPAE

SEQ ID NO: 5375 - protein, 197 aa, Arabidopsis thaliana
MVGANKKQRTVQASSRKGCMRGKGGPDNASCTYKGVRQRTWGKWVAEIREPNRGARLWLGTFDTSREAALAYDSAARKLYGPEAHLNLPESLRSYPKTASSPASQTTPSSNTGGKSSSDSESPCSSNEMSSCGRVTEEISWEHINVDLPVMDDSSIWEEATMSLGFPWVHEGDNDISRFDTCISGGYSNWDSFHSPL

SEQ ID NO: 5376 - protein, 294 aa, Arabidopsis thaliana
MKSRVRKSKYTVHRKITSTPFDGFPKIVKIIVTDPCATDSSSDEENDNKSVAPRVKRYVDEIRFCDEDDEPKPARKAKKKSPAAAAENGGDLVKSVVKYRGVRQRPWGKFAAEIRDPSSRTRLWLGTFATAEEAAIGYDRAAIRIKGHNAQTNFLTPPPSPTTEVLPETPVIDLETVSGCDSARESQISLCSPTSVLRFSHNDETEYRTEPTEEQNPFFLPDLFRSGDYFWDSEITPDPLFLDEFHQSLLPNINNNNTVCDKDTNLSDSFPLGVIGDFSSWDVDEFFQDHLLDK

SEQ ID NO: 5377 - protein, 206 aa, Arabidopsis thaliana
MSSIEPKVMMVGANKKQRTVQASSRKGCMRGKGGPDNASCTYKGVRQRTWGKWVAEIREPNRGARLWLGTFDTSREAALAYDSAARKLYGPEAHLNLPESLRSYPKTASSPASQTTPSSNTGGKSSSDSESPCSSNEMSSCGRVTEEISWEHINVDLPVMDDSSIWEEATMSLGFPWVHEGDNDISRFDTCISGGYSNWDSFHSPL

SEQ ID NO: 5378 - protein, 277 aa, Arabidopsis thaliana
MALNMNAYVDEFMEALEPFMKVTSSSSTSNSSNPKPLTPNFIPNNDQVLPVSNQTGPIGLNQLTPTQILQIQTELHLRQNQSRRRAGSHLLTAKPTSMKKIDVATKPVKLYRGVRQRQWGKWVAEIRLPKNRTRLWLGTFETAQEAALAYDQAAHKIRGDNARLNFPDIVRQGHYKQILSPSINAKIESICNSSDLPLPQIEKQNKTEEVLSGFSKPEKEPEFGEIYGCGYSGSSPESDITLLDFSSDCVKEDESFLMGLHKYPSLEIDWDAIEKLF

SEQ ID NO: 5379 - protein, 246 aa, Arabidopsis thaliana
RPWGKWAAEIRDPRKGSREWLGTFDTAEEAARAYDAAARRIRGTKAKVNFPEEKNPSVVSQKRPSAKTNNLQKSVAKPNKSVTLVQQPTHLSQQYCNNSFDNSFGDMSFMEEKPQMYNNQFGLTNSFDAGGNNGYQYFSSDQGSNSFDCSEFGWSDHGPKTPEISSMLVNNNEASFVEETNAAKKLKPNSDESDDLMAYLDNALWDTPLEVEAMLGADAGAVTQEEENPVELWSLDEINFMLEGDF

SEQ ID NO: 5380 - protein, 261 aa, Arabidopsis thaliana
METASLSFPVPNTSFGVNKSMPLGLNQLTPYQIHQIQNQLNHRRSTISNLSPNRIRMKNLTPSTSKTKNLYRGVRQRHWGKWVAEIRLPKNRTRLWLGTFETAEKAALAYDQAAFQLRGDIAKLNFPNLIHEDMNPLPSSVDTKLQAICKSLRKTEEICSVSDQTKEYSVYSVSDKTELFLPKAELFLPKREHLETNELSNESPRSDETSLLDESQAEYSSSDKTFLDFSDTEFEEIGSFGLRKFPSVEIDWDAISKLANS

SEQ ID NO: 5381 - protein, 335 aa, Arabidopsis thaliana
MAVYDQSGDRNRTQIDTSRKRKSRSRGDGTTVAERLKRWKEYNETVEEVSTKKRKVPAKGSKKGCMKGKGGPENSRCSFRGVRQRIWGKWVAEIREPNRGSRLWLGTFPTAQEAASAYDEAAKAMYGPLARLNFPRSDASEVTSTSSQSEVCTVETPGCVHVKTEDPDCESKPFSGGVEPMYCLENGAEEMKRGVKADKHWLSEFEHNYWSDILKEKEKQKEQGIVETCQQQQQDSLSVADYGWPNDVDQSHLDSSDMFDVDELLRDLNGDDVFAGLNQDRYPGNSVANGSYRPESQQSGFDPLQSLNYGIPPFQLEGKDGNGFFDDLSYLDLEN

SEQ ID NO: 5382 - protein, 328 aa, Arabidopsis thaliana
MDPLASQHQHNHLEDNNQTLTHNNPQSDSTTDSSTSSAQRKRKGKGGPDNSKFRYRGVRQRSWGKWVAEIREPRKRTRKWLGTFATAEDAARAYDRAAVYLYGSRAQLNLTPSSPSSVSSSSSSVSAASSPSTSSSSTQTLRPLLPRPAAATVGGGANFGPYGIPFNNNIFLNGGTSMLCPSYGFFPQQQQQQNQMVQMGQFQHQQYQNLHSNTNNNKISDIELTDVPVTNSTSFHHEVALGQEQGGSGCNNNSSMEDLNSLAGSVGSSLSITHPPPLVDPVCSMGLDPGYMVGDGSSTIWPFGGEEEYSHNWGSIWDFIDPILGEFY

SEQ ID NO: 5383 - protein, 328 aa, Arabidopsis thaliana
MEKALRNFTESTHSPDPNPLTKFFTEPTASPVSRNRKLSSKDTTVTIAGAGSSTTRYRGVRRRPWGRYAAEIRDPMSKERRWLGTFDTAEQAACAYDSAARAFRGAKARTNFTYPTAVIMPEPRFSFSNKKSSPSARCPLPSLPLDSSTQNFYGAPAAQRIYNTQSIFLRDASCSSRKTTPYNNSFNGSSSSYSASKTACVSYSENENNESFFPEESSDTGLLQEVVQEFLKKNRGVPPSPPTPPPVTSHHDNSGYFSALTIYSENMVQETKETLSSKLDRYGNFQANDDGVRAVADGGLSLGSNEWGYQEMLMYGTQLGCTCRRSWG

SEQ ID NO: 5384 - protein, 328 aa, Arabidopsis thaliana
MEKALRNFTESTHSPDPNPLTKFFTEPTASPVSRNRKLSSKDTTVTIAGAGSSTTRYRGVRRRPWGRYAAEIRDPMSKERRWLGTFDTAEQAACAYDSAARAFRGAKARTNFTYPTAVIMPEPRFSFSNKKSSPSARCPLPSLPLDSSTQNFYGAPAAQRIYNTQSIFLRDASCSSRKTTPYNNSFNGSSSSYSASKTACVSYSENENNESFFPEESSDTGLLQEVVQEFLKKNRGVPPSPPTPPPVTSHHDNSGYFSNLTIYSENMVQETKETLSSKLDRYGNFQANDDGVRAVADGGLSLGSNEWGYQEMLMYGTQLGCTCRRSWG

SEQ ID NO: 5385 - protein, 261 aa, Arabidopsis thaliana
METASLSFPVPNTSFGVNKSMPLGLNQLTPYQIHQIQNQLNHRRSTISNLSPNRIRMKNLTPSTSKTKNLYRGVRQRHWGKWVAEIRLPKNRTRLWLGTFETAEKAALAYDQAAFQLRGDIAKLNLPNLIHEDMNPLPSSVDTKLQAICKSLRKTEEICSVSDQTKEYSVYSVSDKTELFLPKAELFLPKREHLETNELSNESPRSDETSLLDESQAEYSSSDKTFLDFSDTEFEEIGSFGLRKFPSVEIDWDAISKLANS

SEQ ID NO: 5386 - protein, 153 aa, Arabidopsis thaliana
MDAGVAVKADVAVKMKRERPFKGIRMRKWGKWVAEIREPNKRSRLWLGSYSTPEAAARAYDTAVFYLRGPTATLNFPELLPCTSAEDMSAATIRKKATEVGAQVDAIGATVVQNNKRRRVFSQKRDFGGGLLELVDLNKLPDPENLDDDLVGK

SEQ ID NO: 5387 - protein, 329 aa, Arabidopsis thaliana
MGFALIHQNTSANTTTTTTTGERRGRRSKQAEPGRFLGVRRRPWGRYAAEIRDPTTKERHWLGTFDTAHEAALAYDRAALSMRGTQARTNFVYTPTDVHTILTNPNLHSLIVSPYNNNQSFLPNSSPQFVIDHHPHYQNYHQPQQPKHTLPQTVLPAASFKTPVRHQSVDIQAFGNSPQNSSSNGSLSSSLDEENNFFFSLTSEEHNKSNNNSGYLDCIVPNHCLKPPPEATTTQNQAGASFTTPVASKASEPYGGFSNSYFEDGEMMMMNHHEFGSCDLSAMITNYGAAAASMSMEDYGMMEPQDLSSSSIAAFGDVVADTTGFYSVF

SEQ ID NO: 5388 - protein, 306 aa, Arabidopsis thaliana
MEEAIMRLEGAEHRETNIHSLKRKPSRTSSTAPGSPGGVTTAKAASGAGASGVSTIRYRGVRRRPWGRYAAEIRDPLSKERRWLGTFDTAEEAACAYDCAARAMRGLKARTNFVYPMPSLDSYHHRIFSSPPMNMFLLRDVLNSQSLSPLTTFAYPPCNLSNVNDVVHESFTNVNDVCEDLSPKAKRSSTIENESLISNIFEPEPASSGLLQEIVQGFLPKPISQHASIPPKSNQQSVGVFPTMPESGFQTDVRLADFHVEGNGFGQVKYHGELGWADHENGFDSAKMQQNGNGGMFYQYCFHDDY

SEQ ID NO: 5389 - protein, 199 aa, Arabidopsis thaliana; identical to SEQ ID NO: 412

SEQ ID NO: 5390 - protein, 218 aa, Arabidopsis thaliana
MIASESTKSWEASAVRQENEEEKKKPVKDSGKHPVYRGVRKRNWGKWVSEIREPRKKSRIWLGTFPSPEMAARAHDVAALSIKGASAILNFPDLAGSFPRPSSLSPRDIQVAALKAAHMETSQSFSSSSSLTFSSSQSSSSLESLVSSSATGSEELGEIVELPSLGSSYDGLTQLGNEFIFSDSADLWPYPPQWSEGDYQMIPASLSQDWDLQGLYNY

SEQ ID NO: 5391 - protein, 194 aa, Arabidopsis thaliana
MERDDCRRFQDSPAQTTERRVKYKPKKKRAKDDDDEKVVSKHPNFRGVRMRQWGKWVSEIREPKKKSRIWLGTFSTAEMAARAHDVAALAIKGGSAHLNFPELAYHLPRPASADPKDIQAAAAAAAAAVAIDMDVETSSPSPSPTVTETSSPAMIALSDDAFSDLPDLLLNVNHNIDGFWDSFPYEEPFLSQSY

SEQ ID NO: 5392 - protein, 159 aa, Arabidopsis thaliana
MKRIVRISFTDMEATDSSSSEDESPPSSRRRGKKLVKEIVIDHSDPPEVGKTRFKIRIPASLLAARNTTANKKKFRGVRQRPWGKWAAEIRCGRVKGRPERIWLGTFETAEEAALAYDNAAIQLIGPDAPTNFGRPDVDSAVVKKQDSDASGGASEEVV

SEQ ID NO: 5393 - protein, 277 aa, Arabidopsis thaliana
MEKSSSMKQWKKGPARGKGGPQNALCQYRGVRQRTWGKWVAEIREPKKRARLWLGSFATAEEAAMAYDEAALKLYGHDAYLNLPHLQRNTRPSLSNSQRFKWVPSRKFISMFPSCGMLNVNAQPSVHIIQQRLEELKKTGLLSQSYSSSSSSTESKTNTSFLDEKTSKGETDNMFEGGDQKKPEIDLTEFLQQLGILKDENEAEPSEVAECHSPPPWNEQEETGSPFRTENFSWDTLIEMPRSETTTMQFDSSNFGSYDFEDDVSFPSIWDYYGSLD

SEQ ID NO: 5394 - protein, 256 aa, Arabidopsis thaliana
MENSYTVDGHRLQYSVPLSSMHETSQNSETYGLSKESPLVCMPLFETNTTSFDISSLFSFNPKPEPENTHRVMDDSIAAVVGENVLFGDKNKVSDHLTKEGGVKRGRKMPQKTGGFMGVRKRPWGRWSAEIRDRIGRCRHWLGTFDTAEEAARAYDAAARRLRGTKAKTNFVIPPLFPKEIAQAQEDNRMRQKQKKKKKKKVSVRKCVKVTSVAQLFDDANFINSSSIKGNVISSIDNLEKMGLELDLSLGLLSRK

SEQ ID NO: 5395 - protein, 199 aa, Arabidopsis thaliana
MVQTKKFRGVRQRHWGSWVAEIRHPLLKRRIWLGTFETAEEAARAYHEAAVLMSGRNAKTNFPLNNNNTGETSEGKTDISASSTMSSSTSSSSLSSILSAKLRKCCKSPSPSLTCLRLDTASSHIGVWQKRAGSKSDSSWVMTVELGPASSSQETTSKASQDAILAPTTEVEIGGSREEVLDEEEKVALQMIEELLNTN

SEQ ID NO: 5396 - protein, 196 aa, Arabidopsis thaliana
METATEVATVVSTPAVTVAAVATRKRDKPYKGIRMRKWGKWVAEIREPNKRSRIWLGSYSTPEAAARAYDTAVFYLRGPSARLNFPELLAGVTVTGGGGGGVNGGGDMSAAYIRRKAAEVGAQVDALEAAGAGGNRHHHHHQHQRGNHDYVDNHSDYRINDDLMECSSKEGFKRCNGSLERVDLNKLPDPETSDDD

SEQ ID NO: 5397 - protein, 259 aa, Arabidopsis thaliana
FFETSSLLRFRVPLLSSWPTCSSISPSACNRFAVNITSFFFFIFKISLDRFFCGFLKSPEKTTMETATEVATVVSTPAVTVAAVATRKRDKPYKGIRMRKWGKWVAEIREPNKRSRIWLGSYSTPEAAARAYDTAVFYLRGPSARLNFPELLAGVTVTGGGGGGVNGGGDMSAAYIRRKAAEVGAQVDALEAAGAGGNRHHHHHQHQRGNHDYVDNHSDYRINDDLMECSSKEGFKRCNGSLERVDLNKLPDPETSDDD

SEQ ID NO: 5398 - protein, 245 aa, Arabidopsis thaliana
MEFNGNLNAGSCSRSKKSHRQKQQQPQPQPQQHIEEIKYVGVRRRPWGRYAAEIRNPTTKERYWLGTFDTAEEAALAYDRAARSIRGLTARTNFVYSDMPRGSSVTSFVSPDESQRFISELFNPPSQLEATNSNNNNNNNLYSSTNNQNQNSIEFSYNGWPQEAECGYQSITSNAEHCDHELPPLPPSTCFGAELRIPETDSYWNVAHASIDTFAFELDGFVDQNSLGQSGTEGFNSLPSTFFYQ

SEQ ID NO: 5399 - protein, 236 aa, Arabidopsis thaliana
MAEEYYSLRSERVTQLLVPNSESDSVSDKSKAEQSEKKTKRGRDSGKHPVYRGVRMRNWGKWVSEIREPRKKSRIWLGTFPTPEMAARAHDVAALSIKGTAAILNFPELADSFPRPVSLSPRDIQTAALKAAHMEPTTSFSSSTSSSSSLSSTSSLESLVLVMDLSRTESEELGEIVELPSLGASYDVDSANLGNEFVFYDSVDYCLYPPPWGQSSEDNYGHGISPNFGHGLSWDL

SEQ ID NO: 5400 - protein, 236 aa, Arabidopsis thaliana
MTSLNSSASPTSSSSDQSDATTTTSTHLSEEEAPPRNNNTRKRRRDSSSASSSSSMQHPVYRGVRMRSWGKWVSEIRQPRKKTRIWLGTFVTADMAARAHDVAALTIKGSSAVLNFPELASLFPRPASSSPHDIQTAAAEAAAMVVEEKLLEKDEAPEAPPSSESSYVAAESEDEERLEKIVELPNIEEGSYDESVTSRADLAYSEPFDCWVYPPVMDFYEEISEFNFVELWSFNH

SEQ ID NO: 5401 - protein, 254 aa, Arabidopsis thaliana
MSHIHTKRRSKYQTRVQKMTSLNSSASPTSSSSDQSDATTTTSTHLSEEEAPPRNNNTRKRRRDSSSASSSSSMQHPVYRGVRMRSWGKWVSEIRQPRKKTRIWLGTFVTADMAARAHDVAALTIKGSSAVLNFPELASLFPRPASSSPHDIQTAAAEAAAMVVEEKLLEKDEAPEAPPSSESSYVAAESEDEERLEKIVELPNIEEGSYDESVTSRADLAYSEPFDCWVYPPVMDFYEEISEFNFVELWSFNH

SEQ ID NO: 5402 - protein, 184 aa, Arabidopsis thaliana
MENTYVGQRDYRFNVNQLSYRGIRRRKWGKWVSEIREPGKKTRIWLGSYETAEMAAAAYDAAALHLRGRGTNLNFPELVDSFPRPESSSSEHIQAAAQDAALMFKPGRLSEPALESGQGLSRVGLSPDQIQAINESPLDSPRMGWMQDLEVADYEELYGQFFGQHDRDEFFEMQQFQSIWNSNN

SEQ ID NO: 5403 - protein, 189 aa, Arabidopsis thaliana
MVHSKKFRGVRQRQWGSWVSEIRHPLLKRRVWLGTFDTAETAARAYDQAAVLMNGQSAKTNFPVIKSNGSNSLEINSALRSPKSLSELLNAKLRKNCKDQTPYLTCLRLDNDSSHIGVWQKRAGSKTSPNWVKLVELGDKVNARPGGDIETNKMKVRNEDVQEDDQMAMQMIEELLNWTCPGSGSIAQV

SEQ ID NO: 5404 - protein, 244 aa, Arabidopsis thaliana
MEKEDNGSKQSSSASVVSSRRRRRVVEPVEATLQRWEEEGLARARRVQAKGSKKGCMRGKGGPENPVCRFRGVRQRVWGKWVAEIREPVSHRGANSSRSKRLWLGTFATAAEAALAYDRAASVMYGPYARLNFPEDLGGGRKKDEEAESSGGYWLETNKAGNGVIETEGGKDYVVYNEDAIELGHDKTQNPMTDNEIVNPAVKSEEGYSYDRFKLDNGLLYNEPQSSSYHQGGGFDSYFEYFRF

SEQ ID NO: 5405 - protein, 183 aa, Arabidopsis thaliana
MAGLRNSGNSDKAQNDGKGVPSAYRGVRKRKWGKWVSEIREPGTKNRIWLGSFETPEMAATAYDVAAFHFRGREARLNFPELASSLPRPADSSSDSIRMAVHEATLCRTTEGTESAMQVDSSSSSNVAPTMVRLSPREIQAINESTLGSPTTMMHSTYDPMEFANDVEMNAWETYQSDFLWDP

SEQ ID NO: 5406 - protein, 161 aa, Arabidopsis thaliana
MKRIIRISFTDAEATDSSSDEDTEERGGASQTRRRGKRLVKEIVIDPSDSADKLDVCKTRFKIRIPAEFLKTAKTEKKYRGVRQRPWGKWVAEIRCGRGACKGRRDRLWLGTFNTAEEAALAYDNASIKLIGPHAPTNFGLPAENQEDKTVIGASEVARGA

SEQ ID NO: 5407 - protein, 283 aa, Arabidopsis thaliana
MKGKGGPENGICDYRGVRQRRWGKWVAEIREPDGGARLWLGTFSSSYEAALAYDEAAKAIYGQSARLNLPEITNRSSSTAATATVSGSVTAFSDESEVCAREDTNASSGFGQVKLEDCSDEYVLLDSSQCIKEELKGKEEVREEHNLAVGFGIGQDSKRETLDAWLMGNGNEQEPLEFGVDETFDINELLGILNDNNVSGQETMQYQVDRHPNFSYQTQFPNSNLLGSLNPMEIAQPGVDYGCPYVQPSDMENYGIDLDHRRFNDLDIQDLDFGGDKDVHGST

SEQ ID NO: 5408 - protein, 341 aa, Arabidopsis thaliana
MPSEIVDRKRKSRGTRDVAEILRQWREYNEQIEAESCIDGGGPKSIRKPPPKGSRKGCMKGKGGPENGICDYRGVRQRRWGKWVAEIREPDGGARLWLGTFSSSYEAALAYDEAAKAIYGQSARLNLPEITNRSSSTAATATVSGSVTAFSDESEVCAREDTNASSGFGQVKLEDCSDEYVLLDSSQCIKEELKGKEEVREEHNLAVGFGIGQDSKRETLDAWLMGNGNEQEPLEFGVDETFDINELLGILNDNNVSGQETMQYQVDRHPNFSYQTQFPNSNLLGSLNPMEIAQPGVDYGCPYVQPSDMENYGIDLDHRRFNDLDIQDLDFGGDKDVHGST

SEQ ID NO: 5409 - protein, 181 aa, Arabidopsis thaliana
MARPQQRFRGVRQRHWGSWVSEIRHPLLKTRIWLGTFETAEDAARAYDEAARLMCGPRARTNFPYNPNAIPTSSSKLLSATLTAKLHKCYMASLQMTKQTQTQTQTQTARSQSADSDGVTANESHLNRGVTETTEIKWEDGNANMQQNFRPLEEDHIEQMIEELLHYGSIELCSVLPTQTL

SEQ ID NO: 5410 - protein, 244 aa, Arabidopsis thaliana
MTESSIISVKQSSPVPEEEDHHHHQQDSHRTNTKKRVRSDPGYRGVRMRTWGKWVSEIREPRKKSRIWLGTFSTPEMAARAHDAAALTIKGTSAVLNFPELATYLPRPASSSPRDVQAAAAVAAAMDFSPSSSSLVVSDPTTVIAPAETQLSSSSYSTCTSSSLSPSSEEAASTAEELSEIVELPSLETSYDESLSEFVYVDSAYPPSSPWYINNCYSFYYHSDENGISMAEPFDSSNFGPLFP

SEQ ID NO: 5411 - protein, 184 aa, Arabidopsis thaliana
MEGGGVADVAVPGTRKRDRPYKGIRMRKWGKWVAEIREPNKRSRLWLGSYSTPEAAARAYDTAVFYLRGPTARLNFPELLPGEKFSDEDMSAATIRKKATEVGAQVDALGTAVQNNRHRVFGQNRDSDVDNKNFHRNYQNGEREEEEEDEDDKRLRSGGRLLDRVDLNKLPDPESSDEEWESKH

SEQ ID NO: 5412 - protein, 161 aa, Arabidopsis thaliana
MKRIIRISFTDAEATDSSSDEDTEERGGASQTRRRGKRLVKEIVIDPSDSADKLYVCKTRFKIRIPAEFLKTAKTEKKYRGVRQRPWGKWVAEIRCGRGSCKGRRDRLWLGTFNTAEEAALAYDNASIKLIGPHAPTNFGLPAENQEDKTVIGASEVARGA

SEQ ID NO: 5413 - protein, 196 aa, Arabidopsis thaliana
METATEVATVVSTPAVTVAAVATRKRDKPYKGIRMRKWGKWVAEIREPNKRSRIWLGSYSTPEAAARAYDTAVFYLRSPSARLNFPELLAGVTVTGGGGGGVNGGGDMSAAYIRRKAAEVGAQVDALEAAGAGGNRHHHHHQHQRGNHDYVDNHSDYRINDDLMECSSKEGFKRCNGSLERVDLNKLPDPETSDDD

SEQ ID NO: 5414 - protein, 225 aa, Arabidopsis thaliana
MVDSHGSDTECSSKKKKEKTKEKGVYRGARMRSWGKWVSEIREPRKKSRIWLGTFPTAEMAARAHDVAALSIKGSSAILNFPELADFLPRPVSLSQQDIQAAAAEAALMDFKTVPFHLQDDSTPLQTRCDTEKIEKWSSSSSSASSSSSSSSSSSSSMLSGELGDIVELPSLENNVKYDCALYDSLEGLVSMPPWLDATENDFRYGDDSVLLDPCLKESFLWNYE

SEQ ID NO: 5415 - protein, 187 aa, Arabidopsis thaliana
MKLSPPPVTNNEPTATASAVKSCGGGGKETSSSTTRHPVYHGVRKRRWGKWVSEIREPRKKSRIWLGSFPVPEMAAKAYDVAAFCLKGRKAQLNFPEEIEDLPRPSTCTPRDIQVAAAKAANAVKIIKMGDDDVAGIDDGDDFWEGIELPELMMTGGGWSPEPFVAGDDATWLVDGDLYQYQFMACL

SEQ ID NO: 5416 - protein, 192 aa, Arabidopsis thaliana
MSPQRMKLSSPPVTNNEPTATASAVKSCGGGGKETSSSTTRHPVYHGVRKRRWGKWVSEIREPRKKSRIWLGSFPVPEMAAKAYDVAAFCLKGRKAQLNFPEEIEDLPRPSTCTPRDIQVAAAKAANAVKIIKMGDDDVAGIDDGDDFWEGIELPELMMSGGGWSPEPFVAGDDATWLVDGDLYQYQFMACL

SEQ ID NO: 5417 - protein, 307 aa, Arabidopsis thaliana
MEEEQPPAKKRNMGRSRKGCMKGKGGPENATCTFRGVRQRTWGKWVAEIREPNRGTRLWLGTFNTSVEAAMAYDEAAKKLYGHEAKLNLVHPQQQQQVVVNRNLSFSGHGSGSWAYNKKLDMVHGLDLGLGQASCSRGSCSERSSFLQEDDDHSHNRCSSSSGSNLCWLLPKQSDSQDQETVNATTSYGGEGGGGSTLTFSTNLKPKNLMSQNYGLYNGAWSRFLVGQEKKTEHDVSSSCGSSDNKESMLVPSCGGERMHRPELEERTGYLEMDDLLEIDDLGLLIGKNGDFKNWCCEEFQHPWNWF

SEQ ID NO: 5418 - protein, 187 aa, Arabidopsis thaliana
MKLSSPPVTNNEPTATASAVKSCGGGGKETSSSTTRHPVYHGVRKRRWGKWVSEIREPRKKSRIWLGSFPVPEMAAKAYDVAAFCLKGRKAQLNFPEEIEDLPRPSTCTPRDIQVAAAKAANAVKIIKMGDDDVAGIDDGDDFWEGIELPELMMSGGGWSPEPFVAGDDATWLVDGDLYQYQFMACL

SEQ ID NO: 5419 - protein, 177 aa, Arabidopsis thaliana
MPRKRKSRGTRDVAEILRKWREYNEQTEADSCIDGGGSKPIRKAPPKRSRKGCMKGKGGPENGICDYTGVRQRTWGKWVAEIREPGRGAKLWLGTFSSSYEAALAYDEASKAIYGQSARLNLPLLPLCQARLLHFLMNLKFVHVRIQMQDLVLVRSLTSRISKMLSPITALVKLGRY

SEQ ID NO: 5420 - protein, 189 aa, Arabidopsis thaliana
MVHSRKFRGVRQRQWGSWVSEIRHPLLKRRVWLGTFETAEAAARAYDQAALLMNGQNAKTNFPVVKSEEGSDHVKDVNSPLMSPKSLSELLNAKLRKSCKDLTPSLTCLRLDTDSSHIGVWQKRAGSKTSPTWVMRLELGNVVNESAVDLGLTTMNKQNVEKEEEEEEAIISDEDQLAMEMIEELLNWS

SEQ ID NO: 5421 - protein, 187 aa, Arabidopsis thaliana
MPPSPPKSPFISSSLKGAHEDRKFKCYRGVRKRSWGKWVSEIRVPKTGRRIWLGSYDAPEKAARAYDAALFCIRGEKGVYNFPTDKKPQLPEGSVRPLSKLDIQTIATNYASSVVHVPSHATTLPATTQVPSEVPASSDVSASTEITEMVDEYYLPTDATAESIFSVEDLQLDSFLMMDIDWINNLI

SEQ ID NO: 5422 - protein, 186 aa, Arabidopsis thaliana
MVHSKKFRGVRQRQWGSWVSEIRHPLLVWLGTFDTAETAARAYDQAAVLMNGQSAKTNFPVIKSNGSNSLEINSALRSPKSLSELLNAKLRKNCKDQTPYLTCLRLDNDSSHIGVWQKRAGSKTSPNWVKLVELGDKVNARPGGDIETNKMKVRNEDVQEDDQMAMQMIEELLNWTCPGSGSIAQV

SEQ ID NO: 5423 - protein, 179 aa, Arabidopsis thaliana
MQDSSSHESQRNLRSPVPEKTGKSSKTKNEQKGVSKQPNFRGVRMRQWGKWVSEIREPRKKSRIWLGTFSTPEMAARAHDVAALAIKGGSAHLNFPELAYHLPRPASADPKDIQEAAAAAAAVDWKAPESPSSTVTSSPVADDAFSDLPDLLLDVNDHNKNDGFWDSFPYEDPFFLENY

SEQ ID NO: 5424 - protein, 150 aa, Arabidopsis thaliana
MVIQYKRKQEFPMVKEGMVMTEKPKRNLISSNEKRYKGIRMRKWGKWVAEIREPNKRSRIWLGSYKTAVAAARAYDTAVFYLRGPSARLNFPEEVFKDGNGGEGLGGDMSPTLIRKKAAEVGARVDAELRLENRMVENLDMNKLPEAYGL

SEQ ID NO: 5425 - protein, 341 aa, Arabidopsis thaliana
MPSEIVDRKRKSRGTRDVAEILRQWREYNEQIEAESCIDGGGPKSIRKPPPKGSRKGCMKGKGGPENGICDYREVRQRRWGKWVAEIREPDGGARLWLGTFSSSYEAALAYDEAAKAIYGQSARLNLPEITNRSSSTAATATVSGSVTAFSDESEVCAREDTNASSGFGQVKLEDCSDEYVLLDSSQCIKEELKGKEEVREEHNLAVGFGIGQDSKRETLDAWLMGNGNEQEPLEFGVDETFDINELLGILNDNNVSGQETMQYQVDRHPNFSYQTQFPNSNLLGSLNPMEIAQPGVDYGCPYVQPSDMENYGIDLDHRRFNDLDIQDLDFGGDKDVHGST

SEQ ID NO: 5426 - protein, 295 aa, Arabidopsis thaliana
MARQINIESSVSQVTFISSAIPAVSSSSSITASASLSSSPTTSSSSSSSTNSNFIEEDNSKRKASRRSLSSLVSVEDDDDQNGGGGKRRKTNGGDKHPTYRGVRMRSWGKWVSEIREPRKKSRIWLGTYPTAEMAARAHDVAALAIKGTTAYLNFPKLAGELPRPVTNSPKDIQAAASLAAVNWQDSVNDVSNSEVAEIVEAEPSRTVVAQLFSSDTSTTTTTQSQEYSEASCASTSACTDKDSEEEKLFDLPDLFTDENEMMIRNDAFCYYSSTWQLCGADAGFRLEEPFFLSE

SEQ ID NO: 5427 - protein, 295 aa, Arabidopsis thaliana
MARQINIESSVSQVTFISSAIPAVSSSSSITASASLSSSPTTSSSSSSSTNSNFIEEDNSKRKASRRSLSSLVSVEDDDDQNGGGGKRRKTNGGDKHPTYRGVRMRSWGKWVSEIREPRKKSRIWLGTYPTAEMAARAHDVAALAIKGTTAYLNFPKLAGELPRPVTNSPKDIQAAASLAAVNWQDSVNDVSNSEVAEIVEAEPSRAVVAQLFSSDTSTTTTTQSQEYSEASCASTSACTDKDSEEEKLFDLPDLFTDENEMMIRNDAFCYYSSTWQLCGADAGFRLEEPFFLSE

SEQ ID NO: 5428 - protein, 221 aa, Arabidopsis thaliana
MADSSSDKEKKENNKQPVYRGVRMRSWGKWVSEIREPRKKSRIWLGTFPTAEMAMRAHDVAAMSIKGTSAILNFPELSKLLPRPVSLSPRDVRAAATKAALMDFDTTAFRSDTETSETTTSNKMSESSESNETVSFSSSSWSSVTSIEESTVSDDLDEIVKLPSLGTSLNESNEFVIFDSLEDLVYMPRWLSGTEEEVFTYNNNDSSLNYSSVFESWKHFP

SEQ ID NO: 5429 - protein, 176 aa, Arabidopsis thaliana
METEAAVTATVTAATMGIGTRKRDLKPYKGIRMRKWGKWVAEIREPNKRSRIWLGSYATPEAAARAYDTAVFYLRGPSARLNFPELLAGLTVSNGGGRGGDLSAAYIRRKAAEVGAQVDALGATVVVNTGGENRGDYEKIENCRKSGNGSLERVDLNKLPDPENSDGDDDECVKRR

SEQ ID NO: 5430 - protein, 411 aa, Arabidopsis thaliana
MSVLSSRTGRDRQRYDNNFRLVSGCIPYRLMKADETEEDSGVDFVNKLEVLMVSSPNRHDLVFPKGGWEDDETVLEAASREAIEEAGVKGILRELPLGVWEFRSKSSTVEDECLGGCKGYMFALKVTEELEDWPERKNRERRWLTVKEALELCRYEWMQRALEEFLRVMEDERRLRTEEETVHDSSKLEEESQIDPCNKRKSKEEKKLQEGKYLGVRRRPWGRYAAEIRNPFTKERHWLGTFDTAEEAAFAYDVAARSISGSLATTNFFYTENTSLERHPQQSLEPHMTWGSSSLCLLQDQPFENNHFVADPISSSFSQKQESSTNLTNTFSHCYNDGDHVGQSKEISLPNDMSNSLFGHQDKVGEHDNADHMKFGSVLSDEPLCFEYDYIGNYLQSFLKDVNDDAPQFLM

SEQ ID NO: 5431 - protein, 219 aa, Arabidopsis thaliana
MLKSSNKRKSKEEKKLQEGKYLGVRRRPWGRYAAEIRNPFTKERHWLGTFDTAEEAAFAYDVAARSISGSLATTNFFYTENTSLERHPQQSLEPHMTWGSSSLCLLQDQPFENNHFVADPISSSFSQKQESSTNLTNTFSHCYNDGDHVGQSKEISLPNDMSNSLFGHQDKVGEHDNADHMKFGSVLSDEPLCFEYDYIGNYLQSFLKDVNDDAPQFLM

SEQ ID NO: 5432 - protein, 256 aa, Arabidopsis thaliana
MGKQINIESSATHHQDNIVSVITATISSSSVVTSSSDSWSTSKRSLVQDNDSGGKRRKSNVSDDNKNPTSYRGVRMRSWGKWVSEIREPRKKSRIWLGTYPTAEMAARAHDVAALAIKGNSGFLNFPELSGLLPRPVSCSPKDIQAAATKAAEATTWHKPVIDKKLADELSHSELLSTAQSSTSSSFVFSSDTSETSSTDKESNEETVFDLPDLFTDGLMNPNDAFCLCNGTFTWQLYGEEDVGFRFEEPFNWQND

SEQ ID NO: 5433 - protein, 216 aa, Arabidopsis thaliana
MDASPKYTGVRKRKWGKWVAEIRLPNSRDRIWLGSFDSAEKAARAFDAALYCLRGPGARFNFPDNPPEIPGGRSLTPQQIQVVASRFACEEELLPPEQHHPSPPRGDHNTEEEVIISARGEINSGSGGPTLGQVGEDNNNEGNSNDTSSYWPLIWEEENFVGPPNSDHEFGFFTDDSTNLYFPTQQQQQHQLSSDFYYDGACEDDFSHYNINLWNF

SEQ ID NO: 5434 - protein, 259 aa, Arabidopsis thaliana
MVYIGNQKVAAIGIRVSKWITYHGLALNVTTDLTPFNWIVPCGIRDRKVGNIKGLLEDGEHGMVDDLRLIDIVHESLLKEFSEAFQLQIEKQTVSDPNILGVRKRSWGKWVSEIRVPKTGRRIWLGSYDAPEKAARAYDAALFCIRGEKGVYNFPTDKKPQLPEGSVRPLSKLDIQTIATNYASSVVHVPSHATTLPATTQVPSEVPASSDVSASTEITEMVDEYYLPTDATAESIFSVEDLQLDSFLMMDIDWINNLI

SEQ ID NO: 5435 - protein, 153 aa, Arabidopsis thaliana
MEREQEESTMRKRRQPPQEEVPNHVATRKPYRGIRRRKWGKWVAEIREPNKRSRLWLGSYTTDIAAARAYDVAVFYLRGPSARLNFPDLLLQEEDHLSAATTADMPAALIREKAAEVGARVDALLASAAPSMAHSTPPVIKPDLNQIPESGDI

SEQ ID NO: 5436 - protein, 148 aa, Arabidopsis thaliana
EESTMRKRRQPPQEEVPNHVATRKPYRGIRRRKWGKWVAEIREPNKRSRLWLGSYTTDIAAARAYDVAVFYLRGPSARLNFPDLLLQEEDHLSAATTADMPAALIREKAAEVGARVDALLASAAPSMAHSTPPVIKPDLNQIPESGDI

SEQ ID NO: 5437 - protein, 144 aa, Arabidopsis thaliana
MRKRRQPPQEEVPNHVATRKPYRGIRRRKWGKWVAEIREPNKRSRLWLGSYTTDIAAARAYDVAVFYLRGPSARLNFPDLLLQEEDHLSAATTADMPAALIREKAAEVGARVDALLASAAPSMAHSTPPVIKPDLNQIPESGDI

SEQ ID NO: 5438 - protein, 248 aa, Arabidopsis thaliana
MADPNNPITEPKAIIQSSTSSSVTIVPVPTCGDSLSDSATCENPCPLDTITTTTTTVCFAAPSSTASGNDINTLMATDTDISRRKKNPVYRGIRCRSGKWVSEIREPKKTTRVWLGTYPTPEMAAAAYDVAALALKGGDTLLNFPDSLGSYPIPLSSSAAHIRCAAAAAAATRGAAGAAVKVGQKKEDKVYDTAESSTMGFVDEEELLNMPGLLADMAKGMMVAPPWMGSPPSDDSPENSDGESLWSY

SEQ ID NO: 5439 - protein, 238 aa, Arabidopsis thaliana
MADPNNPITEPKAIIQSSTSSSVTIVPVPTCGDSLSDSATCENPCPLDTITTTTTTVCFAAPSSTASGNDINTLMATDTDISRRKKNPVYRGIRCRSGKWVSEIREPKKTTRVWLGTYPTPEMAAAAYDVAALALKGGDTLLNFPDSLGSYPIPLSSSAAHIRCAAAAAAATRGAAGAAVKVGQKKEDKVYDTAESSTMGFVDEEELLNMPGLLADMAKGMMVAPPWMGSPPSDDSPE

SEQ ID NO: 5440 - protein, 188 aa, Arabidopsis thaliana
MASAGLGSRRKDPVYRGIRCRSGKWVSEIREPRKTTRIWLGTYPMAEMAAAAYDVAAMALKGREAVLNFPGSVGSYPVPESTSAADIRAAAAAAAAMKGCEEGEEEKKAKEKKSSSSKSRARECHVDNDVGSSSWCGTEFMDEEEVLNMPNLLANMAEGMMVAPPSWMGSRPSDDSPENSNDEDLWGY

SEQ ID NO: 5441 - protein, 185 aa, Arabidopsis thaliana
MEGSSSSMQSKYKGVRKRKWGKWVSEIRLPNSRERIWLGSYDTPEKAARAFDAALYCLRGNNAKFNFPDNPPVISGGRNLSRSEIREAAARFANSAEDDSSGGAGYEIRQESASTSMDVDSEFLSMLPTVGSGNFASEFGLFPGFDDFSDEYSGDRFREQLSPTQDYYQLGEETYADGSMFLWNF

SEQ ID NO: 5442 - protein, 255 aa, Arabidopsis thaliana
KNMEHQTTPKQKTKEKSKGNKTKFVGVRQRPSGKWVAEIKDTTQKIRMWLGTFETAEEAARAYDEAACLLRGSNTRTNFANHFPNNSQLSLKIRNLLHQKQSMKQQQQQQHKPVSSLTDCNINYISTATSLTTTTTTTTTTAIPLNNVYRPDSSVIGQPETEGLQLPYSWPLVSGFNHQIPLAQAGGETHGHLNDHYSTDQHLGLAEIERQISASLYAMNGANSYYDNMNAEYAIFDPTDPIWDLPSLSQLFCPT

SEQ ID NO: 5443 - protein, 184 aa, Arabidopsis thaliana
MQGTSKDNGGRHPLYRGVRQRKNSNKWVSEIREPRKPNRIWLGTFSTPEMAAIAYDVAALALKGSQAELNFPNSVSSLPAPTSMSPADIQAAAASAAAAFGAARDAIVMANNNSQTSGVACMNSSYDNTNMNGFMDEDLVFDMPNVLMNMAEGMLLSPPRPTVFDAAYDADGFPGGDDYLWNFP

SEQ ID NO: 5444 - protein, 253 aa, Arabidopsis thaliana
MEHQTTPKQKTKEKSKGNKTKFVGVRQRPSGKWVAEIKDTTQKIRMWLGTFETAEEAARAYDEAACLLRGSNTRTNFANHFPNNSQLSLKIRNLLHQKQSMKQQQQQQHKPVSSLTDCNINYISTATSLTTTTTTTTTTAIPLNNVYRPDSSVIGQPETEGLQLPYSWPLVSGFNHQIPLAQAGGETHGHLNDHYSTDQHLGLAEIERQISASLYAMNGANSYYDNMNAEYAIFDPTDPIWDLPSLSQLFCPT

SEQ ID NO: 5445 - protein, 232 aa, Arabidopsis thaliana
MSNNNNSPTTVNQETTTSREVSITLPTDQSPQTSPGSSSSPSPRPSGGSPARRTATGLSGKHSIFRGIRLRNGKWVSEIREPRKTTRIWLGTYPVPEMAAAAYDVAALALKGPDAVLNFPGLALTYVAPVSNSAADIRAAASRAAEMKQPDQGGDEKVLEPVQPGKEEELEEVSCNSCSLEFMDEEAMLNMPTLLTEMAEGMLMSPPRMMIHPTMEDDSPENHEGDNLWSYK

SEQ ID NO: 5446 - protein, 178 aa, Arabidopsis thaliana
MQSKYKGVRKRKWGKWVSEIRLPNSRERIWLGSYDTPEKAARAFDAALYCLRGNNAKFNFPDNPPVISGGRNLSRSEIREAAARFANSAEDDSSGGAGYEIRQESASTSMDVDSEFLSMLPTVGSGNFASEFGLFPGFDDFSDEYSGDRFREQLSPTQDYYQLGEETYADGSMFLWNF

SEQ ID NO: 5447 - protein, 211 aa, Arabidopsis thaliana
MVKTLQKTPKRMSSPSSSSSSSSSTSSSSIRMKKYKGVRMRSWGSWVSEIRAPNQKTRIWLGSYSTAEAAARAYDAALLCLKGSSANNLNFPEISTSLYHIINNGDNNNDMSPKSIQRVAAAAAAANTDPSSSSVSTSSPLLSSPSEDLYDVVSMSQYDQQVSLSESSSWYNCFDGDDQFMFINGVSAPYLTTSLSDDFFEEGDIRLWNFC

SEQ ID NO: 5448 - protein, 195 aa, Arabidopsis thaliana
MVKQAMKEEEKKRNTAMQSKYKGVRKRKWGKWVSEIRLPHSRERIWLGSYDTPEKAARAFDAAQFCLRGGDANFNFPNNPPSISVEKSLTPPEIQEAAARFANTFQDIVKGEEESGLVPGSEIRPESPSTSASVATSTVDYDFSFLDLLPMNFGFDSFSDDFSGFSGGDRFTEILPIEDYGGESLLDESLILWDF

SEQ ID NO: 5449 - protein, 213 aa, Arabidopsis thaliana
MNSFSAFSEMFGSDYEPQGGDYCPTLATSCPKKPAGRKKFRETRHPIYRGVRQRNSGKWVSEVREPNKKTRIWLGTFQTAEMAARAHDVAALALRGRSACLNFADSAWRLRIPESTCAKDIQKAAAEAALAFQDETCDTTTTNHGLDMEETMVEAIYTPEQSEGAFYMDEETMFGMPTLLDNMAEGMLLPPPSVQWNHNYDGEGDGDVSLWSY

SEQ ID NO: 5450 - protein, 213 aa, Arabidopsis thaliana
MNSFSAFSEMFGSDYEPQGGDYCPTLATSCPKKPAGRKKFRETRHPIYRGVRQRNSGKWVSEVREPNKKTRIWLGTFQTAEMAARAHDVAALALRGRSACLNFADSAWRLRIPESTCAKDIQKAAAEAALAFQDETCDTTTTDHGLDMEETMVEAIYTPEQSEGAFYMDEETMFGMPTLLDNMAEGMLLPPPSVQWNHNYDGEGDGDVSLWSY

SEQ ID NO: 5451 - protein, 227 aa, Arabidopsis thaliana
MNSFSAFSEMFGSDYESPVSSGGDYSPKLATSCPKKPAGRKKFRETRHPIYRGVRQRNSGKWVCELREPNKKTRIWLGTFQTAEMAARAHDVAAIALRGRSACLNFADSAWRLRIPESTCAKEIQKAAAEAALNFQDEMCHMTTDAHGLDMEETLVEAIYTPEQSQDAFYMDEEAMLGMSSLLDNMAEGCFYRRRRFNGTIILMSREMMTCPYGAIKIRFLFPFLVL

SEQ ID NO: 5452 - protein, 216 aa, Arabidopsis thaliana
MNSCSAFSEMFGSDYESPVSSGGDYSPKLATSCPKKPAGRKKFRETRHPIYRGVRQRNSGKWVCELREPNKKTRIWLGTFQTAEMAARAHDVAAIALRGRSACLNFADSAWRLRIPESTCAKEIQKAAAEAALNFQDEMCHMTTDAHGLDMEETLVEAIYTPEQSQDAFYMDEEAMLGMSSLLDNMAEGMLLPSPSVQWNYNFDVEGDDDVSLWSY

SEQ ID NO: 5453 - protein, 216 aa, Arabidopsis thaliana
MNSFSAFSEMFGSDYESPVSSGGDYSPKLATSCPKKPAGRKKFRETRHPIYRGVRQRNSGKWVCELREPNKKTRIWLGTFQTAEMAARAHDVAAIALRGRSACLNFADSAWRLRIPESTCAKEIQKAAAEAALNFQDEMCHMTTDAHGLDMEETLVEAIYTPEQSQDAFYMDEEAMLGMSSLLDNMAEGMLLPSPSVQWNYNFDVEGDDDVSLWSY

SEQ ID NO: 5454 - protein, 224 aa, Arabidopsis thaliana
MNPFYSTFPDSFLSISDHRSPVSDSSECSPKLASSCPKKRAGRKKFRETRHPIYRGVRQRNSGKWVCEVREPNKKSRIWLGTFPTVEMAARAHDVAALALRGRSACLNFADSAWRLRIPETTCPKEIQKAASEAAMAFQNETTTEGSKTAAEAEEAAGEGVREGERRAEEQNGGVFYMDDEALLGMPNFFENMAEGMLLPPPEVGWNHNDFDGVGDVSLWSFDE

SEQ ID NO: 5455 - protein, 239 aa, Stylosanthes hamata
MAPREKTPAVKVNAGVKEVHFRGVRKRPWGRYAAEIRDPGKKSRVWLGTFDTAEDAARAYDAAAREFRGPKAKTNFPFPDSDDINSNNNNIVVVKNNNRSPSQSSTVESSSRDRDSYSAAAAATAVADSSPLDLNLAPAGAGFAGSIRFPFQQPFAVFPGGMPAAKQALYLDAVLRASMASHGQFGFGYNRPAAAAAGAQSDSDSSSVIDLNQNEGDVAKNNGRGLVLDLNEPPPQEMA

SEQ ID NO: 5456 - protein, 238 aa, Stylosanthes hamata
MAPREKTPAVKVNGKSNAGVKEVHFRGVRKRPWGRYAAEIRDPGKKSRVWLGTFDTAEDAARAYDAAAREFRGPKAKTNFPFPDSDDINNNNIVVVKNNNRSPSQSSTVESSSRDRDSYSAAAATAVADSSPLDLNLAPQELDSPDPFGSHSTQPFAVFPGGMPAAKQALYLDAVLRASMASHGQFGFGYNRPAAAGAQSDSDSSSVIDLNQNEGDVAKNNGRGLVLDLNEPPPQEMA

SEQ ID NO: 5457 - protein, 344 aa, Cicer arietinum
GFREFKDDSDFDEDEEDDDDDEGLLVGGKGFTFSSNNTKSFKTFSRGSTAAKSVSPKSNEQAEKACKRKRKNQYRGIRQRPWGKWAAEIRDPRKGVRVWLGTFNTAEEAARAYDAEARRIRGKKAKVNFPEEAPVTSSKRFKPNLENKLVNKNLNSFNPNGNKMFNFGENVENYYSPMDQVEQKPLVNNNNQYANMGPFSGNGVQHSQISPSADVTAYFSSEHSSNSFDYSDLGWGEQGPKTPEISSMLSAAAPLESESQYVQNNMQSNNNQNMLPVEDNSAKTLSEELADIESQLKFFETPYDDNWGDASLASFLGGDATQDGGNPMNLWSFDDLPSISGGVF

SEQ ID NO: 5458 - protein, 250 aa, Glycine max
  unsure (1)..(250): unsure at all Xaa locations
MYGRSDSYESDLALLDSIRRHLLGESELIFGAPNFGSGRSSSFSSLDSCLSDDWGELPFKEDDSEDMVLYGVLRDAVNVGWVPSLDAGSPERSGFPAVKLEPDVMPALINPCPPPAXXAVEEKKVVPPKGKHYRGVRQRPWGKFAAEIRDPAKNGARVWLGTFETAEDAALAYDRAAYRMRGSRALLNFPLRVNSGEPDPVRVTSKRSSSPESMAAAAPKRKKVMVVGTVQEQVGSQVVECTRGEQLLVS

SEQ ID NO: 5459 - protein, 324 aa, Glycine max
  unsure (1)..(324): unsure at all Xaa locations
MYGQSSYESDLALLDSIRRHLLGDSEEHKFGAPNVSSGNTPAYSRSSCFSRLYPCLSNDWGELPLKEDDSEDMLLYGVLRDAINAGWVPSLDASSPESFSSGFIPAVTVKSEPDLFPAPEPVYIPPAAQKAEPAVVPAKGKHYRGVRQRPWGKFAAEIRDPAKNGARVWLGTFETAEDAALAYDRAAYRMRGSRALLNFPLRINSGEPRPVRVTAKRASAEXXCSSSESGSWVKKRKKVVGXERGTWRAVVGEVICDAKKGWNKWVGMLTHCSSGTVGLIKSKAKKENKPHLEKLIRVEVLFGFVNTVTRFLIFWFNSIIISVT

SEQ ID NO: 5460 - protein, 325 aa, Glycine max
  unsure (1)..(325): unsure at all Xaa locations
MYGQSCYESDLALLDSIRRHLLGDSEEHRFGAPNVNSGSTPLYSRSSSFGRLYPCLSNDWGELPLMEDDSEDMLLYGVLRDAVNVGWVPSLDASSPESFSSAFMPPVTVKSETDLFPAPEPICNPPVVQGPAPAVVPAKGKHYRGVRQRPWGKFAAEIRDPAKNGARVWLGTFETAEDAALAYXDRAAYRMRGSRALLNFPLRINSGEPEPVRVTAKRASAEXXCSSSESGSWVKKRKKVVGXERGTSRAVVGEVICDAKKGWNKWVGMLTHCSSGTVGLIKSKAKKENKPHLEKLIRVEVLFGFVNTVTRFLIFWFNSIIISVT

SEQ ID NO: 5461 - protein, 210 aa, Glycine max
  unsure (1)..(210): unsure at all Xaa locations
MYGQSSSSSSSYESDLALLDSIRHHLLGESESIFGAPNFGSGRSSSFSSLDSCLSDNWGELPFKEDDTEDMVLYGVLRDAVNVGWVPSLDAGSPESVSSGFPAVKLEPDLMPALISLVSASGGCGGGEEXVVPAKGKHYPGVRQRPWGKFAAEIRDPAKNGARVWLGTFDTAEDAALAYDRAAYRLVGTVQEQVGSQVAECTRGEQLLVS

SEQ ID NO: 5462 - protein, 337 aa, Glycine max
  unsure (1)..(337): unsure at all Xaa locations
VYLPSSRTIAFINTLIQFPFQVRIFKTPSLILFSKHDTNIKKKPPEICTDSSYFFESDLALLDSIRRHLXLGESEMKFGAPNFGSGRSSCFSSLYPCLSDDWGELPLKEDDSEDMVLYGVLRDAVNAGXWVPSLDASSPGRVLSGFPALQLEPDVMLVGFHPGGDREIRTGSISPAVVPAKGKHYRGVRQRPWGKFAAEIRDPAKNGARVWLGTFETAEDAALAYDRAAYRMRGSRAWWHSXPLRRTSGEARPVRVTARWGSVQACXEAGGGTCGEELEEGGGLLVGYVVXQLLVGKWVRRTRGRIKVDSGTSKAQVRLRAGHTRRPNEETNHIWEN

SEQ ID NO: 5463 - protein, 197 aa, Glycine max
TRPNHTTYESNETSNLYGAMSSHALNTNVNALDHFEIPSFRNIFLTENWAELPLKENDTNDMVIYGALRDAAATGWFPANGNEVSNVSVAVKMENEGQNSKTTAARGTRTPPKKGLSYRGVRRRPWGKYAAEIRDTKRNGVRVWLGTYETAEDAALAYDRAAFKMRGSKAKLNFPHLIGSDHEPIKVKKKKRTLKKH

SEQ ID NO: 5464 - protein, 215 aa, Glycine max
  unsure (1)..(215): unsure at all Xaa locations
MSSTTTDSDCSYLEQIQQYLLHNDSTILXXPPQAFPSPSHDSSSDASVHFEHPSEAHDVXXAPPKWRRYRGVRRRPWGKFAAEIRDPKKNGSRVWLGTYVNEEEAALAYDKAAFNMRGQKAKLNFPHLIGSAVQXXEPPCLAVSKRSLPESSPPTSPXXDSCESKGSKRRKSLVDLLNNLAKNKSQAKVVEMALEANEVEQWVNELNDCTLFWCS

SEQ ID NO: 5465 - protein, 277 aa, Glycine max
  unsure (1)..(277): unsure at all Xaa locations
MANALEVSALNRIKLHLLGELSPLTQFQEPNTTSLCSQSSTSDSFTTVDQIFSEFLDFPTTTTSSTEQNQFSAFEFEPKPEIIEPQXXEFSFPTTRCKSSRRPSLQISLPKKTEWIQFGEPEVTETVSQSNPNAEEKKHYRGVRQRPWGKFAAEIRDPNKRGSRVWLGTFDTAIEAAKAYDRAAFRLRGSKAILNFPLEAGADDRKRQREEKVEPVLEVVKREKIGESDVSLIKNNPLTPSSWLGFWGSDANGIFTVPPLSPLSPHPALGFPQLMVV

SEQ ID NO: 5466 - protein, 182 aa, Glycine max
MGSNKTYEEEESTVLFSHSQTQTELLPFNENDPQDMVIYQVLNEANALTNTFLPQRLHQPQLCLEPTRNITKKHYRGVRRRPWGKYAAEIRDSARHGARIWLGTFQTAEEAAMAYDRAAFKMRGSKALLNFPAEIVAATVSFNNTNSNNHDAVSDSSAGSSCTNNSVQLNRNQSESCTSSTG

SEQ ID NO: 5467 - protein, 243 aa, Glycine max
  unsure (1)..(243): unsure at all Xaa locations
MQSSISQSDIFITDYLVPQEVPFQFQFQDMSKNDNNMPMNHTNNNLQMPQITSFSKPPRSSSNLSNRKPSLKNITIPSITSANNTKDDKHYRGVRRRPWGKYAAEIRDPNRKGSRVWLGTFDTAIEAAKAYDKAAFKMRGSKAILNFPLEIGSDQSKEESSSSSSSVSKRKRVKGRTTMRKVSLTTIXNSNKHVKKEECPLTPSCWKGFWDTDVMGTIFSVPPLSPLSPLMVVXDFVELLLFQ

SEQ ID NO: 5468 - protein, 187 aa, Glycine max
  unsure (1)..(187): unsure at all Xaa locations
EETNKHGKQENLRGRRKHGSIFPFPNTNRLAXLPFNENDPQDMVIYQVLHEANALTNTFLPQPTRNITKKHYRGVRRRPWGKYAAEIRDSARHGARIWLGTFQTAEEAAMAYDRAAFKMRGSKALLNFPAEIVAAATATDFKSSSNNNNNNNNNNPDAVSDSSAGSSCTNNSTWVNRNQSEITSGTG

SEQ ID NO: 5469 - protein, 300 aa, Glycine max
  unsure (1)..(300): unsure at all Xaa locations
TQHTPLLSLPSXRTKRSEKRFLTXVMANAAEVSALNRIKLHLLGELSPLATPLNYFDESNPSPSESSNSQSSSVSLNHYFTDLFEFDSKPQIIDLQTPKTLXFSSEXKPQLXXRKPSLLIAVPKKTEWIQFGSPDPNPVMAAPENLPQKNHYRGVRQRPWGKFAAEIRDPNKRGSRVWLGTFDTAVEAAKAYDRAAFRLRGSKAILNFPLEVSAXWRSAAAEGNVERKRRREEEEVVVEEVKPVVKKEKITEQDVSCFREMPVXTPSMWTGFWDSDVKDIFNVPPLSPLSPFGFSPLVAV

SEQ ID NO: 5470 - protein, 280 aa, Glycine max
  unsure (1)..(280): unsure at all Xaa locations
MANAAEVSALKRIKLHLLGELSPLATPQNKFDQTNPSPSESSNSESSSISLNHYFTDLLEPEXXNFLXFEFDSKPQVIDLXNPENPNFSXEEASIXNRKPSLLIAVPKKTEWIQFGNPEVAAPENQPEKKHYRGVRQRPWGKFAAEIRDPNKRGSRVWLGTFDTAIEAAKAYDRAAFRLRGSKAILNFPLEVNTAAETVSVAAVDVERKRRREEEEVVVEDVKAVVKKEKITEHDVSCFRGMPLTPSMWTGFWDSDVKDIFNIPPLSPLSPFGFSPLVAV

SEQ ID NO: 5471 - protein, 202 aa, Glycine max
MVSATVDSDFAFLESVQQYLLGHDSINLMSETHQAASHDPFSDPNKCDGDSGNIAFRSEDATAVVARDHAPPTWKHYRGVRRRPWGKFAAEIRDPKKNGARVWLGTYDTEEKAALAYDKAAFKMRGQKAKLNFPHLIDSDNSDELSEPVMMTTSKRSLLEISSPSSSCSDDSSESQGTKRRKSLAELLNKLAKNRSQVKVEC

SEQ ID NO: 5472 - protein, 202 aa, Glycine max; identical to SEQ ID NO: 5471

SEQ ID NO: 5473 - protein, 278 aa, Glycine max
  unsure (1)..(278): unsure at all Xaa locations
MANALEVSALNRIKLHLLGELSPLTQFQEPNTTSLCSQSSTSDSFTTVDQIFSEFLDFPTTTTSSTEQNQFSAFEFEPKPEIIEPQXXEFSFPTTRCKSSRRPSLQISLPKKTEWIQFGEPEVTETVSQSNPNAEEKKHYRGVRQRPWGKFAAXEIRDPNKRGSRVWLGTFDTAIEAAKAYDRAAFRLRGSKAILNFPLEAGADDRKRQREEKVEPVLEVVKREKIGESDVSLIKNNPLTPSSWLGFWGSDANGIFTVPPLSPLSPHPALGFPQLMVV

SEQ ID NO: 5474 - protein, 274 aa, Glycine max
  unsure (1)..(274): unsure at all Xaa locations
IIKPFTVLNPISLFAPQTPYKPQFHNQKCKVQSHNLRFXITDYLLPQEVPSQFQFPDMSNNNIPMNHTNLQMPQITSFSKPPRSSSNLSNRKPSLRNITIPSITSDETNNIKENKHYRGVRRRPWGKYAAEIRDPNRKGSRVWLGTFDTAIEAAKAYDKAAFKMRGSKAILNFPLEIGESEESVSSCIKVGVKREREEESKSNNYEKSEFNNNNNSNKHVKKEECSPKAVCPLTPSCWKGFWDTDVMGTIFSVPPLSPLSPLMVVXDCGLSLFQ

SEQ ID NO: 5475 - protein, 94 aa, Glycine max
  unsure (1)..(94): unsure at all Xaa locations
XRARARNPARVMCSDXAAEEKKVVPAKGKHYRGVRQRPWGKFAAEIRDPAKNGARVWLGTFETAEDAALAYDRAAYRLPAKRKKVVNGLIVNCL

SEQ ID NO: 5476 - protein, 239 aa, Glycine max
  unsure (1)..(239): unsure at all Xaa locations
MATAEEISTLKLLRQYLLGDIXXDPFLTNLIPVKLEDPSSGLDMGSNFSEQSSFCKFLECFDFEAEVVGLTSHHKVQSSIATSPPQNFNFPEEPMVSMKKEATCYATRHYRGVRRRPWGKFAAEIRDPKKKGSRVWLGTFDTEIDAAKAYDCAAFRMRGHKAVLNFPLEAGMYPEPNSSGRKRRREYTXQLPQVQGMLCHEKXFSVGEPCFSFGIFCQLHKLKQGFIVTLQLSMMRSVI

SEQ ID NO: 5477 - protein, 173 aa, Glycine max
  unsure (1)..(173): unsure at all Xaa locations
MDIHSNHGATSEGILENVWAKIMSSDRADGRKGDAAECSNSWEELPNLDGREGSMEILQRLPSLGRWISMGADFWEEVLEGIILPNTSNTDPVAITTWKLEALMKLITSVTKHYRGVRRRPWGKYAAEIRDSSKKGARVWLGTFDTAEEAALSYDKAALRIRGPKAYLNFPLX

SEQ ID NO: 5478 - protein, 232 aa, Glycine max
  unsure (1)..(232): unsure at all Xaa locations
INTKIRNTIVSITIQNMATTISCDFSSVESIQHYLLELEHDFNTLMNASNHEICYSPTYNSFRVHDAEGSLACKREHXXKVEREFHAPPAWKRYRGVRRRPWGKFAAEIRDPKKNGARIWLGTYETEEEAGLAYDRAAFKMRGSKAKLNFPHLIGSHAPLKPIRVLTKTLKQNLLESDLSYSSAXXQTQESKKRKNLTDLLNRLAKNRKQVEVFEMSLHASNDVNVDQWWSN

SEQ ID NO: 5479 - protein, 220 aa, Glycine max
  unsure (1)..(220): unsure at all Xaa locations
MDSPSSFFNSPSSGFCSESSSPEAFSWEGXXLPFNENDPEEMLLYGMIAGATTEEHSGERASSEESAAARKEKSYRGVRRRPWGKFAAEIRDSTRHGMRVWLGTFDSAEAAALAYDQAAFSMRGSAAILNFPAEIVRESLKEMNYAHDDSNNEEGCSPVVALKRKHSLRRKINVRKKKNNNNNSKLQSSTVDNAVVFEDLGPDYLEQLLMSSDHHIPTTF

SEQ ID NO: 5480 - protein, 218 aa, Glycine max
  unsure (1)..(218): unsure at all Xaa locations
KKITPKSEKTIVFITIQNMATTISCDFSSMESIQHYLLEPEHDSNALMNISNHAATYNAFPSPTFSLEGDDANDSLACKREHPREERDHAPPVWKHYRGVRRRTWGKFAAEIRDPKKNGARIWLGTYETEEAAGLAYDRAAFKMRGSKAKLNFPHLIGSHAPXXQPVRVTKALKRNSPXXKRKNLADLLNRLAKNRSQILIQVLEMGLHANYVNVEQW

SEQ ID NO: 5481 - protein, 177 aa, Glycine max
  unsure (1)..(177): unsure at all Xaa locations
MYNTLTYHTLIQHFTFQVPKDQSQMNNFNTTLESDDFALLESIQRYLLDDNEVNALTEVLATPNNNVDAVNSPLSSSGHATTAATAARGASAAVARAXATPVAKXYKGVRRRPWGKFAXAEIRDPSRNGARVWLGTYESAEDAALAYDRAAFEMRGSKAKLNFPHLIWVQGCRAEPK

SEQ ID NO: 5482 - protein, 204 aa, Glycine max
  unsure (1)..(204): unsure at all Xaa locations
MTTAEETSNLDLIRQHLLGENIISDSSFFSNQFDFTSYISDNTSFFTFLEGYDLMADMKFVDSDNTIXLQRRLRNAXXISPEPLVSSKEKPKKLEYDKAKRYRGVRRRPWGKFAAEIRDPTRKGTRVWLGTFDSEIDAAKAYDCAAFKMRGQKAILNFPLEAGLSDPKPNSCGRKRRRESHDHEXGAATSPSSSWCFLRKSEKI

SEQ ID NO: 5483 - protein, 179 aa, Glycine max
  unsure (1)..(179): unsure at all Xaa locations
MENNTIYCDLSPLESVQHYLLEHENDSXXHYLQCLQPRNLLGRCPXDSKGLFSCKSEQHVDAREFHTHPVWKHYRGVRRRPWGKFAAEIWVPKSKGGRVWLGTYETEEEAGLAYDRAAFKMRGSKAKLNFPHLVXXEHVFLEPKRIXXKASKQNSSKPDQSFSPTPETQGSKKRKKFFS

SEQ ID NO: 5484 - protein, 132 aa, Glycine max
LRHTMEEESKEKKKDTKEARYRGVRRRPWGKFAAEIRDPARHGARVWLGTFLTAEEAARAYDRAAYEMRGALAVLNFPNEYPSCSSMNSSSTLAPSSSSSNSIIEFECLDDKLLEDLLDCDDYAYEKDLPKN

SEQ ID NO: 5485 - protein, 203 aa, Glycine max
  unsure (1)..(203): unsure at all Xaa locations
SHFFHHSPEVTTAEKTSNLDLIRQHLFGENIISDSSSFVSNLHHXXPVKLEPPSSPEFECTSYILEVIKKCNINSPEEQPMVSSSSEEKPTMKKSEHYDEAKRYRGVRRRPWGKFAAEIRDPTRKGTRVWLGTFDSEIDAAKAYDCAAFKMRGQKAILNFPLEAGEYPKPNNSCGRKRRRDXEPXSXIRASISSSSSWCFMRK

SEQ ID NO: 5486 - protein, 217 aa, Glycine max
  unsure (1)..(217): unsure at all Xaa locations
MAPRDKTSAVKPSGNAGVKDLHFRGVRKRPWGRFAAEIRDPAKKTRVWLGTFDTAEEAARAYDAAAREFRGPKAKTNFPLPSENFXXNASPSQSSTVESSSRDRDVAADSSPLDLNLAPGRXSPPLDSPSXNQFPVFPGAVPAANQVMYFDAVLRAGMAGPRGFAFGYNPHPVAASATSDSDSSSVIDLNHNEGVVKGNGSRMFDLDLNHPPPHEIA

SEQ ID NO: 5487 - protein, 270 aa, Glycine max
  unsure (1)..(270): unsure at all Xaa locations
HKEYRAANVKVDPRRLHGKLPLSSQASEEKEDTVEEFDAYNNYASWSSETDMSEMVSALAQVMGNQSEPIHATINLLSXFSTSVVKDQPQPYPSQPPPDQEVAKKPHYRGVRQRPWGKWAAEIRDPKKAARVWLGTFETAEDAALAYDKAALKFKGTKAKLNFPERVHQDTSSATGSGSSVDAVAPPSLSTHDQHGHQVFPNLYQYAQILSSDDAQLPYFTSHLXQSTTTTATATTFXNSQFSSTFSSTSSYFYNQQQQYDQQGHDHSNH

SEQ ID NO: 5488 - protein, 165 aa, Glycine max
  unsure (1)..(165): unsure at all Xaa locations
FLSSKRRTMEGGRSSASNGNGEVRYRGIRRRPWGKFAAEIRDPTRKGTRIWLGTFDTAEQAARAYDAAAFHFRGHRAILNFPNEYQSHNPNSSLPMPLAVPAPPSYSSSSSTSNYSGDXDDTFELEYLDNKLLEELLQMQDNRXXYKXNIXQANQXGSTAMYGMK

SEQ ID NO: 5489 - protein, 138 aa, Glycine max
  unsure (1)..(138): unsure at all Xaa locations
MEGGRSSVSNGXXVEVRYRGIRRRPWGKFAAEIRDPTRKGTRIWLGTFDTAEQAARAYDAAAFHFRGHRAILNFPNEYQSHNPNSSLPMPLAVSAPPSYSSSSSTSNYSDHDDDTFELEYFDNKLLEELLQMQDNRHF

SEQ ID NO: 5490 - protein, 114 aa, Glycine max
  unsure (1)..(114): unsure at all Xaa locations
SCXNALRLEQTQKTRRYRGVRRRPWGKFAAEIRDPKKKGSRVWLGTFDTEIDAAKAYDCAAFRMRGHKAVLNFPLEAGMYPEPNSSGRKRRRXIIQQLSQVQVMSCHEKXFSVG

SEQ ID NO: 5491 - protein, 265 aa, Glycine max
KKKKKQLEGELVSKVDRRQGKRSLPPHEEKKEAFNFPIIHPTPSQNRKEQASPSPFSLLMSNNKNNTFFPTPHGQISTSEFVNSQNNPSQATNQGIDDIRKKHYRGVRQRPWGKWAAEIRDPKKAARVWLGTFDTAEAAAMAYDAAALRFKGNKAKLNFPERVVMPIQPQTNNNNSTSSSAPEGFPNLEEYARLLSCSDDDDFQLALGLYQHHNNEDFICGSSQPPPVPFFVSSSSSSSAMTSSYSDFLGQGGSTGFDEGNKRGS

SEQ ID NO: 5492 - protein, 263 aa, Glycine max
  unsure (1)..(263): unsure at all Xaa locations
MDLDFDSTFFLNHSFFPENSSIFGDTFSWDYNFVLDDIFNNLSDNSSQSQTKETSSASNVSSCIGSVELQEVSSNTTYKEVKKVRPPPPEPRMYRGVRKRPWGKFAAEIRDSTRNGVRVWIGTFDTAEAAALAYDQAAFSTRGSLAVLNFPEEVVRESLKDMPSKPWEEASPVLALKRKHTMRTKSNSKKKTKVDQREQLDFSRTSQNVLVFKNLGAEYLKQLLTSSXSASLFSSSLFFELFVNNFLLCNSFITRIQRYILFX

SEQ ID NO: 5493 - protein, 127 aa, Glycine max
  unsure (1)..(127): unsure at all Xaa locations
FSSTIQNPPQATNQGIDDIRKKHYRGVRQRPWGKWAAEIRDPKKAARVWLGTFDTAEAAAMAYDAAALRFKGNKAKLNFPERAQTNNNNSTSSSAPTTQSSSSRFYYSNYKITPEVXKIYNTHLSSL

SEQ ID NO: 5494 - protein, 82 aa, Glycine max
  unsure (1)..(82): unsure at all Xaa locations
LQNNKERSYIGVRKRPWGKFAAEIRDTTRNGARVWLGTFDSAEAAALAYDQAAFTMRGDNAVLNFPVKTVKESLQEIQYSCX

SEQ ID NO: 5495 - protein, 133 aa, Glycine max
  unsure (1)..(133): unsure at all Xaa locations
XACGTHVPXRXXLSFRGVRRRPWGKYAAEIRDAKRNGVRVWLGTYETAENAALAYDRAAFKMHGSKAKLNFPHLIASAHHHVEPIRIALKKHSFDVSLSSSEVAAKRSKNGTASTNLELNDSKLQFPMDNRWQ

SEQ ID NO: 5496 - protein, 132 aa, Glycine max
  unsure (1)..(132): unsure at all Xaa locations
MEDLKEKVNEGEPTQIKYRGVRRRPWGKFAAEIRDSARHGARVWLGTFNTAEEAARAYDRAAFEMRGATAILNFPDEHPPCNVTSLSKKSSSSNTEIGKQVVVFECLDDKLLEELLDCDGENHQXKLGLLGR

SEQ ID NO: 5497 - protein, 242 aa, Glycine max
  unsure (1)..(242): unsure at all Xaa locations
XXKQSNSVILFSSSLQTPNTLNGLFLRSXHSSNSSFFPFNENDPEEMLLYGMITSYQEKVIIKEEEVNSEENSNKNKKSINKSSFRGVRSRPWGKFAAEIRDSTRHGVRVWLGTFDSAEAAALAYDQAAFSMRGSAAVLNFPVEKVKESLRDMNCTLSQLDGSSPVVALKRRHSLGRKMAAKKKXXVEETHGDVRLENVVVLEDLGAEYLEHLLMMSSHDTTSCSCTFFSXPWSLWSLNFSL

SEQ ID NO: 5498 - protein, 174 aa, Glycine max
  unsure (1)..(174): unsure at all Xaa locations
XTSSVSHGSGSVVEAEVSVSYRGVRRRPWGKFAAEIRDSTRNGVRVWLGTFDTAEAAALAYDQAALVMRGSMAVLNFPAEIVRQSLRNMEQYVQEGSSPVLELKKRHSMKRKSETKKHQLHDVMVLEDLGAEYLEHLLTLSQDMDMDACXLSYIYLLRQTLPFPSPPLSFLSLS

SEQ ID NO: 5499 - protein, 232 aa, Glycine max
  unsure (1)..(232): unsure at all Xaa locations
MSSSSFSPATLTTEQELSVIVAALTNVVAGSTSASSSFSLPEFRLPQTSDPLAAACLMPPPPPPSMDTCRECNIAGCLGCNFFPEEKKIRKQKRAKKKYRGVRQRPWGKWAAEIRDPRRAARVWLGTFGTAEDAARAYDKAAIEFRGPRAKLNFPLVDESLTLQQSEPERVQTEEEQIKTENLNQGMEMDSWNKDTEFCNEADFHQLMMMMDFAGDSSDSATGNALSSXNIQ

SEQ ID NO: 5500 - protein, 177 aa, Glycine max
  unsure (1)..(177): unsure at all Xaa locations
NSVYSSGVRMDSSSHQLLPFNENDPEDMLLYGIITSCXXEKKVTINQEQVNKKRSSFRGVRRRPWGKFAAEIRDSTRHGVRVWLGTFDNAEAAALAYDQAAFSMRGSGAVLNFPVEKVKESLRDMKLDGCSPVVALKRRHSLAAKRKXXEDVLVFHDLGADYLEHLVMCSDLPSTTI

SEQ ID NO: 5501 - protein, 279 aa, Glycine max
MMSRFMHAPSPVLSSSHPHLGVGHKREREDDTGAGASGGVAIAAASSQTQTQEIESAGGDRRRRYRGVRQRPWGKWAAEIRDPHKAARVWLGTFDTAEAAARAYDEAALRFRGNRAKLNFPENVVPVPPPPPVPDLPASAVAGSDSISGSGSVVAGFSPTLMQGAPFQGSSAFLRDYWGYSQLLRSTGDFHGLDQWFFDSQMAAFQSSSSSLLPSPPPPSFSPSSASYPLFSSSQQMGIFRPPGEQGHGGEDGGSGSEFSELPPSTWSDTSGYPPPPPG

SEQ ID NO: 5502 - protein, 279 aa, Glycine max; identical to SEQ ID NO: 5501

SEQ ID NO: 5503 - protein, 279 aa, Glycine max; identical to SEQ ID NO: 5501

SEQ ID NO: 5504 - protein, 273 aa, Glycine max
  unsure (1)..(273): unsure at all Xaa locations
IQDNEEPFIELNKVDRRHGKRPLPSDQSRERREGFNFFNQSPPKSQGGEASQFSFMHPINTGDDSTLSSPIPQYGQISNSCFETQDPSLQPLNQXXGNGRKRHYRGVRQRPWGKWAAEIRDPKKAARVWLGTFDTAEAAAAAYDAAALKFKGSKAKLNFPEHVLLPPPPISSSSPPCNNTQEEGFPNLMQYAHWSRDDDDLQRIASGLHQHHHHNEAFYDSSSSTLFSSTSTTYSMTVSDQQQNIGDDTSTPKGAEYNYGGCFFRGSDFHDKN

SEQ ID NO: 5505 - protein, 165 aa, Glycine max
  unsure (1)..(165): unsure at all Xaa locations
MASSSASREGHYRGVRKRPWGRYAAEIRDPWKKTRVWLGTFDTPEEAALAYDGAARSLRGAKAKTNFPPAPPLCLXPQRPFLRSPLAPRPPSQPRPXASSSTPPFSETLNRRNYLFXXPPPPSSLTEAPTXGGVQVVESSPTASFLGLVRRGIPIDLNEPPPLWL

SEQ ID NO: 5506 - protein, 114 aa, Glycine max
  unsure (1)..(114): unsure at all Xaa locations
MDEEGSXGEGXGGXAGDVRYRGVRRRPWGKFAAEIRDSTRQGQRVWLGTFNTAEEAARAYDRAAYAMRGPFAILNFPDEYPMTAGGATNAATYSSAASSSSSASSSRHANVARX

SEQ ID NO: 5507 - protein, 229 aa, Glycine max
  unsure (1)..(229): unsure at all Xaa locations
MCGGAIISDFIDVNLNSGRKLTTHNTHHQLHTFSDFHATSSSNYSSVLKTKTLITLSLSKVKMCGGAIISDFIDVNLNSGRKLTTHNTHHQLHTFSDFHATXFFQTSTILPGSKPPXASSASKQPRSEVEGSGRVRKNVYRGIRQRPWGKWAAEIRDPRKGVRVWLGTFNTAEEAARAYDNAAKRIRGDKAKLNFPDSKNPCLNPFQPNTSFPTSNPSKKKKKLGLDSL

SEQ ID NO: 5508 - protein, 301 aa, Glycine max
  unsure (1)..(301): unsure at all Xaa locations
IQDNEKPFIELNKVDRRHGKRPLPSDQSRERREGFNFFNQSPPKSQGGEASQFSFMHPINTGDDSTLSSPIPQYGQISNSCFETQDPSLQPLNQXXGNGRKRHYRGVRQRPWGKWAAEIRDPKKAARVWLGTFDTAEAAAAAYDAAALKFKGSKAKLNFPEHVLQNNHSYCYGSSALAPPPPLPLPSSQHVYDQPQQPLLSSSSQEEGFPNLMQYAQLHDDXSTTCCFRPSSSTTSSSSSSSQXSFLXFKFFNFVXSSSSTTSSMAVSDQQQIGDDTSTAPKRGEYYDSCFFRGNDFHDKN

SEQ ID NO: 5509 - protein, 381 aa, Glycine max
  unsure (1)..(381): unsure at all Xaa locations
NKKRNMEDSILCKHTVHHTVTKKLTPKKSSQTNSTTERRIVRISYTDPDATDSSSDEEGFPFVRQRMKRYVNQIEIEXRRRRKSCSXXRPAGEACRRPAKLHSGKKFRGVRQRPWGKWAAEIRDPARRVRLWLGTYDTAEEAAMVYDNAAIRLRGPDALTNFVTPPQRDSPSPSPPPAAAETPAEVCEMKVVVTEEASGSGYDSSEDHCHHNLSSPTSVLQFRSNSSEENSESQQKAEQVLRECEGETETSLFEETGEFLALDNMPLPAWDDVFNFETPEYPXLFSCPSPSSLCQVDDFFQDILFASDPLVLLXTLLKLTKLSFVNRQSSTSRLAQYSWQIFASGGKKKMPSFYLIKILYIYIYIYIYIYIYIYSFICVFI

SEQ ID NO: 5510 - protein, 175 aa, Glycine max
  unsure (1)..(175): unsure at all Xaa locations
MAPSSSASASREGHYRGVRKRPWGRYAAEIRDPWKKTRVWLGTFDTPEEAALAYDGAARSLRGAKAKTNFPPAXRPSASTSXRPFLRSPLAPPRPPPQPRPQRXFLHTAVLRDXSTRPNNLSHPPPQXLTEIPTAELCPXGGGVQVMEGSPTASFLGFVRRGIPIDLNEPPPMWL

SEQ ID NO: 5511 - protein, 222 aa, Glycine max
  unsure (1)..(222): unsure at all Xaa locations
ESIPQSHAHKRRGKENKNKTAEFWCQSTLRFQEMDFDSSFFQYQNFNSSFVNLSSNLTHASHQLKETHASPQPQPPKETNKDKRPFRGVRRRPWGKFAAEIRDSTRNGVRVWIGTFDTAEAAALAYDQAALSTRGSMAVLNFPEEVVRESLKDMQSNNKPISLEDGSSPVLALKRKHTMRRKSNAKKNKRDHGMESRNVNSITQNALVLEDXGSEYLEQLLX

SEQ ID NO: 5512 - protein, 236 aa, Glycine max
IPLFVQNHFLGRTFFSSMKKTPPPPPLIPSPSLNSSQSRIKESSSSDYSNSSGSLVSTESQLEVSSNLTHASHQLETHASPQPPKESNKDKRPFRGVRRRPWGKFAAEIRDSTRNGVRVWIGTFDTAEAAALAYDQAALSTRGSMAVLNFPEEVVRESLKDIKPSLEDGSSPVLALKRKHTMRRKSKATNKKTKRGHGMELENIVLSQNVLVLEDLGSEYLEQLLSLTSSDDDFLC

SEQ ID NO: 5513 - protein, 222 aa, Glycine max
  unsure (1)..(222): unsure at all Xaa locations
MCGGAIISDFIGVKRGRNLAAQELWSELDPFSDLLGFDTTTTTTNQPPLPDKKVVSSCEKKKKKSVSAERRARKNVYRGIRQRPWGKWAAEIRDPHKGXSRVWLGTFPTAEEAARAYDDAAKRIRGDKAKLNFPXPPLRHPPKNNAASALTPPPNKXSSSQSTTGSTGSPPSAAFHGGGDELDLKQLERFLGLDNMGAEWDNMXXDLWMLDDVVVPNRHLIY

SEQ ID NO: 5514 - protein, 217 aa, Glycine max
  unsure (1)..(217): unsure at all Xaa locations
MRRGRTAAAAAAVVDPTPDQAKETTRFRGVRKRPWGRFAAEIRDPWKKQRVWLGTFDSAEDAARAYDKAARSFRGPKAKTNFPPPPARQRRTTTRRFRSTRPMXXFPPSSSPXVQVNRPTSSGMSSTVESFSGPRVXPPPPPRXAPCCGCXPYHPSQRRXEDDCHSDCDSSSSVVDDGQDCVLISSFRQPLPFDLNLPPSDADDDNDDDLPATALCL

SEQ ID NO: 5515 - protein, 351 aa, Glycine max
  unsure (1)..(351): unsure at all Xaa locations
GTYHIYIYYMQQGEVTTQGGTLVSGYNRGDPDLREMVSALTHVVSSGSGQRSTEWTQQSGFPMMSASSLSGHKRGREEEESSTSHNMIQQQQQSAPRLFRNIGDFMVPSQGDSSSVTEEAPTSTTTSVTAVTENPPGGGERRRKYRGVRQRPWGKWAAEIRDPHKAARVWLGTFDTEEAAARAYDEAALRFRGNRAKLNFPENVRAVPPIQPFQATTRLTVSDSTTSQFRPLSATTCNTLRQSDFQQQQIQQQQQQQRQQQQRQRQQRQQQQQQQQQPSSLLQQLYYNAQFASLQSPSMLSSSPSFSSSFPLFSSQQIFQPPESRNPAGGVPXXFPTSTWSDTSSQPPPSG

SEQ ID NO: 5516 - protein, 336 aa, Glycine max
  unsure (1)..(336): unsure at all Xaa locations
XSLFTPHKSNHIFQFSHLNPHHTLSMPMMFSGLNREKEMSAMISALTHVVCGEDEHHGAVVGDDDFTVTSNMASGSMPPSSTCSSQGGNSVLKRRREYDNTNDFSRGGSFPAISTIAESSSXGNKKNGEYSIRLRIQNRERESSGXEEPRRKYRGVRQRPWGKWAAEIRDPFKATRVWLGTFETAEDAARAYDQASLRFRGNKAKLNFPENVRLRQPSSQQEPPLNLNPPPPPNHGAILSIPSTTVHTEALQGSLGSSNFYEHSYSHLHEFPVSLYDQIAESTSTTMASHHLQFLPPASSSTMTMTSPQAPPSIYPTHPAAWSSGYSYNSSSSASG

SEQ ID NO: 5517 - protein, 221 aa, Glycine max
  unsure (1)..(221): unsure at all Xaa locations
SSSASPAPPQPPARKRERKTMYRGIRRRPWGKWAAEIRDPAKGARVWLGTFATAEAAARAYDRAARRIRGAKAKVNFPNDFXXAXGPAARVRRRRRRPRPRPRRRGAGDARHVRRRRQGRPPSRLRRRRRXGHGRLLPXPRVRAXRXXAXEMCXGRXLXXXPLXXXXRXXRXNXXXXFXXPXXVXXXEXXXSXWWGXLXXXXXFFSXXKKXXXPGXIFXRP

SEQ ID NO: 5518 - protein, 111 aa, Glycine max
  unsure (1)..(111): unsure at all Xaa locations
RKRKFLKRRHYRGVRQRPWGKWASEIRDPKKAARVWLGTFETAEAAALAYDEAALRFKGTKAKLNFPERVHXXSKEFGYLTNRPSLFHASATPLSDQHSHTATNNDAMXSF

SEQ ID NO: 5519 - protein, 222 aa, Glycine max
  unsure (1)..(222): unsure at all Xaa locations
MRKGRGGGASAXXAAAAVNGSVLKEPRYRGVRKRPWGRFAAEIRDPLKKARVWLGTFDSAEDAARAYDTAARNLRGSKAKTNFPLSPFCYPPPRILSSTLVSTTTKTTATTTTTTLTTXQRPTSSGMSSTVESFSGPRPPTTTTTTTTPFLTTTRRYPRTPPLVPEDCHSDCDSSSSVVDDSDDNIVSSSFRPPLPFDLNALPFDDDAAVVDDDLRCTALCL

SEQ ID NO: 5520 - protein, 203 aa, Glycine max
  unsure (1)..(203): unsure at all Xaa locations
MRKGRGGGASAXXAAAAVNGSVLKEPRYRGVRKRPWGRFAAEIRDPLKKARVWLGTFDSAEDAARAYDTAARNLRGSKAKTNFPLSPFCYPPPRILSSTLVSTTTKTTATTTTTTLTTXQRPTSSGMSSTVESFSGPRPPTTTTTTTRRYPRTPPLVPEDCHSDCDSSSSVVXXPPLPFDLNALPFDDAXXADDDLRRTALCL

SEQ ID NO: 5521 - protein, 145 aa, Glycine max
  unsure (1)..(145): unsure at all Xaa locations
NXXEXXIIKGVDHDPFHDCLSFDMIDNSRDPQEESHHQVIEEAMKTKKKSYIGVRRRPWGRFAAEIRDTTRKGIRVWLGTFDSAEEAALAYDQAAFSMXXSXAVLNFPVKXVKESLQEMNYSGCSRRCSPALELKERHNIRRKXX

SEQ ID NO: 5522 - protein, 346 aa, Glycine max
  unsure (1)..(346): unsure at all Xaa locations
MCGGAIISDFIPAAAIAGSRRLTADYLWPDLKKRKSDLDVDFEADFRDFKDDSDIDDDDDDHQVKPFAFAASSRLSTAAKSVAFQGRAEISANRKRKNQYRGIRQRPWGKWAAEIRDPRKGVRVWLGTFNTAEEAARAYDAEARRIRGKKAKVNFPEAXXGTSSVKRSKVNPXXENLKTVQPNLGHKFSAGNNHMDLVEQKPLVSQYANMASFPGSGNGLRSLPSSDDATLYFSSDQGSNSFDYAPEISSMLSAPLDCESHFVQNANQQQPNSQNVVSIEDDSAKTLSEELVDIESELNFQMPYLEGSWGDTSLESLLSGDTTQDGGNLMNLWCFDDIPSMAGGVF

SEQ ID NO: 5523 - protein, 221 aa, Glycine max
  unsure (1)..(221): unsure at all Xaa locations
MCGGAIISDFIGVKRGRNLAAQELWSELDPFSDLLGFDTTTTTTNQPPLPDKKVVSSCEKKKKKSVSAERRARKNVYRGIRQRPWGKWAAEIRDPHKGVRVWLGTFPTAEEAARAYDDAAKRIRGDKAKLNFPXPPLRHPPKNNAASALTPPPNKXSSSQSTTGSTGSPPSAAFHGGGDELDLKQLERFLGLDNMGAEWDNMXXDLWMLDDVVVPNRHLIY

SEQ ID NO: 5524 - protein, 104 aa, Glycine max
  unsure (1)..(104): unsure at all Xaa locations
XPAKNGARVWLGTFETAENAALAYDRAAYRMRGSRALLNFPLRINSGEPEPVRVTSKEASSSSSDSASSTKRRKKVVGSTGIEKGASGKSSGTQCTRGEQLLVN

SEQ ID NO: 5525 - protein, 352 aa, Glycine max
  unsure (1)..(352): unsure at all Xaa locations
XLEGTYHIYIYYMQQGEVTMQGGSLVSGYNRGDPELREIVSALTHVVSSGSGQRSTEWTQQSGFPMMSASSLSGHKRGREEEENSTSHIDATTTTKCSKTLQNGDFMVPSQGDSSSVTEEAPTSTTTTVTAVTENPPGGGERRRKYRGVRQRPWGKWAAEIRDPHKAARVWLGTFDTEEAAARAYDEAALRFRGNRAKLNFPENVRAVPPIQPFQATTRLTVSDSTTSQFRPLSATTCNTLRQSDFQQQQIQQQQQQQRQQQQRQRQQRQQQQQQQQQPSSLLQQLYYNAQFASLQSPSMLSSSPSFSSSFPLFSSQQIFQPPESRNPAGGVPXXFPTSTWSDTSSQPPPSG

SEQ ID NO: 5526 - protein, 345 aa, Glycine max
  unsure (1)..(345): unsure at all Xaa locations
PTRPPTRPQRSGSLVSGYNRGDPELREIVSALTHVVSSGSGQRSTEWTQQSGFPMMSASSLSGHKRGREEEENSTSHIDATTTTKCSKTXFRNIGDFMVPSQGDSSSVTEEAPTSTTTTVTTVTTAVTETGGGERRRKYRGVRQRPWGKWAAEIRDPHKAARVWLGTFDTEEAAARAYDEAALRFRGNRAKLNFPENVRAVPPIQPFQATTRLTVSDSTTSQFRPLSAVAPPFIQQPQNYLQYSQLLQSDFQQQQIQQQQQQQRQQQQQQQPSSLLQQLYYNAQFASLQSPSMLSSSPSFSSSFPLFSSQQIFQPPESRNPAGGVPXXFPTSTWSDTSSQPPPSG

SEQ ID NO: 5527 - protein, 228 aa, Glycine max
  unsure (1)..(228): unsure at all Xaa locations
MCGGAIISDFIGVKRGRNLAAQELWSELDPFSDFLGFDTTNSKNQPPLQKIKKKSVVGAEKKKSDSGRARKNVYRGIRQRPWGKWAAEIRDPHKGVRVWLGTFPTAEEAAQAYDDAAIRIRGDKAKLNFPXPPPFPPPPLXPPSKKQRCLSPDIITEESSSSSSHSTTGSTGXXSGGGNDELDLKQIEWFLGLENELPVSNNIGAEWDNMDDLWMLDDVVVPNRHLIY

SEQ ID NO: 5528 - protein, 189 aa, Glycine max
  unsure (1)..(189): unsure at all Xaa locations
MAPRDIKSNVVVAGGSNPTRKEIRYRGVRKRPWGRYAAEIRDPGKKTRVWLGTFDTAEEAARAYDAAAREFRGAKAKTNFPTHAELTXXAAARSPSQSSTLDSSSPPTPPLDLTLAAPLAAGGALVFPVARPVVFFDAFERAEVRASFDLPVAAFSDSDSSTVMDYERGSRRRXXLDLDLNVPPPPEVA

SEQ ID NO: 5529 - protein, 194 aa, Glycine max
  unsure (1)..(194): unsure at all Xaa locations
MAPRDSRATAFAGPGPGPSPAHKEIRYRGVRKRPWGRYAAEIRDPGKKTRVWLGTFDTAEEAARAYDTAAREFRGAKAKTNFPTPSELILNNNIRSPSQSSTLDSSSPPSXXPPPLDLTLTPLSVAVTVFPVARPVLFFDAFARADAMIAVSRREMCGFERPAADFRRNDSDSDYNRRVLLDLDLNVPPLPEVA

SEQ ID NO: 5530 - protein, 198 aa, Glycine max
  unsure (1)..(198): unsure at all Xaa locations
RTRGFYPDATDSSFDEEGFPLVRKRMKRYVNQIEIETAAEKVVRKRPAGEPCRRPAKLHSGKKFRGVRQRPWGKWAAEIRDPARRVRLWLGTYDTAEEAAMVYDNAAIRLRGPDALTNFLTPPQRESPSQATTVAVTERSLRLXATTPATTIASTXLSSPTSVLHFRSNSESDQKSEFFSLXQVLRECEGEGEFWPLG

SEQ ID NO: 5531 - protein, 185 aa, Glycine max
  unsure (1)..(185): unsure at all Xaa locations
XGSSVTACTLSHEVHFRGVRKRPWGRYAAEIRDPGKKTRVWLGTFDTAEDAARAYDVAARNFRGPKAKTNFPFLPDNNTNVNLNKKNNNVNREFTRRAAPAAMDRFPFLPIQQQILVTHPVAPMRPVYFLDRAHFMTQPFPLRFEPGPVQSDSDSSSVVVDCQPKRELNLDLNLAPXXMNINLFF

SEQ ID NO: 5532 - protein, 266 aa, Glycine max
  unsure (1)..(266): unsure at all Xaa locations
XRLREDDRRVRLREDDRRVRLREDDRRVRLREDDRRENKRNRESRLFPGLNREREMSAMVSALTHVVSGEVPITGDSSSSSSXGSSSSTSXDDTVIVTPTMPSSSSSSTYVVGTSSLKRSRENDTYTSSLFSHPPSSSPAMPTRAEYATREMGNSVYEYRTTTENATRDEGRRKYRGVRQRPWGKWAAEIRDPFKAARVWLGTFDTAEAAARAYDEAALRFRGNKAKLNFPENVTLRQPQFTEIMVLKPSQKKKKKQKKKKKKKKK

SEQ ID NO: 5533 - protein, 215 aa, Glycine max
  unsure (1)..(215): unsure at all Xaa locations
LSHFFLFISSFHHHHGQGEEERGXSRTRSQTTMXDELHFRGVRKRPWGRYAAEIRDPGKKTRVWLGTFDTAEDAARAYDAAARNFRGPKAKTNFPVPPDDNNNNNVNVNKNKTEREATRRSTSAAIDRFPFLPIQQQILMTHPVAAPMRPVFFLDRAHFMTQSFPLRFEPGPVQSDSDSSSVVVDCQPKRELNLDLNLAPXXMNINPFFYLFIFS

SEQ ID NO: 5534 - protein, 153 aa, Glycine max
  unsure (1)..(153): unsure at all Xaa locations
TDHASSYFNXSKNGERGGEEEVKYRGVRKRPWGKFGAEIRDPTKPTGRQWLGTFDTAEEAARAYDRAAIALRGALAILNFPHEFHFHLPFILSNSSTKGNGSSFDKEVIELEYLDDKVLEELLELEEKRRNNEDXDHWSTIHCFEIPGPFYFL

SEQ ID NO: 5535 - protein, 400 aa, Glycine max
MLKFCTPLLYNRFILYSISKGVLRRNHTREILGGSWQFKFGPKIVRKKTIVYIVFMSLLTVAHQRGSGEFMRFTESHGGGGGGDGDGEYGYGHDDGRGGGGGGSLGLNFNQVMQQGEVTTQGGTLVSGYNRGDPDLREMVSALTHVVVSSGSGQRSTEWIQQSGFPMMSASSLSCLSSFSSPSSSGASWVGHKRGREEEESSSSHNMIQQQQQSAPSVTAVATTVTETPPPPGGGERRRKYRGVRQRPWGKWAAEIRDPHKAARVWLGTFDTEEAAARAYDEAALRFRGNRAKLNFPENVRAVPPIQPFQATTRLTVSDSGSSDLINYLQYSQLLQSDFQQQHIQHQQQQQRHLQHHSHYSQPLLLSPCFPTNGLFPATGKPQSRWRRAGVSNVHMVGYQ

SEQ ID NO: 5536 - protein, 387 aa, Glycine max
MSLLTVAHQRGSGEFMRFTESHGGGGGGDGDGEYGYGHDDGRGGGGGGSLGLNFNQVMQQGEVTTQGGTLVSGYNRGDPDLREMVSALTHVVVSSGSGQRSTEWIQQSGFPMMSASSLSCLSSFSSPSSSGASWVGHKRGREEEESSSSHNMIQQQQQSAPSVTAVATTVTETPPPPGGGERRRKYRGVRQRPWGKWAAEIRDPHKAARVWLGTFDTEEAAARAYDEAALRFRGNRAKLNFPENVRAVPPIQPFQATTRLTVSDSGSSDLINYLQYSQLLQSDFQQQQIQQQSPSSLLQQLYYNAQLASLQSPSVLSSSPSFSSSVSPTPFPLFSTSAQFSSASFPMFSSQQMGYFQLPESCPPAGGVPEFPPSTWSGTSGQPPPSG

SEQ ID NO: 5537 - protein, 174 aa, Glycine max
  unsure (1)..(174): unsure at all Xaa locations
TKTDAFXLFFESLREMCGGAIISDFILLFDILRVFWENWLKNGSTTAKSVAFQVRAEKFANRKRKNQYRGIRQRPWGKWAAEIRDPRKGVRVWLGTFNTAEEAARAYDAEARRIRGKKAKVNFPEEAPXXTSVKRXKVNPQENLSHKFGAGNNHMDLVEQKPXVYQYANMASFX

SEQ ID NO: 5538 - protein, 334 aa, Glycine max
NILVFLSASPPPKVFPNVSIPPQHIHLLVHFSPIPSKFFSYSLNPTLHALQPTPSHNNLPSSLSHSNKNILNHSKNTLLGMSVHAKLKHHPMNLASPSSHFEDDPPCKTKTKTQRRLLRIIITDHDATDSDSSEQQQKTRRVNREITQINMQPEQNLKCKRPNKKPPPSSAEARRRNKFRGVRQRPWGRWAAEIRDPTRRKRLWLGTFDTAEEAATEYDRAAVKLKGPNAVTNFPLAPEATAQSPPLAADNLSSDGGASYSDLVASPTSVLAYDDSTPFDGFRYLDVDAFGFHIDAPLSLPEVNVNVALTCHHGKKQEEAFDEFDLDEFMTWPY

SEQ ID NO: 5539 - protein, 198 aa, Glycine max
  unsure (1)..(198): unsure at all Xaa locations
LLPSISXMANSLEVSALNRIKLHLLGELSPLPLTTSSQSSSICSQSSCSDSSATLDQIFSEFLYFPTSSSENHFSALEFEAKPEIIYLETPNPQLEFTSLTTQDSKKPQSSRKPSLQISLPKKTEWIQFGAEVTETVSQSNPNAEEKKHYRGVRQRPWGKFAAEIRDPNKRGSRVWLGTVDTGIEAAKAYDRAAFRLR

SEQ ID NO: 5540 - protein, 157 aa, Glycine max
  unsure (1)..(157): unsure at all Xaa locations
MCGGAIIADFIPRQRPRTLTASELWPKRSDSTSTSSSSRXVNIFFSFNINFPTNKTSSRDVTVKRQRKNLYRGIRQRPWGKWAAEIRDPRKGVRVWLGTFNTAEEAARAYDKEARKIRGKKAKVNFPNEDDPLPQKQPENENKKSIYHKFSSKKKKK

SEQ ID NO: 5541 - protein, 230 aa, Glycine max
  unsure (1)..(230): unsure at all Xaa locations
XDHASATCCTAAPLVVNANXXFSGFNREKEMSAMITALTRVVCGDYGGGGGDDVSNMASGSMPPSSTSLSHGGNSVLKRRREDXXNTSDFLRGGSFPAILTTAEGSSTIRRRRANTVYDYEXTEERRXKLEEEEEARRKYRGVRQRPWGKWAAEIRDPLKARRVWLGTFETAEDAARAYDQASLRFRGNKAKLNFPENVRLRPLTLRLFRVHVLQAIFMTTLIRMFMIYP

SEQ ID NO: 5542 - protein, 353 aa, Glycine max
  unsure (1)..(353): unsure at all Xaa locations
MAATMNFYNETSQQVQSGGELMEVLEPFMKTCPSSTPSILSSDSPSPSSYSPLLPPHPSFSTYTPSAYLLENQERIEGVEEQPSSLLGLNHLSTSQISQIQAQAXXAQNSLSLNFLGPKPVPMKXXVGGPAKPTKLYRGVRQRHWGKWVAEIRLPKNRTRLWLGTFDTAEEAALAYDKAAYRLRGDLARLNFPNLKGSCPGEEYKPMQAAVDAKLDAICANLAEMQKQGKNEKGARSGKKSKQGPNLEAKPEPEASGSGAAALSPESEGSADSSALSDLTFDVTEPQWEEHFNLQKFPSYEIDWDSLXRLFVFLFLCLVLWVINNLVIIRIALVAAAIEFLKIAVLLVGFGLC

SEQ ID NO: 5543 - protein, 396 aa, Glycine max
  unsure (1)..(396): unsure at all Xaa locations
MCGGAIISDFIPAGPXPAGLRRVXTADILWPSLRKRFSKSAXLDDDFEAGFREFKDDSEIEDVDDEDDEDEEELKKXKPFGFSXAPATSASKPLSRGSATVESKGQAEKCAKRKRKNQYRGIRQRPWGKWAAEIRDPRKGVRVWXLGTFSTAEEAARAYDAEAGRIRGKKAKVNFPXMSLQAPAASSKRLKVNPEAQPMKENLNTVKPKMNQMFNFGHNLEGYSIDQVEQKPLVNQYVNPAPFPGNGVQVSPVTPSADVTAYFSSEHSSNSFDYSDXFGWGEQGPXKTPEISSLLSAAPLEGAADQVQKTNNSAXXVVAAQDDSAKTLSEELADIESQLNFETPSFLDEAWADATLASFGGDATHDAAGNPMNLWSFDDLPSMAGVFXTPFISPFM

SEQ ID NO: 5544 - protein, 396 aa, Glycine max
  unsure (1)..(396): unsure at all Xaa locations
MCGGAIISDFIPAGPAGGAQRVXTADILWAXNLRKRFSKSLLARXFRGRXFREFEDDSEIEDVDDEDDEEEEDKPLSRGATTVKSVESKGQAXEKCAKRKRKNQYRGIRQRPWGKWAAEIRDPRKGXVRVWLGTFSTAXEEAARAYDAEARRIRGKKAKVNFPDEPXSGAASSKRLKANPEGSANEEXNLNSVKPKINQMFNFGDNLEGYYSPIDQVEQKPLVNQYXXNRAPFAGNGVQVSPVTPSADVTAYFSXSEHSSSSFDYSDLGWGEQVPKTPEISSMLSAAPLDGESQFVQGAADQNQKKNNLLDMGTVQDDSAKTLSEELADIESQLKFFETPSFLDEAWGXDAGIGXSLLSEDASQDAAGNPMNLWSFDDLPSMAGVFXTPSYPFLCK

SEQ ID NO: 5545 - protein, 253 aa, Glycine max
  unsure (1)..(253): unsure at all Xaa locations
EKVKGCNFFLTNLTTFCNVFSGSVWFSGSSWNSKKIPTLKMGRGGTAAAAVEIAEPGSRPVFFKEPRYRGVRKRPWGRFAAEIRDPLKKARVWLGTFDTAEEAARAYDTAARTLRGPKAKTNFPLXSAVLPPXDPFSDHRYFDGAGAGEDFQDHRRPTSSGMSSTVESFSGPRAAVPAKAPVIVNRRYPRTPPVVPEDCRSDCDSSSSVVDDGDGDNVASSFRREPLPFDLNVLPLDDADVATDDLFCTVLCL

SEQ ID NO: 5546 - protein, 264 aa, Glycine max
  unsure (1)..(264): unsure at all Xaa locations
HTPTFHVRTTTHEAPQPPIXPTSLKLKFXRRPTMQNRRKNKTTSQKLLRVILTDHDATDSDSSGDDEDPKNTKKTQXKVKRQITHITINPSSSLDPTRSTRPKKRPAVPRRRNKFRGVRQRPWGRWTAEIRDPTQRKRVWLGTFDTAEEAAAVYDEAAVKLKGPNAVTNFPLSAAGNTEHDTPPPETVFSGEGLSSPTSVLTYCDGDSTPFDGFRYGEVDAFGFEFDIDAPFSLTAVNLGVLSQRFGKEEFGEFDPNEFLTWPS

SEQ ID NO: 5547 - protein, 318 aa, Glycine max
  unsure (1)..(318): unsure at all Xaa locations
MCGGAIIADFIPRRGGRRLTASELWPNSFGKDGDFDFDSPTSPINNVPLSKCPHLXKASEQVENKPVKRQRKNLYRGIRQRPWGKWAAEIRDPRKGVRVWLGTFNTAEEAARAYDREARKIRGKKAKVNFPNEDDEYSIQARHPIPPLPFTPQTQNPPLYQQQTRWLSPAMKIQGXRRVQRVLIRQRSXMGSSQNGNGYLGVTAMEKNEKETEVIEAQEEKNKVQELSEELMAYENYMKFYRIPYYDGQSTAPPNNVQESLVGDLWSFDXRGIYQRMFFSCMCLFLRQCCESFCXLISLRFSRDGQKCKLGASVEMVS

SEQ ID NO: 5548 - protein, 225 aa, Glycine max
  unsure (1)..(225): unsure at all Xaa locations
MMNNPALLEIEGSRLFPGINREREMSAMVSALTHVVSGEVPTGDSSSVLHHQPHDDDAVTVKPNMPSTTPFSSTYVVATSSLKRSRQHDTYTPSFSHPPSSFPAMPTSAECSKSGMGNAVYEYRTRGTENXXKKEEGRRKYRGVRQRPWGKWAAEIRDPFKAARVWLGTFETVEAAARAYDEAALRFRGSKAKLNFPENVTLRQPQFTIPLPKKKKKKKTPNAVR

SEQ ID NO: 5549 - protein, 345 aa, Glycine max
  unsure (1)..(345): unsure at all Xaa locations
NLLHPFLSCRKLFKFFCQWVFXLTTCSSSFRKTQVELISIMAALMDFYSSRPSSTSLRSIQGRTNGSSXTXFMKSPSPNYFPSSPSLPNLYSNGLSSTQPTSLVGLNHLTPSQISQIQAQIXXIQAQQHQNHSNTLSFLGPKPIPMKXXAGMPPKPTKLYRGVRQRHWGKWVAEIRLPKNRTRLWLGTFDTAEEAALAYDKAAYKLRGDFARLNFPNLRHQGSSVGGDFGEYKPLHSAVDAKLQAICEGLAELQKQGKTEKPPRKSRSKLAEKVVSDKXXEQQLLXGGSCVLXSSEGSSPLSDLTFADVSEXXQWEGDSDNYNLQKYPSYEIDWDSLXSVLLCMV

SEQ ID NO: 5550 - protein, 183 aa, Glycine max
  unsure (1)..(183): unsure at all Xaa locations
MCGGAIIADFIPRQRPRTLTASELWPKRSDSTSTSSSSRXVNIFFSFNINFPTNKTSSRDVTVKRQRKNLYRGIRQRPWGKWAAEIRDPRKGVRVWLGTFNTAEEAARAYDKEARKIRGKKAKVNFPNEDDPHSXXCRNTDLARASTWSSVTISTKQGFSLLLTLMRIAGPTWLTPLRKPTTK

SEQ ID NO: 5551 - protein, 329 aa, Glycine max
  unsure (1)..(329): unsure at all Xaa locations
MAAMMDFYTSSTEFQFHSDPFRGELMEVLEPFMKSPFSTPSPSNSCFLSTSYSPSPNNYSXLPILKRDHPYPTPPKTYGFGQGQPTSLVGLNHLTPSQISQIQAQIXXIQNHSNTLSFLGPKPIPMKHXXGMPPKPTKLYRGVRQRHWGKWVAEIRLPKNRTRLWLGTFDTAEEAALAYDKAAYKLRGDFARLNFPNLRHQGSSVGGDFGEYKPLHSAVDAKLQAICXRALAELQKQGKTEKPPRKTRSKLASPXXENDNNNDNNSCKVEAASSSSEGSSPLSVLTFADVSEPQWEGDSDNFNLQKYPSYEIDWDSLXSRVFLVSYVVM

SEQ ID NO: 5552 - protein, 224 aa, Glycine max
  unsure (1)..(224): unsure at all Xaa locations
MRKGRGGGASAAAVDVNGSILKEPRYRGVRKRPWGRFAAEIRDPLKKARVWLGTFNSAEDAARAYDAAARTLRGPKAKTNFPPLSPFCYPHXXPPILSSTLVSTXQHHHHNNNNLNNPQRPTSSGMSSTVESFSGPRPPTTTTTTTTTTATPFLTATRRYPRTPPLVPEDCHSDCDSSSSVVDDGDDNIVSSSFRXXPLPFDLNALPFDDAAADDDLRRTALCL

SEQ ID NO: 5553 - protein, 296 aa, Glycine max
  unsure (1)..(296): unsure at all Xaa locations
GSRTSMSSPLNGSDSTCSCXMFRSSSLLSPHPNFYTHTPPPSYLLQSQQSLIGFEQPPSSLLGLNHLSPSQISQIQAQIEXXQQSQNQNPHSLNFLGPKPVPMKHXXGGPPKPTKLYRGVRQRHWGKWVAEIRLPKNRTRLWLGTFDTAEEAALAYDKAAYRLRGDFARLNFPSLKGSCPGEEYKPVHSAVDAKLDAICANLAEMQKQGKTEKGARSAKKSKQGPNQEAKPEPQASAESEGSADSSPLSDLTFDVTEPQWEHFNLQKFPSYEIDWDSLXTSSLFLCLVLWLIIIII

SEQ ID NO: 5554 - protein, 325 aa, Glycine max
  unsure (1)..(325): unsure at all Xaa locations
MAATMNFYNETSQQVQSGGELMEVLEPFMKSPSSTPSILSSDSPSPSPLNFPSSSLLSPHPNFYTHTPPPSYLLQSQQSLIGFEQPPSSLLGLNHLSPSQISQIQAQIEXXQQSQNQNPHSLNFLGPKPVPMKHXXGGPPKPTKLYRGVRQRHWGKWVAEIRLPKNRTRLWLGTFDTAEEAALAYDKAAYRLRGDFARLNFPSLKGSCPGEEYKPVHSAVDAKLDAICANLAEMQKQGKTEKGARSAKKSKQGPNQEAKPEPQASAESEGSADSSPLSDLTFDVTEPQWEHFNLQKFPSYEIDWDSLXTSSLFLCLVLWLIIIII

SEQ ID NO: 5555 - protein, 214 aa, Glycine max
  unsure (1)..(214): unsure at all Xaa locations
MRRGRATAAVVDPTAEQAKETRFRGVRKRPWGRFAAEIRDPWKKQRVWLGTFDSAEDAARAYDKAARSFRGPKAKTNFXXPSPARRTTTPRSRFRRSTRXHGLSTKFEPXXQVNRPTTSGMSSTVESFSGPRVPPSSSSSRKPLVVVNPIIPLDDDDDDCHSDCDSSSSVVDDQDCVLTSSFRQPLPFDLNLPPPDAAYDDDDDDDVPATALCL

SEQ ID NO: 5556 - protein, 240 aa, Glycine max
  unsure (1)..(240): unsure at all Xaa locations
XSARGSDSSSLLHQHHHHQQQHQQHQQQLLQYWSDALNLSPRGMLTRLGXXDGRPLFRLPTQPINTTKLYRGVRQRHWGKWVAEIRLPRNRTRLWLGTFDTAEDAAMAYDREAFKLRGENARLNFPELFLNKDKKEEQQQQEQEASSPSGDATVSDDQVHATTESSEGVSQEMVWGEMSAWFNAIPAAWGPGSPMWDDLDATIANHTFLFPIPINKNSMMLRDKNKTLDQVTCGRIRIEI

SEQ ID NO: 5557 - protein, 302 aa, Glycine max
  unsure (1)..(302): unsure at all Xaa locations
MCGGAIIADFIPRRGGRRLTASELWPNSXSPKTMTLTWITPTSLPNNPPXLKRSQPPKVSEQVENKPVKRQRKNLYRGIRQRPWGKWAAEIRDPRKGVRVWLGTFNTAEEAARAYDREARKIRGKKAKVNFPNEDDEYSIQARNPIPPLPFVHNTLPCTSNXYRCDLNNASPLMKIRGQRRVQRVLIRQRSSXGSVQNGNGYLGGTVMEKKEKETEVIEAEEEXXNKVLELSEELMAYENYMKFYQIPYYDGQSTTNNVQESLVGDLWSFDXRGIYQGCSFHACVLFLRQCCESFCFLPPFC

SEQ ID NO: 5558 - protein, 260 aa, Glycine max
  unsure (1)..(260): unsure at all Xaa locations
MSDTHQTFMSVQPPLNLXTTPLTHKPQAQILTATHHXQNRRKNQTSAXXKLLRVILTDHDATDSDSSGDDDDPKNPPKHKTPIPTPSSSSSIDPTRLTLPKKRPAVPRRRSKFRGVRQRPWGRWTAEIRDPNQRKRVWLGTFDTAEEAAAVYDDAALKLKGPNAVTNFPLSAAGKTEHDTAPPEAAFSGEGFSSPTSVLTYFDGDSTPLYGFRYGEVDAFGFDIDAPFSLTDVNLGVLSQRFGKEDFREVDPDELLTWPS

SEQ ID NO: 5559 - protein, 195 aa, Glycine max
  unsure (1)..(195): unsure at all Xaa locations
LSHPFSLFPLSPTPSLHRFPYYSFQRQCYPQXSNNMTAPPSKYTHHSKLLIPSEEDPPKHPYPRLVRITVTDTEATDSSSDEEQHTSTRHRHRKFVNEISIESSCASENDGAASRKRIRRRSTATPKGRASDTRLVSNGKKFRGVRQRPWGKWAAEIRDPSRRVRLWLGTYDTAEEAALVYDNAAIRLRGPHALT

SEQ ID NO: 5560 - protein, 151 aa, Glycine max
  unsure (1)..(151): unsure at all Xaa locations
ATTEFPSRAQPPKPVSDFSDPGPDRGPTEPKPEPTLSXNFLGPKPVPMKHVGGPPKPTKLYRGVRQRHWGKWVAEIRLPKNRTRLWLGTFDTAEEAALAYDKXAYRLRGDFARLNFPSLKGSCPGXXEYKXCASRXDAKLDAICAHLAEMX

SEQ ID NO: 5561 - protein, 223 aa, Glycine max
  unsure (1)..(223): unsure at all Xaa locations
MAPRDHKTSNAKANGNGNSGVKEVHFRGVRKRPXWGRYAAEIRDPGKXKSRVWLGTFDTAEEAARAYDAXAAREFRGPXKAKTNFPLPLENVKNSSPSQSSTVESSSRDRDVAADSSPLDLNLAPAAVASARFPFQHQFPVFTGAVPAANQVLYFDAVLRAGMAGPRGFAFGYNHHPVAASEFQSDSDSSSVIDLNHNEGEVKGNGSRIFDLDLNHPPPHEIA

SEQ ID NO: 5562 - protein, 138 aa, Glycine max
  unsure (1)..(138): unsure at all Xaa locations
XTRPPDERSKHVWRSNHRRFHTSAASPHPHSLRTLAQAQRTSTSTSSSSSXKRQRKNLYRGIRQRPWGKWAAEIRDPRKGVRVWLGTFNTAEEAARAYDKEARKIRGKKAKVNFPNEDDPQNRKQPENDIIKAIXXKK

SEQ ID NO: 5563 - protein, 135 aa, Glycine max
  unsure (1)..(135): unsure at all Xaa locations
MAPREATALIGPGPSLSPAHKEIRYRGVRKRPWGRYAAEIRDPGKKTRVWLGTFDTAEEAARAYDTAAREFRGAKAKTNFPTPSELILNNNNINARSPSQTSTLDSSSPPPDSYSEYLMVVSAISQNIXNIPISI

SEQ ID NO: 5564 - protein, 246 aa, Glycine max
  unsure (1)..(246): unsure at all Xaa locations
MKEEAPLATWISHIPAKFNGHEDIKNGKEKNQSNSIFPVSDIKNSSIPLNLLETLPPLTIAPCFDDPVASLASSSARNHVPPKFPNLTLFLPEPSMVYSSISSSNINPSYHVSQFGQNQHQAGSGDAHKMNNNLTNSRSKSFNENWLSATRTQPLKYGGRXXKLFKGVRQRHWGKWVAEIRLPTNRTRVWLGTFDSAEDAAIAYDTAAYILRGEYAQLNFPELSMXFKQILXKATTAALVEAKYKQ

SEQ ID NO: 5565 - protein, 307 aa, Glycine max
  unsure (1)..(307): unsure at all Xaa locations
RNHGGNARHKVTAXNPRPRGSNIGSSLSKLILASGSGTNTLDSIFSNCPQTTNGSTSSNSVLDXFRTHSVPGCEPLGSSVYLRQRDILQKFYQESRGNGSYNVPTSSLSNSLTNPCKKKLYRGVRQRHWGKWVAEIRLPQNRMRVWLGTYDTAEAAAYAYDRAAYKLRGEYARLNFPNLKDPTKLGFGDSARLNALKSSVDAKIQAICQKVKRERAKKSEKPSSSSSPSPSPSPSPSPSIFNDNWANQLFSPAVSEDGFWKGENSHSPASVLTECQTEETELLXXEGCSLARLPSFDPELIWEVLTV

SEQ ID NO: 5566 - protein, 126 aa, Glycine max
  unsure (1)..(126): unsure at all Xaa locations
PVKVKNSGSVKKFRGVRQRPWGKWAAEIRDPVQRVRIWLGTFETAEEAALCYDNAAIMLRGPDALTNFGIRSKETLEKEERKELDEKEEIRTEKPEMKSCFYDSADEFCLNLSSPTSVLRFNESGX

SEQ ID NO: 5567 - protein, 218 aa, Glycine max
  unsure (1)..(218): unsure at all Xaa locations
MSSSSSSFFPAHITTDQEFSLIVAALTNVVSGSTSSSSVPEFRFPHSSPPLSSASLMPPPPPSIHTCRECNIAGCLGCNFFPERLEQRKKYRGVRQRPSGKWAAEIRDRHRSARVWLGTFETAEDAARAYDKASFELRGPRAKLNFPLVDESLTLQPEMAATXXSRLTTRIISIKAWEWTRTNSGTGXNEADFHPFMMMMDFTGDSSDSAATGYTLSS

SEQ ID NO: 5568 - protein, 216 aa, Glycine max
  unsure (1)..(216): unsure at all Xaa locations
MRRGRTAAAAAAVVDPTPDQAKETTRFRGVRKRPWGRFAAEIRDPWKKQRVWLGTFDSAEDAARAYDKAARSFRGPKAKTNFXXPSPARQRXDHHSQIPLYQAHGLSTKFEPVVQVNRPTSSGMSSTVESFSGPRVPSSSSRAKPLVVVVNPIIPLNDDEDDCHSDCDSSSSVVDDGQDCVLISSFRQPLPFDLNLPPSDADDDNDDDLPATALCL

SEQ ID NO: 5569 - protein, 109 aa, Glycine max
  unsure (1)..(109): unsure at all Xaa locations
MCGGAVIADFVPAGAXXARMAPPPTSPAPSSPVGRXKEKPLAPGRKTAYRGIRRRPWGRWAAEIRDPTKGARVWLGTYATAEEAARAYDVAARDIRGPKAKLNFPPXXX

SEQ ID NO: 5570 - protein, 280 aa, Glycine max
  unsure (1)..(280): unsure at all Xaa locations
MTTFMDMYNTTSSIMTPDFLDQCSDQELMKALEPFMTSTPNHASSIKLNQLTPSQMFQIQARIQVPRGQXXLSPKPIPMKHVRASPSSKPTKLYRGVRQRHWGKWVAEIRLPKNRTRLWLGTFDTAEEAALAYDNAAFKLRGENARLNFPHLRHHGGAYGEFGNYKPLPSAVDAKLQAICQSLGTNSQKLKTQNPIVLDTHKAETETSEFQDFNKVENSFSDEYSSSSSSSSPESDITLLDFSDSSMDNLGLDLEKYPSVEIDWAALSXLMNNQWLTGIV

SEQ ID NO: 5571 - protein, 213 aa, Glycine max
  unsure (1)..(213): unsure at all Xaa locations
XLIPSPNLFITIFILNSGNSSKPTKLYRGVRQRHWGKWVAEIRLPKNRTRLWLGTFDTAEEAALAYDNAAFKLRGENARLNFPHLRHHGARAYGEFGNYKPLPSAVDAKLQAICQSLANSQKLKTQNPIVLDTHKAETETSEFQDFNKVENYQTSSSSAFSDEYSSSSSSSSPESDITLLDFSDSCXKQWXNLGLDLEKYPSVEIDWAALSDS

SEQ ID NO: 5572 - protein, 324 aa, Glycine max
  unsure (1)..(324): unsure at all Xaa locations
MTTFMDMYNTTSSIMTPDFLDQCSDQELMKALEPFMKSDSSSTTSSSITTYPSFXXSFSSSPNLSSTTWSTQFCSSSYHQKGPTPTQASSFKLNQLTPSQIFQIQTQIQVPRAQVLSPKPITMKHVRASPSSKPTKLYRGVRQRHWGKWVAEIRLPKNRTRLWLGTFDTAEEAALAYDNAAFKLRGENARLNFPHLRHHGARAYGEFGNYKPLPSAVDAKLQAICQSLANSQKLKTQNPIVLDTHKAETETSEFQDFNKVENYQTSSSSAFSDEYSSSSSSSSPESDITLLDFSDSCXKQWXNLGLDLEKYPSVEIDWAALSDS

SEQ ID NO: 5573 - protein, 120 aa, Glycine max
  unsure (1)..(120): unsure at all Xaa locations
MKPYTSSPSSSKSKKKPTTTQQDHETAWGGRYLGVRRRPWGRYAAEIRDPSTKERHWLGTFDTAEEAALAYDKAARSMRGSRARTNFIYPDTPPGSSVTSILSPDEXNPNPNPPGPRRAX

SEQ ID NO: 5574 - protein, 185 aa, Glycine max
  unsure (1)..(185): unsure at all Xaa locations
MAPRDINRSNVVVVAGVSNPTHKEIRYRGVRKRPWGRYAAEIRDPGKKTRVWLGTFDTAEEAARAYDTAAREFRGTKAKTNFPTHAAVARSPSQSSXRWTPRLRRRWTLLLPPHSPPRARXVFPVARPVVFFDAFARAEVRASXRSSRGGVQRLGLVLGRGLRXRVPHRKVLDLDLNVPPPPEVA

SEQ ID NO: 5575 - protein, 311 aa, Glycine max
  unsure (1)..(311): unsure at all Xaa locations
MGTAIDMYNSSNIVADFLDPYSEELMKALKPFTLESQPCSFSSNSLPTSYPSSNQIKLNQLTPDQIVQIQAQIHIQQQQQHVAPHLGPKRVPMKHAGTAAKPTKLYRGVRQRHWGKWVAEIRLPKNRTRLWLGTFDTAEEAALAYDNAAFKLRGEFARLNFPHLRHHGAFVFGEFGDYKPLPSSVDSKLQAICESLAKQEDAELAEVESDVAKSNAEYVYPEFGILRSSTRTXMFSGESSSPESSVTFLDFSDFSDSNNQWDEMENFGLEKFPSVEIDWEAIXXLGEFSLCQMVGLVLLCFWVLVCTYYVL

SEQ ID NO: 5576 - protein, 182 aa, Glycine max
  unsure (1)..(182): unsure at all Xaa locations
XGVRKRPWGRFAAEIRDPLKKARVWLGTFDTAEEAARAYDTAARTLRGPKAKTNFPLSPPFYHPDPFSDHRHFANTGEDFHDHRRPTSSGMSSTVESFSGPRAAVPATAPVATGRRYPRTPPVIPEDCRSDCDSSSSVVDDGEGDNVASSFPREPLPFDLNALPLDDADVATDDLFCTVLCL

SEQ ID NO: 5577 - protein, 108 aa, Glycine max
  unsure (1)..(108): unsure at all Xaa locations
MAPRDSRATAFAGPGPGPSPAHKEIRYRGVRKRPWGRYAAEIRDPGKKTRVWLGTFDTAEEAARAYDTAAREFRGAKAKTNFPTPSELILNNNIRSPSQSSTIXAKCE

SEQ ID NO: 5578 - protein, 116 aa, Glycine max
  unsure (1)..(116): unsure at all Xaa locations
PSQTPTQPTPPATKRLENKPTFPRATDTESSSTRFLSPELQTLGAXQKFRGVRQRPLGKWSAEIRDPSQRGVRLWLGTYNTAEEAALVYDNAAIKLRGPHALTNFITPPITDYSRR

SEQ ID NO: 5579 - protein, 92 aa, Glycine max
  unsure (1)..(92): unsure at all Xaa locations
XLEFSSMPVHALPFSKDSPPPKPKEAHFRGVRKRPWGRFAAEIRDPWKKTRKWLGTFDTAEEAARAYDAAARTLRGPKAKTNFSYKYVQLHX

SEQ ID NO: 5580 - protein, 371 aa, Glycine max
  unsure (1)..(371): unsure at all Xaa locations
PATCFVDPHFFFFSGSLPPKATKTIFVSYIAGKRDQFFSVTFFQYIGFLVDKILQKSWRECETETHSLNSKTKSTNIGSSLSKLILTSGTNTLDSIFSNXXPTTTNGSTRSNSVLDYLEPFGSLGYEPLGSSVYLRQRDILQKFYQESRGNGSYNVPTSSLSNSLTNPCKKKLYRGVRQRHWGKWVAEIRLPQNRMRVWLGTYDTAEAAAYAYDRAAYKLRGEYARLNFPNLKDPTKLGFGDSARLNALKSSVDAKIQAICQKVKRERAKKNAAKKLHNSTDPKRGQSEKPSSSSSPSPSPSPSIFNDNWANQLFSPAVSEDGFWKGENSHSPASVLTECQTEETELLFEGCSLARLPSFDPELIWEVLTV

SEQ ID NO: 5581 - protein, 266 aa, Glycine max
  unsure (1)..(266): unsure at all Xaa locations
XDPRVRTAARRRQKGKRTSAVNKRALREDXXGGGGGGGAMRYRGVRRRPWGRYAAEIRDPQSKERRWLGTFDTAEEAACAYDCAARAMRGLKARTNFVYPTSPQPSSPSKPFFSQHASLSXPYSLXXPSLLSSSSTQNFHXXPVLQQEYXSTFSSLPVSPSLAPPSYSMNNSCGGSLSVKMNTFPTCGTNFAENDDGDGFFSRESSDSGLLEEIVNKFLRRSRGLERSLVNARLLLQILRRSRFFSLRLFLNQRLFPPGNNTMMMT

SEQ ID NO: 5582 - protein, 330 aa, Glycine max
  unsure (1)..(330): unsure at all Xaa locations
RNHGGNARHKVTAXNPRPRGSNIGSSLSKLILASGSGTNTLDSIFSNXXPQTTNGSTSSNSVLDDLEPFRSSGCESLGSSVYLRQRDILQKFYQESRGXXGNNNGSYNIPRSLANTSINSVCRSSSLSCYSLTKPCKKKLYRGVRQRHWGKWVAEIRLPQNRMRVWLGTYDTGEAAAYAYDRAAYKLRGEYARLNFPNLKDPTKLGFGDSARMNALKSSVDGKIPALCQKVKKERAXKKNATKKKLHDSSGSTDPNGGQKINSSSCSSSSLSQPLSPPSIFYDNWANDLFSPASVSTECQSMETEELXXEGCSLARLPSFDPELIWEVLA

SEQ ID NO: 5583 - protein, 202 aa, Glycine max
  unsure (1)..(202): unsure at all Xaa locations
FKCYFSIFFFFLDGEGQLACTCXVKNHNKGDGSKSLADTLAKWKEYNAWLDNNEAEKPARKVPAKGSKKGCMKGKGGPENSRCNYRGVRQRTWGKWVAEIREPNRGSRLWLGTFPTAISAALAYDEAARAMYGSCARLNFPNVQVSTLSEESSRNSPAAANRSRNSPAASQSGHALMILESSECMILPNNSCGDATQDDDMX

SEQ ID NO: 5584 - protein, 254 aa, Glycine max
  unsure (1)..(254): unsure at all Xaa locations
HASGNLSLSLSFFPFFTFSFILISISISLHQPTPPFPLSFHAIMASSSIKHTHHLNRTKLFMKEETLLKKKHHYPKIIRIRVTDADATDSSSDDDEPSMSSTRRRVKNFVNEITIQGGGGGGGDVNVVSKKRRFKSGAXSSVMSAEDXXGRKKFRGXVRQRPWGKWAAEIRDPSRRVRLWXLGTYDTAEEAAIVYDNAAIQLRGADALTNFITPPPEXTEKPVTAPAXESRNNDDLRSPTSAISISNKAANSIX

SEQ ID NO: 5585 - protein, 236 aa, Glycine max
  unsure (1)..(236): unsure at all Xaa locations
GSSGSSSSRIGSRAELPSSEASSSASTRKHSHSVYRGVRMRAWGKWVSEIREPRKKNRIWLGTFATAEMAARAHDVAALAIKGNSAILNFPELASSLPRPDSNSPRDVQAAAAKAAAMEVNDAPTTPTSSSSASLSQSSSWSSLAVSSSSGEDPSTPEELGEIVELPSLGTSFXXIPDPSGELVFFDPWPYSQAWSHGIYDESESYFFGDQISMQDSETESMVLCGFAFEASLWQH

SEQ ID NO: 5586 - protein, 145 aa, Glycine max
  unsure (1)..(145): unsure at all Xaa locations
MCGGAIISDFIXXFLRLLISSGFFGXELAKKWLYDPCLCYDVIFIFSXXFNGSECLCSYCDFYTFXNYIKGSTTAKSVAFQVRAEKFANRKRKNQYRGIRQRPWGKWAAEIRDPRKGVRVWLGTFNTAEEAARAYDAEARKIRGX

SEQ ID NO: 5587 - protein, 94 aa, Glycine max
  unsure (1)..(94): unsure at all Xaa locations
NKCESHIKHHRSDNANRRLRFRSLRXKPWGRFAAEIRDPWKKQRVWLGTFDSAEDAARAYDKASRRLTLPKAKTNFPPFPGPAEADHHSQIPFX

SEQ ID NO: 5588 - protein, 285 aa, Glycine max
  unsure (1)..(285): unsure at all Xaa locations
XHASGRKCKGKGXGPDNNKFRYRGVRQRSWGKWVAEIREPRKRTRKWLGTFATAEDAARAYDRAAIILYGSRAQLNLQPSGSSSQSSSSRSSSSSTQTLRPLLPRPSGFTFNFPFNSAPYPIDNSKNHNINTVQVHHPHHYPRVREVVQVPHSESDLGGLGGNNNIVVDGSINQPRTSGMVLDNINNNNNHVHVQVQHGVFSNQQQQHQNSVVEGVNSSVVGSVSSSMDASSVDPDLALVGTMGLGSSSPFWSMANEDDYTGSLWDYNDPFFFDLXRNLSIKLLG

SEQ ID NO: 5589 - protein, 320 aa, Glycine max
  unsure (1)..(320): unsure at all Xaa locations
PRVRQPQPQETKPTATTTTETTPSETSNSNTNNKISSRKCKGTRPPDNNKFRYRGVRQRSWGKWVAEIREPRKRTRKWLGTFATAEDAARAYDRAAIILYGSRAQLNLQPSGSSSQSSSSRSSSSSTQTLRPLLPRPSGFSVNFPFNTATVPYPYNNSHNYTYSPPVLCPNDNHNNNIVQVHHPHHHRCPEELVQVQVAHTLSTSYQHNSESDVGLGVNNNVQVQHGVLSNQQQQQHQNGVVVEGVNNSPVVGSVASAMDASSVDPDLALVGTVGLGSSSPFWSMANEDDYTGSLWDYNDPFFFDLXRNLIFILVHGELG

SEQ ID NO: 5590 - protein, 282 aa, Glycine max
  unsure (1)..(282): unsure at all Xaa locations
XHASGRKCKGKGXGPDNNKFRYRGVRQRSWGKWVAEIREPRKRTRKWLGTFATAEDAARAYDRAAIILYGSRAQLNLQPSGSSSQSSSSRSSSSSTQTLRPLLPRPSGFTFNFPFNSAPATTVPYPYNNSHNYTYTPPVLYPIDNSKNHNINTVQVHHPHHYRCPEEVVQVPHSESDLGGLGGNNNIAVHVQVQHGVFSNQQQQHQNSVVEGVNSSVVGSVSSSMDASSVDPDLALVGTVGLGSSSPFWSMANEDDYTGSLWDYNDPFFFDLXRNLSLKLLD

SEQ ID NO: 5591 - protein, 232 aa, Glycine max
  unsure (1)..(232): unsure at all Xaa locations
KNPSLFSLSLSLLVTPLVCYKYLSIVCAMLKSGMGIQERKKVKKPAQASSRKGSARGKGGPENATCTYKGVRQRTWGKWVAEIREPNRGARLWLGTFDTAREAALAYDAAARKLYGPDAKLNLPELSVPYAAGVMNPXSHATTATATATTSGSPNDXCNNNSLSCTLPLTLSIFWGPTMDDTMPVSDESIWTEAAMSLDYPIVGGGGGFVTTENLFGEATAWXSLQTPSFCM

SEQ ID NO: 5592 - protein, 391 aa, Glycine max
  unsure (1)..(391): unsure at all Xaa locations
VLRCTVLRSLCIRFVDMGAYDQVSLKPLDSSRKRKSRSRGDGSKSVAETIAKWKEYNEHLYSGKDDSRTTRKAPAKGSKKGCMKGKGGPQNSQCNYRGVRQRTWGKWVGEIREPNRGSRLWLGTFSSAQEAALAYDEAARAMYGPCARLNFPSMAASSSCSSAATAASDTTTTTSNQSEVCAVEDVIEKPANVNDKFNDCHKAYVSASPTSRMKQEPKXXEAVDHMDTGAGEIQDVGLEGTHDTGQVAENVNKDQMDLSWIDGFDFIDDYLKSFSADELFQVDELLGLIDNNPIDNSVLMQGLDFGQMGFPGDGNHDTPSSFIYQLQNPDAKLLGSLPHMEQTPSGVDYGLDFLKTVEPGDYNGGGEEPPFLNLDDDLNHDSNGMQARKGG

SEQ ID NO: 5593 - protein, 56 aa, Glycine max
KEIHAKRGNGRKRHYRGVRQRPWGKWAAEIRDPKKAARVWLGTFDTAEAAAAAYDA

SEQ ID NO: 5594 - protein, 99 aa, Glycine max
  unsure (1)..(99): unsure at all Xaa locations
MANEKNHLDNTNMMPCNADEAHLRGVQKRPWGRYADEIRDPGKKTRVWLGTFDTDEDASRAYDVTVRNFRGPRVKTNFPLLPDNNINVNLNXXKSNNVY

SEQ ID NO: 5595 - protein, 217 aa, Glycine max
MVQSKKFRGVRQRHWGSWVSEIRHPLLKRRVWLGTFETAEEAARAYDQAAILMSGRNAKTNFPITQTPEGDPKSTTSEDTPSTTSKDLEEILHAKLRKCGKVPSPSMTCLRLDPENSHIGVWQKRAGRRSDSNWVMTVQLGKKSVNVNNNDTHHQSPSLAVTGNLHHQEVVRGEIDEEERIALQMIEELLNDRNCPSPSFNNNIQERDGADHDHFFL

SEQ ID NO: 5596 - protein, 165 aa, Glycine max
  unsure (1)..(165): unsure at all Xaa locations
MCGGAIIADFIPRRGGRRLAASELWPNSFAIGDAFDLDSPTSLPNNPPLSKGRQPPKGXNKPVKRQSKNLFRGIRQRPWGKWAAEIRDPREGVSVWLGTFNTAEECREXAYDREARKHLRAKKAKVNFPNEADEYSIQARNPIPPLPFAPQHPPLYQQQYRCDLN

SEQ ID NO: 5597 - protein, 374 aa, Glycine max
  unsure (1)..(374): unsure at all Xaa locations
MGAYDQVSLKPLDSSRKRKSRSRGYGTRSVAETIAKWKEYNEHLYSGKDDSRTTPKAPAKGSKKGCMKGKGGPQNSQCNYRGVRQRTWGKWVGEIREPNRGSRLWLGTFSSAQEAALAYDEAARAMYGPCARLNFPGITDSSSCCSSAETATSDTTTTSNQSEVCAAEDVKEESSTCQCEXXKVNDCHKAYVSASPTSRMKQEPKDEAVDHMDTGAGEIQDVGPEGTHDTGQVAENVNKDQMDLSSFSTDELFQVDELLGLIDNNPIDDSVLMQTQVDDTPSSFIYQLQNPDAKLLGSLPHMEQTPSGFDYGLDFLKTVEPGDYNGGGEEPRFLNLDDDXEPXFKGHASKEGXLEKATCISLSSASFSTGSSIC

SEQ ID NO: 5598 - protein, 170 aa, Glycine max
  unsure (1)..(170): unsure at all Xaa locations
FVDMGAYDQVSLKPLDSSRKRKSRSRDGTRSVAETIAKWKEYNEHLYSGKDDSRTTPKAPAKGSKKGCMKGKGGPQNSQCNYRGVRQRTWGKWVGEIREPNRGSRLWLGTFSSAQEAALAYDEAARAMYGPCARLNFPGITAASSSCSSAETATSDTTTTSNQSEVCAGX

SEQ ID NO: 5599 - protein, 392 aa, Glycine max
  unsure (1)..(392): unsure at all Xaa locations
VLRCTVLRSLCIRFVDMGAYDQVSLKPLDSSRKRKSRSRDGTRSVAETIAKWKEYNEHLYSGKDDSRTTPKAPAKGSKKGCMKGKGGPQNSQCNYRGVRQRTWGKWVGEIREPNRGSRLWLGTFSSAQEAALAYDEAARAMYGPCARLNFPGITAASSSCSSAETATSDTTTTSNQSEVCAAEDVKENPRLVNVNDKVNDCHKAYEAASPTSRMKQEPKDEAVDHMVPGAGKILDVRPEGTHDAGQVAEDVNKDQMDLPWIXXGFDFSDNYLNRFSTDELFQVDELLGLIDNNPIDESALMQSLDFGQMGFPGDGNHDTLSSFIYQLQNPDAKLLGSLPHMEQTPSGFDYGLDFLKTVESGDYNGGGEEPRFLNLDDDLNPDSKGMQARKDD

SEQ ID NO: 5600 - protein, 169 aa, Glycine max
  unsure (1)..(169): unsure at all Xaa locations
AKWKEYNEHLYSGKDDSRTTPKAPAKGSKKGCMKGKGGPQNSQCNYRGVRQRTWGKWVGEIREPNRGSRLWLGTFSSAQEAALAYDEAARAMYGPCARLNFPGITDYASFKESLKESPMAASSSCSSAETATSDTTTTSXTSRMKQEPKDEAVDHMVPGAGKILDVRPX

SEQ ID NO: 5601 - protein, 229 aa, Glycine max
  unsure (1)..(229): unsure at all Xaa locations
LVVGVCWKSTSLFSSSSSPPLPNQRCAPQHICTKAFNFSAXPFRFLLAKTHNKGDGSKSLAKILAKWKEYNAQIDSSSDADKPVRKVPAKGSKKGCMKGKGGPENSRCNYRGVRQRTWGKWVAEIREPNRGNRLWLGTFPTAIGAALAYDEAARAMYGSCARLNFPNVSVSSFSEESSKDSPSANHCGSSMAVSANESMISPSNSGVDAEDDGAALSSQLXLPQSYFSX

SEQ ID NO: 5602 - protein, 186 aa, Glycine max
NLRIMEQELQRNSVHDDEAATTTSSGDKPATPRGGGTRHPLFRGVRKRRWGKWVSEIREPRKKSRIWLGSFPAPEMAAKAYDVAAYCLKGRKAQLNFPDEVHRLPLLPSSCTARDIQAAAAKAAHMMMVQAASADSPEKSSGGDDFWGEIELPELLNGKWWASDRHVTPWPETELPPQLPFTTACL

SEQ ID NO: 5603 - protein, 203 aa, Glycine max
  unsure (1)..(203): unsure at all Xaa locations
MLKSGMGIEERKQVKKPAQASSRKGCMRGKGGPENASCTYKGVRQRTWGKWVAEIREPNRGARLWLGTFETSHEAALAYDAAARKLYGSDAKLNLPELSIKSQSQCPPPPSSVSNNTQIPQMENLQQQIQNNYMDMATCSNNFNNTSWGTMNEGLPVFDDSIWAEAAMSLDFPQIAAGLRFIHRVTTXADVGVWDSLQTPWCM

SEQ ID NO: 5604 - protein, 132 aa, Glycine max
  unsure (1)..(132): unsure at all Xaa locations
MVQSRKFRGVRQRHWGSWVAEIRHPLLKRRVWLGTFETAEEAARAYDEAASLMSGRNAKTNFPVGENXNSGKSXSSNTSSSSTTTLSAVLSAKLRKCGKSPSPSLTCLRLDTENSHIGVWQKRAGPRSDSNW

SEQ ID NO: 5605 - protein, 241 aa, Glycine max
  unsure (1)..(241): unsure at all Xaa locations
MAELPSSEASSSSASSRKHSSSEAHLPAPDQKRPKQARDSSSKHPVYRGVRMRAWGKWVSEIREPRKKNRIWLGTFATAEMAARAHDVAALAIKGNSAILNFPELAASLPRPDSNSPRDVQAAAAKAAAMEVNDVPTTPSSSSSSASLSLSQSSSWSSLAVSSSSGASTPEELGEIVELPSLGTSFXXIPDPSGELVYLDPWPYSQAWSHGIYDESEGYFIGDSETESMILCGFEGSLWQH

SEQ ID NO: 5606 - protein, 280 aa, Glycine max
  unsure (1)..(280): unsure at all Xaa locations
VAPNIKYCSLTKKKNRMAELPSSEASSSSASSRKHSSSKRPKQARDSSSKHPVYRGVRMRAWGKWVSEIREPRKKNRIWLGTFATAEMAARAHDVAALAIKGNSAILNFPELAASLPRPDSNSPRDVQAAAAKAAAMEVNDVPTTPSSSSSSTPVSLSQSSSWPSLGTSFEIPDPSGELVFFDPWPYSQAWSPGIYDESESGELVYLDPWPYSQAWSMVICGFGEGYFIGDHEXCGHDTLWLRGFIVAALKRWLSLFFFFWVIDFPIMWGPFPIFGFKVS

SEQ ID NO: 5607 - protein, 207 aa, Glycine max
  unsure (1)..(207): unsure at all Xaa locations
LVVGVCWKSTSLFSSSSSPPLPNQRCAPQHICTKAFNFSAXPFRQMLAKTHNKGDGSKSLAKILAKWKEYNAQIDSSSDADKPVRKVPAKGSKKGCMKGKGGPENSRCNYRGVRQRTWGKWVAEIREPNRGNRLWLGTFPTAIGAALAYDEAARAMYGSCARLNFPNVSVSSFSEESSKDSPVANHCGSSMAVLSIFVCKRVHDFTK

SEQ ID NO: 5608 - protein, 233 aa, Glycine max
  unsure (1)..(233): unsure at all Xaa locations
MVMEESNPLDNEVQPTTSSSSFTITTPSTSSSSSIEEATNTTTKEKKKKRAISNIEGKHPTYRGVRMRQWGKWVSEIREPRKKSRIWLGTFPTPDMAARAHDVAALTIKGSSAYLNFPELAAKLPRPASTSPKDIQAAAAKASALDFGHQSHEAESELSQAVSSSIQTQSSSSSSNSSLKGVDDTFLDLPDLSLDLSHGADEFHYSSAXXLVAGAEHIELGFRLEEPFLWESY

SEQ ID NO: 5609 - protein, 198 aa, Glycine max
RKHGVPNSLHSFFMDQETTRRNTMQESYRGVRQRKWGKWVSEIREPGKKSRIWLGSYESPEMAAAAYDVAALHLRGRAARLNFPELVETLPRPTSSKPEDVQVAAQQAAVMFRISPTMSPINNHQGCVRVGLSPTQIQAINESPLDSPKMWMVQMAEALSFDDHSMMMLPSDDDDYALELSGWEEIQHESLWDSPEYM

SEQ ID NO: 5610 - protein, 263 aa, Glycine max
  unsure (1)..(263): unsure at all Xaa locations
TLISCRCLLEELISVFFVIFPNQRCAPQQILTKAFNXXPTPFQMLAKAHNKXXDGSKSLAKILAKWKEYNAQIDSSSDADKPIRKVPAKGSKKGCMKGKGGPENSRCNYRGVRQRTWGKWVAEIREPNRGNRLWLGTFPTAIGAALAYDEAAXRAMYGSCARLNFPNVSVSSFSEESSKDSPSANHCGSSMAHVVSANESMISPSNSGVDAEEDVDMEPISLSLSVKHENGEGESGDKFIPSFFLMMYIGTWLNFLAHVLVNG

SEQ ID NO: 5611 - protein, 289 aa, Glycine max
  unsure (1)..(289): unsure at all Xaa locations
MDTCKKSPLKPWKKGPTRGKGGPQNASCEYRGVRQRTWGKWVAEIREPKKRTRLWLGSFATAEEAAMAYDEAARRLYGPDAYLNLPHLQPRSXXSTITSGKFKWFPSKNFISMFPSCGLLNVNAQPSVHLIHQRLQELKRNSVVSQSSSSSSNDPKAEIQNVXTAKITEKMKXSSKRCSNIIRGGAWRSXQEKPQIDLHEFLQQMGILKEERQSERTDSSEFNSAXSWTDDCDHLGVFSDKSVNWEALIEMHGLAGIQESEVTQLEAYEPNDDLTFSTSIWNFXXKLSI

SEQ ID NO: 5612 - protein, 201 aa, Glycine max
  unsure (1)..(201): unsure at all Xaa locations
LTVPLLIGPSPPNPNWVSQSFQIECKNRNFFLKCLLGRSSFYPDYEDFGRQKNHNKGDGSKSLADTLAKWKEYNAWLDNNEAEKPVRKVPAKGSKKGCMKGKGGPENLRCNYRGVRQRTWGKWVAEIREPNRGSRLWLGTFPTAISAALAYDEAAMAMYGFCARLNFPNVQVSTFSEEPSRNSPAAAYQSDGXTSTIAYEX

SEQ ID NO: 5613 - protein, 124 aa, Glycine max
  unsure (1)..(124): unsure at all Xaa locations
YDYYEEKREAKAAAPTTREXPYRGIRMRKWGKWVAEIREPNKRSRIWLGSYATPVAAARAYDTAVFHLRGPSARLNFPELLXPGRRRFDRKMSADSIRKKATQVGARVDALQTALQNSTDPVYV

SEQ ID NO: 5614 - protein, 136 aa, Glycine max
  unsure (1)..(136): unsure at all Xaa locations
ARAQQRLVTAGCVVAVKCAMRERINHSRGIRQCSWGKWAAEIRDPXKGVRVRLGTFNSAEEAARAYDAAAGRFLGKRANVNLTDEPVGAAVYERLKENAEAESMKENLNTVKPNMNQMLNSGHNXXQGYYSPVDHV

SEQ ID NO: 5615 - protein, 130 aa, Glycine max
  unsure (1)..(130): unsure at all Xaa locations
YDYYEEKREAKAAAPTTREXPYRGIRMRKWGKWVAEIREPNKRSRIWLGSYATPVAAARAYDTAVFHLRGPSARLNFPELLXPGRRRFDRKMSADSIRKKATQVGARVDALQTALQQSKYTDTPENXDEA

SEQ ID NO: 5616 - protein, 218 aa, Glycine max
MVQTRKFRGVRQRHWGSWVSEIRHPFLKRRVWLGTFETAEEAARAYDQAAILMSGRNAKTNFPILQTPEGDPKTTLTPIDHETSSSSTTTSKELEEILHAKLRKCGKLPSPSMTCLRLDPENSHIGVWQKRAGQRSDSNWVMMVPPLGKKGGANEGGTGGDASCSNSFPFSECDPTPQVARQELLRTEMDEEERIALQMIEELLSRNCPTSPSFNNLY

SEQ ID NO: 5617 - protein, 235 aa, Glycine max
  unsure (1)..(235): unsure at all Xaa locations
KSKIQWEPQRYSVEDSGVHKPPSTRLKPKLLIXALLMCSISEKAKRKRQSAFRGVRKRSWGRYVSEIRLPGQKTRIWLGSFGSPEMAARAYDSAAFFLKGTSATLNFPDLVHSLPRPLSSSRRDIQSAAAEAALHSPPPKEEQESIFTSTTTSSFHDVMEAPLMSPLXGWTPLSEISHGTNSSISTMTFSSWDQLLPLLSLNAAFAIRHPLLLETSWIFFHFLLITLLCFSKTCF

SEQ ID NO: 5618 - protein, 191 aa, Glycine max
  unsure (1)..(191): unsure at all Xaa locations
NLRIMEQELQRNSVHDDEAATTTSSGDKPATRGGGTRHPLFRGVRKRRWGKWVSEIREPRKKSRIWLGSFPAPEMAAKAYDVAAYCLKGRKAQLNFPDEVHRLPLLPSACTARDIQAAAAKAAHMMIVHSSITSDCGGGGGGDDFWGEIELPELLNAKWWASDHDVTPWPESELXAPAALHHGVLVVCNNQ

SEQ ID NO: 5619 - protein, 171 aa, Glycine max
  unsure (1)..(171): unsure at all Xaa locations
PASAHASAHAXRPRVRREDDRRGGKWAAEIRDPFKAARVWLGTFDTAEAAARAYDEAALRFRGNKAKLNFPENVTLRQPQFTVSNPPSSLVSITTSIDPVVHSTRPLLLPSQASTATNVYEYFQLSGFPTNTNLYDGNRMFVTSNAMASHHLQSSSSLLASSSSAFGSSVX

SEQ ID NO: 5620 - protein, 75 aa, Glycine max
  unsure (1)..(75): unsure at all Xaa locations
RPXXGXXAAEIRDPNRKGSRVWLGTFDTAIXAXKAYDXXAFKMXGSKAILNFXLEIGSXQXKXEXSSSSSSVSSX

SEQ ID NO: 5621 - protein, 197 aa, Glycine max
  unsure (1)..(197): unsure at all Xaa locations
YVHXNLRIMEQELQRNSVHDDEAATTTSSGDKPATPRGGGTRHPLFRGVRKRRWGKWVSEIREPRKKSRIWLGSFPAPEMAAKAYDVAAYCLKGRKAQLNFPDEVHRLPLLPSACTARDIQAAAAKAAHMMIVQAASTSDCGDGGGGDDFWGEIELPELLNAKWWASDHDVTPWPESELXAPAALHHGVLVVVCNNQ

SEQ ID NO: 5622 - protein, 175 aa, Glycine max
MARPQQRYRGVRQRHWGSWVSEIRHPILKTRIWLGTFETAEDAARAYDEAARLMCGARARTNFPFNPNVSPSSSSKLLSATLTAKLHRCYMASLQVTRQALASESQRTPPSVQNATTSTTTQESEANRGVKRVKAVENVPLQFKPLEEDHIEQMIEELLDYGSIELCSVISPQAL

SEQ ID NO: 5623 - protein, 210 aa, Glycine max
  unsure (1)..(210): unsure at all Xaa locations
MARSQQRYRGVRQRHWGSWVSEIRHPILKTRIWLGTFETAEDAARAYDEAARLMCGARARTNFPFNPNVSHSSSSKLLSATLTAKLHRCYMASLQMTRQALASESQRMAPPNATTSTTSNNFMKSNQXXHAVLLPHKRQEEEQEAEANWVFKKVKVENXXQQFKPLEEDHIEQMIEELLDYGSIELCSVISPQALXLNVHVFELNLKSQL

SEQ ID NO: 5624 - protein, 194 aa, Glycine max
MARSQQRYRGVRQRHWGSWVSEIRHPILKTRIWLGTFETAEDAARAYDEAARLMCGTRARTNFPYNPNASQSSSSKLLSATLTAKLHRCYMASLQMTRPSSQPETQRVVASPNVITSSASNFSLKRNQTETMLLPQKRQEEEQEGEGNWVFKKVKVENAQQFKPLEEDHIEQMIEELLHYGSIELCSVIPAQAL

SEQ ID NO: 5625 - protein, 186 aa, Glycine max
  unsure (1)..(186): unsure at all Xaa locations
MVQTKKFRGVRQRQWGSWVSEIRHPLLKRRVWLGTFETAEAAARAYDQAAILMNGQNAKTNFPTSKNQAEADDNNNTDTFLSPKALSELLSTKLRKYCKDPAPSLTCLRLDADNSHIGVWQKGAGPHSGSNWVMRLELGXXKQITEEGSESTESPQSSTNGATENNEVEEEDRVALQMIEELLNWN

SEQ ID NO: 5626 - protein, 149 aa, Glycine max
  unsure (1)..(149): unsure at all Xaa locations
MVEPAVAASSELSDSTRNTNTNTPSPSSSSSLSPSPSPSSSSSKKRARDNNNSRNNSNKHSVYRGVRMRTWGKWVSEIREPRKKNRIWLGTFATAEMAARAHDVAALTIKGSSAILNFPELAASLPRXSVCNSPRDVHAAVVXKTVSWE

SEQ ID NO: 5627 - protein, 99 aa, Glycine max
  unsure (1)..(99): unsure at all Xaa locations
DHASREEREGFNFSVLPSPPNQGIGRKRHFIGVRQRPWXLWAAEFRDPKKAAXVWLGSFDTAXAAAAASXAAAXKFIGSXANLNFPEHVLVPPPPFXPS

SEQ ID NO: 5628 - protein, 211 aa, Glycine max
  unsure (1)..(211): unsure at all Xaa locations
MSESFFSLWSIRVNXTMRVSTEKLETEPESKKIKRIRGGGGGDSSNKHPLYRGVRMRNWGKWVSEIREPRKKSRIWLGTFPTPEMAARAHDVAALSIKGSAAILNFPHFANSLPRPASLAPRDVQAAAAKAAHMDPSSLSSLVSAMDLSSASDELSQIIELPSLESTDDGSVVLEKEFVFVDSLDAWMYQPPFGFDTEQDTGFXXGLMWNY

SEQ ID NO: 5629 - protein, 194 aa, Glycine max
  unsure (1)..(194): unsure at all Xaa locations
VGLCGSRYTVNGPSTSTVXXAAASATDNPRGGTRHPMYRGVRKRRWGKWVSEIREPRKKNRIWLGSFPVPEMAARAYDVAAYCLKGRKAQLNFPDDVDSLPLPSSRTARDIQTAAAQAARMMKASGNDEKSGIASDDGDSGCDDFWGEIELPELMDGECCWGCPAGASSWTSSGDLAEWPEEDSPQQPSFMACL

SEQ ID NO: 5630 - protein, 211 aa, Glycine max
  unsure (1)..(211): unsure at all Xaa locations
MARPQQRYRGVRQRHWGSWVSEIRHPLLKTRIWLGTFETAEDAARAYDEAARLMCGPKARTNFPYNPNEPLSSSSKLLSATLTAKLHKCHMASLSLQMSKQKQSQTEPHQGSSSDSGNAIAGTSSDNTGFRWPEEEAQVEVPPAQQQQFQPVLQDDHIEQMIQELLDYGSMELSFVDSAXALYYKLTMQTPFQGEGFYYLLMRHVIKYSEL

SEQ ID NO: 5631 - protein, 170 aa, Glycine max
  unsure (1)..(170): unsure at all Xaa locations
MEGEEGGIATKKRGKEGXXTETTRYKGIRMRKWGKWVAEIREPNKRSRIWLGSYSTPVAAARAYDTAVFHLRGPSARLNFPELVAAEGPAADMSAASIRKKATEVGARVDALHRQHPHALPAGEFADRVDLNKMPEPENSDCDYWDRDXECCLVVNLEFFKNKYKIITLF

SEQ ID NO: 5632 - protein, 101 aa, Glycine max
  unsure (1)..(101): unsure at all Xaa locations
NYTAQVSKTKPMENLSPLIYKNPIRRTSRRSTMYLGVRKRPWGRYAAEIRNPYTKERHWLGTFDTAEEAAIAYDLSSIKICGINARTNFHYPFVIFNYLYX

SEQ ID NO: 5633 - protein, 233 aa, Glycine max
  unsure (1)..(233): unsure at all Xaa locations
MEGEGRRREGGERETATAAATRKVVEGADQRRYKGIRMRKWGKWVAEIREPNKRSRIWLGSYSTPVAAARAYDTAVFYLRGPSARLNFPELLIGEGAAALTGGCDMSAASIRKKASEVGARVDALQATLHXTITTMLCHHGSFSLPAVAXGSGDFAVRVVDLNKMPEPESSDCEWNVNXRKKKKGACFHIQVMVVVNVRRLRQNDVVDEACGGGGGGAEYCTVSFFPSTFSLG

SEQ ID NO: 5634 - protein, 256 aa, Glycine max
  unsure (1)..(256): unsure at all Xaa locations
QGPCPGPLQTQNTFTILNFTHLQITMTQQATTSSETTTSSSSSSSSSSSTFSPSQHSGPKAQAQKQSKRPRDCSKHPVYHGVRKRNWGKWVSEIREPRKKSRIWLGTFATPEMAARAHDVAALTIKGQSAILNFPEIADLLPRPVTCSPRDIQTAATAAASMVKFDPVTQSSDSETPESSVSEIVELPNIEDSSVDSTPEFSQIFQXVLVDVVDSWVFPPMGMGSEGIEFCAAFSDELFPQQSFIGSEIEILPIWD

SEQ ID NO: 5635 - protein, 189 aa, Glycine max
  unsure (1)..(189): unsure at all Xaa locations
MRSSNGASSSRASNANTGRHPVYRGVRRRSSGKWVSEIREPKKPNRIWLGTFATPEMAAIAYDVAALALKGKDAELNFPNSASSLPVPTSSAARDIQMAAASAAAAVGAANDALEGSRGGNASVSLTEEFSGGNLNHFVDEDLIFDMPNILVNMAEGMLLSPPRFDNFAATDYXXYMDEDPNLWGFPNY

SEQ ID NO: 5636 - protein, 217 aa, Glycine max
  unsure (1)..(217): unsure at all Xaa locations
MARPQQRYRGVRQRHWGSWVSEICHPLLKTRIWLGTFETAEDAARAYDEAARLMCGSKARTNFPYNPNEPHSSSSKLLSATLTAKLHKCHMASLSLQMAKPTTEQRASTITWVIQSICLSMSLLDQALTPVFDGQIXRHEEFRWLEXGIGLXVEGQVEVSHQQFQPVLEDDHIEQMIQELLDYGSIELCSVGLTXTLKYNSIQGFKKRSATVFSAAT

SEQ ID NO: 5637 - protein, 186 aa, Glycine max
MAKPSSEKPEEHSDSKYYKGVRKRKWGKWVSEIRLPNSRQRIWLGSYDTPEKAARAFDAAMFCLRGRNAKFNFPDNPPDIAGGTSMTPSQIQIAAAQFANAGPHEGHSGRPEHPPMESPSPSVSVNGSVTDLFTPVGSSGYASDYGIFPGFDDFSGDFYVPEMPNVNYGEENGEGFIVDESFLWNF

SEQ ID NO: 5638 - protein, 177 aa, Glycine max
  unsure (1)..(177): unsure at all Xaa locations
FKLIQPWKTGITVVPTIQRXSQQQRKERXRRSPTSDKLKNHTARRKPYRGIRMRKWGKWVAEIREPNKRSRIWLGSYTTPVAAARAYDTAVFYLRGPTARLNFPELLFQDDDQEGSDSVQHGAAGNMSADSIRRKATQVGARVDALQTALHHHAPSTNSLNLKPDLNEFPKLEELQD

SEQ ID NO: 5639 - protein, 159 aa, Glycine max
  unsure (1)..(159): unsure at all Xaa locations
FFVPSSLLKPPLPPTPSSPHFHSFFSLSLCHCHSFSHSHIKPKNFLFLKTMVEPPAAAATSESDTTGNTNTPSPSSSSSSSSSKKRARDNNNNSNSSSNKHSVYRGVRMRTWGKWVSEIREPRKKNRIWLGTFATAEMAARAHDVAALTIKGSSAILNX

SEQ ID NO: 5640 - protein, 242 aa, Glycine max
  unsure (1)..(242): unsure at all Xaa locations
MNVKVLATFKPRRPKEKKLTAIEFHFTSLACQMKTTSSQNLVGIXLPRFHNTNNNDSTETEPETKKIKRIRGGGDSSKHPLYRGVRMRNWGKWVSEIREPRKKSRIWLGTFPTPEMAARAHDVAALSIKGPAAILNFPHLANSLPRPASLAPRDVQAAAAKAAHMDPSSLSSLVSAMDLSSASDELSQIIELPSLESTDDGSVDLKKEFVFVDSLDAWMYQPPFGFDTEQDTGFXXGLMWNY

SEQ ID NO: 5641 - protein, 236 aa, Glycine max
  unsure (1)..(236): unsure at all Xaa locations
PRVRPRVRKEKKLTAIEFHFTSLACQMKTTSSQNLVGIXLPRFHNTNNNDSTETEPETKKIKRIRGGGDSSKHPLYRGVRMRNWGKWVSEIREPRKKSRIWLGTFPTPEMAARAHDVAALSIKGPAAILNFPHLANSLPRPASLAPRDVQAAAAKAAHMDPSSLSSLVSAMDLSSASDELSQIIELPSLESTDDGSVDLKKEFVFVDSLDAWMYQPPFGFDTEQDTGFXXGLMWNY

SEQ ID NO: 5642 - protein, 219 aa, Glycine max
  unsure (1)..(219): unsure at all Xaa locations
IRLEPLLTQNTMTQQTTTSSSSHSGPRAQAQKQSKRPRDCSKHPVYHGVRKRNWGKWVSEIREPRKKSRIWLGTFSTPEMAARAHDVAALTIKGQSAILNFPEIADLLPRPVTCSPRDIQTAATAAASMVKFDPVTQSSDSETXXESSELSEIVELPNIEDSSVDSTPEFVLVDVVDSWVFPPMGMGSEGIEFCAAFSDELFPQQSFIGSEIEILPIWD

SEQ ID NO: 5643 - protein, 191 aa, Glycine max
  unsure (1)..(191): unsure at all Xaa locations
MVKSKSVEKPAEEQQRGGVSAYRGVRKRKWGKYVSEIRLPNSRQRIWLGSYDSAEKAARAFDAAMFCLRGSGANFNFPSDRPNIAGGRNMTPSQIQIAAARFANSEPRKECSGQPVESLTSDEETASLVTGSFPDMFSDFGSGDFVPDFSDFPSFDDFSRDFXSCMNFRVSISEKRTWMDXXFRXSFLWNF

SEQ ID NO: 5644 - protein, 190 aa, Glycine max
MVKSKSVEKPAEEQQRGGVSAYRGVRKRKWGKYVSEIRLPNSRQRIWLGSYDSAEKAARAFDAAMFCLRGSGANFNFPSDRPNIAGGRNMTPSQIQIAAARFANSARKECSGKPVESLTSIEETTSFPVNSEFPGIFSGFGSGNFVPEFSDFPSFDDFGHDFFVHELPGFDYGEENLDGLIIQDSFLWNF

SEQ ID NO: 5645 - protein, 167 aa, Glycine max
  unsure (1)..(167): unsure at all Xaa locations
EIVVPRIRRLXRKSDKRKQQHQQQEKPYRGIRMRKWGKWVAEIREPNKRSRIWLGSYATPVAAARAYDTAVFHLRGPSARLNFPELLSQDDDVSTQQQGNMSADSIRKKATQVGARVDALQTALQPSSSHSANSTDKPDLNEYPKPEDXYFLPPSRLILIHQSRVLM

SEQ ID NO: 5646 - protein, 189 aa, Glycine max
  unsure (1)..(189): unsure at all Xaa locations
MRSSNGTSSSRASNGNTGRHPVYRGVRRRSSGKWVSEIREPKKPNRIWLGTFATPEMAAIAYDVAALALKGKDAELNFPNSASSLPIPASSAAHDIQMAAALAATAVGAANDALEGSQGGNVSVSLAEEFSGGNLNHFVDEDLIFDMPNILVNMAEGMLLSPPRFDNFAATDYXXYMDEDPTLWGFPNY

SEQ ID NO: 5647 - protein, 157 aa, Glycine max
  unsure (1)..(157): unsure at all Xaa locations
MRKRINMESDADFNSFATSSSSTTPSIFFDTNTSSTSSSSTSPTSNSESCTKEHSKTXXQNDSTTSQTSLENGKDSKGCKKRQIDNSNQNHHPTYRGVRMRNWGKWVSEIREPRKKSRIWLGTYPTAEMAARAHDVAALAIKGHSAYLNFPELAQEX

SEQ ID NO: 5648 - protein, 158 aa, Glycine max
  unsure (1)..(158): unsure at all Xaa locations
KNKIVSLLSNDYKKMTSSNRSSSPTSSSSDQSDVTTTTSTHLSEXXSPRNNKRKRSKDSSSSSSSSSSKLKHPVYRGVRMRSWGKWVSEIRQPRKKTRIWLGTFATADMAARAHDVAALAIKGSSAVINXXPELASILPRPASSSPHDIQAAAAEAAX

SEQ ID NO: 5649 - protein, 153 aa, Glycine max
  unsure (1)..(153): unsure at all Xaa locations
REREREREREREMESEGRREGGERETTAATRKVEGAERRYKGIRMRKWGKWVAEIREPNKRSRIWLGSYSTPVAAARAYDTAVFYLRGPSARLNFPELLVXXEGPAALVAGCDMSAASIRKKATEVGARVDALQATLHHHYNSHRRASNPLMX

SEQ ID NO: 5650 - protein, 158 aa, Glycine max
  unsure (1)..(158): unsure at all Xaa locations
IRLEDETSCSTCEECKEPGXRFVGVRQRPSGRWVAEIKDTIQKIRVWLGTFDTAEEAARAYDEAACLLRGTNTRTNFWPCSQSSTSPALSSKITNLLLQRLKERNNNNTCSSSSSSSTSLLINHQQTTMTSSTTVHKLTTLLVALNHAYNIEFKVFLK

SEQ ID NO: 5651 - protein, 221 aa, Glycine max
  unsure (1)..(221): unsure at all Xaa locations
XKRVLGKTPTVKRRKYKGVRMRKWGKWAAEIRDPFKGARIWLGTFSTAEEASQAYNARRLEFEAIKALSDEKSNNGSNSSSNNNVVASAETVAATENNSSNYCVSSAAGSVSDSKSASMDESESVLSLTSPSSVLELDTSAFNLIGSGKVSSNEVDSEYGFHDEHDFDDDLAALEDFRGFDDNEPSELPDYDFDDFGADEFAGWIEEPLNIPCVXXDFAAS

SEQ ID NO: 5652 - protein, 106 aa, Glycine max
  unsure (1)..(106): unsure at all Xaa locations
XHISCGPDPPNPIXRSLRSKPKSRWPSSIRITASRTRLWLGTFDTAEEAALAYDKAAYKLRGDFARLNFPNLRHQGSSVGGDFGEYKPLHSAVDAKLQAICEGLAE

SEQ ID NO: 5653 - protein, 245 aa, Glycine max
  unsure (1)..(245): unsure at all Xaa locations
MCLGLQETNGSSTILNFTHLQITMTQQATTSSETTTSSSSSSSSSSSTFSPSQHSGPKAQAQKQSKRPRDCSKHPVYHGVRKRNWGKWVSEIREPRKKSRIWLGTFATPEMAARAHDVAALTIKGESAILNFPEIADLLPRPVTCAPRDIQAAATAAASMVKFDPVTQSSDSETXXESSELSEIVELPNIEDSSFDSVDSRPEFVLVDVVDGWVFPPMXEWGQRESRSVPLFLMSCFRNRVLLMR

SEQ ID NO: 5654 - protein, 188 aa, Glycine max
  unsure (1)..(188): unsure at all Xaa locations
MMVKPSSEKPEEHRDSKYYKGVRKRKWGKWVSEIRLPNSRQRIWLGSFDTPEKAARAFDAAMFCLRGRNAKFNFPDNPPDIAGGESMTPSQIQVAAAQFANAGPHEGHSGRPEHSPMQSLSPSVSVNGSLTDLFTPVGSSGYASDYGIFPGVDDFSXXGFYVPEMLNFNYGEENGEGFIVDESFLWNF

SEQ ID NO: 5655 - protein, 180 aa, Glycine max
MENNNHHAMAAGASSDSNTSDHTTPISSSCVNDNNNNKLYKGVRKRKWGKWVSEIRLPNSRERIWLGSYDSPEKAARAFDAALYCLRGRHAKFNFPNTPCNMDTAKSLTPPEIQEVAAKFANQVSPLLQKPQEQPQPQRSSDGGGGGANSSSFGSKLLCKSDSIAEMYPFSFPYFSVKLN

SEQ ID NO: 5656 - protein, 280 aa, Glycine max
  unsure (1)..(280): unsure at all Xaa locations
YIFIIISPTHTILFNKTCDGNSIPTTKPAASEIRHCNHQRWQVQREKQKQXNTNKFAGVRQRPSGRWVAEIKDTTQKIRMWLGTFETAEEAARAYDEAACLLRGSNTRTNFITHVSLDSPLASRIRNLLNNRKGIKXXEEDANANANNAPAPRVSTTSSATSTGTSTTVTTQSSNLFDDAYKPDLSNCREEFESGHQSNTSWCFGPVFDRFPMAQIFDIPKIDDGLTNAADLDLSEFEIERQISASLYAINGVQEYMETVQDSNETLWDLPPLCSLFCXS

SEQ ID NO: 5657 - protein, 126 aa, Glycine max
  unsure (1)..(126): unsure at all Xaa locations
MGTAIGMYSNNNIVPDFLDPYSEELMKALMPFMKSDSSSSSSSRESHPSPLIPSNSLPSSNHHLGPKRVPMKHAGTAAKAAKLYRGVRQRHWGKWVAEIRLPXNRTRLWLGTFDTAEEATLAYDNA

SEQ ID NO: 5658 - protein, 273 aa, Glycine max
  unsure (1)..(273): unsure at all Xaa locations
FGSSGSSSSRFGSREYQNQRAKEGRFCEKLKIKNRPKFVGVRQRASGKWAAEIKDTSKKIRLWLGTYQTAEEAARAYDEAACLLRGSNTRTNFSTHVATNSPISLKLRNLLDRKAMSNQSQSQIQRQSSMISSTFQGADTSASPNVSAIKTTKSVIXPVWTRYEYDQLFNGYXTPNTSQFDYSWPLAQQRINELPISKDDFEARDHLQSHXHLSIIRXDXCVKSNVYALYISLHSSTNVLSAYDIFNPTPYGWIIRXKRILRCILLFCVIYHL

SEQ ID NO: 5659 - protein, 346 aa, Glycine max
  unsure (1)..(346): unsure at all Xaa locations
GVFGGFFFLFFFTTMSEFRKQPASRPKQKLPSPLPQESKAMRKLRIICDDPDATDSSEDETEKVQSPRRVKRNVSEISLPPLPLTTTPETSSCEVNSGKNGRVSLKVNPRVRRGKFRGVRQRKWGKWAAEIRDPFQSTRIWLGTFNTAEEASQAYEARRLEFEAMAEAQAYKTSSVSEPLATISDNKSNCCNSSAAAISAAAVSAADVSVSEKFSTTFDDLEESVLSHNSPSSVLELXYIGFQIPXEGXWIEPNFGLDFDWLSFNDYGQGFDDFGGLEDIRGFDDNEPTELPDFDFGDFGADEFAGWIEEPLNIPCAXXSFAELRRNMRLDFYNIISFVIYKLVFL

SEQ ID NO: 5660 - protein, 352 aa, Glycine max
  unsure (1)..(352): unsure at all Xaa locations
FHLVSFLGILRGFWRVFLSHFFSTMPESRKQPASRPKQKLHHHSLQESKAMRKLRIICDDPDATDSSEDETEKVQSPRRVKRNVSEISLPPLPLTTTPETSSCEVNSGKNGRVSLKVNPRVRRGKFRGVRQRKWGKWAAEIRDPFQSTRIWLGTFNTAEEASQAYEARRLEFEAMAEGSVSEPLATISDNKSNCCNSSAAAISAAAVSAAACVCIXEANDLVAELAGLEVPDVSLLNXVTTTIXFXVVQLLLFHLGXEPNFGLDFDWLSFNDYGQGFDDFGGLEDIRGFDDNEPTELPDFDFGDFGADEFAGWIEEPLNIPCAXXGFAELRRNMRLDFYNIISFVIYKLVFL

SEQ ID NO: 5661 - protein, 146 aa, Glycine max
  unsure (1)..(146): unsure at all Xaa locations
XHLXLRTHRPTDTTXPSCTPAHIGAQWTLCPLNRSKECQGTAKKHPVYHGVRKKNWGQGXSEIREPHXKKARIWLGTLSTPKMAVRAHDEAALTIKGQTTILNFPKTAHQIPRPVTCSPRDIQTAHTAVASMVKIDTVTQYSDSET

SEQ ID NO: 5662 - protein, 327 aa, Glycine max
  unsure (1)..(327): unsure at all Xaa locations
TIFLGILRGFDPIFFTMVEPLNQSTPRTKKMKHKRNPIHDSKMTRKLRIICNDPDATDSSSDEDEYLNVRKMIEPLEPLERLEVPVNPVVADETSTESTNNDELNQTKRVMAKTPSVKRRKYKGVRMRKWGKWAAEIRDPFKGTRIWLGTFSTAEEASQAYETRRLEFEVMAKALSDEKSNNGSSNNNVVASAETETVAAPENNSSNYYVSSAAGSVSDSKSASMDESESVLSLTSPSSVLELDTSAFNLIGSGKVSSNEVDSEYGFHDEHDFDDDLAALEDFRGFDDNEPSELPDYDFDDFGADEFAGWIEEPLNIPCVXXDFAAS

SEQ ID NO: 5663 - protein, 163 aa, Glycine max
  unsure (1)..(163): unsure at all Xaa locations
FDSFPHFQNINKVERENQKKKTTTQQKELEIRTQXSKPXPSSKAMRLSSPSSSTSDCKKKKYKGVRMRSWGSWVSEIRAPNQKTRIWLGSYSTPEAAARAYDAALLCLKGSSANLNFPLSSSQQYIPXXDAVMSPKSIQRVAAAAAYSFIDNATTPPSPPSAS

SEQ ID NO: 5664 - protein, 231 aa, Glycine max
  unsure (1)..(231): unsure at all Xaa locations
LPLLHTLSHSLKQLQRTKLFTKXHVFHQYFSDPDATSPGSGGSSRPALSDEDFFLAASNPKKRAGRKKFRETRHPVYRGVRRRDSGKWVCEVREPNKKSRIWLGTFPTAEMAARAHDVAAIALRGRSACLNFADSASRLPVPATAEARDIQKAAAEAAEAFRPGKDDDAVAERVAATATEREEEQEEGXXVPEYLRNMVLMSPTHCFGSDEYGSADVEFDDAEVSLWSYSI

SEQ ID NO: 5665 - protein, 219 aa, Glycine max
  unsure (1)..(219): unsure at all Xaa locations
MQXSARKRRAGRKKFHETRHPVYKGVRQRNGKWVSELRQPNNKNARVWLGTFAHPDMAAIAYDVAALAFKGDSASLNFPNAATSFPRPRTCSVRAIQFAATQAAEKHFSCVESQQLQREGSGSGSFSLDDDSSEFSSQGRFFWDEEEVFNMPELLNCMAEALIITPPALERGFNWVGGETTVDLTLWXNXXPLRFSANQRGTCNFDLLQNIIYTNSLKM

SEQ ID NO: 5666 - protein, 164 aa, Lupinus polyphyllus
MARPQQRYRGFRQRHWGSWVSEIRHSILKTRIWQGTFESAEDAARAYDEAARLMCGTRARTNFPYNPNASQSSSSKLLSATLIAKLHRCYMASLQMTRPSSLPEAPRIIASPNNAVKGIGADAMLLPKKREQEEQETGGNLDFKKVKVECSQQFKPLEEDHIAQ

SEQ ID NO: 5667 - protein, 153 aa, Narcissus pseudonarcissus
MCGGAIISDFIPPSRSRKLTADYLWPNLNKGKDKKKSFGFEDDFEADFNEFEDESEEGESEAVDVKPFKFGAKAGFSREGSTYLKPIELNGAAERSSKRKRKNQYRGIRQRPWGKWAAEIRDPNKGVRVWLGTFNTAEEAARAYDDEARRIRG

SEQ ID NO: 5668 - protein, 218 aa, Oryza sativa (indica cultivar-group)
MEVEEAAYRTVWSEPPKRPAGRTKFRETRHPVYRGVRRRGGRPGAAGRWVCEVRVPGARGSRLWLGTFATAEAAARAHDAAALALRGRAACLNFADSAWRMPPVPASAALAGARGVRDAVAVAVEAFQRQSAAPSSPAETFADDGDEEEDNKDVLPVAAAEVFDAGAFELDDGFRFGGMDAGSYYASLAQGLLVEPPAAGAWWEDGELAGSDMPLWSY

SEQ ID NO: 5669 - protein, 213 aa, Oryza sativa (japonica cultivar-group)
MSLSLGFSAGAGVGADRLAAAPALQAAGALPPRVDVSLSLARAANGQPSSYLPLNENDSLDMVLFDVLREASAVAALSSSSSSSPELGARTTAPVVAGHPAGRKGGGGGGGGRGAAARGGAAGGRHYRGVRRRPWGKYAAEIRDPTRHGARLWLGTFGTAEEAAAAYDRAAFRMRGAKALLNFPPAVAGDGARRGAAAAAKQVGMSDESETKN

SEQ ID NO: 5670 - protein, 273 aa, Oryza sativa (japonica cultivar-group)
MAGFGLDQHLDLIRAHLLEDAHHHVLAPSPSPSPPGTGRVRPAPVSLPPRPPLLWAAASAAPRQQEECFELGGGYAGEGEGEEEDDFRRYRGVRQRPWGKYAAEIRDPARKGARVWLGTYDTAVEAARAYDRAAFQLRGSKAILNFPNEVAADAAVKWAPPVAPIPAAAMSAGRGKRVRSEEQYYLREVKKERLIMAPPENSSSSSSSAAAAAGDIWDELKGICSLPPLSPLSPHPHMAFPQLFVIDLAFGQILNSFVLLLLRTRDFAFDYAI

SEQ ID NO: 5671 - protein, 141 aa, Oryza sativa (japonica cultivar-group)
MEDDKSKEGKSSSSYRGVRKRPWGKFAAEIRDPERGGARVWLGTFDTAEEAARAYDRAAFAMKGATAMLNFPGDHHHGAASRMTSTGSSSSSFTTPPPANSSAAAGRGGSDRTTDKVELECLDDKVLEDLLAETNYRDKNY

SEQ ID NO: 5672 - protein, 244 aa, Oryza sativa (japonica cultivar-group)
MALSEPDLAAETEAIVSALTHVVAYGGGGPPPSEETAASAVTRTAPWRADGARQGAVPAARKYRGVRRRPWGKWAAEIRDPHRAARVWLGTFATAEDAARAYDAAALRFRGGRARLNFPEDAAAADERRATDAAAAAAAASSAPAALLESQPGDVADCLDYSRILAGAPERPTSSTVPDGFFGGGGNGRFLHSWSIGTSPSPSGSGSGGAGGGGGGGGGGAPVRPLFHGGNGWEQRGDSAYNGF

SEQ ID NO: 5673 - protein, 334 aa, Oryza sativa (japonica cultivar-group)
MCGGAILAEFIPAPSRAAAATKRVTASHLWPAGSKNAARGKSKSKRQQRSFADVDDFEAAFEQFDDDSDFDDAEEEDEGHFVFASKSRVVAGHDGRAAARAASKKKRGRHFRGIRQRPWGKWAAEIRDPHKGTRVWLGTFNTPEEAARAYDVEARRLRGSKAKVNFPATPAAARPRRGNTRATAVPPPATAPAAAPPRGLKREFSPPAETALPFFTNGFVDLTTAAAPPPAMMMTSSFTDSVATSESGGSPAKKARSDDVDSSEGSVGGGSDTLGFTDELEFDPFMLFQLPYSDGYESIDSLFAAGDANSANTDMNAGVNLWSFDDFPIDGALF

SEQ ID NO: 5674 - protein, 207 aa, Oryza sativa (japonica cultivar-group)
MCGGAIIYDYIPARRRLCASDFWPDADDSDPHTPAPEKPPRAKRERKNQYRGIRQRPWGKWAAEIRDPVKGVRVWLGTYPTAEAAARAYDRAARRIRGAKAKVNFPNDFGAAPAPAAAAAKAVPRVAPTPAVLPPPKMEAVSEGAGACSSDEVKELSEELLAYENYMSFLGIPYMEGGAASAAGAEEAAAPAGLWTFEDYELPSLAL

SEQ ID NO: 5675 - protein, 221 aa, Oryza sativa (japonica cultivar-group)
MEQHSHCWYYGGGMAVTAAAGAGAASSTSSESQPSGYDYETAGSAEVSAPGGGAGRERAARKEEGGAGAAAAAAGFIGVRKRPWGRFAAEIRDSTRNGVRVWLGTFETAEAAAMAYDQAALSARGAAAALNFPVERVRESLRALALGAAGGSPVLALKGRHSKRKRRKRSELAGATATANKTTTTTSATTGGEHKQIVLELEDLGADYLEELLWMSEQTSH

SEQ ID NO: 5676 - protein, 293 aa, Oryza sativa (japonica cultivar-group)
MGGGRRRRSAAMAMEGEVEGGGRRRVVRIIFRDEDATDSSSSEEEGEGEVVAARRVVVKRTRLRCQEVERRFTGVRRRPWGRWAAEIRDPKENGRRVWLGTFDTAEAAAAAYDDACLRLRGPGAALNLPSRRCVAPAPPPPPPPPPPTAEEKKLLLFPPPLPPRKKAMLFPLPLPPRKKPLLYPPPLPPKKKPLPPPSPPPQPPLPEKENTPLPPLLLPPKKKPLPPPSPTAAAKEEPIELEHAAPPPPFVPRPVWPLLASGGGGKRKKQSGCGGRIPALNTAAAAVEETGRA

SEQ ID NO: 5677 - protein, 282 aa, Oryza sativa (japonica cultivar-group)
MAMEGEVEGGGRRRVVRIIFRDEDATDSSSSEEEGEGEVVAARRVVVKRTRLRCQEVERRFTGVRRRPWGRWAAEIRDPKENGRRVWLGTFDTAEAAAAAYDDACLRLRGPGAALNLPSRRCVAPAPPPPPPPPPPTAEEKKLLLFPPPLPPRKKAMLFPLPLPPRKKPLLYPPPLPPKKKPLPPPSPPPQPPLPEKENTPLPPLLLPPKKKPLPPPSPTAAAKEEPIELEHAAPPPPFVPRPVWPLLASGGGGKRKKQSGCGGRIPALNTAAAAVEETGRA

SEQ ID NO: 5678 - protein, 362 aa, Oryza sativa (japonica cultivar-group)
MCGGAILSDLIPPPRRVTAGDLWLEKTKKQQQQKKKNKGARRLPLRQEEEDDFEADFEEFEVDSGEWEVESDADEAKPLAAPRSGFAKGGLKNTTVAGADGPAARSAKRKRKNQFRGIRQRPWGKWAAEIRDPRKGVRVWLGTFNSPEEAARAYDAEARRIRGKKAKVNFPDGAPVASQRSHAEPSSMNMPAFSIEEKPAVMSAGNKTMYNTNAYAYPAVEYTLQEPFVQIQNVSFVPAMNAIEDTFVNLSSDQGSNSFGCSDFSQENDIKTPDITSMLAPTMTGVDDSAFLQNNASDAMVPPVMGNASIDLADLEPYMKFLIDGGSDESIDTLLSSDGSQDVASSMDLWSFDDMPVSAEFY

SEQ ID NO: 5679 - protein, 341 aa, Oryza sativa (japonica cultivar-group)
MCGGSILGDLHLPVRRTVNAGDLWGDAGKGRDGGDGLKKRKGSSWDFDVDCDDDDDDDFEADFEEFEDDYGDDDDVGFGDDDQSDMNGLKLAGFSTTKLGLGGSRKRKTRYRGIRQRPWGKWAAEIRDPRKGVRVWLGTFGTAEEAAMAYDVEARRIRGKKAKVNFPDAAAAAPKRPRRSSAKHSPQQQKARSSSSSPASLNASDAVSKSNNNRVSSAGSSTDATAAAIAIDDGVKLELLSETDPSPPMAAAAAAWLDAFELNDLDGSRCKDNAFDHQIHKVEAAVADEFAFYDDPSYMQLGYQLDQGNSYENIDALFGGEAVNIGGLWSFDDMPMEFRAY

SEQ ID NO: 5680 - protein, 386 aa, Oryza sativa (japonica cultivar-group)
MCFDLADQRGPRGGGGRPVKGGGDGRAAAAAAATAMTVAGASELMSGYYQAQEMSTMVSALARVVAGGGGGGGDGDGDQWAWSSPSPSSSAAAAAARGVQERRREEQAMHELAGYACGGAPSPEFAGSEQSSDTQSASAATMDEHHSPVGGGGNAEGPDTPRRRYRGVRQRPWGKWAAEIRDPHKAARVWLGTFETAEAAARAYDEAALRFRGSRAKLNFPEDARLYPTAATTTTAAPPPAPVAAASPSAAIYPGASQSAEYLRYQMLLQGRLTTATPNQGTLLPFYGGGGGGGSMTNPYGGGGGGAMSGFLGSYYSFPTPSVSVATVPSSTSSAPGNYYSSHGGSHQSMSAAEEWNWENALVYPATAASWSESSYHHHPPPPHTQ

SEQ ID NO: 5681 - protein, 239 aa, Oryza sativa (japonica cultivar-group)
MAEHFSHAGMYIGYTADAAASSSSSSSSSSSSSSEMLRFDTGWPDETPAPSSVAGRRRSAGGDHRQGRGQTEAAAAFIGVRRRPWGRFAAEIRDSTRNGARVWIGTFDSAEAAAMAYDQAALSARGAAAALNFPVERVRESLHALSLGAAGGSPVLALKRRHSKRKRRKKAELLAAAAATAATANATPQTRRISKSTELTTATTDEQKRFVVELEDLGAEYLEELLWLSEINGGSDPAD

SEQ ID NO: 5682 - protein, 329 aa, Oryza sativa (japonica cultivar-group)
MCGGAILAELIPSAPAARRVTAGHVWPGDANKAKKKGARADDFEAAFRDFDNDSDDEEMMVEEAEEEEATSEHKPFVFRAKKAAAAASSRRRKPAQYRGVRRRPWGKWAAEIRDPVKGIRVWLGTFTNAEAAALAYDDAARAIRGDRAKLNFPSATTPDTRKRGRATAAAAPAVKATPVINLVEEEDEEEVAAAMASIKYEPETSESSESNALPDFSWQGMSASDEFAVAAAALSLDSDDDLAKKRPRTEPEDTTDSGSGDDTDALFDALLFADQYNHFNGGAYESLDSLFSADAVQTTAAAAAADQGMGLWSFDDGCCLVDVEASLSF

SEQ ID NO: 5683 - protein, 373 aa, Oryza sativa (japonica cultivar-group)
MEEGFVALKRTEHVEVTSLAVAVEATPSAKGGKGKVVVGGGGAGGGVGPTRVRVFCDDFDATDSSSDEDEEEVTARRRVKRYVQEIRLQRAAAVAVPPVKVKGEEVFPAAVSAKMAEAAKARVVLAAGRKRKAGGVDGAEPRFRGVRRRPWGKYAAEIRDPWRRVRVWLGTFDTAEEAAKVYDTAAIQLRGRDATTNFNQSGDSASLDVPPEVAERVPQPPGASKNASPATSYDSGEESHAAAASPTSVLRSFPPSAVVATADTANKKQPPPPPLVVRETDESVDVFGCSFSDDGGFAGELPPLYTDFDLLADFPEPPLDFLSNLPVEPFSLAPFSSNNGSPDLHLDDAPSPAAAQVDDFFQDITDLFQIPVV

SEQ ID NO: 5684 - protein, 321 aa, Oryza sativa (japonica cultivar-group)
MDRQWRCLAAAASTSGNSKLPPLPMALGGAVEYGQLVHGAAAPVAPFFVDAEQQSLSPATAMVLGAGWYNYNLVTPSQAAQLHHRLRRAVGAAPCSMKRCGGMAAAAAGRLALVGPAPVQAKLYRGVRQRHWGKWVAEIRLPRNRTRLWLGTYDTAEDAALAYDGAAFRLRGDAARLNFPELRRGGRHHAPALSASVDAKILQATTTTTADTAAAAAPASTNTTPPPSPRVVKTEPGCCSVSEASTTTTADAADVSSTGSSPSPTSSNQAATATPPAPRPPPPLPETIQQLDFTEAPWDEADGFALRRYPSWEIDWDAILS

SEQ ID NO: 5685 - protein, 136 aa, Oryza sativa (japonica cultivar-group)
MDGDGGGGWDDQGNGGGETTKYRGVRRRPSGKFAAEIRDSSRQSVRVWLGTFDTAEEAARAYDRAAYAMRGHLAVLNFPAEARNYVRGSGSSSSSRQHQQRQVIELECLDDQVLQEMLKGGDDQYRSAAGSKRNNY

SEQ ID NO: 5686 - protein, 321 aa, Oryza sativa (japonica cultivar-group)
MCGGAILANIIPATPPRPATAAHVWPGGDGEKRRKVGGGGCDDDFEAAFERFGREDSEMEEEEVEEVVVGKKAAVRRRRATPAAGRRARPSKYWGVRRRPWGKWAAEIRDPVEGVRVWLGTFATAEAAAHAYDAAARDLRGATAKLNFPSSSSSTAATPRPRKCRPTTATATPKATTPNVVVVVNLVDKEAEVSESSGASSSALPDFSWQGMSASSDDDAAAQQALLDAAGGAKKRPRSEPHVTSDDEVLPASFDSDNNTAAAGLLPLDDPFLFGDQFGDLNGGAFASLMDGLFAAGEANVAGESVGLWSFGDDFLNASYY

SEQ ID NO: 5687 - protein, 367 aa, Oryza sativa (japonica cultivar-group)
MVNRASETAHVTSAWAHTSSLRSSPMVEVIVEKKARRIVRGRWHVEASNEAAAAAPAVAAPAPRVVRVLCRDHDATDSSGDDDGEDDAPRRARLLVHEIHVARQPVAMSPAAASSSQRRRVGPMKRTESAVDATMDATAAAPERKFRGVRKRPWGKYGAEIRVSQQSARVWLGTFDTAEEAARVYDHAALRLRGPSATTNFPMTPAAPSPPPSRATYAGAASGYDESSDESQLVGSPVSVLRPMPARATAKKEAKEEDDSAPDILGISAGDGLISPFTCDVLNFPPPDEDMFGGGISFGEPTPPPMVFDDDCMARLGHAPNDDEHPVTSSSFLDGDLGDLPSWTEVDGFFSDVGGDDLFAAEPFPAL

SEQ ID NO: 5688 - protein, 241 aa, Oryza sativa (japonica cultivar-group)
MGTNPSLHELAAGAAPRGRVVRILVRDADATDSSSSEDEAVAVAQPRPRRRGKVGGGGGGGGGVKRRVMEAGAGEARPTARFRGVRQRPWGRFAAEIRDPHLRRRLWLGTFDTAEEAAAAYDAASVRLRGSSAATNFASVRCYSLPPELPKPTISPPEAAVRPITLPIGTAKPTLLPRVKEEGESCGGRVKEEASSCEVQVLAPEPMWTMISGKRKKRSGCGTRVRAFHAVSACVEEVGGA

SEQ ID NO: 5689 - protein, 312 aa, Oryza sativa (japonica cultivar-group)
MCGGAILADFTPARVPRRLTAAELLPVTPTPPAAERRTTRKRKSDVDFEAEFELFEDDDDDDEFELSDDGDESLAVSFSSDVSSSSRPRRRVAAAAAGRRKASKKSKYRGVRRRPSGRFAAEIRDPKKGRRVWLGTYGSAEEAAMAYDREARRIRGKGARLNFPRDGDGSPRRSNDRPCWTIDLNLPAAAVSGDDDDAMAVDAADADAGSAGRAAAYADQEALSAAKCKIKQCPRDEQMASATPELMEEDASSSRNMVPLSMALQLQYAAMIAECDREMEEIAAVERDLERRRRQVFERRGHLVRQASLLLD

SEQ ID NO: 5690 - protein, 292 aa, Oryza sativa (japonica cultivar-group)
MSRSRTVRIFWDDPDLTDSSGEDEGCGGRRVGSMVRELPPAQMPVAQAAAAAALPEQCSGGDGDMGRRVVGGGCTVGVGRRRLTKDGGPGAPSTKFRGVRRRPWGKFAAEIRDPWRGVRVWLGTFDTAEEAARVYDNAAIQLRGPSATTNFSASTNSAGAQDPVAVGYESGAESSPAVSSPTSVLRKVPSLCSLAEDKDDYEAGPCEPATAAGSNLTVLEEEELGEFVPFEDAPVYGGSSFWDFEPESGFLYAEPSSPETPWDAGATSSGEAQDYFQDLRDLFPLNPLPAIF

SEQ ID NO: 5691 - protein, 318 aa, Oryza sativa (japonica cultivar-group)
MNTRGSGSSSSSSSSQASLMAFSEPPKPASQPSPPSSPMSERPPSGRSRRRAQEPGRFLGVRRRPWGRYAAEIRDPTTKERHWLGTFDTAQEAALAYDRAALSMKGAQARTNFVYTHAAYNYPPFLAPFHAPQYAAAAAAPSSVQYGGGVGAAPHIGSYGHHHHHHHHHGHGAASGASSVGECSTMPVMVPVDPHRSSMSSSLLDMDRNGHDFLFSGADDNSGYLSSVVPESCLRPRGGGAAADHQDMRRYSDADAYGMMGLREDVDDLAQMVAGFWGGGDAADQLGACGFPASGGAADMVASSQGSDSYSPFSFLSH

SEQ ID NO: 5692 - protein, 289 aa, Oryza sativa (japonica cultivar-group)
MAMAKELQETSSSSSSSAASTSSCSSAVTDAWSSPARPNAVAGGKRKKEVVGEADEAAGGGAGEEEEEEAEAAAAGKSSAATKKRKRSSDGKHPVYRGVRMRAWGKWVSEIREPRKKSRIWLGTFPTADMAARAHDVAALAIKGRAAHLNFPDLAGVLPRAASASPKDVQAAAALAAAFTTSPSSSPSSSLSADDVAPCVVHADADEQPAAAAKNDDDDGSTTAPVAAAAAAAAADEQQLFDLPDLLFDIQDGPFGFPAMWAPLADVDEVNAELRLEEPLLWDLGVTDA

SEQ ID NO: 5693 - protein, 228 aa, Oryza sativa (japonica cultivar-group)
MAASEQSSESSSTASTSSCGKKQQVAGKRKREDVGGGGEQAAAVAYRGVRMRAWGKWVSEIREPRKKSRIWLGTFPCPEMAARAHDVAALSIKGARAVLNFPDLAPALPRPASLAPRDVQAAAALAAVMHHHKHPSSSTSTSSPPAAPPPDEHHPRHEPQQPESSREDDQQQQPAAAAAAQMAVAELVFDELAPLWVEDVVEFGTSDHCWTAYDALDPIGFQPLLWEY

SEQ ID NO: 5694 - protein, 230 aa, Oryza sativa (japonica cultivar-group)
MEMDIGEGESCCGRRKQQQQQNISSSKSRKCCPLRRSRKGCMKGKGGPENQRCPFRGVRQRTWGKWVAEIREPNRGARLWLGTFNTALDAARAYDSAARALYGDCARLNLLLAAATAGAPPAAATPSVATPCSTNDDSNNSSSTTHQQQLTTMLQLDDDNYTLQPSSSDQEDFETYVTRLPKAEDFGLEGFQEVPLDVLDEAGGGISIWDLSICPADFMATAATTTAKSS

SEQ ID NO: 5695 - protein, 315 aa, Oryza sativa (japonica cultivar-group)
MDNHAVAVQQRDTAPRPRARARASVSSIQGGGGPGWADHVALPRPPRCHPRRPPTPCRRPLAFASSSIHPHRAVLPSGAPPHVSAGARDTGGAAGLARPHHSFPQEKKPKPRHAGVASPRLALAPLRNSARMDRREATVFLPPPPPPQPTQPQQQPAAAAVRAPVGGRGGGGGRQYRGVRMRKWGKWVAEIREPNKRSRIWLGSYSTAVAAARAYDTAVFYLRGRSARLNFPDQLDGAGGGGAGAGGAEDHRELTAAVIRKKAAEVGARVDAQHSVVGAAAPVPLQPPQPPPPQRRRTKNPDLNREPTPDTSDDE

SEQ ID NO: 5696 - protein, 338 aa, Oryza sativa (japonica cultivar-group)
MAPSKQQQMLLKKVMAKKPKTKRLSGFGLKPSAAFSRPHVPSAAASLQPSRRVRVVFEDPDATDSDSDDDEDAGAASKKRYFELFIGKPASSTKQASPASTVAAYANIGKVGSTCYRGVRLRKWGKWAAEIRNPFTGHREWLGTFDTADAASAAYQSASRNFAEEKRRRGVASSASPASSATPTPTASSSSSTSAAPFAHPSPSSVLEATKPAPKPESPPLPEQAATPLLVEATNETAELPDDPEFYKDILRGLQLPDIDPMDFRAGLDALDISDVPAYMNGEQDVLFTEDMLLGDFAEEDDLDLDDIGDDFCEDFPEIPSGYDFGRGDMFRQVDFCV

SEQ ID NO: 5697 - protein, 411 aa, Oryza sativa (japonica cultivar-group)
MHSKLEFFKDESTDHPSKLRIRNEIRLSKRGRVVTDTRTRTREGDAVTGRAAPPPPAAAAAAAAAVREEGTHHHRHRHARHATKRGGGVRRRRSERRRNRKKGGGGEGEELEELEEEEISFLFPLDGAGGGEEGRLLRASELCGIIELPHWVRKKRTRRKSDGPDSIAETIKWWKEQNQKLQEENSSRKAPAKGSKKGCMAGKGGPENSNCAYRGVRQRTWGKWVAEIREPNRGRRLWLGSFPTALEAAHAYDEAARAMYGPTARVNFADNSTDANSGCTSAPSLMMSNGPATIPSDEKDELESPPFIVANGPAVLYQPDKKDVLERVVPEVQDVKTEGSNGLKRVCQERKNMEVCESEGIVLHKEVNISYDYFNVHEVVEMIIVELSADQKTEVHEEYQEGDDGFSLFSY

SEQ ID NO: 5698 - protein, 258 aa, Oryza sativa (japonica cultivar-group)
MVKNTSNKCIAAAGATAAAGLGGGAASCSGGGGDGKVTTAAAAALAVRPYKGVRMRSWGSWVSEIRAPHQKRRIWLGSYATPEAAARAYDAALLCLKGSDAVLNFPSSASSRRRLDIHRGGTDSAAGDMSPRSIQRVAAAAAAAFDAAAAAVVVDESCSCSAEAMSSTPTSGATSLSTLGSSGGGDVLDHATTPSSSSSAAANVCSPPLEGDHELWTELDAFASPKFMDLMAAGGTAFSSPWEEPEEDGELMRLWSFC

SEQ ID NO: 5699 - protein, 228 aa, Oryza sativa (japonica cultivar-group)
MPFVRTLAFPTLANQIEGEIKSRTERDHGEVDLSSPEEAMSRAECGGGEEEERCRYRGVRRRRWGKWVSEIRVPGTRERLWLGSYATPEAAAVAHDTAVYFLRGGAGDGGGGGATLNFPERAAATYGGGAAVARLSPRSVQRVASDAGMAADAQLVAARDAAPAPAPATAYARPDHCAGATTARHDELARRGMYGAHAHAAGANARTSGERQLVCAEEISVDDMEILM

SEQ ID NO: 5700 - protein, 193 aa, Oryza sativa (japonica cultivar-group)
MEQRAAAAAQQRQGRRQSAAACGIRRARAETRHPVYRGVRFRAGKWVSEIRELRKPSRIWLGTYATPEMAAAAYDAAALALRGRGAALNFPDAARSRPAPASASADDVRAAATAAAAAMAHQEEDDDSRRQLEDGGGGGGVVDEDDVLEMPRLMVSMAEGLMISPPPVMLGLQADGGGIMDEGGGVVRLWDHS

SEQ ID NO: 5701 - protein, 214 aa, Oryza sativa (japonica cultivar-group)
MEYYEQEEYATVTSAPPKRPAGRTKFRETRHPVYRGVRRRGPAGRWVCEVREPNKKSRIWLGTFATAEAAARAHDVAALALRGRGACLNFADSARLLRVDPATLATPDDIRRAAIELAESCPHDAAAAAASSSAAAVEASAAAAPAMMMQYQDDMAATPSSYDYAYYGNMDFDQPSYYYDGMGGGGEYQSWQMDGDDDGGAGGYGGGDVTLWSY

SEQ ID NO: 5702 - protein, 203 aa, Catharanthus roseus
MSEEIISVSDRFLLSLIEEHLLSDNSDDSSSELTSTEENWEEIFADFLNWSGSEIQKRGSPSSESCQSNSMAESCQEDSVVGTPPEAAAGGGCSKDWNRYKGVRRRPWGKFAAEIRDPKKKGSRIWLGTYETPEDAALAYDAAAFNMRGAKARLNFPHLIGSNISGPVRVNPRKRFPAEPSTTSSSSSSSSSENSGGRKKRRY

SEQ ID NO: 5703 - protein, 210 aa, Catharanthus roseus
MYQSNAHNSDHLTFLPPLVDYQFLNNDFDFSEIFTDFNYANYNYNTSTSDNFSGFQFNENCEEIISPNYASEDLSDIILTDIFKDQDNYEDEVVAGEQEEELITTPTSRGGGGGGCEQRSNEEWIRYRGVRRRPWGKFAAEIRDPKRKGSRIWLGTYETAEDAALAFDQAAFQLRGSRARLNFPNLIGSANAPVRVSPRRRSSSCHLRPQ

SEQ ID NO: 5704 - protein, 376 aa, Catharanthus roseus
MALLDQASNLSPMPFDFTRKRKSRRRDGTKNVAETLAKWKEYNEKLDALDGGKPARKVPAKGSKKGCMKGKGGPENSHCKYRGVRQRTWGKWVAEIREPNRGSRLWLGTFRNAIEAALAYDEAARAMYGPCARLNLPNYRASEESSSLPTTSGSDTTTASGISEVSVYEDKKFTPVVSGLKQDDKGESLESADSKPQLLVDAGTPMSAVKEEPKEYQVMDSQSEGQFGDEEPPSKLVCKEVDFGQDQAVVPAVKNAEEMGGEMGGDILKGCSLSEMFDVDELLSVLDSTPLHASDFQHGMGNGNVKAEAAYNYAPSWDSAFQLQNQDPKLGSQQHMAQTPPEINSGLDFLQPGRQEDSYFTLGDLDFLDLGAELGL

SEQ ID NO: 5705 - protein, 234 aa, Lycopersicon esculentum
MDQQLPPTNFPVDFPVYRRNSSFSRLIPCLTEKWGDLPLKVDDSEDMVIYGLLKDALSVGWSPFNFTAGEVKSEPREEIESSPEFSPSPAETTAAPAAETPKGRHYRGVRQRPWGKFAAEIRDPAKNGARVWLGTYETAEEAAIAYDKAAYRMRGSKAHLNFPHRIGLNEPEPVRVTAKRRASPEPASSSGNGSMKRRRKAVQKCDGEMASRSSVMQVGCQIEQLTGVHQLLVI

SEQ ID NO: 5706 - protein, 244 aa, Lycopersicon esculentum
MYQLPTSTELTFFPAEFPVYCRSSSFSSLMPCLTESWGDLPLKVNDSEDMVIYGFLQDAFSIGWTPSNLTSEEVKLEPREEIEPAMSTSVSPPTVAPAALQPKGRHYRGVRQRPWGKFAAEIRDPAKNGARVWLGTYESAEEAALAYGKAAFRMRGTKALLNFPHRIGLNEPEPVRVTVKRRLSESASSSVSSASESGSPKRRRKGVAAKQAELEVESRGPNVMKVGCQMFQLASSYWLVKIWS

SEQ ID NO: 5707 - protein, 240 aa, Lycopersicon esculentum
MDSSSSSSQFFYSMNSDLNSSDSSYEWSNFNTQSYLPFNVNDSEEMLLFGVLNAAHEETTSETVTSHRVKEEEVTSESEVIEAIPAKEKSYRGVRRRPWGKFAAEIRDSTRNGVRVWLGTFDSAEDAALAYDQAAFSMRGNSAILNFPVETVRDSLRDMKCHVDDDCSPVVALKKRHSMRKRSTNSKKVNSISKVVREVKMENVNNVVVFEDLGADYLEQLLSSSSSDQSSCDATYFSPW

SEQ ID NO: 5708 - protein, 245 aa, Lycopersicon esculentum
MDSSSSSSQFFYSMNSDLNSSDSSYEWSNFNTQSYLPFNVNDSEEMLLFGVLNAAHEETTSETVTSHRVKEEEVTSESEVIEAIPAKEKSYRGVRRRPWGKFAAEIRDSTRNGVRVWLGTFDSAEDAALAYDQAAFSMRGNSAILNFPVETVRDSLRDMKCHVDDDCSPVVALKKRHSMRKRSTNSKKVNSISKVVREVKMENVNNVVVFEDLGADYLEQLLSTSCQVIKVVVMQLISVHGKIKD

SEQ ID NO: 5709 - protein, 214 aa, Lycopersicon esculentum
AAGRKPSLNISIPSVKKTEEPKTGEVKTGEPKTEEPKTGEVKTEYSVKEKMVENSEKKRYRGVRQRPWGKFAAEIRDPTRKGTRVWLGTFDTAMDAAMAYDRAAFRLRGSKAILNFPLEVSNFKQENHEIEKNVVNLNSNTNSCGKRVRREMENDDGIVMKKEVKREQMVATPLTPSNWSSIWDCGNGKGIFEVPPLSPLSPHSNFGYSQLLVS

SEQ ID NO: 5710 - protein, 161 aa, Lycopersicon esculentum
MVPTPQSDLPLNENDSQEMVLYEVLNEANALNIPYLPQRNQLLPRNNILRPLQCIGKKYRGVRRRPWGKYAAEIRDSARHGARVWLGTFETAEEAALAYDRAAFRMRGAKALLNFPSEIVNASVSVDKLSLCSNSYTTNNNSDSSLNEVSSGTNDVFESRC

SEQ ID NO: 5711 - protein, 201 aa, Lycopersicon esculentum
MTKQDEGLTLELIRQHLLEDFTTTESFIDSLNSCFSDHISSSDDISPVFTSVKTEPSTSNSLSDSPNSSYPNEPNSPISRYFNLRSDFPEFKIDSDTILSPVFDSSAGSNEDNNKKKNYRGVRRRPWGKFAAEIRDPSRKGSRIWLGTFDTDIDAARAYDCAAFKMRGRKAILNFPLDAGKSGAPANVGRKRRRENKMELV

SEQ ID NO: 5712 - protein, 224 aa, Lycopersicon esculentum
MSSPLEIDTSFSHSNLLFLEDESSWSNTHDPFVDIDEYLPIIIPCNDEEIVVESSNASTTTTTTTTSKVASIQNIHHDQEEVTSIEKKHEDDQEKHYIGVRKRPWGKYASEIRDSTRNGIRVWLGTFDTAEEAALAYDQAALSMRGPWSLLNFPMEHVKKSLENIEYSCKDGLSPAAVLKATHKTRRVKHKRSSRKKKNENLENVFVFQDLGVELLEELLMTSS

SEQ ID NO: 5713 - protein, 372 aa, Lycopersicon esculentum
MCGGAIISDLVPPSRISRRLTADFLWGTSDLNKKKKNPSNYHSKPLRSKFIDLEDEFEADFQHFKDNSDDDDDVKAFGPKSVRSGDSNCEADRSSKRKRKNQYRGIRQRPWGKWAAEIRDPRKGIRVWLGTFNSAEEAARAYDAEARRIRGKKAKVNFPDEAPVSVSRRAIKQNPQKALREETLNTVQPNMTYISNLDGGSDDSFSFFEEKPATKQYGFENVSFTAVDMGLGSVSPSAGTNVYFSSDEASNTFDCSDFGWAEPCARTPEISSVLSEVLETNETHFDDDSRPEKKLKSCSSTSLTVDGNTVNTLSEELSAFESQMKFLQIPYLEGNWDASVDAFLNTSAIQDGGNAMDLWSFDDVPSLMGGAY

SEQ ID NO: 5714 - protein, 248 aa, Lycopersicon esculentum
MTENSVPVIKFTQHIVTTNKHVFSEHNEKSNSELQRVVRIILTDADATDSSDDEGRNTVRRVKRHVTEINLMPSTKSIGDRKRRSVSPDSDVTRRKKFRGVRQRPWGRWAAEIRDPTRGKRVWLGTYDTPEEAAVVYDKAAVKLKGPDAVTNFPVSTTAEVTVTVTETETESVADGGDKSENDVALSPTSVLCDNDFAPFDNLGFCEVDAFGFDVDSLFRLPDFAMTEKYYGDEFGEFDFDDFALEAR

SEQ ID NO: 5715 - protein, 222 aa, Lycopersicon esculentum
MAPKEKIGAVTAMAMVNLNGISKEVHYRGVRKRPWGRYAAEIRDPGKKSRVWLGTFDTAEEAARAYDNAAREFRGAKAKTNFPKLEMEKEEDLKFAVKNEINRSPGQTSTVESSSPVMVDSSSPLDLSLCGSIGGFNHHTVKFPSSGGGFTGSVQAVNRMYYIEALARAGVIKLEQIGRKRLDYLGGGDSDSSTVIDFMRVDVKSTTAGLNLDLNFPPPENM

SEQ ID NO: 5716 - protein, 260 aa, Lycopersicon esculentum
MCGGAILADIIPPRDRRLSSTDLWPTDFWPISTQNVPLNPKRARPSTGGEQMKKRQRKNLYRGIRQRPWGKWAAEIRDPRKGVRVWLGTFNTAEEAARAYDREARKIRGKKAKVNFPNEDDDHYCYSHPEPPPLNIACDTTVTYNQESNNCYPFYSIENVEPVMEFASYNGIEDGGEEMVKNLNNRVVEEEEKTEDEVQILSDELMAYESLMKFYEIPYVDGQSVAATVNPAAETAVGGGSMELWSFDDVSRVQPSYNVV

SEQ ID NO: 5717 - protein, 264 aa, Lycopersicon esculentum
MNSQIFSTGFSGYGMEQQGSIGLNQLTPIQIQQIQAQINFQNQQQQQQQQMMLQTAHHASTMNFLAPKPVPMKQSGSPPKPTKLYRGVRQRHWGKWVAEIRLPKNRTRLWLGTFDTAEEAALAYDKAAYMLRGDFARLNFPQLRHNGNLIGGDFGEYNPLHSSVDAKLKDICQSLAQGKSIDSKKKKTKGLSAEKAAVVKMEEEESKTAEVGSESDGSHSGSGGSSPVTELIFPEFTEEEPTWDMSENFLLQKYPSHEIDWASL

SEQ ID NO: 5718 - protein, 300 aa, Lycopersicon esculentum
MAIMDEAANMVCVPLDYSRKRKSRSRRDRTKNVEETLAKWKEYNEKLDNEGKGKPVRKVPAKGSKKGCMRGKGGPENWRCKYRGVRQRIWGKWVAEIREPKRGSRLWLGTFGTAIEAALAYDDAARAMYGPCARLNLPNYACDSVSWATTSASASASDCTVASGFGEVCPVDGALHEADTPLSSVKDEGTAMDIVEPTSIDEDTLKSGWDCLDKLNMDEMFDVDELLAMLDSTPVFTKDYNSDGKHNNMVSDSQCQEPNAVVDPMTVDYGFDFLKPGRQEDLNFSSDDLAFIDLDSELVV

SEQ ID NO: 5719 - protein, 204 aa, Lycopersicon esculentum
MARAQQRYRGVRQRHWGSWVSEIRHPLLKTRIWLGTFETAEDAARAYDEAARLMCGPRARTNFPYNPNMPQTSSSKLLSTTLTAKLHKCYMASLQMTKTSPQGQKLAKNATNVQESVINSYKMKQQMLVPKPSVLLTHHDHHEEAKVVNLGVGVIRKVEDQVLEGIPQFVKPLEDDHIEQMIEELLDYGSIELCSNVVPSHQIQ

SEQ ID NO: 5720 - protein, 299 aa, Lycopersicon esculentum
MIIMSTEQPNCSESTESSCNSSSSSSPSSPSSVLLQPLPQINSKNRLKRCRGEEEVEEEEDVVVNNPNPKKMNKNNNNGSSTSVVSYVGVRMRAWGKWVSEIREPKKKSRIWLGTFATPEMAARAHDVAAMSIKGTSAILNFPQFSHLLPRPVTCSPRDIQNAAVKAAHMDHLNPKFSILPETSAATMTSSSSSLSLVSGVTSSSSSFQDDEESRPSPPELIPEATGQLSEIVELPKLGSSYELVESTQSLFESDEWWDNNYGNCEYFFGQDNYISSNMEFTGLENVVSTSFESFLWQH

SEQ ID NO: 5721 - protein, 237 aa, Nicotiana sylvestris
MYQPISTEFPVYHRTSSFSSLMPCLTDTWGDLPLKVDDSEDMVIYGLLSDALTTGWTPFNLTSTEIKAEPREEIEPATSPVPSVAPPAETTTAQAVVPKGRHYRGVRQRPWGKFAAEIRDPAKNGARVWLGTYETAEEAALAYDKAAYRMRGSKALLNFPHRIGLNEPEPVRLTVKRRSPEPASSSISPASENSLPKRRRKAVAAKQAELEVQSRSNVMQVGCQMEQFPVGEQLLVS

SEQ ID NO: 5722 - protein, 282 aa, Nicotiana sylvestris
MASPQENSTTLDLIRQHLLDDNVFLEHYCSETETTTLIYSQSSSSSESLDQSFSFEPTLNYATTAQSSNLEVSTFFNNSKTEFDSFEFGTIPNVSAARSSSLKQTSFKERKPSLNIAIPVKQEVVQKVELAPTEKKHYRGVRQRPWGKFAAEIRDPNRKGTRVWLGTFDTAIEAAKAYDRAAYKLRGSKAIVNFPLEVANFKQEFNNEIRPLVNSSRKRVRETVNEEQLVINKEMKIEEERVPTAPLTPSSWSAIWDSGDGKGIFEVPPLSPFGAYSQLVMI

SEQ ID NO: 5723 - protein, 227 aa, Nicotiana sylvestris
MAVKNKVSNGDLKGGNVKTNGVKEVHYRGVRKRPWGRYAAEIRDPGKKSRVWLGTFDTAEEAAKAYDTAAREFRGPKAKTNFPLPSENQSTSHSSTMESSSGETGIHAPPHAPLELDLTRRLGSVAADGGDNCRRSGEVGYPIFHQQPTVAVLPNGQPVLLFDSLWRPGVVNRPQPYHVMPMAMGFNGVNAGVDPTVSDSSSVVEENQYDGKRGIDLDLNLAPPTEF

SEQ ID NO: 5724 - protein, 233 aa, Nicotiana tabacum
MYQPISTELPPTSFSSLMPCLTDTWGDLPLKVDDSEDMVIYGLLSDALTAGWTPFNLTSTEIKAEPREEIEPATIPVPSVAPPAETTTAQAVVPKGRHYRGVRQRPWGKFAAEIRDPAKNGARVWLGTYETAEEAALAYDKAAYRMRGSKALLNFPHRIGLNEPEPVRLTAKRRSPEPASSSISSALENGSPKRRRKAVAAKKAELEVQSRSNAMQVGCQMEQFPVGEQLLVS

SEQ ID NO: 5725 - protein, 236 aa, Nicotiana tabacum
MNQPIYTELPPANFPGEFPVYRRNSSFSRLIPCLTETWGDLPLKVDDSEDMVIYTLLKDALNVGWSPFNFSAGEVKSEQREEEIVVSPAETTAAPAAELPRGRHYRGVRRRPWGKFAAEIRDPAKNGARVWLGTYETDEEAAIAYDKAAYRMRGSKAHLNFPHRIGLNEPEPVRVTAKRRASPEPASSSENSSPKRRRKAVATEKSEAVEVESKSNVLQTGCQVELLTRRHQLLVS

SEQ ID NO: 5726 - protein, 203 aa, Nicotiana tabacum
HEETWGELPLKVDDSEDMVIYTLLKDALNVGWSPFNFTAGEVKSELMEEEIVVSPADTTAAPAAELPRGRHYRGVRRRPWGEFAAEIRDPAKNGARVWHRTYETDEEAAIAYDKAAYRMRGSKAHLNFPHRIGLNEPEPVRVTAKRRASPEPASSSENSSAKRRRKAVAAEKSGAVEVESKSNVLQVGCQVELLTRGHQLLVS

SEQ ID NO: 5727 - protein, 237 aa, Nicotiana tabacum
MTESSSSQSESASSDSLPFDFLSDSFDFEADFFQFGDEVSNSSSESANSVHNSTNFIMLELEPTISSSDYEKPQVIIDLTSPKLSNVSDRKPSLKIDLPPVKKFEWIGFCNSTTQSNSIVSVTMQQKRKTEEKRHYRGVRQRPWGKYAAEIRDPTRRGARVWLGTFNTAVEAAKAYDRAAFKMRGSKAILNFPLEVGKNLSYSSSAVDGGVKRRKESDACGEEKGVKKVERCKEEES

SEQ ID NO: 5728 - protein, 291 aa, Nicotiana tabacum
MASPQENCTTLDLIRQHLLDDNVFMEHYCPQPILYSQSSSSSESLNSIASELNNETFSFEPTLKYADTAQSSNLDISSFFNNSKTEFDSFEFETKPNVSAARISSNSPKQTSFKERKPSLNIAIPMKQQEVVQKVEVVPTEKKHYRGVRQRPWGKFAAEIRDPNRKGTRVWLGTFDTAIEAAKAYDRAAFKLRGSKAIVNFPLEVANFKQQDNEILQPANSGRKRMRETENEEIVIKKEVKREERVPAAAAPLTPSSWSAIWEGEDGKGIFEVPPLSPLSPHMAYSQLVMI

SEQ ID NO: 5729 - protein, 277 aa, Nicotiana tabacum
MDSSSCSSHFFYPMNSDLSSDSSWEWSNLNSTSLPFNVNDSEEMLLFGVLTNTAQETTSETVTSYHVKEEEVSSKSKVIKEIEEKPAKEKSFRGVRRRPWGKFAAEIRDSTRNGVRVWLGTFDSPEAAALAYDQAAFLMRGTSAILNFPVETVQESLRDMKCHVDEECSPVVALKKRHSLRKKSLSSKKSNSSSNSKVVREVKMENVNVVVFEDLGPDYLEQLLSSSSSDHSSCNEAFYHVNQRFTQLCIYLFIYLYYFCLFSFRGREIGEFHLFVL

SEQ ID NO: 5730 - protein, 226 aa, Nicotiana tabacum
ISDFWSSSSSSSSIAGKSDSVQSLTHSYNKPQKSDSGKLNQLEKGTISVKVEKESSGPRARKNKYRGIRQRPWGKWAAEIRDPQKGVRVWLGTFNTAEEAARAYDEAAKRIRGDKAKLNFPEPPSPPAKRHCTSTIPDQPTRSDLMSQKPASIMLNYGYENQTPYYPMEMPAAEDPQHHDYELKEQISNLESFLDLEPDSGIVDSDPLNIFLMDDFAATQQQQLFY

SEQ ID NO: 5731 - protein, 225 aa, Nicotiana tabacum
MRRGRAAAAPAPVTGEPNGSGGSKEIRFRGVRKRPWGRFAAEIRDPWKKTRVWLGTFDSAEDAARAYDAAARALRGPKAKTNFPLPYAHHHQFNQGHNPNNDPFVDSRFYPQDNPIISQRPTSSSMSSTVESFSGPRPPPAPRQQTTASSRKYTRSPPVVPDDCHSDCDSSSSVVDHGDCEKENDNDNDNIASSSFRKPLLFDLNLPPPMDDAGADDLHCTALCL

SEQ ID NO: 5732 - protein, 251 aa, Nicotiana tabacum
MIRNPVVSLMDEPKTVKFSQHIVTKNKHVPEQNENSNFHSKFLQRVVRIILTDADATDSSDDEGQDTVRRVKRHVTEINLMPSPNLICEKKRRLVSPDTDVTRRKKFRGVRQRPWGRWAAEIRDPTRGKRVWLGTYDTPEEAAIVYDAAAVKLKGPDAVTNFPKVLTADITEMESVTDRGEKSENDFALSPTSVLRNDDFTPSDDLGFCEVDAFGFDVDSLFRLPEFGLSEKYYGDEFGEFDFDDFALEAR

SEQ ID NO: 5733 - protein, 225 aa, Nicotiana tabacum
MAVKNKVSNGNLKGGNVKTDGVKEVHYRGVRKRPWGRYAAEIRDPGKKSRVWLGTFDTAEEAAKAYDTAAREFRGPKAKTNFPSPTENQSPSHSSTVESSSGENGVHAPPHAPLELDLTRRLGSVAADGGDNCRRSGEVGYPIFHQQPTVAVLPNGQPVLLFDSLWRAGVVNRPQPYHVTPMGFNGVNAGVGPTVSDSSSAVEENQYDGKRGIDLDLNLAPPMEF

SEQ ID NO: 5734 - protein, 264 aa, Solanum tuberosum
MCGGAIISDYEPAGNFYRKLSARDLWAELDPISDYWSSSSSSSTVENPYSAQSPVTHSVDKPKKSDSGKSNQLKKGNKTVKVEKEKSTGPRQRKNKYRGIRQRPWGKWAAEIRDPQKGVRVWLGTFNTAEDAARAYDEAAKRIRGNKAKLNFPAPSPPAKRQCTSTVAADPPPALLLESSNIISYNNSPLMNFGYDVQSQTPYYPMEMPVASDDYELKEQISNLESFLELEPADSSDQFSGIVDPDPLNVFLMEDFASTQHQFY

SEQ ID NO: 5735 - protein, 298 aa, Solanum tuberosum
MCGGAILYDIIPRDRRLSSTDLWPSSADFWQTSSFSKPISTQNVPPKPKRAQLSRGSEQMKKRQRKNLYRGIRQRPWGKWAAEIRDPRKRVRVWLGTFNTAEAARAYDREARKIRGKKAKVNFPNEDDDHYYSHPEPPPLNIVYESYDTTSTYNQESNNCYPFHSIENTEPVMEFAIANKNSSGSAYNGIEDQNVEGEEQTVKNSNNRIVEEEEKTEDEVQILSDELMAYESLMKFYEIPYVDGQSVAATVNPAADTEVGGGSMELWSFDDVSRLQPSYNVSLIIVLFKLLHLFSLLN

SEQ ID NO: 5736 - protein, 372 aa, Hordeum vulgare
MTVDRKGAQAAAAAAATSAPFEIPALQPGRKKRPRRSRDGPNSVSETIKRWKEVNQQLEHDPQGAKRARKPPAKGSKKGCMQGKGGPENTQCGFRGVRQRTWGKWVAEIREPNRVSRLWLGTFPTAEVAAQAYDEAARAMYGPLARTNFPVQDAQAAPAVAVPVATEGVVRGSSASCESTTTSNHSDVASSSHNKQRQIQAPEISSRSDLLESTQSVEYSQQQSVPDAVSSIAMSTSEEDVYEPLEPISNLPDGEADCFDIEELLKLMEADPVEVDPVTVGSWNEFQDAGANARGSWNEFQCARANTGVSWNANAGMEMGQQEPLYLDGLDQGMLEGMLHSDYPFPVWISEDRPMHNPAFHDAEMSEFFEGL

SEQ ID NO: 5737 - protein, 316 aa, Hordeum vulgare
MEGLQRSSSTFRRKKRPRRSRDGPNSVSETIKQWKEVKQQLEHDPQGAKRARKPPAKGSKKGCMQGKGGPENTQCGFRGVRQRTWGKWVAEIRESNRVSRLWLGTFPTAEVAAQAYDEAAKAMYGPLARTNFPVQDAQAAPTVVVQVATEGVVRGSSASCESTTTSNHSDVASSSHNKQLQIQAPEISSQSDLLESTQSVEYIQQQSVPDAVSSIAMSTSEEDVYEPLEPISNLPDGEAHCAISRCFGPRTWPETWTRRRRGCPAASSTPSSGVPAPALAPQRAEAVPSPRGGNGRRCRGSDRAMVDVMRAVFILE

SEQ ID NO: 5738 - protein, 303 aa, Oryza sativa
MLLNPASREVAALDSIRHHLLEEEEETPATAPAPTRRPVYCRSSSFGSLVADQWSESLPFRPNDAEDMVVYGALRDAFSSGWLPDGSFAAVKPESQDSYDGSSIGSFLASSSSEAGTPGEVTSTEATVTPGIREGEGEAVAVASRGKHYRGVRQRPWGKFAAEIRDPAKNGARVWLGTFDSAEEAAVAYDRAAYRMRGSRALLNFPLRIGSEIAAAAAAAAAGNKRPYPDPASSGSSSPSSSSSSSSSSSSGSPKRRKRGEAAPASMAMALVPPPPPPAQAPVQLALPAQPWFAAGPIQQLVS

SEQ ID NO: 5739 - protein, 304 aa, Oryza sativa
  unsure (1)..(304): unsure at all Xaa locations
MLLNPASREVAALDSIRHHLLEEEEETPATAPAPTRRPVYCRSSSFGSLVADQWSESLPFRPNDAEDMVVYGALRDAFSSGWLPDGSFAAVKPESQDSYDGSSIGSFLASSSSEAGXTPGEVTSTEATVTPGIREGEGEAVAVASRGKHYRGVRQRPWGKFAAEIRDPAKNGARVWLGTFDSAEEAAVAYDRAAYRMRGSRALLNFPLRIGSEIAAAAAAAAAGNKRPYPDPASSGSSSPSSSSSSSSSSSSGSPKRRKRGEAAPASMAMALVPPPPPPAQAPVQLALPAQPWFAAGPIQQLVS

SEQ ID NO: 5740 - protein, 134 aa, Oryza sativa
  unsure (1)..(134): unsure at all Xaa locations
MTARSMLRNXXPEASVLDTIRQHLLEEPXXAAAVARRRRXSFGSLVADMWSDSLPFRDDDADDMVVFGAMRDAFSCGWLPDGVFAEVKPEPLLSPDSSSYDGSXLAASASRTSRQGEAASAPAFVASGASTQGG

SEQ ID NO: 5741 - protein, 229 aa, Oryza sativa
MSLSLGFSAGAGVGADRLAAAPALQAAGALPPRVDVSLSLARAANGQPSSYLPLNENDSLDMVLFDVLREASAVAALSSSSSSSPELGARTTAPVVAGHPAGRKGGGGGGGGRGAAARGGAAGGRHYRGVRRRPWGKYAAEIRDPTRHGARLWLGTFGTAEEAAAAYDRAAFRMRGAKALLNFPPAVAGDGARRGAAAAAKQVGMSDGKIVIRKALDIPKWNTGNAGNL

SEQ ID NO: 5742 - protein, 345 aa, Oryza sativa
MDFSGDIDDLISLQLLHDQLLGVEADACLPVAVHHDGVAAFAEHQQGFHPAAFLPQQPMTMTPAGYVDMANDQYLGAHAAAGEAEAVYRAAAAEPVMIRFGGEVSPVSDPRRPPLTISLPPTSHAWAAAEAVHPAALLQAQAAAAAADPNDFRKYRGVRQRPWGKFAAEIRDPKKRGSRVWLGTYDTAIEAARAYDRAAFRMRGAKAILNFPNEVGSRGADFLAPPPPPPPPTTSTHGKRKRHETAAADPDVEVIGESSKSVKTETYTSPASSSLASTTTSTVTSSSTSPSPSSEAAACGGGGGSELFVPPMPSSWSWDQLEGFFGILSPLSPHPQMGFPEVAVN

SEQ ID NO: 5743 - protein, 345 aa, Oryza sativa; identical to SEQ ID NO: 5742

SEQ ID NO: 5744 - protein, 104 aa, Oryza sativa
  unsure (1)..(104): unsure at all Xaa locations
XIRDSAKNGARVWLGXTLDTAKDTALAYDRAAYRMRGSRALLNFPLRIGSEIAAAAAAAAAAAAGDKRPSPEPATSESSFSSSSSSSSSTSSSGSPKRRNRGEA

SEQ ID NO: 5745 - protein, 177 aa, Oryza sativa
  unsure (1)..(177): unsure at all Xaa locations
MXASSSPPPRRRRRRRISIRIRISAPHRRXLINFLESRRAGAMSTTNSSSSVSVPAMDAHGQEEEEEPMQVQQQQAFRGVRKRPWGKFAAEIRDSTRNGVRVWLGTFDSAEEAALAYDQAAFAMRGSAAVLNFPMEQEGASPVVALKRRHSMRAAAAGRRRKSAAPDRRIRKAEEGX

SEQ ID NO: 5746 - protein, 228 aa, Oryza sativa
  unsure (1)..(228): unsure at all Xaa locations
MXASSSPPPRRRRRRRISIRIRISAPHRRXLINFLESRRAGAMSTTNSSSSVSVPAMDAHGQEEEEEPMQVQQQQAFRGVRKRPWGKFAAEIRDSTRNGVRVWLGTFDSAEEAALAYDQAAFAMRGSAAVLNFPMEQVRRSMDMSLLQEGASPVVALKRRHSMRAAAAGRRRKSAAXXHRRIRKAVGNCLLIHHMWPWFVAPKTKPKEKKKSCCXFDSNXEYXQLLVV

SEQ ID NO: 5747 - protein, 281 aa, Oryza sativa
  unsure (1)..(281): unsure at all Xaa locations
MRRRAMAGFGLDQHLDLIRAHLLEDAHHHVLAPSPSPSPPGTGRVRPAPVSLPPRPPLLWAAASAAPRQQEECFELGGGYAGEGEGEEEDDFRRYRGVRQRPWGKYAAEIRDPARKGARVWLGTYDTAVEAARAYDRAAFQLRGSKAILNFPNEVAADAAVKWAPPVAPIPAAAMSAGRGKRVRSEEQYYLREVKKERLIMAPPENSSSSSSSAAAAAGDIWDELKGICSLPPLSPLSPHPHMAFPQLFVIDLAFGQILNSFVLLLLRXIDDHSSFIAICQ

SEQ ID NO: 5748 - protein, 273 aa, Oryza sativa; identical to SEQ ID NO: 5670

SEQ ID NO: 5749 - protein, 256 aa, Oryza sativa
  unsure (1)..(256): unsure at all Xaa locations
PTSSAPPPTCTSPTTHPPPPPPPPTRSRLLPSTRPPPPPPPRRPTSSPPPPQEQGRRRHYRGVRQRPWGKWAAEIRDPKKAARVWLGTFDTAEDAAIAYDEAALRFKGTKAKLNFPEXFQGPASSSPVASPPPPPTVAATTPPPAAGACPPPRQQQTVVPYPDLMRYAQLLQGGVGGSYMPFGGAATMSSSTVSSSSAPQILDFSTQQLIRAGPPSPMPSSGSGSATAAASSTTSASSPGAWPYGGSERKKKDSSS

SEQ ID NO: 5750 - protein, 177 aa, Oryza sativa
  unsure (1)..(177): unsure at all Xaa locations
XGLGKLNNEEEEEPMQEQAFRGVRKRPWGKFAAEIRDSTRNGVRVWLGTFDSAEEAALAYDQAAFAMRGSAAVLNFPMEQVRRSMDMSLLQEGASPVVALKRRHSMRAAAAGRRRKSAAPDPXXPSPSISPAAQAQATTPSDLYSYLSHAQRMHIFCTTLVLAVVNMWIRFHALIVX

SEQ ID NO: 5751 - protein, 269 aa, Oryza sativa
MTPTSTTRRKKTKDTSCSRPNLVSSPGTTGARRRGAASKKKRGRHFRGIRQRPWGKWAAEIRDPHKGTRVWLGTFNTPEEAARAYDVEARRLRGSKAKVNFPATPAAARPRRGNTRATAVPPPATAPAAAPPRGLKREFSPPAETALPFFTNGFVDLTTAAAPPPAMMMTSSFTDSVATSESGGSPAKKARSDDVDSSEGSVGGGSDTLGFTDELEFDPFMLFQLPYSDGYESIDSLFAAGDANSANTDMNAGVNLWSFDDFPIDGALF

SEQ ID NO: 5752 - protein, 180 aa, Oryza sativa
  unsure (1)..(180): unsure at all Xaa locations
XGDRSGSSFQTTATAAARRSYRGVRRRPWGKFAAEIRDTRRRGARVWLGTFATADEAALAYDMAALRMRGHRAHLNFPLATVQKHLERDLAGGRSSSDQTSTRARRRRRPRANTTTDAAARSVVFSGVQTATNCDHMVSFASEKDQVSMQECSKSDAGXXIDFEEIGGEYWDYLXPASCI

SEQ ID NO: 5753 - protein, 365 aa, Oryza sativa
  unsure (1)..(365): unsure at all Xaa locations
MCGGAIISGFIPPSAAAAAAAAVAKKQQGRRVTADVRPGMLRKGKAAAAEEDFEADFREFERGMSDDEAEGGGGEGRPCPRPRAAPPTADGMLTTKLGPTXDGPTARSAKHKRKNQYRGIRQRPWGKWAAEIRDPSKGVXRVWLGTYNTAEEAARAYDAEARKIRGKKAKVNFPDEPAVAXRSSPXSKTLPSKXKLAPPLKTCGDDAFFQLNSFCLQCLQRCLQSPAEPVDLMPPVKPLASTETFEMNMLSDTSSNSFGSSDFGWEDDTLTPDYTSVFVPTMPAYGEPAYLTGGAPKRMRGNGMPNLAQNMPTFDPEMKYLPLPYVESSSDESMDNLLQNDATQDGASNEGIWSLDELLMAAGAY

SEQ ID NO: 5754 - protein, 142 aa, Oryza sativa
  unsure (1)..(142): unsure at all Xaa locations
MASIEPSRPSSGPSLDSHSQYDPFGAAAAERHYRGVRRRPWGKWAAEIRDPNKAARVWLGTFDTAEAAAAAYDDAALRFKGAKAKLNFPERVRGRTGQGGFLVSPAGVSPAMAPRPPSTLPTTTTAASSPSAWPHGGGHGSX

SEQ ID NO: 5755 - protein, 334 aa, Oryza sativa; identical to SEQ ID NO: 5673

SEQ ID NO: 5756 - protein, 204 aa, Oryza sativa
  unsure (1)..(204): unsure at all Xaa locations
MCCTGDEVAGPGEQRRRPLDADAGGDKGAVATTSSSLLAAPMLSRRRQAEEMAAMVSALASVVAGGGGTSLPGSYCSELAAAAAAPSPAAPFPAGYVPSPGQHSPASAAAGDEEELPSPSSAEARKRYRGVRQRPWGKWAAEIRDPHKAARVWLGTFDTAEDAARAYDGAALRFRGSRAKLNFPEHATLPPPPPPPERRDTDTX

SEQ ID NO: 5757 - protein, 214 aa, Oryza sativa
  unsure (1)..(214): unsure at all Xaa locations
MCGGAIIYDYIPARRRLCASDFWPDADDXPTPTPXAPEKPPRAKRERKNQYRGIRQRPWGKWAAEIRDPVKGVRVWLGTYPTAEAAARAYDRAARRIRGAKAKVNFPNELRRRPRAGRGGGEGRPSRRAHAGRAPAAQDGGGVRGRRRLLLRRGQGAVRGAARVRELHELPRHPLHGGRRRLRRRRRGSRGARRALDLRRLRAAVASALVKMSQ

SEQ ID NO: 5758 - protein, 285 aa, Oryza sativa
  unsure (1)..(285): unsure at all Xaa locations
MCALATVHSSAGIASAAAELMADQRRRFRGGGDWQASVDDVVDDGGELEAAAAAAARGSVLSGEYQAQEMSTMVSALTWVVAAGHDDHGGGQWSGLVDVPATTLAGGGGGDYGHGAQGSYYYYGAAPTSTPEFVAGGQQEQLSSDVPQGGASLGLAMDEHSPTYTVEASSSADQHGGGGGGRRYRGVRQRPWGKWAAEIRDPHKAARVWLGTFETAEAAARAYDEAALRFRGSRAKLNFPEDARLSSPPAGAGAGGATAAAQTATTSSWSGSSQYPPPPRPPQQX

SEQ ID NO: 5759 - protein, 237 aa, Oryza sativa
  unsure (1)..(237): unsure at all Xaa locations
MCGGSILGDLHLPVRRTVNAGDLWGDAGKGRDGGDGLKKRKGSSWDFDVDCDDDDDDDFEADFEEFEDDYGDDDDVGFGDDDQESDMNGLKLAGFSTTKLGLGGSRKRKTRYRGIRQRPWGKWAAEIRDPRKGVRVWLGTFGTAEEAAMAYDVEARRIRGKKAKVNFPDAAAAXPRSGHGRSSAKHSPQQQKARSSSSSPASLNASDAVSKSNNNRVSSXXGAAPTPPPPPSPSTTX

SEQ ID NO: 5760 - protein, 362 aa, Oryza sativa; identical to SEQ ID NO: 5678

SEQ ID NO: 5761 - protein, 256 aa, Oryza sativa
  unsure (1)..(256): unsure at all Xaa locations
XGRPTPEISRRRRLAXASVDDVVDDGGELEAAAAAAARGSVLSGEYQAQEMSTMVSALTWVVAAGHDDHGGGQWSGLVDVPATTLAGGGGGDYGHGAQGSYYYYGAAPTSTPEFVAGGQQEQLSSDVPQGGASLGLAMDEHSPTYTVEASSSADQHGGGGGGRRYRGVRQRPWGKWAAEIRDPHKAARVWLGTFETAEAAARAYDEAALRFRGSRAKLNFPEDARLSSPPAGAGAGGATAAAQRPTSPANSTRKVX

SEQ ID NO: 5762 - protein, 308 aa, Oryza sativa
MCGGAILADLIPSPRSGGHTKKNKRRRISDDEDFEAAFEEFDAGDDDSDSDSESEEVDEYDVVVDDDDSEDGVVVLPPPPPPPPVIPHGEAIDRSRIERHGARRFRGVRKRPWGKWAAEIRDPVRGVRVWLGTFPTAESAARAYDAAARRLRGAKAKPNFPSAPPPSAAAHRRKKRRAHAATRSPSSPPATSEVTAASASASSDVPAPAFASFVGEPGHGGAKSMPTTSHTSQPAPPATVASENVDDPEVFDPYDVHGGLASYFAGGAYESLESLFAHGGDSAAVDQAASDHWPAALWSFADDGSFCF

SEQ ID NO: 5763 - protein, 308 aa, Oryza sativa; identical to SEQ ID NO: 5762

SEQ ID NO: 5764 - protein, 235 aa, Oryza sativa
MAPRTSDKTMSPAAAATGLALGVGGVAGAAAVGTGQHFRGVRKRPWGRYAAEIRDPAKKSRVWLGTFDTAEEAARAYDAVAREYRGAKAKTNFPYPSAPAAGVNSGSSNSSTVESFGSDRQAPMKAMPIPPSLELDLFHRAAAAAAAGAGGMRFPFEGYPVSHPYYFFGQAAAAAAASGCRMLKIAPAPVTVAALAQSDSDSSSIVDLAPSPPAALAKKAIAFDLDLNCPPPMEV

SEQ ID NO: 5765 - protein, 257 aa, Oryza sativa
  unsure (1)..(257): unsure at all Xaa locations
MAPRNAAEAVAVAVAEGGGAGMEPRFRGVRKRPWGRYAAEIRDPARKARVWLGTFDTAEAAARAYDSAALHFRGPKAKTNFPVXPSRTPTTTPRRRRCPRRRRWPSSARXSSTVESSSRDTPAAAPVAAAAKAQVPASPSLDLXPRDVGHGGRPAVPVPRPQGRAPRGGPTTQPTVWLGSCLSCGAASRSRGGFGYSRPSCFAFGSSAPMVFAVRKKNSNRRREEKEENKSKVSSLHAPPSRHQLINSTGISRSKSS

SEQ ID NO: 5766 - protein, 174 aa, Oryza sativa
  unsure (1)..(174): unsure at all Xaa locations
MCGGAIISDFIPXXREAHRAATGSKRALCASDFWPSASXRKPPTSTTSPPPAPXTPDQAAEEPTKKRERKTLYRGIRRRPWGKWAAEIRDPAKGARVWLGTFATAEAAARAYDRAARRIRGAKAKVNFPNEDXRHSTTRPPTATVLRVKMNAPRNKMQFVFKKKKKKKKKKKKX

SEQ ID NO: 5767 - protein, 396 aa, Oryza sativa
MCGGAIISGFIPPSAAAAAAAAAAKKQQGRRVTADVLWPGMLRKGKAAAAEEDFEADFREFERGMSDDEAEGGGGEEEEDDDDVVVVVPPPAAARFVVRAAAKAAPPTADGMLTTKLVQHDGPTARSAKHKRKNQYRGIRQRPWGKWAAEIRDPSKGVRVWLGTYNTAEEAARAYDAEARKIRGKKAKVNFPDEPAVAQKLSLKQNAAKQEKLAPPLKTCGDDAFFQLNSSDNDLFAMLAKVPAKPAEPVDLMPPVKPLASTETFEMNMLSDTSSNSFGSSDFGWEDDTLTPDYTSVFVPNAAMPAYGEPAYLTGGAPKRMRNNYGIAVPQGNGMPNLAQNMPTFDPEMKYLPLPYVESSSDESMDNLLQNDATQDGASNEGIWSLDELLMAAGAY

SEQ ID NO: 5768 - protein, 224 aa, Oryza sativa
  unsure (1)..(224): unsure at all Xaa locations
MALSEPDLAAETEAIVSALTHVVAYGGGGPPPSEETAASRGVRRRPWGKWAAEIRDPHRAARVWLGTFATAEDAARAYDAAALRFRGGRARLNFPEDARFLXAAADERRATDAAAAAAAASSAPAALLESQPGDVADCLDYSRILAGAPERPTSSTVPDGFFGGGGNGRFLHSWSIGTSPSPSGSGSGGAGGGGGGGGGGAPVRPLFHGGNGWEQRGDSAYNGF

SEQ ID NO: 5769 - protein, 327 aa, Oryza sativa
  unsure (1)..(327): unsure at all Xaa locations
MAAAIDMYKYNTSTHQIASSDQELMKALEPFIRSASSSSASSPXATTTTLLLLPXAKILTCPPXSYPTSSITTAAATTTSSFSQLPPLMGLTHLGPAQIQQIQAQXXLAQQQQQRALAGAFLRPRGQPMKQSGSPPRAGPFAAVAGAAQSKLYRGVRQRHWGKWVAEIRLPKNRTRLWLGTFDTAEDAALAYDKAGXFRLRGDLARLNFPTLRRXRGAHARXXPLHASVDAKLTAICQSLATSSSKNTPAESAASAAEPESPKCSASTEGEXXSVSAGSPPPPTPLSPPVPEMEKLDFXXEAPWDESETFHLRKYPSWEIDWDSILS

SEQ ID NO: 5770 - protein, 420 aa, Oryza sativa
  unsure (1)..(420): unsure at all Xaa locations
MENTIVTSIIILERKNAQLATAGYPWNIRASSNAAAAHRTPNTGIVPTSHPATSPANRKHRWTPPTRVDLLNTWRARGGTARLHPSCRHAAPDPVEAAPSVTASTLRCRNYASPRGAHSAIHSHPPTAAATISKPTNTHSHRELERGKKSFRSERLRASSSPTSPFSFPHAFAYGGGLAQQPELSPAQMHYIQARLHLQRQAAQAGPLGPRAQPMKASSSSASAAGAAATPPRPQKLYRGVRQRHWGKWVAEIRLPRNRTRLWLGTFDTAEEAALAYDQAAYRLRGDAARLNFPDXXAASRGPLHASVDAKLQTLCQNIAAAKNAKKSSVSASAAATSSAPTSNCSSPSSDDASSCLESADSSPSLSPSSAATTAETPATXXAGDAAARLQPPWDEAAAFALTKYPSYEIDWDSLLAANX

SEQ ID NO: 5771 - protein, 116 aa, Oryza sativa
  unsure (1)..(116): unsure at all Xaa locations
HESPLLSPPARGPFPIPTASIPIPISSIPELGAGMRRGGAXGGGRGGXARFRGVRKRPWGRYAAEIRDPAKKARVWLGTYDSAEDAARAYDAAARALRGAKAKTNFPLSLPHAQPX

SEQ ID NO: 5772 - protein, 153 aa, Oryza sativa
  unsure (1)..(153): unsure at all Xaa locations
MEQHRGFIGVRKRPWGRFAAEIRDSTRNGVRVWLGTFETAEAAAMAYDQAALSARGAAAALNFPVERVRESLRALALGAAGGSPVLALKGRHSKRKRRKRSELAGATATANKTTTTTSATTXXGSTSRSSSXLEDLGADYLEELLWMSEQTSH

SEQ ID NO: 5773 - protein, 368 aa, Oryza sativa
  unsure (1)..(368): unsure at all Xaa locations
GRSERRERRRRRRRWWQEVEGEGGDAHTAAAAAGDGFGGLVGGIAAAAQEDWAEXPDRLLRSASSLSTSSSAPPSPRSSSASDAPVXASSRRRRRRPRHRRRDTSSPSRTRPXTTTVGGSPRLHPLSWQQSSMSQPASPQQQQQQPLQHQQMISFGASPPCSTTQFVVPENAQQQQMLLRYWSEALNLSPRGGPGGVPPWLYQQLLRVPPPPQKLYRGVRQRHWGKWVAEIRLPRNRTRLWLGTFDTAEDAAMAYDREAFKLRGENARLNFPDRFLGKGRAGSVHGEETTTASSSNLSSRRGAVPGRNASRAGGVRRHVGCSRXESWFSTWGPGSSFWDDYDMPVTSSSSDLPPQGTPQTPTFMWKED

SEQ ID NO: 5774 - protein, 105 aa, Oryza sativa
  unsure (1)..(105): unsure at all Xaa locations
XHASAHSSVPLPAPPTPPRQQQMIGVRKRPWGKFAAEIRDSTRKGARVWLGTFDSPEAAAMAYDQAVFSVRGAFAVLNFPLHRVXQESLPDSPSGAAREGIARVX

SEQ ID NO: 5775 - protein, 329 aa, Oryza sativa; identical to SEQ ID NO: 5682

SEQ ID NO: 5776 - protein, 408 aa, Oryza sativa
  unsure (1)..(408): unsure at all Xaa locations
MASGAGELCYKRAPMASLTPPRPPFPLSPTHTPRSTAILPPPPPPSPSPRTPTATVSSSEVRKALDLSDFERLQGKVFSKPSSSSSSSGSPTCSSTVSWLGCLQRARDPGXLLDPGLPDLLFFXXSSSLCSSVRLVAKRGSFSTPHLLDLPPKSHLPTSPFSFPHAFAYGGGLAQQPELSPAQMHYIQARLHLQRQAAXXAGPLGPRAQPMKASSSSASAAGAAATPPGPQKLYRGVRQRHWGKWVAEIRLPRNRTRLWLGTFDTAEEAALAYDQAAYRLRGDAARLNFPDNAASRGPLHASVDAKLQTLCQNIAAAKNAKKSSVSASAAATSSAPTSNCSSPSSDDASSCLESADSSPSLSPSSAATTAETPATVPDSEAPWDEAAAFALTKYPSYEIDWDSLLAAN

SEQ ID NO: 5777 - protein, 286 aa, Oryza sativa
  unsure (1)..(286): unsure at all Xaa locations
MVSALARVVAGGAAAAARGVQERRREEQAMHELXRDTPAGARHRRSWIGAELGPQSASAATMDEHHSPVGGGGNAEGPDTPRRRYRGVRQRPWGKWAAEIRDPHKAARVWLGTFETAEAAARAYDEAALRFRGSRAKLNFPEDARLYPXPPPPMLLQGRLTTATPNQGTLLPFWRRRRWLHDQSLRRRWRRRHERLPRXPTTLSLPPLFPWPPSPPPPPPRRATTTRPTAARTRACRRRRSGTGRTPWSTRRRRRHGRSRAITTTRRRRTRSSRRILSCSLSLLEE

SEQ ID NO: 5778 - protein, 373 aa, Oryza sativa; identical to SEQ ID NO: 5683

SEQ ID NO: 5779 - protein, 267 aa, Oryza sativa
  unsure (1)..(267): unsure at all Xaa locations
MTEKVIPAMAAARQDSCKTKLDERGGSHQAPSSARWISSEQEHSIIVAALRYVVSGCTTPPPEIVTVACGEACALCGIDGCLGCDFFXGPRRRXNEEAVMATDYAAAAAAAAVAGGSGGKRVRRRRKKNVYRGVRHRPWGKWAAEIRDPRRAVRKWLGTFDTAEEAARAYDRAALEFRGARAKLNFPCSDPCPAKETAMAASDDNGRADDSDSVAVQRGCRGDDDAGGLADGRGRSRQQPALGWLAGPDEAGXSGHLVPAIFRARFL

SEQ ID NO: 5780 - protein, 117 aa, Oryza sativa
  unsure (1)..(117): unsure at all Xaa locations
XSKLVRFHCNPTPPHAAASAKPTARFRGVRQRPWGRFAAEIRDPHLRRRLWLGTFDTAEEAAAAYDAASVRLRGSSAATNFASVRCYSLPLELPKPTISPPEAAVRPITLPKKKKKK

SEQ ID NO: 5781 - protein, 191 aa, Oryza sativa
  unsure (1)..(191): unsure at all Xaa locations
YHLLSPLSSPQTPTHHRRRAGMEPRFRGVRKRPWGRYAAEIRDPARKARVWLGTFDTAEAAARAYDSAALHFRGPKAKTNFPVASSSRDTPAAAPVAAAAKAQVPASPSLDLSLGMXGHGGRPAVPVPRPQXVAVTVAVAAPVPRRPAVVSVKKEVARLDEQSDTGSSSSVVDASPAVGVGLDLNLPPPIE

SEQ ID NO: 5782 - protein, 170 aa, Oryza sativa
MPNDMQKLIAEVRQLSLNSTQVERVSGRNRSIDIMDGDGGGGWDDQGNGGGETTKYRGVRRRPSGKFAAEIRDSSRQSVRVWLGTFDTAEEAARAYDRAAYAMRGHLAVLNFPAEARNYVRGSGSSSSSRQHQQRQVIELECLDDQVLQEMLKGGDDQYRSAAGSKRNNY

SEQ ID NO: 5783 - protein, 467 aa, Oryza sativa
MAPEVWMDCLLWARWSYWSGCMWQMPPGDEHGDRGSDHCEDRAHAVRPRVRPRVEPIEGKKKRKRKEKKEEEERTRTLAYHFAPLRKQSTTASAARAHRRRAMCGGAIIHHLKGHPEGSRRATEGLLWPEKKKPRWGGGGRRHFGGFVEEDDEDFEADFEEFEVDSGDSDLELGEEDDDDVVEIKPAAFKRALSRDNLSTITTAGFDGPAAKSAQRKRKNQFRGIRHRPWGKWAAEIRDPRKGVRVWLGTFNSAEEAARAYDAEARTIRGKKPKVNFPEAPTTAQKRRAGSTTAKAPKSSVEQKPTVKPAFNNCANAMAFVYPSANFTSNKPFVQPDNMPFVPAMNSAAPIEDPIINSEQGSNSFGCSDFGWENDTKTPDITSIAPISTIAEVDESAFIKSSTNPMVPPVMENSGVDLPDLEPNMRFLLDDGGGDSIDSLFNLDGSQDVVSNMDLWSFDDMPVSDFY

SEQ ID NO: 5784 - protein, 235 aa, Oryza sativa
MAPRAATVEKVAVAPPTGLGLGVGGGVGAGGPHYRGVRKRPWGRYAAEIRDPAKKSRVWLGTYDTAEEAARAYDAAAREFRGAKAKTNFPFASQSMVGCGGSPSSNSTVDTGGGGVQTPMRAMPLPPTLDLDLFHRAAAVTAVAGTGVRFPFRGYPVARPATHPYFFYEQAAAAAAAEAGYRMMKLAPPVTVAAVAQSDSDSSSVVDLAPSPPAVTANKAAAFDLDLNRPPPVEN

SEQ ID NO: 5785 - protein, 365 aa, Oryza sativa
MCGGAIIHHLKGHPEGSRRATEGLLWPEKKKPRWGGGGRRHFGGFVEEDDEDFEADFEEFEVDSGDSDLELGEEDDDDVVEIKPAAFKRALSRDNLSTITTAGFDGPAAKSAQRKRKNQFRGIRHRPWGKWAAEIRDPRKGVRVWLGTFNSAEEAARAYDAEARTIRGKKPKVNFPEAPTTAQKRRAGSTTAKAPKSSVEQKPTVKPAFNNCANAMAFVYPSANFTSNKPFVQPDNMPFVPAMNSAAPIEDPIINSEQGSNSFGCSDFGWENDTKTPDITSIAPISTIAEVDESAFIKSSTNPMVPPVMENSGVDLPDLEPNMRFLLDDGGGDSIDSLFNLDGSQDVVSNMDLWSFDDMPVSDFY

SEQ ID NO: 5786 - protein, 235 aa, Oryza sativa; identical to SEQ ID NO: 5784

SEQ ID NO: 5787 - protein, 154 aa, Oryza sativa
RVAETCLSLAVAAADPSVKAQRKHRLSLVEANGAGHGSGRRRWSSGRWAREAHYRGVRKRPWGRYAAEIRDPWKKTRVWLGTYDTPVEAALAYDRAAVALRGVKARTNFGSGSSAAAASPPHAPAAAAAGPWSLRRARHQPPFAVALCLLPGEG

SEQ ID NO: 5788 - protein, 243 aa, Oryza sativa
  unsure (1)..(243): unsure at all Xaa locations
MPPARLRFVPSLVPPRHSPSRTRSRTVAGWPSSQSSARPRCTTSRPASTSSARPQKLYRGVRQRHWGKWVAEIRLPRNRTRLWLGTFDTAEEAALAYDQAAYRLRGDAARLNFPDXXAASRGPLHASVDAKLQTLCQNIAAAKNAKKSSVSASAAATSSAPTSNCSSPSSDDASSCLESADSSPSLSPSSAATTAETPATXXAGDAAARLQPPWDEAAAFALTKYPSYEIDWDSLLAANXHHH

SEQ ID NO: 5789 - protein, 223 aa, Oryza sativa
  unsure (1)..(223): unsure at all Xaa locations
XPRVRPRVRPRVRSQRLVTSRSRRPRRRRRXRKTAYRGIRRRPWGRWAAEIRDPRKGARVWLGTYATAEEAARAYDVVARDIRGAKAKLNFPPXHPPPPXPPPXPRSDAKPPPRRTTTTTTTSRRAQAPRRRRRCLPPRRRPXEHQLRECMSGLEAFLGLXXEEEDDGGAGEPWDAVDMMLEXARREWQRCHAHASKLIHACSSKIYNFSTTTMLITTYCVGK

SEQ ID NO: 5790 - protein, 236 aa, Oryza sativa
  unsure (1)..(236): unsure at all Xaa locations
VWISTSSPRRRRRRRRRRGGSSSSSSSGSRRGVEEGTRRXYLGVRRRPWGRYAAEIRDPATKERHWLGTFDTAEEAAVAYDRAARTIRGAAARTNFAYPDLPPGSSLTPYLSPDXSPPTXPPPPPTAPAPAPTPXTAAALPAPAQPAHGGDAQEMAYGGGGGQNXWVACSTSSAAAAARPSELEFGGYDDAGASAAAADFEEGYVHSPMFSPMPAADEVAADGFQLGGSSSSSYYY

SEQ ID NO: 5791 - protein, 321 aa, Oryza sativa; identical to SEQ ID NO: 5686

SEQ ID NO: 5792 - protein, 207 aa, Oryza sativa
  unsure (1)..(207): unsure at all Xaa locations
MALGGAVEYGQLVHGAAAPVAPAKLYRGVRQRHWGKWVAEIRLPRNRTRLWLGTYDTAEDAALAYDGAAFRMRGDAARLNFPELRRGGRHHAPXXLSASVDAKILQATTTTTADTAAADRRRRTPRRRRRRASSRPXPGCCSVSEASTTTTADAADVSSTGSSPSPTSSNQAATATPPAPRPPPPLPETFALRRYPSWEIDWDAILS

SEQ ID NO: 5793 - protein, 208 aa, Oryza sativa
  unsure (1)..(208): unsure at all Xaa locations
PRAEFGRGSSFFYPPRPSSPRGEAAAPRYRGVRKRPWGRFAAEIRDPAKRARVWLGTYDSAEAAARAYDVAARNLRGPARQNQLPARLLPPAPVAPLXXPPREGGGGGAAXVAGPACSASSTVESSSGPRGPRPAATAAAVPRRRVPRPAPPAPDAGCHSDCASSASVVDDADDASTVRSRVAAFDLNLPPXXLDRDHVDXXCTDLRL

SEQ ID NO: 5794 - protein, 191 aa, Oryza sativa
LTIGKAAPPAPQKLYRGVRQRHWGKWVAEIRLPRNRTRLWLGTFDTAEEAALTYDQAAYRLRGDAARLNFPDNAASRGPLDAAVDAKLQAICDTIAASKNASSRSRGGAGRAMPINAPLVAAASSSSGSDHSGGGDDGGSETSSSSAAASPLAEMEQLDFSEVPWDEAEGFALTKYPSYEIDWDSLLNNNN

SEQ ID NO: 5795 - protein, 367 aa, Oryza sativa; identical to SEQ ID NO: 5687

SEQ ID NO: 5796 - protein, 312 aa, Oryza sativa; identical to SEQ ID NO: 5689

SEQ ID NO: 5797 - protein, 292 aa, Oryza sativa; identical to SEQ ID NO: 5690

SEQ ID NO: 5798 - protein, 224 aa, Oryza sativa
  unsure (1)..(224): unsure at all Xaa locations
MSRRSYSACAARARRAAASPXAPPLPMKRHGAVAVAAAAAARAPVKLYXRGVRQRHWGKWVAEIRLPRNRTRLWLGTFDTAEEAALAYDSAAFRLRGESARLNFPELRRGGAHLGPPLHAGVDAKLHAICHGMDLPQPQPQTQSNATTTTMSTTATNTPSPFFSSESPVVKSEPVCSASESSSSADGDVSSTGSSDSEAPWDESESFLLHKYPSLEIDWDAILS

SEQ ID NO: 5799 - protein, 154 aa, Oryza sativa
  unsure (1)..(154): unsure at all Xaa locations
XTPSITCKDNSNYLNQIRQKHHKYRGVRQRPWGRWASEIRDPVKGARVWLGTFDTAVEAARAYDAEARRIHGHKARTNFPPDEPPLPAPSPLIRVRRRSASCSTTTTTTTAWPVETARRRRRRRTEPPLARRRRRWRPASEAMSSYCWSAAPTT

SEQ ID NO: 5800 - protein, 326 aa, Oryza sativa
MCGGAILADFTPARVPRRLTAAELLPVTPTPPAAERRTTRKRKSDVDFEAEFELFEDDDDDDEFELSDDGDESLAVSCVSSPKSKAVPSFSFSSDVSSSSRPRRRVAAAAAGRRKASKKSKYRGVRLRPSGRFAAEIRDPKKGRRVWLGTYGSAEEAAMAYDREARRIRGKGARLNFPRDGDGSPRRSNDRPCWTIDLNLPAAAVSGDDDDAMAVDAADADAGSAGRAAAYADQEALSAAKCKIKQCPRDEQMASATPELMEEDASSSRNMVPLSMALQLQYAAMIAECDREMEEIAAVERDLERRRRQVFERRGHLVRQASLLLD

SEQ ID NO: 5801 - protein, 73 aa, Oryza sativa
  unsure (1)..(73): unsure at all Xaa locations
XHNNGVNRRPWGKYKVKIRDQTRHGARLWLGTFGTPEKAAAAYDRAAFRMRGAKAMLHLPPAVAGDGARRGAA

SEQ ID NO: 5802 - protein, 211 aa, Oryza sativa
  unsure (1)..(211): unsure at all Xaa locations
FHRSKHISPRPISIRQVSTAARAPVKLYRGVRQRHWGKWVAEIRLPRNRTRLWLGTFDTXEEAALAYDSAAFRLRGESARLNFPELRRGGAHLGPPLHAGVDAKLHAICHGMDXXPQPQPQTQSNATTTTMSTTATNTPSPFFSSESPVVKSEPVCSASESSSSADGDVSSTGSSDVVPEMQPPWDESVLHKYPSLEIDWDAILSXMQWLN

SEQ ID NO: 5803 - protein, 93 aa, Oryza sativa
  unsure (1)..(93): unsure at all Xaa locations
HTPSITCKERSYPYRGVRQRPWGRWASEIRDPVKGARVWLGTFDTAVEAARAYDAEARRIHGHKARTNFPPDEPPLPAPSPLLINECKYLXKX

SEQ ID NO: 5804 - protein, 189 aa, Oryza sativa
  unsure (1)..(189): unsure at all Xaa locations
AAASVQGGLXSRFSFLGFLICSLLAAMSAEQSSPGSSRRRPLRQEEEDDDDVVVVVPPPAAARFVVRAAAKAAPPTAXXGMLTTKLVQHDGPTARSAKHKRKNQYRGIRQRPWGKWAAEIRDPSKGVRVWLGTYNTSXEEAARAYDAEARKIRGKKAKVNFPDEPAAAQKLSREQNARKQEKLAPPLET

SEQ ID NO: 5805 - protein, 323 aa, Oryza sativa
  unsure (1)..(323): unsure at all Xaa locations
MAAGYSDGGGGGWARRRWGTGVAAAGDSDGGGDGGDGGRAQQRRGTATATSEQSCLRTLPPASFPGEVRSAVSSLLLSPGGSALDTVFSHLPPPVTIPPLGSSVYYRQSELLRHFAASQAAXRRRAPPPPPARRRAAAAGLDDGAPRKLYRGVRQRQWGKWVAEIRLPQNRVRVWLGTYDSPETAAHAYDRAAFKLRGEYARLNFPGVMDGRDCXXDNLRQLRDAVDAKIQAIRVRIKRARARRQREESKKSQRAEDAKAATPSRPVASEPASETTTTTTTTSSSYGSPDGVLSMSAASVDGDCPLERMPSFDPELIWEMLNF

SEQ ID NO: 5806 - protein, 301 aa, Oryza sativa
  unsure (1)..(301): unsure at all Xaa locations
XGEAGEAEDDDVAGRASQGVLPXRAAAQATAGNGAVAAAAAVEGEINTDGLAALAVEAXRVLRPQTGRAGWRRPSRERERVSSGRXVVEGEEGLTAELLVAAERKYRGARKRPWGKYAAEIRIRNMKERVWLGTFGTAEEAAWAYDTAATVIHGDKATTNFPRAPLRPATTPSRRRRAAAAAAPSAPASEAPPPPPPSSALVPEXRATSXKAAVESAGAGVDXGRGGGRGGRRGRGRTPARVVAEDSPMLQATTPAAAPAPAPAXGTCTGQSSHLPADDHHDILSSSFWQDPAGDGEDTQX

SEQ ID NO: 5807 - protein, 326 aa, Oryza sativa
MCGGAILADFTPARVPRRLTAAELLPVTPTPPAAERRTTRKRKSDVDFEAEFELFEDDDDDDEFELSDDGDESLAVSCVSSPKSKAVPSFSFSSDVSSSSRPRRRVAAAAAGRRKASKKSKYRGVRRRPSGRFAAEIRDPKKGRRVWLGTYGSAEEAAMAYDREARRIRGKGARLNLLRDGDGSPRRSNDRPCWTIDLNLPAAAVSGDDDDAMAVDAADADAGSAGRAAAYADQEALSAAKCKIKQCPRDEQMASATPELMEEDASSSRNMVPLSMALQLQYAAMIAECDREMEEIAAVERDLERRRRQVFERRGHLVRQASLLLD

SEQ ID NO: 5808 - protein, 595 aa, Oryza sativa
MCGGAILADFTPARVPRRLTAAELLPVTPTPPAAERRTTRKRKSDVDFEAEFELFEDDDDDDEFELSDDGDESLAVSCVSSPKSKAVPSFSCTMRWRNLACFLEGFSPDGNLNFTRFLLLLLISSIAGGSFVGCLLELQAAAARGGGGGRSSEGEQEEQVQGRRRRPSGRFAAEIRDPKKGRRVWLGTYGSAEEAAMAYDREARRIRGKGARLNFPRDGDGSPRRSNDRPCWTIDLNLPAAAVSGDDDDAMAVDAADADAGSAGRAAAYADQEALSAAKCKIKQCPRDEQMASATPELMEEDASSSRNMVPLSMALQLQYAAMIAECDREMEEIAAVERDLERRRRQWQGLVLFSNKSSIKFLIHAARFSTAKWVSREIYSSIRALGFPEMASEQAAESYTVEELVAVNPYNPDILNDLEGFVNDQVSNQTYNLDANLSLLRLYQFEPERLSVQIVSRILIKQMEEQFKTLIVLSHYLETARFRQFWDEASKNRNILDVVPGFEQAIQSYAIHVLSLTYQKVPRPVLAEAINIEGLALDKFLEHHIANSGWVIEKGARSQLIVLPRNEFNHPELKKNTAETVPFEHVTRIFPVLS

SEQ ID NO: 5809 - protein, 247 aa, Oryza sativa
  unsure (1)..(247): unsure at all Xaa locations
GVLGAAEAGEPAVAAVVADEXSGRRRGAXRRRAQEPGRFLGVRRRPWGRYAAEIRDPTTKERHWLGTFDTAQEAALAYDRAALSMKGAQARTNFVYTHAAYNYPPFLAPFHAPQYAAAAAAPSSVQYGGGVGAAPHIGSYGHHHXPPPPPRTWXAASGASSVGECSTMPVMVPVDPHRSSMSSSLLDMDRNGHDFLFSXXADDNSGYLSSVVPESCLRPRGGGAAADHQDMRRYSTPTLHSASSPIX

SEQ ID NO: 5810 - protein, 160 aa, Oryza sativa
  unsure (1)..(160): unsure at all Xaa locations
XARGELIPSAPSSRCVTGGHVWPVAVYNAKKKGARPADLKTAFQDFYNDSDDEEMMLEESEEEEATSEHKPFVFRAKKQTSAASSRCRKPAQYRGVRRGPWVKWSAEIRDPVKGXIRVWLGTFTNTEAAALAYEEAARAIRGDRAKLNFPSATTPDTRKX

SEQ ID NO: 5811 - protein, 182 aa, Oryza sativa
MRRRVSSSSSSSSSSSPARHHKARRSRRKLAVDEDWEAAFREFLSRDHDDDDDDHDGQHVVVAPLIRGSDKCVHGHEVVASTVGGGASGGRRRADDDDGERRRRRRREKRSYPYRGIRQRPWGRWASEIRDPVKGIRVWLGTFDTAEGAARAYDDEVRRIYGGNAKTNFPPSPPRLSTLIRV

SEQ ID NO: 5812 - protein, 225 aa, Oryza sativa
MDDSSFGSEPTTSSSGGEAPASPPSTASSSSDGAGGKKKRPRKDGHHPTYRGVRMRSWGKWVSEIREPRKKSRIWLGTFATAEMAARAHDVAALAIKGRAAHLNFPDLAHELPRPATAAPKDVQAAAALAAAADFPASSANAGASNNPDGSDDASAGSASPPPPPDAADDALFDLPDLLLDLRYGPPSSGLSCASSWEDEVGLISGAGAAAAGVFRLEEPLLWEY

SEQ ID NO: 5813 - protein, 225 aa, Oryza sativa; identical to SEQ ID NO: 5812

SEQ ID NO: 5814 - protein, 93 aa, Oryza sativa
  unsure (1)..(93): unsure at all Xaa locations
XSCGRTRGLCTMAIVGFDGPAAKLAKRKRKNQFRGIRQRPWGKWAAEIRDPRMGVRVWLGSFNSAVEAVRAYDAEALKICGKKAKVNFTEASX

SEQ ID NO: 5815 - protein, 182 aa, Oryza sativa
  unsure (1)..(182): unsure at all Xaa locations
MARPQQRYRGVRQRHWGSWVSEIRHPLLKTRIXWLGTFETAEDAARAYDEAARIMCGPRARTNFPLADATAAAAAAAASSSFLSAALVAKLHRFNLASVQATQRQREAAATAAAASSASATTPPLGNAAAADDDARTTTTYGAEWSGRFLEEQHVEQMIDELLDYFSMEICSLCDTHTHTLF

SEQ ID NO: 5816 - protein, 130 aa, Oryza sativa
  unsure (1)..(130): unsure at all Xaa locations
PSTPSPPPPPSEPPRLALAHQAPARAHVHPAMRKSKQPQPQPSPEIRYRGVRKRPSGRYAAEIRDPAKKTPIWLGTFDSAEVAARAYDDAARSLRGPTARTNFPLXPRRPRPRPGRRRRQRRPPRPATAA

SEQ ID NO: 5817 - protein, 47 aa, Oryza sativa
  unsure (1)..(47): unsure at all Xaa locations
XGKHYRGVRQRXWGKFAAXIRDXAKNGARXXLGTFDTXEDAAXAYDX

SEQ ID NO: 5818 - protein, 237 aa, Oryza sativa
MQRIKSEIERSIETKAVRGGGGGEKRGRSGDGGRHPSYRGVRMRAWGKWVSEIREPRKKSRIWLGTFPTPEMAARAHDAAALVVKGPAAVLNFPDMAASLPRPASASPRDVQAAAARAAAMEPPQPPPSSLTVQADSAAAASPKNGGVSGAGAADDELEAIVELPRLDELDAAELVFGAAFQDTAAEHPWCDPVWIDGGYAAAAAAAAAAAAHDDLFGLDADHHGWAQSVGALLWNL

SEQ ID NO: 5819 - protein, 74 aa, Oryza sativa
  unsure (1)..(74): unsure at all Xaa locations
XHEDPKKRGSRVWLGTYDTAIEAARAYNRAAFRMRGAKAILNFPNEVGSRGADFLAPPPPPPPPITSTHGKRKX

SEQ ID NO: 5820 - protein, 372 aa, Oryza sativa
RWIRGRRRRRSCRRLEMPPVQPGRKCGGEERAGTSLLPETIKRWAELNNQQDDPQGPKKARNEPAKGSKKGCMKGKGGPENTRCDFRGVRQRTWGKWVAEIREPNRQSRLWLGTFPTAEAAACAYDEAARAMYGPMARTNFGQHHAPAASVQVPVAQAAVKCALPGGGLTASKSRTSTQGASADVQDVLTGGLSACESTTTTINNQSDVVSTLHKPEEVSEISSPRGAPPAVLEDGSNEDKAESVTYDENIVSQQRAPPEAEASNGRGEEVFEPLEPIASLPEDQGDYCFDIDEMLRMMEADPTNEGLWKGDKDGSDAILELGQDEPFYYEGVDPGMLDNLLRSDEPAWLLADPAMFISGGFEDDSQFFEGL

SEQ ID NO: 5821 - protein, 145 aa, Oryza sativa
  unsure (1)..(145): unsure at all Xaa locations
CSXHERPQARRIQHHEAGPRQQQEXRTTRRRGIRQRPWGKWAAAITDPSKGMRGWLGTFGTGEDGVMAYDMKARRIRRKKAKVNLRDTVADGPKRPRRSSAKHSPHKQKARSSAPSTASLNASDANQDQQQPGQLGWEQDRHYRX

SEQ ID NO: 5822 - protein, 217 aa, Oryza sativa
  unsure (1)..(217): unsure at all Xaa locations
XGFPHASLPRSDLAAAAASLYSRVAPEADRSNVXPRAAAGSSGKHPFYRGIRSRSGKWVSEIREPRKARRIWLGTFPTAEMAAVAYDVAARALRGPDAALNFPDLAASRTAPPASSSADDIRAAAAAAAASLQHDRAGGGIAXLPPLDGGAQQEGSSGAGAGSHQYFLDEEALFETPQFLRNMAAGMMMSPPRLSPSSSDDSPESEAGGSLWSYRDP

SEQ ID NO: 5823 - protein, 252 aa, Oryza sativa
GQSKKKFRGVRQRHWGSWVSEIRHPLLKRRVWLGTFETAEEAARAYDEAAILMSGRNAKTNFPVARNATGELTPAAAGSGSSSSMTANGGGNSLSQILSAKLRKCCKTPSPSLTCLRLDPEKSHIGVWQKRAGARADSSWVMTVELNKAVSSSDQPTPSDSTVTTTSTSTTGSPSPPPPAMDDEERIALQMIEELLGRSGLVALLFLSDYLLDFHQKKMRNMMKVIFVNKTCFLNGFKRKKDMLYRIILLQS

SEQ ID NO: 5824 - protein, 315 aa, Oryza sativa; identical to SEQ ID NO: 5695

SEQ ID NO: 5825 - protein, 105 aa, Oryza sativa
MVQPKKKFRGVRQRHWGSWVSEIRHPLLKRRVWLGTFETAEEAARAYDEAAVLMSGRNAKTNFPVQRNSTGDLATAADRDARSNGGSRNSSAGNLSQILSAKLRK

SEQ ID NO: 5826 - protein, 228 aa, Oryza sativa
  unsure (1)..(228): unsure at all Xaa locations
MGQSKKKFRGVRQRHWGSWVSEIRHPLLKRRVWLGTFETAEEAARAYDEAAILMSGRNAETNFPVARNATGELTPAAAGSGSSSSMTANGGGNSLSQILSAKLRKCCKTPSPSLTCLRLDPEKSHIGVWQKRAGARADSSWVMTVELNKAVSSSDQPTPSDSTVTTTSTSTTGSPSPPPPAMDDEERIALQMIEELLGRSGPGSPSHGLLHGGEGSLVICMYKTSXSL

SEQ ID NO: 5827 - protein, 180 aa, Oryza sativa
  unsure (1)..(180): unsure at all Xaa locations
TTSSSGGEAPASPPSTASSSSDGAGGKKKRPRKDGHHPTYRGVRMRSWGKWVSEIREPRKKSRIWLGTFATAEMAARAHDVAALAIKGRAAHLNFPDLAHELPRPATAAPKDVQAAAALAAAAXFPASSXXSASPPPPPDAADDALFDLPDLLLDLRYGPPSSGLSCASSWEDEVGLISG

SEQ ID NO: 5828 - protein, 287 aa, Oryza sativa
MEAAAIHAPTTTTSSDSGSCVTNGTREKREISKHKQLKRKRSTSPAPPPGCGGGQGQEAAVETDADAGAAGEEESSSCGGAGAGEGERKRGDAGRHPSYRGVRRRSWGKWVSEIREPRKKSRIWLGTFPTAEMAARAHDVAALAIKGRAAHLNFPSLAHTLPRPASTSPSDIQAAAALAAAAAATDQCESSSSAVAAATATDAEAAESTSSAAASPCAATSSVEENALFDLPDLLLDLSDGLWCSPVWTTAPADQYDAGDDGDDAAAPLLWAEQCWMDAPAAPVQPD

SEQ ID NO: 5829 - protein, 287 aa, Oryza sativa; identical to SEQ ID NO: 5828

SEQ ID NO: 5830 - protein, 199 aa, Oryza sativa
  unsure (1)..(199): unsure at all Xaa locations
MDDSSFGSEPTTSSSGGEAPASPPSTASSSSDGAGGKKKRPRKDGHHPTYRGVRMRSWGKWVSEIREPRKKSRIWLGTFATAEMAARAHDVAALAIKGRAAHLNFPDLAHELPRPATAAPKDVQAAAALAAAAXFPASSANAGASNNPDGSDDASXRYGPPSSGLSCASSWEDEVGLISGAGAAAAGVFRLEEPLLWEY

SEQ ID NO: 5831 - protein, 274 aa, Oryza sativa
  unsure (1)..(274): unsure at all Xaa locations
MEADASHTPTTSSSSSTSSLVDNGAQDRPKSSKPKHAAKKRKRAAAEEPANAAHGAGEDTSSCSTDDNAAASGKAQAGGGGGGVDSXAAPAPPPRRRGAAXKHPSYRGVRRRSWGKWVSEIREPRKKSRIWLGTFPTAEMAARAHDVAALAIKGRNAHLNFPDSAHELPRPESTSPADIQAAAAKAAAEVRCEEESSPSSSPTAEQPEEEAXXALTRCTPTAAXDNALFDLPDLLLDLRDGLWWSPVWPAALAAEEYDGGDAVVLNEPLLWAEX

SEQ ID NO: 5832 - protein, 152 aa, Oryza sativa
TTTPQQMMMRRRRARASSEYLGVRRRPWGRYAAEIRNPYTKERHWLGTFDTAEEAAVAYDLSAISISGAAAARTNFLYPDMHHHHPSPPQHALSPAVPPPPPPPPPSPLYDDDYLSPAAAEEEVEAGDDESLTIATILQSFQYQQSVPPASS

SEQ ID NO: 5833 - protein, 233 aa, Oryza sativa
MQGEYHRSSSEDSAASAAAAAAAAAAAMAPLAAAAAAVAAKEEQAAAAAVLPLQQQQPRRQYRGVRMRKWGKWVAEIREPHKRTRIWLGSYATPVAAARAYDTAVFYLRGRSARLNFPEEISSLASLSEGGGASEPREPDGGTLSAASIRKKAIEVGSRVDALQTGMMVAPHGEEQHHHHEQKHQRTAWSGRAKNPDLNQAPSPENSDADRSQQNRLRAAKIDQRLRQHAASV

SEQ ID NO: 5834 - protein, 216 aa, Oryza sativa
  unsure (1)..(216): unsure at all Xaa locations
MARLTTLITSTSLPPQPRAHSSLSRRERALSLAATTRNPSPSSRTSAMARPQQRYRGVRQRHWGSWVSEIRHPLLKTRIWLGTFETAEDAARAYDEAARIMCGPRVRTNFPHDPHSAAAASSSFLSAALVAKLHRFNLASVQAAQRGNSNDDDSTTSSSAAASSRAVIPSLPAAAGALGNAXXATAEWSGGFLEEQYVDQMIEELLDYFSMEISCX

SEQ ID NO: 5835 - protein, 198 aa, Oryza sativa
  unsure (1)..(198): unsure at all Xaa locations
XGTEGVEENXFQPCHTTTNHLKQKIEKKNRKKRPGPQTSGRHPTYRGVRMRSWGKWVSEIREPRKKSRIWLGTFATAEMAARAHDVAALAIKGRTAHLNFPDLAHLLPRPATAAPKDVQAAALLAAAAADFPSVSVDANAKSPDTCSVASAASPQPPPPDAEADPALFDLPDLLLDLRYGPRASRLFLALLDLGDKNX

SEQ ID NO: 5836 - protein, 176 aa, Oryza sativa
  unsure (1)..(176): unsure at all Xaa locations
MARPQQRYRGVRQRHWGSWVSEIRHPLLKTRIWLGTFETAEDAARAYDEAARIMCGPRVRTNFPHDPHSAAAASSSFLSAALVAKLHRFNLASVQAAQRGNSNDDDSTTSSSAAASSRAVIPSLPAAAGALGNAXXATAEWSGGFLEEQYVDQMIEELLDYFSMEISSDVPCSSTC

SEQ ID NO: 5837 - protein, 338 aa, Oryza sativa; identical to SEQ ID NO: 5696

SEQ ID NO: 5838 - protein, 167 aa, Oryza sativa
  unsure (1)..(167): unsure at all Xaa locations
XGKHPFYRGIRSRSGKWVSEIREPRKARRIWLGTFPTAEMAAVAYDVAARALRGPDAALNFPDLAASRTAPPASSSADDIRAAAAAAAASRAAARTTAGSGGAQQEGSSGAGAGSHQYFLDEEALFETPQFLRNMAAGMMMSPPRLSPSSSDDSPDPSDGGSLWSYR

SEQ ID NO: 5839 - protein, 163 aa, Oryza sativa
  unsure (1)..(163): unsure at all Xaa locations
LVDPRAAGRASPLRGDPYRGVRMRKWGKWVAEIREPHKRTRIWLGSYATPVAAARAYDTAVFYLRGRSARLNFPEEXLLAGFAVRGXGGAGGEADGGTLSAASIRKKAIEVGSHVDALQTGMMVAPTHHREQQKXXSHHPHLQPHGEEQHHHDIFVCKKKKKX

SEQ ID NO: 5840 - protein, 119 aa, Oryza sativa
  unsure (1)..(119): unsure at all Xaa locations
CQRMTKYKGVRQRHWGSWVAEIRHPLLKTRIWLGTYGTAEDAARAYDEAARLMSGPAARTNFPLSSSGXXNARSCLSPTLRARLEKCCGAGSSALDALLLCSSSRASDHPFPSSPNVGX

SEQ ID NO: 5841 - protein, 275 aa, Oryza sativa
  unsure (1)..(275): unsure at all Xaa locations
MELNFQVQPPVFQLQDYCYYYSQEVAAAASPAAKPTKPRGRKKGSTSHSKFVGVRQRPSGRWVAEIKDTTQKIRMWLGTFETADAAARAYDEAARLLRGAEARTNFAPRISPDCPLAVRIRGILHHKKLKKARSAAAATAGSPGAASKKRSTTAAAAAATPTITTTTIAIAMVRVYRPDFVHAGAEEFDSWMFDTAWPVPRAGHRRRRHATASNGVAGGVKRRHAAGRDGGVREVERRISASLYAMNGLQEYFDKVFDASAXXDPFWDFSPLCHX

SEQ ID NO: 5842 - protein, 141 aa, Oryza sativa
  unsure (1)..(141): unsure at all Xaa locations
MTKYKGVRQRHWGSWVAEIRHPLLKTRIWLGTYGTAEDAARAYDEAARLMSGPAARTNFPLSSSGXXNARSCLSPTLRARLEKCCGAGSSAQAQQGAVAGQDNDDAAAAAAAMGVDDGDEYVEEMIQELTFYGYRDRPALX

SEQ ID NO: 5843 - protein, 192 aa, Oryza sativa
  unsure (1)..(192): unsure at all Xaa locations
MDHIGISGGGEGGVVSPAQPSSPERRYKGVRLRKWGRWVSEIRMPNSRERIWLGSYESAEKAARAFDAAAVCLRGSRGAGSLNFPESPPPDVXAAASPARLSRSXQIQAEAARHANRPFPANTAAAGGSSSSYSISQRQDIDWSFMDTLPAMSSSAASTNADLVPAMDDFMYGHSCEQGHKKLDTTVEFLQX

SEQ ID NO: 5844 - protein, 154 aa, Oryza sativa
  unsure (1)..(154): unsure at all Xaa locations
TPPPPPPLSPRRWRRRXGRKRFVGVRQRPSGRWVAEIKDTIQKIRVWLGTFDTAEEAARAYDEAACLLRGANTRTNFSSKVTNLLLLRLKARNQQVVDAGAAAPQEAALLQLQQQTPASCQEVFXSVATARSTASTSTTSSATPLDYMRRADQX

SEQ ID NO: 5845 - protein, 86 aa, Oryza sativa
  unsure (1)..(86): unsure at all Xaa locations
TPPPPPPLSPRRWRRRXGRKRFVGVRQRPSGRWVAEIKDTIQKIRVWLGTFDTAEEAARAYDEAACLLRGANTRTNFWPHLPHGIX

SEQ ID NO: 5846 - protein, 411 aa, Oryza sativa; identical to SEQ ID NO: 5697

SEQ ID NO: 5847 - protein, 274 aa, Oryza sativa
MERGEGRRGDCSVQVRKKRTRRKSDGPDSIAETIKWWKEQNQKLQEENSSRKAPAKGSKKGCMAGKGGPENSNCAYRGVRQRTWGKWVAEIREPNRGRRLWLGSFPTALEAAHAYDEAARAMYGPTARVNFADNSTDANSGCTSAPSLMMSNGPATIPSDEKDELESPPFIVANGPAVLYQPDKKDVLERVVPEVQDVKTEGSNGLKRVCQERKNMEVCESEGIVLHKEVNISYDYFNVHEIVEMIIVELSADQKTEVHEEYQEGDDGFSLFSY

SEQ ID NO: 5848 - protein, 281 aa, Oryza sativa
MLFRFVSCNVQLCGIIELPHWVRKKRTRRKSDGPDSIAETIKWWKEQNQKLQEENSSRKAPAKGSKKGCMAGKGGPENSNCAYRGVRQRTWGKWVAEIREPNRGRRLWLGSFPTALEAAHAYDEAARAMYGPTARVNFADNSTDANSGCTSAPSLMMSNGPATIPSDEKDELESPPFIVANGPAVLYQPDKKDVLERVVPEVQDVKTEGSNGLKRVCQERKNMEVCESEGIVLHKEVNISYDYFNVHEVVEMIIVELSADQKTEVHEEYQEGDDGFSLFSY

SEQ ID NO: 5849 - protein, 218 aa, Oryza sativa
MEVEEAAYRTVWSEPPKRPAGRTKFRETRHPVYRGVRRRGGRPGAAGRWVCEVRVPGARGSRLWLGTFATAEAAARAHDAAALALRGRAACLNFADFAWRMPPVPASAALAGARGVRDPVAVAVEAFQRQSAAPSSPAETFANDGDEEEANKDVLPVAAAEVFDAGAFELDDGFRFGGMDAGSYYASLAQGLLVEPPAAGAWWEDGELAGSDMPLWSY

SEQ ID NO: 5850 - protein, 414 aa, Oryza sativa
  unsure (1)..(414): unsure at all Xaa locations
AGSGGRGRRXRHPVYRGVRFRAGKWVSEIRELRKPSRIWLGTYATPEMAAAAYDAAALALRGRGAALNFPDAARSRPAPASASPDDVRAAATAAAAAMAHQEEDDDSRRQLEDGXXGGGGVVDEDDVLEMPRLMVSMAEGLMISPPLMLGLQADGGGIMDEGGGVLSVRPRTVGNGGGYVRECNAMIDRWMDRADAAAGGVVRIDRPETWTYGGMCVLTYYTCISQRFEFETSSFHEVVTGNNKDAVLVLLLPTRRLNTHTAVGSSLETPSCIGCRNDDDDQKPRRNSRAACRLQVMQATVHQYRRKKKKPPIFHRILLLRVEHMRQLWLQLFAAAVATRPSLLMQIERPNSNSSRPALRTDGYIKFSLPKRGCNRETEGYTSEICRPDAESNRIASNRRHGGRGSRAESSSEQ

SEQ ID NO: 5851 - protein, 267 aa, Oryza sativa
  unsure (1)..(267): unsure at all Xaa locations
MELQFQKPTQGQSQQQQCHYQVPTVTVAKNKAKTKCSSSKFVGVRQRPSGRWVAEIKDTTQKIRMWLGTFETAEEAARAYDEAACLLRGSNTRTNFATQAAPDSPLASRIRTILTHKKLKKSMPQHHHLQHRSISPCSXSTVPAAATSTSTSGVSPSRSNSSSLNFATNLSNFAMSGGEELQLASSQQQYDQYGHSTPAYYRLGMDAXMSGSNACPVASDQDKMKAEKQGSHGMNGIQEQETFDMGXXDLCDSLWDLPPICQLSCKY

SEQ ID NO: 5852 - protein, 198 aa, Oryza sativa
  unsure (1)..(198): unsure at all Xaa locations
MEKKYKGVRRRKWGKWVSEIRLPNSRDRIWLGSYDSPEKAARAFDAAFVTLRGHGAAGADLNFPDSPPSCDARSSDPRQVQAAALSHANRAHVTPQQAAAALMSPPSLSPPPGFATGSEVVAPAVRADGSIXXLAPGHGAPAAADSPPGWGGGHAYDFLQPPPPSPPLPSCDDDMVDVVDESSASLWSFDTRDSYFRY

SEQ ID NO: 5853 - protein, 180 aa, Oryza sativa
  unsure (1)..(180): unsure at all Xaa locations
MTVDQRTTAKAIMPPVEMPPVQPGRKCGGEESTGTTDRKKRPRRSRDGPTSVAETIKRWAELNNQQELDPQGPKKARKAPAKGSKKGCMKGKGGPENTRCDFRGVRQRTWGKWVAEXIREPDRQSRLWLGTFPTAEAAACAYDEAARAMYGPMARTNFGQHHASTTTTINNQSDVVFTLH

SEQ ID NO: 5854 - protein, 184 aa, Oryza sativa
MDVSAALSSDYSSGTPSPVAADADDGSSAYMTVSSAPPKRRAGRTKFKETRHPVFKGVRRRNPGRWVCEVREPHGKQRIWLGTFETAEMAARAHDVAALALRGRAACLNFADSPRRLRVPPIGASHDDIRRAAAEAAEAFRPPPDESNAATEVAAAASGATNSNAEQFASHPYYEVLDDGLDLG

SEQ ID NO: 5855 - protein, 376 aa, Oryza sativa
MVGPIQQDEGSHTCKRLEFWIEIPGVTDTATAWLVLSQNQSQGQQESSETDGRSIRHVATGRRRRLTWTTDTCQWRCTPVSCRCRRQQKQTQKEMERPSGGATSGGAWAHRPPPHRGDAFARAAPRPPNPTVAASVSVVRTACVCLCYCCCLRAAAATHTTDMEYYEQEEYATVTSAPPKRPAGRTKFRETRHPVYRGVRRRGPAGRWVCEVREPNKKSRIWLGTFATAEAAARAHDVAALALRGRGACLNFADSARLLRVDPATLATPDDIRRAAIELAESCPHDAAAAAASSSAAAVEAAAAAAPAMMMQYQDDMAATPSSYDYAYYGNMDFDQPSYYYDGMGGGGEYQSWQMDGDDDGGAGGYGGGDVTLWSY

SEQ ID NO: 5856 - protein, 237 aa, Oryza sativa
LQEFGTRLSIAGEVNQRESSMEVEEAAYRTVWSEPPKRPAGRTKFRETRHPVYRGVRRRGGRPGAAGRWVCEVRVPGARGSRLWLGTFATAEAAARAHDAAALALRGRAACLNFADSAWRMPPVPASAALAGARGVRDAVAVAVEAFQRQSAAPSSPAETFANDGDEEEDNKDVLPVAAAEVFDAGAFELDDGWFGGMDAGSYYASLAQGLLVEPPAAGAWWEDGELAGSDMPLWSY

SEQ ID NO: 5857 - protein, 176 aa, Oryza sativa
  unsure (1)..(176): unsure at all Xaa locations
MVKNTSNKCIAAAGATAAAGLGGGAASCSGGGGDGKVTTAAAAALAVRPYKGVRMRSWGSWVSEIRAPHQKRRIWLGSYATPEAAARAYDAALLCLKGSDAVLNFPSSASSRRRLDTRTRRRATXSPRSIQRVAAAAAAAFDAAAAXPSSSTKAAPSPWEEPEEDGELMRLWSFCX

SEQ ID NO: 5858 - protein, 272 aa, Triticum aestivum
  unsure (1)..(272): unsure at all Xaa locations
MLLLNPASEAAAAALDSIRQQLLEEPMAPARPAYCRSASFGSLVADQWSESLPFRPNDADDMVVYGALRDAFSCGWLPDGSFAAVKPEPLPSPDSYDGCCLGSFLASPPGLDAPWAEEAEVAATASRGKHFRGVRQRPWGKFAAEIRDPAKNGARVWLGTFDSAEDAAVAYDRAAYRMRGSRALLNFPLRIGSEIAAAAGQKRPSPQPASPDSPPPSSSAXXGSSKRRKRGEAAAESMSMALVPPPPVQAPVQLTLPVQPWLATGAVQQLVS

SEQ ID NO: 5859 - protein, 276 aa, Triticum aestivum
  unsure (1)..(276): unsure at all Xaa locations
MLLLNPASEAAAAAALDSIRQQLLEEXXARPAYCRSASFGSLVADQWSESLPFRPNDADDMVVYGALRDAFSCGWLPDGSFAAVKPEPLPSPGSYDGSCLGSFLASXARAGRAVDXEEEAEVAATASRGKHFRGVRQRPWGKFAAEIRDPAKNGARVWLGTFDSARXDAAVAYDRAAYRMRGSRALLNFPLRIGSEIAAAAAAAGQKRPSPQPASPDSPPPSXSAPGSSKRRKRGEAAAASMAMALVPPPPAQAPVQLTLPAQPWLAAGAVQQLVS

SEQ ID NO: 5860 - protein, 276 aa, Triticum aestivum
  unsure (1)..(276): unsure at all Xaa locations
MLLLNPASEAAALDSIRQQLLEEXXARPAYCRSASFGSLVADQWSESLPFRPNDADDMVVYGALRDAFSCGWLPDGSFAAVKPEPLPSPDGSYDGSCLGSXSSRRRRPGRTRRXXAEEEAEVAAAASRGKHFRGVRQRPWGKFAAEIRDPAKNGARVWLGTFDSAEDAAVAYDRAAYRMRGSRALLNFPLRIGSEIAAAAAAAGQKRPSPQPASPDSSSPSCSAXXGSSKRRKRGEAAAASMAMALVPPPPAQAPVQLTLPAQPWLAAGAVQQLVS

SEQ ID NO: 5861 - protein, 130 aa, Triticum aestivum
  unsure (1)..(130): unsure at all Xaa locations
MLLNPASEALVLDSIRQHLMEDTAAPAPEARRQRPAYCRSASFGSLVADQWSESLPFRADDSDDMVVYGALRDAFSCGWLPDGSFAAVKPEPLLPSPDSCYVGFLEPETPPATSPGGSEEEAAAAFMGEX

SEQ ID NO: 5862 - protein, 240 aa, Triticum aestivum
  unsure (1)..(240): unsure at all Xaa locations
MVSALSHVIRTPPDPPLSQENSSISTMRPRQEQGRKRHYRGVRQRPWGKWAAEIRDPKKAARVWLGTFDTAEDAAIAYDEAALRFKGTKAKLNFPERVQGPPTSASSSRAGXSRQIAATTNTTPPXRGGAGNAATAXTSWTVVPYPDLMRYARLLQGAGSAGGAVNLPFGAMSPPSMSSSAPHILDFSTQQLIRVSPASPAAAMSSSGTTGPSTSSSTTTASSPGAAWPYTGEHKNNKDS

SEQ ID NO: 5863 - protein, 220 aa, Triticum aestivum
  unsure (1)..(220): unsure at all Xaa locations
ARAEHGRTLAMAPKNALPVAVAAAADAGMEPRFRGVRKRPWGRYAAEIRDPARKARVWLGTFDTAEAAARAYDAAALHYRGPKAKTNFPVGTXSPPSPTQPVPLPPPKALAVSPSSSTVESSSRDTPAAAPAAPAAAAPAPPPALDLSLAMPVMVAAQPFLFLDPRVAVTVAVAAPAPAPCRSAAISGMNKVAVREEEHSDTGLSSSVGDASTVVGVGFN

SEQ ID NO: 5864 - protein, 167 aa, Triticum aestivum
  unsure (1)..(167): unsure at all Xaa locations
KTPTARPTRVAGMPLSLGADHLAAPGARAPPARVGTGMGMASLSLGGAAAYLPLNENDSLDMLLFDVLREASAVAAASPSSSSSPPTKTATAIAAAGADAIESGGACAAGRAAERPHYRGVRRRPWGKYAAEIRDPSRPGTRLWLGTFGTAEEAAVAYDRAAFRLRX

SEQ ID NO: 5865 - protein, 246 aa, Triticum aestivum
  unsure (1)..(246): unsure at all Xaa locations
MTTQQSHHPAAASRQLPLHSPGSSTGSADSTPWHHRAPTTPPLLPFDTNDADEMLLLHMLSQHQQHTHKALAAPVKREAPDRQEAAHPASAGRAFRGVRKRPWGKYAAEIRDSTRNGVRVWLGTFDSPEDXAALAYDQAAFAIRGGAAVLSFPADHVRRSLEGGADDAGGRAHSVSPVLALKRRHSMRSRKATAAGRKVKAATRGAQPEGMVMELEDLGAEYLEQLLGASEDTATMDSWCWSHHFI

SEQ ID NO: 5866 - protein, 424 aa, Triticum aestivum
  unsure (1)..(424): unsure at all Xaa locations
MSREVQRDPVLPFALAVFQPCYAPVGRERVLLESPSRPSGLFPLLPFLSLVFLCIGAQFSSAFAPRSSFFSIMFFVLPSLHPPSSPSAQALIAAAIDMYKYNTSTHQIGSAASALDQELMKALEPFITIACSSSSHYPYHYYSSPSMTQDSYMATPSSSSYASSFAASPLPTTAPASPSFSQLPPLYSSHSGVNGSMGLAQLGPAQIQQIQAQFFVQQQQQQRGLAGGSFLGPRAQPMKPAAALALAGVAPAQSKLYRGVRQRHWGKWVAEIRLPKNRTRLWLGTFDTAEDAALAYDKAAFRLRGDLARLNFPSLRRGGAHLAGPLHASVDAKLTAICESLAAXXSSKNSEPESPKCSASTEGEDSASAGSPPPPXXPPVPEMEKLDFTEAPWDESETFHLRKYPSVEIDWDSILSXTASSCYY

SEQ ID NO: 5867 - protein, 309 aa, Triticum aestivum
  unsure (1)..(309): unsure at all Xaa locations
MKALEPFITIASSSSSHYPYHYYSSPSMTQDSYMATPSSSSYASSFAASPLPTTAPASPSFSQPPPLASAPSAVNGSMGLAQLGPAQIQQIQAQFFVQQQQQQRGLAGGSFLGPRAQPMKPAAALALAGVAPAQSKLYRGVRQRHWGKWVAEIRLPKNRTRLWLGTFDTAEDAALAYDKAAFRLRGDLARLNFPSLRRGGAHLAGPLHASVDAKLTAICESLAAXXSSKNSAEAEPESPKCSASTEGEDSASAGSPPPPXXPPVPEMEKLDFTEAPWDESETFHLRKYPSVEIDWDSILSXTASSCYYY

SEQ ID NO: 5868 - protein, 278 aa, Triticum aestivum
MSDSSSTASSSPSPSSTSPRLTTGDVNFLARRAVTTQQNHHQAAAEAFPLHSPGSSTGSADSAPWHHRAPATPPPVLPFDTSDADEMLLLDMVSQHHEVQHAAASPTTAPAVKQEADEEDKVVLGVARAFRGVRKRPWGKFAAEIRDSTRNGVRVWLGTFDSPEAAALAYDQAALAIRGGAAVLNFPADQVRRSLEGAADDLCGCTNGVSPVLALKQRHCIRSRKATTMSRKAKAARGQPEGMVMELEDLGAEYLEQLLGTSQEMASMDSWCWSHHSI

SEQ ID NO: 5869 - protein, 330 aa, Triticum aestivum
  unsure (1)..(330): unsure at all Xaa locations
MCGGAILAELIPGAPARRAASGHGHVWPGKGAKHTKAAAADDFQAAFREFNEDSDEEXXVVMVVERQEEVAESKPFVFAAEEEEQAAPARRRKPAQYRGVRRRPWGKWAAEIRDPVKGVRVWLGTFPSADAAALAYDEAARAIRGPRAKLNFPSSSAVAAAAPGARKRGRAGADAAPAAKPAQVITLVDEEEEXXASSLFVKHEADASEGSESSGALPDFSWQGISAFDEAPAYPAPEPETEQLTKRARTTEAEDTDDPASDSDSDALFDALLFADQFAFFNGGAYESLDSLFSADAVQSSATATAVNEAALGLWTFDDDCLVDECSLSF

SEQ ID NO: 5870 - protein, 143 aa, Triticum aestivum
  unsure (1)..(143): unsure at all Xaa locations
MCGGAVIADFVPAGAXXARMAPPPTSPAPSSPSPVRRXRRNRRRRGXKTAYRGIRRRPWGRWAAEIRDPTKGARVWLGTYATAEEAARAYDVAARDIRGPKAKLNFPPAVGAPQAAAAVEGAGAPKKRPTSRGGPVPNSXXXS

SEQ ID NO: 5871 - protein, 209 aa, Triticum aestivum
  unsure (1)..(209): unsure at all Xaa locations
MRRGGGAATAVAAAAEAERDAGARFRGVRKRPWGRYAAEIRDPAKKARVWLGTFDSAEDAARAYDAAARMLRGPKAKTNFPLSLPHHHQLQASYSPXXPVAAAAAVPTSVAAAAARPACSSLSSTVESFGGPRARPVXPTAASXXPPILDGDCHSDCGSSASVVDDDCADAAASPSCGLLLPFDLNLPPEFGGVACNDDDELKLTALRL

SEQ ID NO: 5872 - protein, 257 aa, Triticum aestivum
  unsure (1)..(257): unsure at all Xaa locations
FGSTATSSSRTRXTAEPPPPPFAARAISSEQEHTPMVAALLHVISGYTTPVPDFFFPASKEVCTACGMDGCLGCEFFGAGARXXAIAPKATVGGPQRRRRNKKTQYRGIRQRPWGKWAAEIRDPRRAVRVXLGTFDTAEDAARAYDRAAVEFRGPRAKLNFPFPXXSSSSSSWAAADAAAKSDTRSPSPSPSSADGEEXQRNGSGMACRLDEARQERALLTFSGGGQQHPGNVSRAGKETTRGRSRGCHGKCLLAVT

SEQ ID NO: 5873 - protein, 213 aa, Triticum aestivum
  unsure (1)..(213): unsure at all Xaa locations
MCGGAIIYDYIPAHRRRVSTADFWPDADHSDAHSAAPDKAPRAKRGRTNQYRGIRQRPWGKWAAEIRDPVKGVRVWLGTYPTAEAAARAYDRAARRIRGAKAKVNFPNKXPRRRARARGLVPMAAPPAAVLPSPKKEEEGEGLEHAACSCEEVKALSEELMAYENYMSFLGVPYMEGGTAATAAPAAFGVAAEEAPAELWSFEDSYYPGPLGL

SEQ ID NO: 5874 - protein, 383 aa, Triticum aestivum
  unsure (1)..(383): unsure at all Xaa locations
MCGGAILAGFIPPSAAAAAAKAAAAKKKQQQRSVTADSLWPGLRKKAAEEEDFEADFRDFERDSSDDDXRGRGGSXPPPASAGFAFAAAAEVAPPAPARLDAVQHDGPAAKQVKRVRKNQYRGIRQRPWGKWAAEIRDPSKGVRVWLGTYDTAEEAARAYDAEARKIRGKKAKVNFPEEAPTVQKSTLKPTAAKSAKLAPPPKACEDEPFNHLSRGDNDLFAMFAFNDKKVPAKPAESVDSLLPVKPLVPTETFGMNMLSDQSSNSFGSTDFGWDDEAMTPDYTSVFVPNAAAMPAYGEPAYLQGGAPKRMRNNFGVAVLPQGNGAQDIPAFDHEMKYXXLPYVESSSDGSMDSLLLNGAMQDGASSGDLWSLDELFMAAGGY

SEQ ID NO: 5875 - protein, 169 aa, Triticum aestivum
  unsure (1)..(169): unsure at all Xaa locations
MAPRTSDKTATPPAAGAAATGLALGVGGGNGGGVGTHYRGVRKRPWGRYAAEIRDPAKKSRVWLGTYDTAEEAARAYDAAAREYRGNKAKTNFPFASASAPPAAAAALTGDGSRSSNSSTVESFGGDVQAPMQAMPLPPSLELDLFHRAAPKTSPAGVAIDRIISSYFX

SEQ ID NO: 5876 - protein, 178 aa, Triticum aestivum
  unsure (1)..(178): unsure at all Xaa locations
XGQERSPDVQQSAAMGEQYPHTYGGGGGNAEQTSVPERRYRGVRQRPWGKWAAEIRDPHKAARVWLGTFETAEAAARAYDEAALRFRGSRAKLNFPEDARLTAPAAPTTASAAPTVASSAAAYPAGAVXXDYLQYQMLLRAGGGGFXXPYYGGGGGSSSGSYSLPESSVTVASVPSSX

SEQ ID NO: 5877 - protein, 335 aa, Triticum aestivum
  unsure (1)..(335): unsure at all Xaa locations
MCGGAILAELIPGAPARRATSGHGHVWPGKGAKQTKAAAADDFEAAFREFNEDSDVEDDVVMVMERREEVAESKPFVFAASXQEAAAGGGGXAAPVRRRKPAQYRGVRRRPWGKWAAEIRDPVKGVRVWLGTFPSADAAALAYDEAARAIRGPRAKLNFPSSSAVAAAAPGARKRGRAGAAAPAAKPAPVITLVDDEEEXXASSFVKHEAEASEGSESSGALPDFSWQGISAFDEAPAYPAPEPETEQLTKRARTTEAEDTDDPASDSDSDALFDALLFADQFAFFNGGAYESLDSLFSADAVQSSATATAVNEAALGLWTFDDDCLVDECSLSF

SEQ ID NO: 5878 - protein, 188 aa, Triticum aestivum
  unsure (1)..(188): unsure at all Xaa locations
MCGGAIISDFIPERDHRGGSKRSLCTADFWPHAAAAAFDDPTAEEEPSRKRERKTMYRGIRRRPWGKWAAEIRDPAKGARVWLGTFATPEGAARAYDRAARRIRGTKAKVNFPNXGPAPRPRRLRRRQRGRLHPPAVVHGARGGVRAPAAAACAYDXGRARDGALELWQHQRSSAYVIDRNCSFSFYM

SEQ ID NO: 5879 - protein, 168 aa, Triticum aestivum
  unsure (1)..(168): unsure at all Xaa locations
MCGGAIISDFTPERDRLCTADFWPHAAAFDDPTDHPEEEPSRKRERKTMYRGIRRRPWGKWAAEIRDPAKGARVWLGTFATPEGAARAYDRAARRIRGTKAKVNFPNXGPAPRPRRLRRRQRHRRLLPPAVVHGRCRRAGDGGGVRAYDELRLFSEKLXISSNEYFTX

SEQ ID NO: 5880 - protein, 137 aa, Triticum aestivum
  unsure (1)..(137): unsure at all Xaa locations
MCGGAIIYDYIPAHRRRVSTADFWPDADHSDAHSAAPDKAPRAKRGRTNQYRGIRQRPWGKWAAEIRDPVKGVRVWLGTYPTAEAAARAYDRAARRIRGAKAKVNFPNEILVGAPAHEAPCTMAAVLPSPKKEEEPX

SEQ ID NO: 5881 - protein, 148 aa, Triticum aestivum
  unsure (1)..(148): unsure at all Xaa locations
XHGFASSSKTGPDYTAAPAASYSPHGAAAGDEELPSPSSAESGGSGGAPRKRYRGVRQRPWGKWAAEIRDPHKAARVWLGTFDDAEAAARAYDAAALGFRGSRAKLNFPESATIPPXAAASSCAGISDATAAAARGAAGVAGSVGRAX

SEQ ID NO: 5882 - protein, 163 aa, Triticum aestivum
  unsure (1)..(163): unsure at all Xaa locations
XRGVRRRPWGKWAAEIRDPQKAARVWLGTFATAEDAARAYDAAALRFRGSRAKLNFPEDAAAATARRARDAATAAAAASSKPAALLESQDGDVMDYLDYSKILAXXPEPSNVMGRLMGGDGNGRFLGSWSIGTSPTSSASSASLVVSGPASAPLFQCGSGLKQ

SEQ ID NO: 5883 - protein, 162 aa, Triticum aestivum
  unsure (1)..(162): unsure at all Xaa locations
MCGGAIISDFTPERDRLCTADFWPHAAAFDPQHRAAEEEPSRKRERKTMYRGIRRRPWGKWAAEIRDPAKGARVWLGTFATPEGAARAYDRAARRIRGTKAKVNFPNXGPAPRPRRLRRRQRRLQRRRLLPPAVVHGARGGVRAPAADVILLLPNYYCAYDX

SEQ ID NO: 5884 - protein, 147 aa, Triticum aestivum
  unsure (1)..(147): unsure at all Xaa locations
SSRSRAFHSAPLVVVARPRQSPGGRSGRTEASAGRRSTTMRNGSTVCDAAAAVGLGVAPRYRGVRKRPWGRFAAEIRDPAKRARVWLGTYDSAEAAARAYDVAARTLRGPLATTNFPQDXPSPSPRSPRSRIRFDRLXPRPSLQRQX

SEQ ID NO: 5885 - protein, 203 aa, Triticum aestivum
  unsure (1)..(203): unsure at all Xaa locations
XLGPRSQPMKPASVXXAATPPRPQKLYRGVRQRHWGKWVAEIRLPRNRTRLWLGTFDTAEEAALAYDQAAYRLRGDAARLNFPDNAASRGPLHASVDAKLQTLCQNITASKNAKKSASVSASTAAATSSTPTSNCSSPSSDEASSSLESAXXSSPSPATTTAAEVPEMQQLDFSEAPWDEAACFALTKYPSYEIDWDSLLAAN

SEQ ID NO: 5886 - protein, 215 aa, Triticum aestivum
  unsure (1)..(215): unsure at all Xaa locations
XKNKKLRLIHFGIMVSHLPAKQSKWAGKQSNIERKIHGAAAGDEELPSPSSAESGGSGGTPRKRYRGVRQRPWGKWAAEIRDPHKAARVWLGTFDDAEAAARAYDAAALGFCGSRAKLNFPESATIPPXAAASSCTGISDATAAAASSSALAMPPPQRPEALLESQALLXEGRLIPTTPGXLRPSTGGSTSGGPRTPAPPLIYSFRGGASYPLQX

SEQ ID NO: 5887 - protein, 119 aa, Triticum aestivum
  unsure (1)..(119): unsure at all Xaa locations
HEKAGPCKSRSGPDQSSDTMEEHRSRSPASSNVXXEAPRRRYRGVRQRPWGKWAAEIRDPHKAARVWLGTFETAEAAARAYDDAALRFRGSRAKLNFPEDARLHPATVTPXAAPARAPI

SEQ ID NO: 5888 - protein, 349 aa, Triticum aestivum
MCGGAILSDIIPPPRRPAGGRLWQADRKKRRAGPRRVPEEEPEEEAEEGDEDFEADFEGFVDEESDGEVKPFPARRSGFSGDGLKATAAGEYDCASGSAKRKRKNQFRGIRRRPWGKWAAEIRDPRKGVRVWLGTYNSAEEAARAYDVEARRIRGKKAKVNFPEEAPMAPQQRCATAVKVPEFNTEQKPVLNTMGNADVYSCSAVDYTLNQQFVQPQNMSFVPTVNAVEAPFMNFSSDQGSNSFSCSDFSWENDIKTPDITSVLASIPTSTEVNESAFLQNNGINSTVPPVMGDANVDLADLEPYMKFLMDDGSDESIDSILSCDVPQDVVGNMGLWTFDDMPLSAGFY

SEQ ID NO: 5889 - protein, 237 aa, Triticum aestivum
  unsure (1)..(237): unsure at all Xaa locations
MAPRTSDKTATPPAAGAAATGLALGVAXGGNDGGVGTHYHGVRKRPWGRYAAEIRDPAKKSRVWLGTYDTAEEAGRAYDAAAREYRGNKAKTNFPFAPASAPPAAAAALTVDGSRSSNSSTVESFGGDVQAPMQAMPLPPSLDLDLFHRAATSTAGAGMRFPFSGYPVSHPYYFFGQAAAAAAAGCHMYSQAPKVTVASVSPSDSDSSSVVDLAPSPPARKPVPFELDLNCPPPAEL

SEQ ID NO: 5890 - protein, 332 aa, Triticum aestivum
  unsure (1)..(332): unsure at all Xaa locations
XRRKKRKRRESPKNHRHHKSKSKRHHSAENSDSDDEVMAREREGEESDGEAKPFPVRRSGFSGDGLKATAAGDDDCASGSAKRKRKNQFRGIRRRPWGKWAAEIRDPRKGVRVWLGTYNSAEEAARAYDVEARRIRGKKAKVNFPEEAPMAPQQRCAXXAVKVPEFNTEQKPVLNTMGNADVYSCSAVDYTLNQQFVQPQNMSFVPTVNAVEAPFMNFSSDQGSNSFSCSDFSWENDIKTPDITSVLASIPTSTEVNESAFLQNNGINSTVPPVMGDANVDLADLEPYMKFLMDDGSDESIDSILSCDVPQDVVGNMGLWTFDDMPLSAGFY

SEQ ID NO: 5891 - protein, 193 aa, Triticum aestivum
  unsure (1)..(193): unsure at all Xaa locations
RHEVEVFXVESGESELESXXDEAKPFAAPRTRSALPRDGLNTSAVVVDGPAANSVKRKRKNQFRGIRRRPWGKWAAEIRDPRKGVRVWLGTFNSPEEAARAYDAEARRIRGKKAKVNFPDEVSTIPQKHRAGPTPLKVPEMDFEEKPIIKPAVNXXMTNSNAYHYPVVDHNIPEPFMHTQNMSFAPFVNSAAP

SEQ ID NO: 5892 - protein, 222 aa, Triticum aestivum
  unsure (1)..(222): unsure at all Xaa locations
MCGGAILSDIIPPPRRATGGNVWRADKKKRARADAAAGRPRRAPEEFEEEGDAEFEADFEGFVEAEEESDGEGKPFPVRRSGFSGDGLKATAAGDDDCASGSAKRKRKNQFRGIRRRPWGKWAAEIRDPRKGVRVWLGTYNSAEEAARAYDVEARRIRGKKAKVNFPEEAPMAPQQRCAXXSVKVPEFNTEQKPVLNTMGNADVYSCPAVDYTINQQFVQPX

SEQ ID NO: 5893 - protein, 357 aa, Triticum aestivum
  unsure (1)..(357): unsure at all Xaa locations
MCGGAILSYIVPPPRRATGDNVWRADKKRRAMPDAAAGRPRRVPEEEFQEEEGDAEFEADFEGFVEAEEESDGEAKPFPVRRTGFSGDGLKATAAGDDDCASGSAKRKRKSQFRGIRRRPWGKWAAEIRDPRKGVRVWLGTYNSAEEAARAYDVEARRIRGKKAKVNFPEEAPMAPQQRCAXXSVKVPEFNTEQKPVLNTMGNADVYSCPAVDYTLNQQFVQPQNMSFVPTVNAVXEAPFMNFSSDQGSNSFSCSDFSWENDIKTPDITSVLASIPTSTEVNESAFLQNNGINSTVPPVMGDANVDLADLEPYMKFLMDDGSDESIDSILSCDVPQDVVGNMGLWTFDDMPLSAGFY

SEQ ID NO: 5894 - protein, 203 aa, Triticum aestivum
  unsure (1)..(203): unsure at all Xaa locations
MCGGAILSDIIPPPRRATGGNVWRADKKRRARPDAAAGRPRRAPEEEFQEEEGDAEFEADFEGFVEAEEESDGEAKPFPVRRSGFSGDGLKATAAGDDDCASGSAKRKRKNQFRGIRRRPWGKWAAEIRDPRKGVRVWLGTYNSAEEAARAYDVEARRIRGKKAKVNFPEEAPMAPQQRCATAGXRVPEFNTEQKPVLNTMGX

SEQ ID NO: 5895 - protein, 201 aa, Triticum aestivum
  unsure (1)..(201): unsure at all Xaa locations
PNPRPAAMRKARPPQPQPQPSQQSPEIRYRGVRKRPSGRYAAEIRDPAKKTPIWLGTFDCAEDAARAYDSAARSLRGPTARTNFPPSSATXXPPPRPPPPAAAAAAATSSQSSTVESWSRRXGPAPPPGPAAPPERARPRRGREDCRSYCGSSSSVLLEEGADXXAAASRSPLPFDLNMPPPQDDAEGDQMTCRYDTLLRL

SEQ ID NO: 5896 - protein, 108 aa, Triticum aestivum
  unsure (1)..(108): unsure at all Xaa locations
RGNSSRREEARAGRRSTTIGTAAPCATXAAAVGLGVAPRYRGVRKRPWGRFAAEIRDPAKRARVWLGTYDSAEAAARAYDVAARTLRGPLATTNFPHDLAPASPASPX

SEQ ID NO: 5897 - protein, 156 aa, Triticum aestivum
  unsure (1)..(156): unsure at all Xaa locations
PLASRVSARKQRELAQAIAGRRSTTMRNGSTVCDAAAAVGLGVAPRYRGVRKRPWGRFAAEIRDPAKRARVWLGTYDSAEAAARAYDVAARTLRGPLATTNFPHDXSSPSPRSPRCRVRLHRLPPAPXLQRQLHRRVLQRAQGGERASGRAARASX

SEQ ID NO: 5898 - protein, 182 aa, Triticum aestivum
  unsure (1)..(182): unsure at all Xaa locations
HASATNQRRTPPSHRHNNRRVEHLPWLPRTRPPPPAPTRPTIPPPRHRNNSRRPRPSTAGRSPAADATRGMEPRFRGVRKRPWGRYAAEIRDPARKARVWLGTFAGGEAAARAYEAAARPQRAPTAKTHSPVASPRPTPTSPSXHRRRPSPPPPPSRQRAPRGDQRHEQGGXXREEEQSDTG

SEQ ID NO: 5899 - protein, 174 aa, Triticum aestivum
  unsure (1)..(174): unsure at all Xaa locations
MCGGAILAGFIPPSAAAKAAAAKKKQQQRSVTADSLWPGLQKKAADEEDFEADFREFERDSSDDDAAVEEVPPPPAAAGFAFAAAAEVAPPAPARLDAVQRDGPAAKQVKRVRKNQYRGIRQRPWGKWAAEIRDPSKGVRVWLGTYDTAEEAARAYDAEARKIRGKNAKANFSX

SEQ ID NO: 5900 - protein, 159 aa, Triticum aestivum
  unsure (1)..(159): unsure at all Xaa locations
XRHRLLLQRGRVGAAAAGPDADDQGGAPEGAQEAPPRHGGREEGRLGAAAAXQATGARTPSVRYRGVRQRRWGKFASEIRDPIQGRRLWLGTFDTAEEAAAAYDAAKIRISGSRXARLTAPPASLSPPAKRITSPPPPPPPPEPAKPAISIHPSIKKKX

SEQ ID NO: 5901 - protein, 171 aa, Triticum aestivum
  unsure (1)..(171): unsure at all Xaa locations
MCGGASLADVKXXPTVTWKVTKAALCPKKKKPRHGSNGGRCFTGLGGCMGPDVDDNEEDFEAELEVFEVNFGDSDVELGRTRVDEKDDDNEVVEINSFAAAKSSLSQGFDGPSAKRKRKSQFRGIRQRPWGKWAAEIRDPSKGARVWLGTFNSAEEAARAYDVEARRIRGX

SEQ ID NO: 5902 - protein, 134 aa, Triticum aestivum
  unsure (1)..(134): unsure at all Xaa locations
XGAFPSLDAFLDRSPWRRAAHAAPIISRVSPAAGSSATLKTPVAAPPGGEGGPEDRDHMYRGVRQRRWGRWASEVREPNRGKRHWLGTFDNAVDAALAYDRAAVAIFGSRAIVNFPHEVKPVITXXVFGEREVX

SEQ ID NO: 5903 - protein, 178 aa, Triticum aestivum
  unsure (1)..(178): unsure at all Xaa locations
SKNSLPSTTQTATYLKQQTLIPRTRCAEGSSPPTTAARGVPAXSPSAGKAKMRGGWPTDEDSDDWEAAFREFVAADDGDVLNEPLPTGIMASXRAIPLAGHGEAEAAXRASPSHPYRGIRQRAWGRWSAEIRDPIKXXRVWIGTFDTAAEAAHAYDAEARRIHGRKARTNFPAAPAAX

SEQ ID NO: 5904 - protein, 172 aa, Triticum aestivum
  unsure (1)..(172): unsure at all Xaa locations
MCGGAILAELIPSAPXXRSVTAVHLLPKRPRVDDFEAAFKRFDEDSAEEEVLQRAGFEFGAHRQPAARRGGXXSPAQYRGVRRRPWGKWAADIRDPVKGVRVWLGTFPSAEAAAHAYDDAARDFRGASARLNFPSSSTSAPKRHVAAKATPCLVIDLVDDEEGDAGAAGAGX

SEQ ID NO: 5905 - protein, 97 aa, Triticum aestivum
  unsure (1)..(97): unsure at all Xaa locations
MAPRAAEKAPVSPPTGLGLGLGGGVGVVAGGAHYRGVRKRPWGXRYAAEIRDPAKKSRVWLGTYDTAEEAARAYDTXAAREFRGAKAKTNFPVPSSS

SEQ ID NO: 5906 - protein, 123 aa, Triticum aestivum
MAPTHTQHVQARPRLLRPPGLPPRAQPMKTAAAAPAAVKLYRGVRQRHGCKWVAEIRLPRNQTRLWLGTFDTAEEAAHAYDQAACRLHGDAARLNFPDNASSRPPLNAAVDAKLQVISRTIAA

SEQ ID NO: 5907 - protein, 184 aa, Triticum aestivum
  unsure (1)..(184): unsure at all Xaa locations
HGPFFSVLTSTSPRLANHRRRQLPGPPLNDHTAKPPPSSSGSPLHSPASSTGSADSAPRPSPVLPFDTNGADEMLLLDMISQYHHVQHAAFFSTIAPVKREASQEEDKAAVDVGRAFRGVRKRPWGKNAAEIRDSTRNGVRVRLETFNSPEDAEMEYDEADFAIRGGDDVLNFSGEHVRRSLEX

SEQ ID NO: 5908 - protein, 149 aa, Triticum aestivum
  unsure (1)..(149): unsure at all Xaa locations
TNPTQQCLPLPLPRPQAAATSGAAXGGGRKGKAAGKGGPENAKFRYRGVRQRSWGKWVAEIREPRKRSRKWLGTFATAEDAARAYDRAALLLYGPRAHLNLTAPPPPPGADPHPRPFSSSSSSAPPPLRPLLPRPPQNSGGAGXGLPAX

SEQ ID NO: 5909 - protein, 171 aa, Triticum aestivum
  unsure (1)..(171): unsure at all Xaa locations
XTRGMGPNPSLDMLAAAAGMESAAEAAAAAAAAEAQPRGRVVRIIVHDADATDSSSSEDESXAAAAGPDADDQGGAPEGAQEAPPRHGGREEGPRTPSVRYRGVRQRRWGKFASEIRDPIQGRRLWLGTFDTAEEAAAAYDAAKIRISGSRRGLPXPCAXXXGPXTXPXST

SEQ ID NO: 5910 - protein, 148 aa, Triticum aestivum
  unsure (1)..(148): unsure at all Xaa locations
XDSLFLRALISVVNGDAVVPTLHLEPSSTPHIAAAVPXXCASCGVDGCIGCMFVAAAAPAGSSSEGXRSSAASFVKGGGVGKITRRRSWSXXFRGVRQRSWGKWAAEIRDPHRAVRKWLGTFDTAVDAARAYDLAALEFRGHRARLNX

SEQ ID NO: 5911 - protein, 135 aa, Triticum aestivum
  unsure (1)..(135): unsure at all Xaa locations
MVQPKKKFRGVRQRHWGSWVSEIRHPLLKRRVWLGTFETAEEAARAYDEAAVLMSGRNAKTNFPVQRSSTGDPAPAATRDVRGGSSSSSTSNLSQVLSAKLRKCCKAPSPSLTCLLLYTXKSHIXVWXKXAGARA

SEQ ID NO: 5912 - protein, 375 aa, Triticum aestivum
  unsure (1)..(375): unsure at all Xaa locations
ISGPDPDRAGHDGRSEGRRGGGGGGDALRDPGAPAWKNLWSRGKYPESCSRQTNRKKRPRRSRDGPNSVSETIRRWKEVNQQLEHEKRARKPPAKGSKKGCMQGKGGPENTQCGFRGVRQRTWGKWVAEIREPNRVSRLWLGTFPTAEDAARAYDEAARAMYGALARTNFPVHPAQAPAXGSTSAKXYMAIEGVVRGASASCESTTTSANHSDVASNLPRQAQALEIYSQPDVLESTESVVLESVEHYSHQDTVPDAGSSIARSTSEEDVFEPLEPISSLPDGEADGFDIEELLRLMEADPIEVEPVTGGSWNGGANTGVEMGQQEPLYLDGLDQGMLEGMLQSDYPYPMWISEDRAMHNPAFHDAEMSEFFEGL

SEQ ID NO: 5913 - protein, 198 aa, Triticum aestivum
  unsure (1)..(198): unsure at all Xaa locations
ISGPDPDRVGHDGRSEGRRGGGGGGDALRDPGAPAWKNLWSRGKYPESCSRQTNRKKRPRRSRDGPNSVSETIRRWKEVNQQLEHEKRARKPPAKGSKKGCMQGKGGPENTQCGFRGVRQRTWGKWVAEIREPNRVSRLWLGTFPTAEDAARAYDEAARAMYGALARTNFPEHPAQAPAXGCTSAKXYMAIEGVLRGA

SEQ ID NO: 5914 - protein, 196 aa, Triticum aestivum
  unsure (1)..(196): unsure at all Xaa locations
MATANQDCAATLQFHDHRGGPAATELHGRTISSEQEHGIIVAALRHVVSGYTTAPPEAVVAVACGRCGIDGCLGCDFFGAXPSRRRWRRPCPWEGCWCPPPRRRTKTXYRGERQRPRKKRAAEIRDPRRAVRKWLGTFDTAEDAARTYDLAALEFRGPRARLNFPCSDETLRGHGSAHGADDEAGTSPQNETLTPP

SEQ ID NO: 5915 - protein, 106 aa, Triticum aestivum
  unsure (1)..(106): unsure at all Xaa locations
MGATEDSSSGSETTTSSSVEALASPPSPTATTASSKKKRPRNDGRHPTYRGVRMRSWGKWVSEIREPRKKSRIWLGTFATAEMAARAHDVAALAIKGRAAHLNFPX

SEQ ID NO: 5916 - protein, 124 aa, Triticum aestivum
  unsure (1)..(124): unsure at all Xaa locations
XEXHRRERVLALEMPDSELNSPASSSVLEKRERDSGGNGAGGRHRGYRGVRMRAWGKWVSEIREPRKKSRIWLGTFPTPEMAARAHDAAALVVKGPAAVLNFPELASSLPRPASAAXHDVQAAX

SEQ ID NO: 5917 - protein, 278 aa, Triticum aestivum
METGGSKREGDCPGQERKKKVRRRSTGPDSVAETIKKWKEENQKLQQENGSRKAPAKGSKKGCMAGKGGPENSNCAYRGVRQRTWGKWVAEIREPNRGNRLWLGSFPTAVEAARAYDDAARAMYGAKARVNFSEQSPDANSGCTLAPPLPMSNGATAASHPSDGKDESESPPSLISNAPTAALHRSDAKDESESAGTVARKVKKEVSNDLRSTHEEHKTLEVSQPKGKALHKAANVSYDYFNVEEVLDMIIVELSADVKMEAHEEYQDGDDGFSLFSY

SEQ ID NO: 5918 - protein, 104 aa, Triticum aestivum
  unsure (1)..(104): unsure at all Xaa locations
MVQSKKKFRGVRQRHWGSWVSEIRHPLLKRRVWLGTFETAEEAARAYDEAAILMSGRNAKTNFPVPRSANGETAAARDGRGVGSSSSGAAGASSLSQILSAKLX

SEQ ID NO: 5919 - protein, 368 aa, Triticum aestivum
  unsure (1)..(368): unsure at all Xaa locations
MCGGAILKDLKXXPAPTRKVTAAVLWPEKNKPKRADGVARRLAGLVDDGEVDFEADFEEFEADSGDSDVELGRAGDDVVVEIKPLFAVKRSLSQDDLSTMTTAGFDGPAQRSAKRKRKNEFRGIRQRPWGKWAAEIRDPSKGVRVWLGTFNSAERGSQELIDVERTIRGKKEPXVNLPEYPTVTKERRACPAAPKVPKSSVAQEPTVIPAVNNLANPNAFVYPSADFASKQPLVQPDNMPFVPAINSAASVEAPVMNMYSDQGSNSFGCSDLGWEYDTKTPDISSIAPISTIAEGTESALLQSNTNSVVPPVMENNAVDXXEPWMRFLLDDGVDEPIDSLLNFDVPQDVVGNMDLWSFDDMPICGEIF

SEQ ID NO: 5920 - protein, 332 aa, Triticum aestivum
MAPLSEHQMRLTRALAKRPKTKMLTGFGVKPTAAFSKPAQLQAQALLPGAQPPRRRVRVLYEDPDATDSDTDDEEAVAAPASSKRCFELFLGKAPPATKPVTPTAAASAVAACTTSSAEGHRGVRLRKWGKWAAEIRNPFSGKREWLGTFDTADLASAAYQAASRSFIEEKRRRRSAASTTPTSSSTTPTASSSSSTSAAPFAHPSPSSVLEATKPAVESLSPDPTPVPVMVSTTAETAQLPDDPEFYQDLLRGLQLPDIDPMDFRAGLDALDVSEASAYLDGEQDLLLGDLADEDLELGMDLDIGDDFLEMPGCDFGRGMDDFLQTVDFCV

SEQ ID NO: 5921 - protein, 105 aa, Triticum aestivum
  unsure (1)..(105): unsure at all Xaa locations
XKEPPAPTESPAPLPHTKSYSSFGHAAGREGRGGKQYRGVRMRKWGKWVAEIREPHKRTRIWLGSYATPVAAARAYDTAVFYLRGRSARLNFPDEISXAGAVVAX

SEQ ID NO: 5922 - protein, 196 aa, Triticum aestivum
  unsure (1)..(196): unsure at all Xaa locations
MARPQQRYRGVRQRHWGSWVSEIRHPLLKTRIWLGTFETAEDAARAYDEAARIMCGPRVRTNFPDNDAAXXSSSFLSPALVAKLHRCSQAGQQQDKDASTSSVGVDPRSPPAPFAGYTGNASAAAASAAAGWSGGFLEEQYVEQMIEELLDYFSMEISYXPRLRTCSVPVPCACSVSAPFTSLSLRVCVWVGLFLV

SEQ ID NO: 5923 - protein, 141 aa, Triticum aestivum
  unsure (1)..(141): unsure at all Xaa locations
XPVERGEREADTHTAAESPRLRQAPHQQPSTMEREATVAFYPPAPAPQQQRPTAAQPLSARAPSSGGGGGGGGRQYRGVRMRKWGKWVAEIREPNKRSRIWLGSYATXVAAARAYDTAVFYLRGRSARLNFPDQLLDGAPX

SEQ ID NO: 5924 - protein, 220 aa, Triticum aestivum
  unsure (1)..(220): unsure at all Xaa locations
QIVQFIPNYQLSSASLPPNRRRFLIDRAWRXTVDWRSYRPDLPAAMYRMVDGSQVMHAFAPPTAQGAAPTXSRSPSHAPARIRAPGFVAPPTSLPRQILQLHHHVRRAPGAAMAXGGAADEAARRGGAPGAHGLQPLSRRHPAPRXGKWVAEIRLPRNRTRLWLGTFDTADEAALAYDAAAFRLRGESARLNFPELRXRGGEHHGPPLDAAIDAKLXAPS

SEQ ID NO: 5925 - protein, 150 aa, Triticum aestivum
  unsure (1)..(150): unsure at all Xaa locations
XSRQSISSMDGDKQKKCCPLRRSRKGCMKGXKGRPGHQQCPFRGVRQRTWGKXWVAEIREPNRGARLWLGTFATALDAARAYDAAARALYGDCARLNLXRRRRPRCSTLPQGSGANGNSAPGTPCCSSNNSDSSASTPTGTPTDMDCSAX

SEQ ID NO: 5926 - protein, 243 aa, Triticum aestivum
  unsure (1)..(243): unsure at all Xaa locations
XASTXPPAVAEATAAAAAGVNTRLTGVRKKGEDKFGAAIMHPVTKTFLWLGTYSSPEVAACAYDLAARELKGAKAKLNFPYPLPPPARLVKEVIAAPRHRSHGHEAPLFQVVTLPPDPTSPPPPPPKLVVYFPFPFEVPASNPPPVPAYPFLHMPRPARARLSPQPAHAPGPKPQPPIQRMNVMVQAESCLSSSRKTLGASSSRCLVLKKPKLVVLPVTPSAPTEGTGDNFTKPWYFPDFPVV

SEQ ID NO: 5927 - protein, 270 aa, Triticum aestivum
  unsure (1)..(270): unsure at all Xaa locations
AQHTDQHSTTSLALQTIDRRNRLSXEEVRREASRASMVKTAAAGSTGDGAVAAKQQQLGGKMRTYKGVRMRSWGAWVSEIRAPGQKTRIWLGSHSTAEAAARAYDAALLCLKGASAAADLNFPVRFPFDLXXAAAMSPKSIQRVAAAAAAGASANVFDFAAADDSASANAVDFAGADDSASAVTPDDSLYVLQLLLPVAQVHGVRHDGPVQHLLRSGADSNGGRVQLGGRRRHCALELLNRSPGSRRTEETDKSLLKRRPELAMHGDNYP

SEQ ID NO: 5928 - protein, 64 aa, Triticum aestivum
  unsure (1)..(64): unsure at all Xaa locations
XLLRTRDSGGAAEXXEPTDAGVDAGRAFRGVRKRSWGKYAAEIRDSTRNGVRVWLGTFESPEAX

SEQ ID NO: 5929 - protein, 111 aa, Triticum aestivum
MVKNHPGSGTSRCDAAAAMAESGGGGGTAALCGGGSRQPAMAARQFKGVRMRSWGSWVSEIRAPHQKRRIWLGSYATPEAAARAYDAALLCLKGSDAVLNFPSSSSASPSS

SEQ ID NO: 5930 - protein, 278 aa, Zea mays
  unsure (1)..(278): unsure at all Xaa locations
MLLNPASETSVLDTIRQHLLEEPAAAEARPADESFGSLVADQWSGSLPFRTDDADDMVVFGVLQDAFAYGWLPDGSFVHVKPEPVRSPDSSSYHPCSYDGSPCFGXPGPXEPPLTPGTTTPGRGQEEAAAAMARGKHYRGVRQRPWGKFAAEIRDPARNGARVWLGTYDTAEDAALAYDRAAYRMRGSRALLNFPLRIGSGDKRPSPAPPEXXATSSDSSSSASGSHKRRKRGEAAAANMAMALVPPPSQLNRPPQPWFPAAPVEQAAMAPRVEQIVV

SEQ ID NO: 5931 - protein, 280 aa, Zea mays
  unsure (1)..(280): unsure at all Xaa locations
MLLNPASETSVLDTIRQHLLEEPAAAEARPADESFGSLVADQWSGSLPFRTDDADDMVVFGVLQDAFAYGWLPDGSFVHVKPEPVRSPDSSSYHPCSYDGSPCFGXPGPXEPPLTPGTTTPSSRGQEEAAAAMARGKHYRGVRQRPWGKFAAEIRDPARNGARVWLGTYDTAEDAALAYDRAAYRMRGSRALLNFPLRIGSGDKRPSPAPXXEPATSSDSSSSSASGSHKRRKRGEAAAANMAMALVPPPSQLNRPAQPWFPAAPVEQAAMAPRVEQIVV

SEQ ID NO: 5932 - protein, 276 aa, Zea mays
  unsure (1)..(276): unsure at all Xaa locations
MLLNPASEASVLVTIRQHLLEEPAAAEAPCRRXSFGSLVADQWSGSLPFRTDDADDMVVFGALQDAFAYGWLPDGSFVHVKPEPVRSPDSSSYPCSYDGSSCFGLLDPEPLTPGTTTPGRGQEEAAAAMARCLHYRWGRQRPWGKFAAEIRDPARNGARVWLGTYDTAEDAALAYDRAAYRMRGSRALLNFPLRIGSGDKRPSPAPXXEPATSSDSSSSWASGSHKRRKRGEAAAANMAMALVPPPSQLNRPAQPWFPAAPVEQAAMAPRVEQLVV

SEQ ID NO: 5933 - protein, 370 aa, Zea mays
  unsure (1)..(370): unsure at all Xaa locations
MNKPIPSRGWLQVGKVQRTRLRLYKPRPGPALASPFNSITSFPSTQAHRHTAHSSLNSPPASSAHHHKPNRELSPSRSFHSRMLLNPASXXLDTIRQHLLEEPPAAADESFGILVADQWSDSLPFRTDDADDMVVFGALQDAFAYGWLPDGSFAHVKPEPVRSPDSYYSSSYDGSCFGGLPYPEQPLTPXXARGRRQGRRGVSQRPWGRVGAENGDPGRTGARAGLGTYDTARDAALAYDRAPCRRRGSRALLNFPLRIGSGDKRPSPAPXXEPATSSDSSSSSASGSHKRRKQGEAAAANMALALVPPPSQLNRAPEPXAPPAPADQAAWPSRWGPRLRSVAGCAGERVPAAARGKRATAPPRGKQIVI

SEQ ID NO: 5934 - protein, 228 aa, Zea mays
  unsure (1)..(228): unsure at all Xaa locations
LACLQDAFAYGWLPDGSFAHVKPEPVRSPDSSYYSSAPASAASRTRSSHXRPAARARRPPRPAPXREEAAAAVARGKHYRGVRQRPWGKFAAEIRDPAKNGARVWLGTYDTAEDAALAYDRAAYRMRGSRALLNFPLRIGSEIAAAAAGDKRPLALPXXPATSSDSSSSSSSTGGSPKRRKRGEAAAANMAMALVPPPSQLSRPAQPWFPAAPVEQAAMPPRVEQLVI

SEQ ID NO: 5935 - protein, 160 aa, Zea mays
  unsure (1)..(160): unsure at all Xaa locations
MLLNPASEALVLDSIRQHLMEDTAAAAAPVAEARRQRPAYCRSASFGSLVADQWSESLPFRADDSDDMVVYGALRDAFSCGWLPDGSFAAVKPEPLLPSPDSAYACDGPSCFGFLEPETPPATSPGEAXRGXXXXXXXXEAAAAXARGXXYRGXRXRPGX

SEQ ID NO: 5936 - protein, 111 aa, Zea mays
  unsure (1)..(111): unsure at all Xaa locations
MLLNPACEAAAPMDSIRHHLLDEPAAAATASAAPRPVYCRSTSFGSLVADQWSESLPFRPDDADDMVVFGALRDAFSQGWLPDGSFAAVKPEPLAFPDSPYXRGSYPCLGX

SEQ ID NO: 5937 - protein, 226 aa, Zea mays
  unsure (1)..(226): unsure at all Xaa locations
MSLSLERSSSVVRDVATPAPPATSGASAPYPRAGAGASLSRAAAAQHSQYLPLNEDDSLXDMVLFDVLREASGPGSASAAAPDTXPAALVAAYAQGARXSGAARRGSRTAYAPEAATAGRHYRGVRRRPWGKYAAEIRDPARHGARLWLGTFATAEEAAAAYDRAAVRMRGAKALLNFPPGVAGCGSAATATAKQAGLTEAKXTANAISKEPAAKLCNVIVWNSSI

SEQ ID NO: 5938 - protein, 289 aa, Zea mays
  unsure (1)..(289): unsure at all Xaa locations
XDQLLGGEACLPVVPNSAAYTASSVHYHHHHPTQAAFLPQPAQQVAYVDLTNXXYAADATACDCEAAFRAAEPVMIRFGGDPSPVSDSDPSRRPLLLTVSLPPPASHAWGPAAAVXXLPLEAAAAALDANDFRKYRGVRQRPWGKFAAEIRDPKRRGSRVWLGTYDTAVDAARAYDRAAFRMRGAKAILNFPNEVGSRGADFLAPPPAPPPVAAAATSSSSQNKRKLRDAEATAGGAAEPAAANKSVKVEASGSPAPSLSPATTTTTTTTTTTASTVTTCCSPSSGSAA

SEQ ID NO: 5939 - protein, 297 aa, Zea mays
  unsure (1)..(297): unsure at all Xaa locations
XDLQLISDQLLGGEACLPVVPNAAAYTASSVHYHHPTQAAFLQQPAQQVAYVDLTNXXYAADATACDCEAAFRAAEPVMIRFGGDPSPVSDSDPSRRPLLLTVSLPPPASHAWGPAAAVXXLPLEAAAAALDANDFRKYRGVRQRPWGKFAAEIRDPKRRGSRVWLGTYDTAVDAARAYDRAAFRMRGAKAILNFPNEVGSRGADFLAPPPPPVAXPPTSSSSQNKRKLRDAEATAGGAAEPAAASKSVKAAEASGSPAPPSLSPATTTTTTTTTAASTVTTCCSPSSGSAAGRLLX

SEQ ID NO: 5940 - protein, 92 aa, Zea mays
  unsure (1)..(92): unsure at all Xaa locations
MLLNPASEASVLDTIRQHLLEEPAXXESFGSLVADQWSGSLPFRTDDADDMVVFGALQDAFAYGWLPDGSFVHVKPEPVRSPDSSSYPCSYD

SEQ ID NO: 5941 - protein, 246 aa, Zea mays
  unsure (1)..(246): unsure at all Xaa locations
MRVVSALAXDQVCLCACTRPLPRTSXSKNMSLSLERSSSVVRDVATPAPPATSGASAPYRAGASLSLPGAAAAQHSQYLPLNEDDSLDMVLFDVLREASGSASTSAAAPATXPAALVAAYAEGARXSGAARRGSRTAYAPKAATAGRHYRGVRRRPWGKYAAEIRDPARHGARLWLGTFATAEEAAAAXDRAAVRMRGAKALLNFPPAVAGCGSAATATAKQAGLTEAKXTANAISKEPAAKLCVM

SEQ ID NO: 5942 - protein, 334 aa, Zea mays
  unsure (1)..(334): unsure at all Xaa locations
KRKIPLNLDFSGEIDDXXSLQLIREQLLGGEASLPIDAAAYSASVVHHPTQAEFHQPAAFLPQPSHVAYVDLTNEYAADATVASAGGEAAFRAEPVMIRFGGEPSPVSDPSRRPLLTISLPPASHAWGPAAVPLEAPGAAALDANDFRKYRGVRQRPWGKFAAEIRDPKKRGSRVWLGTYDTAIEAARAYDRAAFRMRGAKAILNFPNEVGTRGADFLAPPPPPPQAAATSQNKRKLMHDAAATAGAGAGAEPAKSVKAEASGSPASSLSPATTTTPASTVTTCSPSSDAGAGHEMFPVTPSSWTWEQLEGVFGILSPLSTTHPQLGFPEVTVN

SEQ ID NO: 5943 - protein, 101 aa, Zea mays
  unsure (1)..(101): unsure at all Xaa locations
MLVIRAYXAAAPMDSIRHHLLDEXXPADAPSAAPRPVYCRSTSFRSLVADQWSESLPFRPDHPDYMVVFGALRDAFSQGWLPHGSFAAMKPEXPGVPGLPL

SEQ ID NO: 5944 - protein, 295 aa, Zea mays
  unsure (1)..(295): unsure at all Xaa locations
TAALNCEIEAVRTPCSRAGLSSTQPRVMAMLREHLDLIRAHLLDDNHDAVTAPSPSPSPPGRRPLPALSVSLPPRPAVVLXSSSTXGRRRRRCRFLSRSSTAARNXEEDDFRRYRGVRQRPWGKYAAEIRDPARKGARVWLGTYDTAVEAARAYDRAAFRLRGSKAILNFPNEVALSTAAWWATPAPPPQPSATVAGNKRARSPQEQDARCMVREVKKERXXRSPQAEGRTTSGRMSRXRXAICSLPPLSPLSPHPHLAVPQLYVXADCLTXCRSKTGTVVLLLPDDSLLSSLIC

SEQ ID NO: 5945 - protein, 332 aa, Zea mays
  unsure (1)..(332): unsure at all Xaa locations
MCGGAILAELIPPTRRVASKPVTEGHLWSASSKKAGSGRDKRHQHEYADDDFEAAFEDFDDDFDVHEDDEDGHFVFSSKSALSPALHDGRAASQKKQRGRQFRGIRQRPWGKWAAEIRDPHKGTRVWLGTFSTAEDAARAYDVEARRLRGSKAKVNFPAASGRARGRARPRRXXTTATHEPPPSTARSAASRRGRGRKGSPPXSQKLPFDVGGGLFFDMAFPTFPASPPPQAVDTSFAGSTATSETGSPAKRPRCDXXDSSEGGSGSALELADELAFDPFVLLQMPYSGGYDDDSLDGLFAADEAVQQDVDGMDGVRLWSFDEFPAVDGSVF

SEQ ID NO: 5946 - protein, 332 aa, Zea mays
  unsure (1)..(332): unsure at all Xaa locations
MCGGAILAELIPPTRRVASKPVTEGHLWSASSKKAGSGRDKRHQHEYADDDFEAAFEDFDDDFDVHEDDEDGHFVFSSKSALSPALHDGRAASQKKQRGRQFRGIRQRPWGKWAAEIRDPHKGTRVWLGTFSTAEDAARAYDVEARRLRGSKAKVNFPAASGRARGRARPRRXXTTATHEPPPSTARSAASRRGRGRKGSPPXSQKLPFDVGGGLFFDMAFPTFPASPPPQAVDTSFAGSTATSETGSPAKRPRCDXXDSSEGGSGSALELADELAFDPFVLLQMPYSGGYDDDSLDGLFAADEAVQQDVDGMDGVRLWSFDEFPPVDGSVF

SEQ ID NO: 5947 - protein, 133 aa, Zea mays
  unsure (1)..(133): unsure at all Xaa locations
CSSSTXGRRRRRCRFLSRSSTAARNXEEDDFRRYRGVRQRPWGKYAAEIRDPARKGARVWLGTYDTAVEAARAYDRAAFRLRGSKAILNFPNEVALSTAAWVREVKKERIQXSPQAEGRTTSGRMSRXRGRSA

SEQ ID NO: 5948 - protein, 256 aa, Zea mays
  unsure (1)..(256): unsure at all Xaa locations
MCGGAILAELIPPTRRVASKPVTEGHLWSASSKKAGSGRDKRHQHEYADDDFEAAFEDFDDDFDVHEDDEDGHFVFSSKSAFSPGHDGRAASQKKQRGRQFRGIRQRPWGKWAAEIRDPHKGTRVWLGTFSTAEDAARAYDVEARRLRGSKAKVNFPPASGRARARPRRGDDGNPRTAPEPXHPAAAAAAAAQPALLPRGGRVRETQRKEGNAAVKPEATQSFDVGALFFNMAFPTFPASSPPQDVEASFLGSTAX

SEQ ID NO: 5949 - protein, 130 aa, Zea mays
  unsure (1)..(130): unsure at all Xaa locations
STINGGRQEGXGKYRGVRKRPWGKFAAEIRDPERGGSRVWLGTFDTAEEAARAYDRAAFTMKGATAVLNFPTSGGSAAAAPGGRTSGGGSSSSTTSSAPAREKVELECLDDRVLEELLAXGQVQQELMKR

SEQ ID NO: 5950 - protein, 109 aa, Zea mays
  unsure (1)..(109): unsure at all Xaa locations
EQHCCPEPEEDDFRRYRGVRQRPWGKYAAEIRDPSRKGARVWLGTYDTAVEAARAYDRAAFRLRGSKAILNFPNEVALSTAAWWSGFRSPQAEGRTTSGRMSRXRGRSA

SEQ ID NO: 5951 - protein, 423 aa, Zea mays
  unsure (1)..(423): unsure at all Xaa locations
MGHEAGPALPRTPQFRITHPTPPPATASSDSLPPHPTVPLTPAQPASPQPSDSEHRRHPAMCGGAILSDIIPPPPPRRVTAGHLWPESKKXXRRAAAGRRRAPVEQEQEEDFEADFEEFEVESGESELESEDDKPKPFAAPSSALARGGLNTGAAGVDGPAANSVKRKRKNQFRGIRRRPWGKWAAEIRDPRKGVRVWLGTFNSPEEAARAYDAEARRIRGKKAKVNFPDEVPTAVSQKRRAAGPASLKAPKMDVEEEKPIIKLAVNNMTNSNAYHYPAVDNIIPEPFMQTQNMPFAPLVNYAXXLVNLSSDQGSNSFGCSDFSLENDSRTPDITSVPAPVATLAAVGESVFVQNTAGHAVASPATGNTGVDLAELEPYMNFLMDGGSDDSISTLLSCDGSQDVVSNMDLWSFEDMPMSAGFY

SEQ ID NO: 5952 - protein, 191 aa, Zea mays
  unsure (1)..(191): unsure at all Xaa locations
XPSNQEAGRLRHHRCSSSKXSSAAAACKSYRGVRRRPWGKFAAEIRDTRRRGARVWLGTFATADDAALAYDKAALRMRGPRACLNFPLDVVQRALADGGGRAETTPRVLRRKRRRANHDDAAGGDDTRSDGSVAAATARDPTTTMVSFACAKKDDQVMTPLMAQERSVSDPGAVIGSRTSVATRPARGPNX

SEQ ID NO: 5953 - protein, 617 aa, Zea mays
  unsure (1)..(617): unsure at all Xaa locations
MSSRRAGTNPRARRALRRECLCFRAESLRLREIEVMMALQAQGTRVPLVLALFLLLAGCGSEAQPLVPALFTFGDSSVDVGNNDYLHTIIKANFPPYGRDFANHVATGRFCNGKLATDITADTLGFTTYPAAYLSPQASGQNLLIGANFASAGSGYYDHTALMYHARGSRNSASRTPPQRPRPQGPRRRPGSPTHSAIPHHAEAERPTQNPTPPPATASSDSLPTPPHPTVPLTPAQPASPQPSDSGHRRHPAMCGGAILSDIIPPPPPRRVTAGHLWPESKKXXRRAASGRRGAPVEQHEQEEDFEADFEEFEVESGESELESXXDEPKPFAAPRSALARGGLNTGAAGVDGPAANSVKRKRKNQFRGIRRRPWGKWAAEIRDPRKGVRVWLGTFNSPEEAARAYDAEARRIRGKKAKVNFPDEVPTAVSQKRRAAGPASLKAPKMDVEEEKPIIKLAVNNMTNSNAYHYPAVDNIIPEPFMQTQNMPFAPLVNYAXXLVNLSSDQGSNSFGCSDFSLENDSRTPDITSVPAPVATLAAVGESVFVQNTAGHAVAPPATGNTGVDLAELEPYMNFLMDGGSDDSISTLLSCDGSQDVVSNMDLWSFEDMPMSAGFY

SEQ ID NO: 5954 - protein, 119 aa, Zea mays
  unsure (1)..(119): unsure at all Xaa locations
XFGSSDDIRKKHYRGVRQRPWGKWAAEIRDPKKAARVWLGTFDTAEAAAMAYDAAALRFKGNKAKLNFPERVVMPIQPQTNNNNSTSSSAPTTHALLLFHHHNKYIIIVLFQQKGFQIX

SEQ ID NO: 5955 - protein, 307 aa, Zea mays
  unsure (1)..(307): unsure at all Xaa locations
ADADAWRVKRTTPPTHYISVAXAYPTLRRVRVCRACARLASXCCAQCTHPAHAGGEQAAXXDVQGAAAMEGHYSPTASAAEAGGXXRRFRGVRQRPWGKWAAEIRDPHKAARVWLGTFDTAEAAARAYDEAALRFRGSRAKLNFPEDARLTTAPSAAVAPAAAAGSTTTMAVAASAGXVVPAGGQRRRRXSADYLQYQMMLLQGATSGQGSSSSHGGYPLYYDYGGHGGAGAGAGGGAMSSSYSFPASTVTVASVPSSSASSAPSYGEAAQWAGSWPESSAWSYPATTASWSGSSQYEYPPSTRPPQ

SEQ ID NO: 5956 - protein, 363 aa, Zea mays
  unsure (1)..(363): unsure at all Xaa locations
MCGGAILSDIIPPPPPRRVTAGHLWPESKKXXRRAAAGRRRAPVEQEQEEDFEADFEEFEVESGESELESEDDKPKPFAAPSSALARGGLNTGAAGVDGPAANSVKRKRKNQFRGIRRRPWGKWAAEIRDPRKGVRVWLGTFNSPEEAARAYDAEARRIRGKKAKVNFPDEVPTAVSQKRRAAGLASLKAPKMDVEEEKPIIKLAVNNMTNSNAYHYPAVDNIIPEPFMQTQNMPFAPLVNYAXXLVNLSSDQGSNSFGCSDFSLENDSRTPDITSVPAPVATLAAVGESAFVQNTAGHAVAPPATGNTGVDLAELEPYMDFLMDGGSDDSISTLLSCDGSQDVVSNMDLWSFDDMPMSAGFY

SEQ ID NO: 5957 - protein, 243 aa, Zea mays
  unsure (1)..(243): unsure at all Xaa locations
TQSAGAAAXEEHQATGRQLRCPGPETPRRRYRGVRQRPWGKWAAEIRDPHKAARVWLGTFETAEAAARAYDEAALRFRGSRAKLNFPEDARLYPASTAGAAAPLAAAASTSPPVYSGGVQGSSDYLRYHQMLLQASTGSQGTLLPFYGGGMSNPYGGGAAMTGSYGGAGGGNTSGSLGSYYSFPASSVSVATVPSSTSSASGYYYSSPHDSQHSEASAAADWNWESALAWPDSSQYPPPPHTQ

SEQ ID NO: 5958 - protein, 134 aa, Zea mays
  unsure (1)..(134): unsure at all Xaa locations
GDWSKDGGGGEPTKYRGVRRRPWGKYAAEIRDSSRHGVRIWLGTFDTAEEAARAYDRSAYSMRGANAVLNFPEDAHAYAAACRGSGSSSSSSRHXGSSSSSSGRDVIELEYLDDEVLQEMLRNHEPSSSARKKM

SEQ ID NO: 5959 - protein, 245 aa, Zea mays
MAPRVADKSPLPLATGLKLGVGGGVGGMGLGPHYRGVRKRPWGRYAAEIRDPAKKSRVWLGTYDTAEEAAKAYDVAAREFRGAKAKTNFPFPLAVAVAGGAGSPSSDSTTLESSCGGSGCGVEAPAVQAAMPLTPALDLDLFHRAAAVSAVTTAGMPFPFKAFPVVRPTPHQYFLYNQAAAAAAAAGYRMVKVASASVTVAAVARSDSDSSTSSVVDRTCSPPAVTAKKEVSFELDLNWPPPAEN

SEQ ID NO: 5960 - protein, 401 aa, Zea mays
  unsure (1)..(401): unsure at all Xaa locations
SHDQQQSASRTPLHRPQPQAQIPSHPTPPSRSLQPSPRPHSPATASTGCIQPPRRVTAGHLWPESKKXXRRAAAGRRRAPVEQEQEEDFEADFEEFEVESGESELESEDDKPKSFAAPSSALARGGLNTGAAGVDGPAANSVKRKRKNQFRGIRRRPWGKWAAEIRDPRKGVRVWLGTFNSPEEAARAYDAEARRIRGKKAKVNFPDEVPTAVSQKRRAAGLASLKAPKMDVEEEKPIIKLGSEXNMTNSNAYHYPAVDNIIPEPFMQTQNMPFAPLVNYAXXLVNLSSDQGSNSFGCSDFSLENDSRTPDITSVPAPVATLAAVGESAFVQNTAGHAVAPPATGNTGVDLAELEPYMDFLMDGGSDDSISTLLSCDGSQDVVSNMDLWSFDDMPMSAGFY

SEQ ID NO: 5961 - protein, 358 aa, Zea mays
  unsure (1)..(358): unsure at all Xaa locations
ARASVRSPNNLQLSSTHARIDRSSSTRRRRRRRQIDRQLTKVDPRRRHGKRPLPGRGGRGGGGGAAPGPAARKARAAGGASPXAAVSQLQGATFSGGGGSSSSSVIGGPSPPQAYAQYYYSARADNDASAVASALAHVIRASPDQLPPQQAPALYGGRPGQPSAGRPPASVCAPLSRSRRPRRRRXXGGASMPTAGRRRHYRGVRQRPWGKWAAEIRDPXHKAARVWLGTFDTAEEAANAYDAANIRFRGASATTNFPXDPLLAPSKATIISLTPEPGKVITLPPVPVKPTFPVQVKEVGGSWGGLVKGASSEVKAFAPKPVWKMIPRVHQKFPGCADGSGLRAIHAASIHVEEVGGG

SEQ ID NO: 5962 - protein, 266 aa, Zea mays
RAGRIGYLEAGRPGHSSPAHQHNHHHRLAVVTRSPPSMAPRNALPAASAVANGMVMEPRFRGVRKRPWGRFAAEIRDPARKARVWLGTFDTAEAAARAYDAAALHFRGPKAKTNFPIDCLVLVAFAALPPPPPPKKPAAVTVSPSSSSTVESSSSSSSRDSPATPPRAASPSQQAPSLDLSLGGTPAMVAAQPFLFLDPRLAVTVAVPAPVPYRPTAVAAGANKRDAASCREEEQSDTGSSSSVVDASPAVGVGFDLNMPPPAEVA

SEQ ID NO: 5963 - protein, 110 aa, Zea mays
  unsure (1)..(110): unsure at all Xaa locations
MASGPSGGGGEPTKYRGVRRRPWGKYAAEIRDSSRHGVRIWLGTFDTAEEAARAYDRSAYSMRGANAVLNFPEDAPAYAAAASRGSAGGSSSSSGRDVIEFEYLDDEVLX

SEQ ID NO: 5964 - protein, 326 aa, Zea mays
  unsure (1)..(326): unsure at all Xaa locations
MAAAIDMYKYYNTSAHQIASSSSPSDQELAKALEPFITSASSSSSSSXXTMATRPLHPSSYATSPLPTPAAASSQLPPLYSSPYAAPCMTGQMGLNQLGPAQIQQIQAQXHVPAXQQQQRGLHAAFLGPRAQPMKQSGXXAAAAGAGXXAQSKLYRGVRQRHWGKWVAEIRLPKNRTRLWLGTFDTAEDAALAYDKAAFRLRGDTARLNFPALRRGGAHLAGPLHASVDAKLTAICQSLSESKSKSGSSXATSRPRPRRTPPSARRRPTEGEEESGSAGSPPSPXAGAARAGDGEAGLPEAPWDETETFHLRKYPSWEIDWDSILS

SEQ ID NO: 5965 - protein, 255 aa, Zea mays
  unsure (1)..(255): unsure at all Xaa locations
SEDPGFDPRRRQERGGGVRRQAGXXREQEQEDAIIVAALRHVVSGYSTPPPEVVVTVAGGEACGTCGIDGCLGCDFFGAPEXXAQEAVSCGTGQVATTASVGGGAAAAALRPRRRRNRNMYRGVRQRPWGKWAAEIRDPRRAARVWLGTFDTAEEAARAYDCAAVEFRGPRAKLNFPGHXGAVPGPXGDTAAAADTETLTPSPGEWQLGGGAGDELWEGLQDLMKQDEVDRWLAPVFGAASSFXAVVLCTHKRGY

SEQ ID NO: 5966 - protein, 253 aa, Zea mays
  unsure (1)..(253): unsure at all Xaa locations
TSRPARGALHXXGQMGLNQLGPAQIQQIHHVPAAAAAEGPARGVPGPAGAADEAVRVAVAAAGAXAPAQSKLYRGVRQRHWGKWVAEIRLPKNRTRLWLGTFDTAEDAALAYDKAAFRLRGDTARLNFPALRRGGAHLAGPLHASVDAKLTAICQSLSESKSKSGSSGDESAASPPDSPKCXXASTTTGEGEEESGSAGSPPPPXXPPTLAPPVPVPEXXAKLDFTEAPWDETEAFHLRKYPSWEIDWDSILS

SEQ ID NO: 5967 - protein, 169 aa, Zea mays
  unsure (1)..(169): unsure at all Xaa locations
MAPKRSSEERAAAEQEQPRLRGVRKRPWGRYAAEIRDPVRKARVWLGTFDTPEQAARAYDAAARRLRGPRATTNYPGDVVREAPCTAPALAASASGSTESSSSSSSRDDGHPPPPLPTAPSSLGLGLGLFPXRRWPPSRACSWTRRRWRGRKVGFDFDLNLPPPAEMVM

SEQ ID NO: 5968 - protein, 364 aa, Zea mays
  unsure (1)..(364): unsure at all Xaa locations
MCGGAILSDIIPPPPPRRVTAGHLWPESKKXXRRAAAGRRRAPVEQEQEEDFEADFEEFEVESGESELESEDDKPKPFAAPSSALARGGLNTGAAGVDGPAANSVKRKRKNQFRGIRRRPWGKWAAEIRDPRKGVRVWLGTFNSPEXEAARAYDAEARRIRGKKAKVNFPDEVPTAVSQKRRAAGLASLKAPKMDVEEEKPIIKPAVNNMTNSNAYHYPAVDNIIPEPFMQTQDMPFAPLVNYAXXLVNLSSDQGSNSFGCSDFSLENDSRTPDITSVPAPVATLAAVGESAFVQNTAGHAVAPPATGNAGVDLAELEPYMNFLMDGGSDDSISTLLSCDGSQDVVSNMDLWSFEDMPMSAGFY

SEQ ID NO: 5969 - protein, 208 aa, Zea mays
  unsure (1)..(208): unsure at all Xaa locations
MCGGAIIFDYIPARRRVSTADFWPGSDSTDPQRAPPPRAKAKPGRRKNQYRGIRQRPWGKWAAEIRDPVKGVRVWLGTYPTAEAAARAYDRAARRIRGAKAKVNFPSDTSSSVTVPTAVSRSAAAAAAQAPAVLPPPKVEAQTQXXSDEVKELSEELMAYENYMNFLGIPYMEGGTTAASATTAAAAPAGLWSFEDYYYPPSLSLFTE

SEQ ID NO: 5970 - protein, 164 aa, Zea mays
  unsure (1)..(164): unsure at all Xaa locations
MAPRTSEKTMTPAAAAAATGLALSVSGGAGASGPHFRGVRKRPWGRYAAEIRDPAKKSRVWLGTFDTAEEAARAYDAAARDYRGPKAKTNFPFPSSGSLPAAKAVTGGGGSRSSNSSTVESFSSGSDVQAXAHAGHAAPTVSGARPVPPRGGCGHGHGPPPYGS

SEQ ID NO: 5971 - protein, 167 aa, Zea mays
  unsure (1)..(167): unsure at all Xaa locations
XPSRVNLQEEAAAGGGAGGDAPLIGVRRRPWGKFAAEIRDSTRNGERVWIGTFDTPEAAALAYDQAAYSMRSSSAVLNFPVEHVQESLRALGLSVDAGVSPVLALKRRHCIRKRSKNKTAAGAKEERTKVAASSSSRGHGGHAPCVLELEDLGADYLEELLALSDQX

SEQ ID NO: 5972 - protein, 297 aa, Zea mays
  unsure (1)..(297): unsure at all Xaa locations
MAAAIDLSGEELMRALEPFIRDASAHGSSPLLHPHQPLSPSSPFSFHQAVAVAAASSYGGNYPFAAPDEAGQLSPSQMQYIQARLHLQRRPVLGPRAQPMKASASXXAPAPARPQKLYRGVRQRHWGKWVAEIRLPRNRTRLWLGTFDTAEEAALAYDQAAYRLRGDAARLNFPDNAASRGPLHASVDAKLQSLCQSIAASKKGAKKPASAAAAASSSAPTSNCSSPSSDDATSSCLESATESSCPSRSPSPSASPGPTVPEMQQLDFSEAPWDEAAGFALTKYPSYEIDWDSLLAN

SEQ ID NO: 5973 - protein, 360 aa, Zea mays
  unsure (1)..(360): unsure at all Xaa locations
MCGGAILSDIIPPPPPRRVTAGHLWPESKKPRRAASGRRGAPVEQHEQEEDFEADFEEFEVESGESELESEDEPKPFAAPRSALARGGLNTXXAAGVDGPAANSVKRKRKNQFRGIRRRPWGKWAAEIRDPRKGVRVWLGTFNSPEEAARAYDAEARRIRGKKAKVNFPDAAVSQKRRAAGPASLKAPKMDVEEEKPIIKLAVNNMTNSNAYHYPAASATTSYXEPFMQTQNMPFAPLVNYAALVNLSSDQGSNSFGCSDFSLENDSRTPDITSVPAPVATLAAVGESVFVQNTAGPVASPATGNTGVDLAELEPYMNFLMDGGSDDSISTLLSCDGSQDVVSNMDLWSFEDMPMSAGFY

SEQ ID NO: 5974 - protein, 327 aa, Zea mays
  unsure (1)..(327): unsure at all Xaa locations
MCGGAILAELIPTTPARRGGAAWPAGKCKRRKADDFEAAFREFDEDSEEEEEEDEGVVESKPAXSSSAPRPRRRSPGRARSSXSRRRAPDQQYRGVRRRPWGKWAAEIRDPVKGVRVWLGTFPSAEAAARAYDHAARHIRGPRAKLNFPXXPPPPPPGPPPAASAPAXADAVIDLEEQEQRPAAAALXXHEAAECSGSDALPDFSWQGVSAAYEAPRAAPGLRLXEARPESAADEASPRASDSESDALFDSLLFGDQFAFFDAGAYESLDSLFSADAVQSNAAAAADQDMPLWSFDDGCLVEDXPLVLSFGDCCCVLSFVNYDLFFF

SEQ ID NO: 5975 - protein, 351 aa, Zea mays
  unsure (1)..(351): unsure at all Xaa locations
PAGPGSNCLLQPSISALCCAPRIVYARSRDLSLDSLGYPLLSVSCKNPWRLRRXIGTPATTPRFPPPCMAXGRAGQQXXLVRALIAPPMPFAYPCSGVEQQSAAGSFLGAGGGGLTPAQILQVQSRLQFXAPAGGGRGRHPADEAAGRAAAAXXPAVSKLYRGVRQRHWGKWVAEIRLPRNRTRLWLGTFDTAEEAALAYDSAAFRLRGDSARLNFPELRRGGQHLGPPLHAAVDAKXXTPSATARTSSCRRRRAGATTXTVVATATATATTAPSPFSSASPHVKSEPGSSGSDSSFXXQTATCPPLGPPTXVLDMQLLDFSEASWDDSESFRLRKYPSLEIDWDSILLIS

SEQ ID NO: 5976 - protein, 209 aa, Zea mays
  unsure (1)..(209): unsure at all Xaa locations
DPLESTCRRRRRPAAAPAATRXLIGVRRRPWGKFAAEIRDSTRNGERVWIGTFDTPEAAALAYDQAAYSMRSSSAVLNFPVEHVQESLRALGLSVDAGVSPVLALKRRHCIRKRLPKNKTAAGAKEERTKQKQQQAAPCVLELEDLGADYLEELLALSDQXANYSSSTKSCLXVNHQCTSMNYRVLKXXMFCSTVMRARLLGQAHTHAF

SEQ ID NO: 5977 - protein, 194 aa, Zea mays
  unsure (1)..(194): unsure at all Xaa locations
AQPRRAKLAREASIAERTQRQSEHARLQRRTDSSVHGAQEEQRGARGGGAGEPRLRGVRKRPWGRYAAEIRDPVRKARVWLGTFDTPEQAARAYDAAARRLRGPRATTNYPGDAASASGSTESSSSSSSRDDGHPPPPMPPAPSSLGLGLGXLPGDGGHPAGHLNIIYLPLFKKRETGKTLALPNLIPFKENPF

SEQ ID NO: 5978 - protein, 409 aa, Zea mays
  unsure (1)..(409): unsure at all Xaa locations
MCGGAILSGLIPPSGVPAAAAAAKKKQQRRATADLLWPGPGKKGAPREEDFEADFREFERGLGEDDVDGAGDEVQELPLPEPARLAFAAAVGAPRTAVDGVMTPKDGEGDMPTTANNSXQQISARRKNQYRGIRRRPWGKWAAEIRDPSKGXVRVWLGTYSTXAEEAARAYDAEARRIRGKKAKVNFRDEAAAAGAQKPPAXQLLQLRASAARLAPPPPPPKFRADEVFGNMDGGSNDLFAMLAFSDSKAVEEVLVDEPLLPGSKRSAANMLLLSDQSSDSYGSCDLGWEWDWDDDTMTSDYASVFAPAAPSNVVPALVHASGPVSKRTRSSYGVAMPGGFDPETNYQYRPLPYVVESSPSSDGASTDDMDCLQMMRAGDVPQDGASGGGGGAGDIWSLDELLMAAGAY

SEQ ID NO: 5979 - protein, 221 aa, Zea mays
  unsure (1)..(221): unsure at all Xaa locations
PLTRSSAPCRVEPASRPIESERIRAPGRALLVGGPTQRTTAGGSDAAPRYRGVRKRPWGRFAAEIRDPAKRARVWLGTFDSAEAAARAYDVAARALRGPLARTNFPXXSPPPPAAPXPTCSSGSTVESSSGPRAGDPRARAAHRGRAAAKPRRPPRQAPPPPTDADCHSDCASSASVVDDGDDASTVRSRARPSLDLNLPAPLDLDGGHDLGFCTDLRLCL

SEQ ID NO: 5980 - protein, 267 aa, Zea mays
  unsure (1)..(267): unsure at all Xaa locations
DPQRQPTPPQPCPAHHHQHLAPSSAVVVTRSNAPPSMAPKNALPAASGMTLEPRYRGVRKRPWGRYAAEIRDPARKARVWLGTFDTAEAAARAYDAAALHFRGPKAKTNFPVAFATATDTRALPLPLRLPLPPPPPKKLSXEPERQHRGVLVPGLARRAGPRAVARPXSLGMPAMVAAQPFLFLDPRLAVTVAVAAPVPRRPTAAAAGAGASKQAAYSCCREDEQSDTGSSSSVVDASPAVGVGFDLNMPPPGEVAXLDRAAALKDX

SEQ ID NO: 5981 - protein, 237 aa, Zea mays
PCPSAQPPPPPPGRNVTRSPPSMAPRNAVPAASAVANGMVMEPRFRGVRKRPWGRFAAEIRDPARKARVWLGTFDTAEAAARAYDAAALHFRGPKAKTNFPVAFAALPPPPPKKYLHPAAVTVSPSSSSTVESSSSSSRDSPATPPRAASPSQQAPSLDLSLGGTPAMVAAQPFLFLDPRLAVTVAVPAPAGANKHAAASCREEEQSDTGSSSSVVDASPAVGVGFDLNMPPPAEVA

SEQ ID NO: 5982 - protein, 340 aa, Zea mays
  unsure (1)..(340): unsure at all Xaa locations
MCGGAILAELIPTTPARRGGAAWPAGKCKRRKANDFEAAFREFDEDSEEEEEDEGVVESKPAFVVRASSAATQPRARQEQRSRRRAPDQQQYRGVRRRPWGKWAAEIRDPVKGVRVWLGTFPSAEAAARAYDHAARGIRGPRAKLNFPXXPPPPPPGPPPAASAPXTADADAVIDLEEQEQRPAAAALKHEAAECSGSDALPDFSWQGVSAAYEAPRAAPGLRLXEARPESAADEASPRASDSESDALFDSLLFGDQFAFFDAGAYESLDSLFSADAVQSNAAAAADQDMPLWSFDDGCLVEDXPLVLSFGDCCCVLSFVNYDLFFFWSFCSCISVSMVS

SEQ ID NO: 5983 - protein, 243 aa, Zea mays
  unsure (1)..(243): unsure at all Xaa locations
RHAAPAQRAHGRHXAAESDSFSDDMEAASSESSSSACSANSQQEATRRPQQQPDGGHSNGSNKSSKKQHQQQPPAPYIGVRKRPWGKFAAEIRDSTRKGARVWLGTFDSPEAAAMAYDQAAFSVRGAAAVLNFPVERVQESLRALALSSASSAAGSPVLALKCRHSIRKRSPXXRTRTRTRSRSGSNRVXRGRRRTTAAAVPHQXXVELEDLGADYLDELLRVSSEFHWQXPIANGGPARCKR

SEQ ID NO: 5984 - protein, 296 aa, Zea mays
  unsure (1)..(296): unsure at all Xaa locations
MAATIDLSGEELMRALEPFIRDASAHGSSPLLHPHQPLSPSSPFSFHQAVAAASSYGGNYPFAAADEAGQLSPSQMQYIQARLHLQRRPVLGPRAQPMKASASXXAPAPARPQKLYRGVRQRHWGKWVAEIRLPRNRTRLWLGTFDTAEEAALAYDQAAYRLRGDAARLNFPDNAASRGPLQPPSDAKLQSLCQSIAASKKGAKKPASAAAATSTSAPTSNCCSSPSSDDATSSCLESATESSCPSRSPSPSASPGPTVPEMQQLDFSEAPWDEAAGFALTKYPSYEIDWDSLLAN

SEQ ID NO: 5985 - protein, 175 aa, Zea mays
  unsure (1)..(175): unsure at all Xaa locations
MCGGAIIADFVPAGARRPATDXTPCPPPSSPVLRCEDHPELPLPAPGRKTAYRGIRRRPWGRWAAEIRDPRKGARVWLGTYATPEDAARAYDVAAREIRGPKAKLNFPPAVGGGGGGARAPAPAAAKRRRKSAAAEESSASSPPAAAAAAVVAGACCXTENXSKKTEIWSVKKKK

SEQ ID NO: 5986 - protein, 352 aa, Zea mays
  unsure (1)..(352): unsure at all Xaa locations
MCGGAILAELIPTTPARRGGAAWPAGKCKRRKANDFEAAFREFDEDSEEEEEDDEGVVESKPAXSSSAPRPRRRSPGRARSSXSRRRAPDQQYRGVRRRPWGKWAAEIRDPVKGVRVWLGTFPSAEAAARAYDHAARHIRGPRAKLNFPSXXPPPPLPGPPPAASAPXTADADAVIDLEEQEQRPAAAALKHEAAECSGSDALPDFSWQGVSAAYDEACAAPGLRLXEARPESAADEASPRASDSESDAMFDSLLFGDQFAFFDAGAYESLDSLFSADAVQSNAAAAADQDMPLWSFDDGCLVEDXPLVLSFGDCCCVLSFVNYDLFFFFFEFLLMYICIDGELNEIILLRK

SEQ ID NO: 5987 - protein, 226 aa, Zea mays
  unsure (1)..(226): unsure at all Xaa locations
MCGGAIIADFVPAGARRPATDDTMSASSSEDHPELPLPLPAPAPGRKTAYRGIRRRPWGRWAAEIRDPRKGARVWLGTYATPEDAARAYDVAAREIRGPKAKLNFPPAVGGGGGARAPAPAAAKRRRKSAAAEESSASSPPAAVVVAGGGEEALRDCMSGLEAFLGLQDADEGGGVEAWDAVVLAXAGVRRSRAAGGPSPSPSARVPSLXTAAAAVLDRVIILLVV

SEQ ID NO: 5988 - protein, 116 aa, Zea mays
  unsure (1)..(116): unsure at all Xaa locations
XKFRGVRRRPWGKFAAEIRDPWRGVRVWLGTFDTAEEAARVYDTAAIQLRGANATTNFSAAANSGSRAGQRDPATPGYESGTESSPAASSPTSVLRKVPSLSSLAEDDSCAAPCEX

SEQ ID NO: 5989 - protein, 255 aa, Zea mays
  unsure (1)..(255): unsure at all Xaa locations
GRDKSFLTSALLQLQSVLLKWNRAILLPPPLPATATLPPHHPRGSRSTTTTTRPTATTRFYSSSTQFSSAWTTTTLPPPTTAAAPAGXSSSPSPSPSSSSEATTTASPPPSTPAQAAPGERRHRLGGRRRREAGGDXXAAFIGVRKRPWGKFAAEIRDSTRKGARVWLGTFDTPEAAALAYDQAALAARGAAAVLNFPVERVVESLGALALAGAGSPVLALKRRHSKRTRRRKPSAVAAAATAAACDGARPEPHA

SEQ ID NO: 5990 - protein, 234 aa, Zea mays
  unsure (1)..(234): unsure at all Xaa locations
TSSAAAQIQQIQAQLMFQQQQQQQQRGPFLGPRAQPMKPGSPSPPPPLAPAPAQSKLYRGVRQRHWGKWVAEIRLPKNRTRLWLGTFDTAEGAALAYDEAAFRLRGDTARLNFPSLRRGGGARLAGPLHASVDAKLTAICQSLAGSKNSSSSDESAASLXXDSPKCSASTEGDXXDSASAGSPPSPTQAPPVPEMAKLDFTEAPWDETEAFHLRKYPSWEIDWDSILSXTINYN

SEQ ID NO: 5991 - protein, 147 aa, Zea mays
  unsure (1)..(147): unsure at all Xaa locations
MAKIGLKPDPVXXNNAKEIRYRGVRKRPWGRYAAEIRDPGKKTRVWLGTFDTAEEAARAYDAAARDFRGAKAKTNFPNFLELSEKMPAAGGGFERSPSQSSTLDCDSPPAAVTPASAGIVPPQLELRLGGYQIPMARPIYFLDVXGX

SEQ ID NO: 5992 - protein, 364 aa, Zea mays
  unsure (1)..(364): unsure at all Xaa locations
MCGGAILAELREPAPRRLTERDIWQQKKKPKRGGAGGRRSFAAEDDEDFEADFEDFEADSGDSDLELGEGADDDVIEIKPFAAKSTFSRDGLSTMTTAGYDAPAARLAKRKRKNQYRGIRQRPWGKWAAEIRDPQKGVRVWLGTFNSPEEAARAYDAEARRIRGKKAKVNFPDAPAVGQKCRSSSASAKALKSCVEQKPIVKTDMNILANTNAPFYQSVNYASNXXPFVPAMNSTVSFEDPIMNLHSDXRGSNSLGXCSDLGWENDTKTPDITSIAPIPTIAEGDESVFVNSNSNSSMVPPVLENNAVDLTDGLTDLESYMRFLMDGGASDSIDSLLNLDGSQDLGSNMDLWTFDDMPIAGDFF

SEQ ID NO: 5993 - protein, 364 aa, Zea mays
MCGGAILANLREPAPRRLTERDIWQQKKKLKRGGGGGRRSFAAEDDEDFEADFEVFEADSSDSDLELREGTDDDVVEIKPFTAKRTFSSDGLSTMTSDVARSAKRKRKNLYRGIRQRPWGKWAAEIRDPQKGVRVWLGTFNSPEEAARAYDAEARRIRGKKAKVNFPDAPAVGQKRRSSGSASAKASKSSFGQKPIVKVAMNNLANTNASFFQSVSYPSNSFVQHGNIPFVPAMNSTGSVEDPIMNLHSDQGSNSFGCSDLGWENDTKTPDITSIAPISTIAEGDESAFVDSNSNNSFVLPALENSAVDLTDGLTDLESYMRFVLDGGPSDSVDSLLNLDGSQDVGSDMDLWSFDDMPIVGDFF

SEQ ID NO: 5994 - protein, 207 aa, Zea mays
  unsure (1)..(207): unsure at all Xaa locations
MCGGAIIFDYIPARRXVSTADFWPGSEADAEDIHASHSPDPQRGKRRRKNQYRGIRQRPWGKWAAEIRDPVKGVRVWLGTYPTAEAAARAYDRAARRIRGAKAKVNFPSDTSSSVTVPTAVSRSAAAAAQAPAVLPQPSVEAQTQXXSDEVKELLEELIYYGFYMNSLIEGYNAAATTAPATTAAAPTGLWSFEDYYYPPSLSLFPE

SEQ ID NO: 5995 - protein, 233 aa, Zea mays
MAPRTSEKTMAPAAAAATGLALSVGGGGGAGGPHYRGVRKRPWGRYAAEIRDPAKKSRVWLGTYDTAEDAARAYDAAAREYRGAKAKTNFPYPSCVPLSAAGCRSSNSSTVESFSSDAQAPMQAMPLPPSLELDLFHRAAAAATGTGAAAVRFPFGSIPVTHPYYFFGQAAAAAAEAGCRVLKLAPAVTVAQSDSDCSSVVDLSPSPPAAGSARKPAAFDLDLNCSPPTEAEA

SEQ ID NO: 5996 - protein, 257 aa, Zea mays
  unsure (1)..(257): unsure at all Xaa locations
QPCPAHHQHLAPSSSAVVTRSIAPPSMAPKNALPAASGMTLEPRYRGVRKRPWGRYAAEIRDPARKARVWLGTFDTAEAAARAYDAAALHFRGPKAKTNFPVAFATATATDTRALPLPLRLPLPPPPQAGREPQRQHRGVVVPGLARRAGPRAVARPEPRHAAHGGRPAVPVPGPEAXAVTVAVAAPVPRRPTAAAAGAGASKQAAYSCCREDEQSDTGSSSSVVDASPAVGVGFDLNMPPPGEVAXLDRAAALKDX

SEQ ID NO: 5997 - protein, 242 aa, Zea mays
  unsure (1)..(242): unsure at all Xaa locations
SFTDSQILASNTNSPIHVRSRTLALRXSGGMRRRGVAAADADGDVELRFRGVRKRPWGRYAAEIRDPAKKARVWLGTFDSAEDAARAYDAAARMLRGPKARTNFPLPAAAAXPPPPHARCCRRSSSTIHNISHRHGRRLXTPPVARPACSSLSSTVESFSGARPRPVLPPRFPXXPSIPDGDCRSDCGSSASVVDDDCTDAAASASCPFPLPFDLNLPPGGXAEPASGFNEEDELRLTALRL

SEQ ID NO: 5998 - protein, 124 aa, Zea mays
  unsure (1)..(124): unsure at all Xaa locations
MDPTPRAVLISISSGGAKGGGGGSHAHYRGVRKRPWGRYAAEIRDPWKKTRVWLGTFDTPLEAALAYDRAARTLRGAKARTNFPDDHXRAAAAAAPPSAPTPAAAARPRQPRHRQRRWSWARAX

SEQ ID NO: 5999 - protein, 195 aa, Zea mays
  unsure (1)..(195): unsure at all Xaa locations
MCGGAILAELREPAPRRLTERDIWQQKKKPKKSTFSRDGLSTMTTAGYDAPAARLAKRKRKNQYRGIRQRPWGKWAAEIRDPQKGVRVWLGTFNSPEEAARAYDAEARRIRGKKAKVNFPDAPAVGQKCRSSSASAKALKSCVEQKPIVKTDMNTLANTNAPFYQSVNYASNXXPFVPAMNSTVSFEDPIMNLHX

SEQ ID NO: 6000 - protein, 127 aa, Zea mays
  unsure (1)..(127): unsure at all Xaa locations
RAGIASXLHSPIPIPAHTFAFGLSGGMRRSGVAAAXADGDVESRFRGVRKRPWGRYAAEIRDPAKKARVWLGTFDSAEDAARAYDAAARMLRGPKARTNFPHPAAXPPPPPHGHRRRRRSAINNTHX

SEQ ID NO: 6001 - protein, 237 aa, Zea mays
MAPRVADKSPLPPATGLGLGVGGGVGGVGMGPHYRGVRKRPWGRYAAEIRDPAKKSRVWLGTYDTAEEAAKAYDSAAREFRGAKAKTNFPFPSQCSVASGAAGSASSNSTVDSSGGGSGCGIQAPMQAMPLPPALDLDLFHRAAAVNAVSTGMRFPFKGYPVACPTPQQYFFYEQAAAAASGYRMLKVAPPAVTVAAVAQSDSDSSSVVDHSPSPPAVTANKVGFELDLNWPPPAEN

SEQ ID NO: 6002 - protein, 382 aa, Zea mays
  unsure (1)..(382): unsure at all Xaa locations
PAGXKKKYLSPAGRGSNCLLQPSISALCCAPRIVYARSRDLSLDSLGYPLLSVSCKNPWRLRRXIGTPATTPRFPPPCMAXGRAGQQXXLVRALIAPPTPFAYPRSGVEQQSAAGSFLGAGGSGLTPAQILQVQSRLRFXAPAGGGRRRHPADEAAGRAXXQAPVPARAGVSKLYRGVRQRHWGKWVAEIRLPRNRTRLWLGTFDTAEEAXALAYDGAAFRLRGXDSARLNFPELRRGGQHLGPPLHAAVDAKLQSAAARTSARRCRRARARAXAPAAATTATPSXPSPRCVKSEPGCSVSESSFSADGDVSSTGSSDVVPEMQLARLLGSAMGRVRQLPPSLTLAMRLLNFSEAPWDDFESFGLRKYPSLEIGWDSILLIS

SEQ ID NO: 6003 - protein, 210 aa, Zea mays
  unsure (1)..(210): unsure at all Xaa locations
MATKRSVCTLDQAHLKGKKELLPTDLNAPLDDAPNTPAPPSCAKAERRRNNQYRGIRQRPWRXWAAEIRDPVKGVRVWLGTYPTAEAAARAYDRAARRIRGAKAKVNFPSDSSSVPAPTAASGSAAAAAAQAPAVLPAPKVEARTQXXSAEVKELPEELMAYENYMSFLGVPYMEGGNAAVSAPPAAAAPTGLWSFEDYYYPPSLSLFPE

SEQ ID NO: 6004 - protein, 172 aa, Zea mays
  unsure (1)..(172): unsure at all Xaa locations
MAPRVADKSPLPPATGLGLGVGGGVGGVGMGPHYRGVRKRPWGRYAAEIRDPAKKSRVWLGTYDTAEEAAKAYDSAAREFRGAKAKTNFPFPSQCSVASGAAGSASSNSTVDSSGGGSGCGIQAPMQAMPLPPALDLDLFHRAAAXFIFFASFIICXLVNINKXXKYFHPXX

SEQ ID NO: 6005 - protein, 324 aa, Zea mays
  unsure (1)..(324): unsure at all Xaa locations
MAAAIDMYKYCNTSAHLIASSSPSDQELAKALEPFITSASSPYHRYSLAPDSYMPTPSSYTTSPLPTPTSSPFSQLPPLYSSPYAASTASGVAGPMGLNQLGPAQIQQIQAQLMFQHQQQRGLHAAFLGPRAQPMKQSGSPPAQSKLYRGVRQRHWGKWVAEIRLPKNRTRLWLGTFDTAEGAALAYDEAAFRLRGDTARLNFPSLRRGGGARLAGPLHASVDAKLTAICQSLAGSKNSSSSDESAASLXXDSPKCSASTEGDXXDSASAGSPPSPTQAPPVPEMAKLDFTEAPWDETEAFHLRKYPSWEIDWDSILSXTINYN

SEQ ID NO: 6006 - protein, 211 aa, Zea mays
  unsure (1)..(211): unsure at all Xaa locations
MCGGAIILDYIPARRRVSAADFWPDSEADAEDSDSHAPDPERRGKAKRGRKNQYRGIRQRPWGKWAAEIRDPVKGVRVWLGTYPTAEAAARAYDRAARRIRGAKAKVNFPNDASSSSVTAPTAASGVAAQAPXXVFLPAPKVEARAQXXSDEVKELSEELMAYENYMSFLGVPYMEGGNAAASATTAAAAPAGLWSFEDYYYPPSLSLFTE

SEQ ID NO: 6007 - protein, 174 aa, Zea mays
  unsure (1)..(174): unsure at all Xaa locations
RSPSPSRPPDRARRRPVDSSPLLGRSTARASAAARRGELFRCCITTTTAGGRXHIKARDVRRGXXVAAPRYRGVRKRPWGRFAAEIRDPAKRARVWLGTFDSAEAAARAYDMAARALRGPLARTNFPALTSPCQPPAPTPTCSSSSTVESSSGPRAGVPRAGRRAAGKPRAPRX

SEQ ID NO: 6008 - protein, 157 aa, Zea mays
  unsure (1)..(157): unsure at all Xaa locations
MLSGYERSREASMMVDALATVVAGGATPPATAGARQQQAAAAAGLSSCTGRSRARSGTDSXATTASPSSSSQAPSPSSTGSGTPRRRYRGVRQRPWGKWAAEIRDPHKAARVWLGTFDTAEAAARAYDVAALRFRGSRANLNFPESATLAKPPPTAX

SEQ ID NO: 6009 - protein, 287 aa, Zea mays
  unsure (1)..(287): unsure at all Xaa locations
MSRSRTVRIFWDDPDLTDSSGDDEGCGARRVGRMVRELAPAPAPAPAALPVPDQCNAGDGDRGRKAGVAGPGVCSGARRRVAKGAGGPASTKFRGVRRRPWGKFAAEIRDPWRGVRVWLGTFDTAEEAARVYDTAAVQLRGANATTNFAASAATNSGSGAGAGQDPATTPAAGYESGAESSPTSVLRKVPSLSSLAEDDSDAPAXPSAAXLAVLEEEELGEFVPFEDAPVYATSGFWDFEPDAGFLYAEPSSPEASWNAGAASPVQENDYFQDLRDLFPLNRLPAIF

SEQ ID NO: 6010 - protein, 118 aa, Zea mays
  unsure (1)..(118): unsure at all Xaa locations
CDIDGRXGGEPTKYRGVRRRPSGKFAAEIRDSSRQSVRMWLGTFDTAEEAARAYDRAAYAMRGQIAVLNFPAEARNYVRGGSSSSRQQQQGGGGGGGSGGGAGQQVIELECLDDQVLX

SEQ ID NO: 6011 - protein, 215 aa, Zea mays
  unsure (1)..(215): unsure at all Xaa locations
MCGGAIIFDYIPARRRVSAADFWPDSEADAEDSDSHAPDPERVPRPRGKAKRGRKNQYRGIRQRPWGKWAAEIRDPVKGVRVWLGTYPTAEAAARAYDRAARRIRGAKAKVNFPNDASSSSVTAPTAASGVAAQAPXXVFLPAPKVEARAQXXSDEVKELSEELMAYENYMNFLGVPYMEGGNAAVSATTAAAAPAGLWSFEDYYYPPSLSLFTE

SEQ ID NO: 6012 - protein, 402 aa, Zea mays
  unsure (1)..(402): unsure at all Xaa locations
MCGGAILSGFIPPSGVXXAAAAAKKKQQRRATADLLWPGPGKKGASREEDFEADFREFERGLGEDDVDGAGDEVQELALPEPARLAFAAAVGAPRTAVDGVMTPKDGEGDMPTTANNSAANKRRRKNQYRGIRRRPWGKWAAEIRDPSKGVRVWLGTYSTAEEAARAYDAEARRIRGKKAKVNFRDEAAAAATPTACASAARLAPPPPPPKFRAGEGFGQHDTGSNDLFAIMFAFSDSSSKVVRVEPDLLPGSKRSAANMLLLSDQSSDSYGSCDLGWEWDWDDDTMTSDYASVFAPAAPSNVVPAWYTQGGPVSKRTRSSYGYGAAMPGGFDPETNYQYQPLPYVVESSPSDGASTDDMDCLQMMRAGDVPQDGASSGGGGGDGGDIWSLDELLMXAAGAY

SEQ ID NO: 6013 - protein, 364 aa, Zea mays
  unsure (1)..(364): unsure at all Xaa locations
MCGGAILANLREPAPRRLTERDIWQQKKKLKRGGGGGRRSFAAEDDEDFEADFEVFEADSSDSDLELREGTDDDVVEIKPFTAKRTFSSDGLSTMTSAVARSAKRKRKNLYRGIRQRPWGKWAAEIRDPQKGVXRVWLGTFNSPEEAARAYDAEARRIRGKKAKVNFPDAPEVGQKRRSGSASAKASKSSFGQKPIVKVTMNSLANTNASFFQSVSYPSNSFVQHGNIPFVPAMNSTGSVEDPIMNLHSDQGSNSFGCSDLGWENDTKTPDITSIAPISTIAEGDESAFVDSNSNNSFVLPALENSAVDLTDGLTDLESYMRFVLDGGPSDSVDSLLNLDGSQDVGSNMDLWSFDDMPIAGDFF

SEQ ID NO: 6014 - protein, 133 aa, Zea mays
HWVPRGRPGHSSPAHQHNHHHRLAVVTRSPPSMAPRNALPAASAVANGMVMEPRFRGVRKRPWGRFAAEIRDPARKARVWLGTFDTAEAAARAYDAAALHFRGPKAKTNFPVAFAALPPPPPQMYLHPRSRPP

SEQ ID NO: 6015 - protein, 444 aa, Zea mays
  unsure (1)..(444): unsure at all Xaa locations
STASQKQRPGGQCAWGPTHRPRSRPRHTTASSSFLFSSSTRGTEHPGDGEQQNIGPRLFGPVLASTRPFINARXPAPSESEPRAPLAGARTXGRSXRPLPASLAKPLPRSRFSRAASSSSGAVRSGRPGXXILEDAPAAALLRPLKKIRSPDRRLNRSLSSFSPAPPSPESSSAFSPMPLPSALQHQQMISFGKQPATRAXEFVAAAAATPLFPPQLVAPXVHQQMLLRYWSEALNXSPRGXPRRGRATAASAAVPXXXAARVVGAAXKLYRGVRQRHWGKWVAEIRLPRNRTRLWLGTFDTAEDAAMAYDREAFKLRGDNARLNFPDLFLGKTETERVDNSEPEPNPELQSADHQGDGTTAMFQPSGGVXGVRADEAWFSAWGPGSSVWDWDYDMDNAHGLLLQSRFASEATSMDYVSSTPEVPAVGTAVASLSPPPPPRSPT

SEQ ID NO: 6016 - protein, 237 aa, Zea mays
KVSSPFRSRKSPSHRFVTGAGAPGAVARSAKRKRKNLYRGIRQRPWGKWAAEIRDPQKGVRVWLGTFNSPEEAARAYDAEARRIRGKKAKVNFPDAPAVGQKHRSGSASAKASKSSFGQKPIVKGSNSFGCSDLGWENDTKTPDITSIAPISTIAEGDESAFVDSNSNSSFVLPALENSAVDLTDGLTDLESYMRFLLDGGPSDSVDSLLNLDGSQDVGSDMDLWSFDDMPIVGDFF

SEQ ID NO: 6017 - protein, 230 aa, Zea mays
  unsure (1)..(230): unsure at all Xaa locations
RPGRVSSFHLKTHTLAPPRRKTPRPMAPRTSERAMTSAAAGLGGAGPHYRGVRKRPWGRYAAEIRDPAKKSRVWLGTFDTPEDAARAYDAAAREYRGAKAKTNFSFPAACRSGNSSSTTTTTTVDSFGGDVQAPPMQAMPLPPSXXCASGAVRFPFSSYPVTHPYYFFGQAAAGCHMLKLPPTTVTVAQSDSDSSSVEDLSPSPPAAVSATRAAAFDLDLNCPPPAEAEA

SEQ ID NO: 6018 - protein, 399 aa, Zea mays
  unsure (1)..(399): unsure at all Xaa locations
MCGGAILSGFIPPSGVAAAAAAAKKKQQQRCRVTADLLWPGPGSKEAPQDQEEDFEADFREFERGLGEDDVDSAGEGGDPEVQELPPPEPTRFAFATAAKAAVDGVMTTTPKDVKGDRPVKRGRKNQYRGIRQRPWGKWAAEIRDPNKGVRVWLGTYNTAEEAARAYDAEARKIRGKKAKVNFPDDDAPGTGHRPANAAPRLVAPPPPPKACADEIFNNLKNDDDDEVAVAVAASSXPAPAVAVVPGNKRRSSATNTMLSVSDDQRSNSYGSGSSDLVGSWSWDDDAAAAAMTSDYTSSVFAPDNAVPSYTQGGAPKRMRSSYGGAPPSLAHDAAMPGFGLDKVSYHHYQALPPYYVGSSNASVGNLGLLQHPAPQDGASAGDIWSLDELLMLAAAGAY

SEQ ID NO: 6019 - protein, 238 aa, Zea mays
  unsure (1)..(238): unsure at all Xaa locations
MCGGAILAGFIPPSAAAAAAKAAAAKKQQQQQQQQQRSVTADSLWPGLRKKAAEEEDFEADFRDFERDSSDDDXRGRGGSXPPPASAGFAFAAAVEVAPPAPARLDAVQHDGPAAKSVKRVRKNQYRGIRQRPWGKWAAEIRDPSKGVRVWLGTYDTAEEAARAYDAEARKIRGKKAKVNFPEEAPTVQKSTLKPTAVKSAKLAPPPKTCEDEPFNHLSRGDNDLFAMFALHDKKGSA

SEQ ID NO: 6020 - protein, 238 aa, Zea mays
MGTNPHLQELAASAVAASEPPPRARVVRILVHDADATDSSSSEDEAPPLLPRRRSRGGSSSLSVRRRVMEPAGASSAVRFRGVRRRPWGRWAAEIRDPHNRRRLWLGTFDTAEEAANAYDAANIRFRGASATTNFPAARYSPPPKPAKPIISLTPEPGKVITLPPVPVKPTFPVQVKEVGGSWGGLVKGARSEVKAFAPKPVWKMIPRVHQKFPGCADGSGLRAVHAASIYVEEVGGG

SEQ ID NO: 6021 - protein, 229 aa, Zea mays
  unsure (1)..(229): unsure at all Xaa locations
XLFRIPLAAGFLGPQAQPMKHAGAPPLAAAKLYRGVRQRHWGKWVAEIRLPRNRTRLWLGTFDSAEDAALAYDKAAFRLRGDAARLNFPSLRRGGAHLAGPLDASVDAKLTAICQGITAEPTSKAAAAAPSDSXXKASASTTTTEGDESVHSAGSPPSLPTFPQQQQQVTPPLPEMASLDFTEAPWDESAALHLNSYPSWDIDWDSILSXSINPTSKCLVTRCNFCQWI

SEQ ID NO: 6022 - protein, 153 aa, Zea mays
  unsure (1)..(153): unsure at all Xaa locations
EEEGTVALSGTVGLVDAALLSETHPAASLSLSGEGTSREAHYRGVRKRPWGRYAAEIRDPWRKTRVWLGTYDTPVEAAMAYDRAAVALRGSKARTNFTAGRGGXPGPLPVQARPLPXXPAXAPGHFSGXDATHSSPWHVVYLPPPSSSKKKKK

SEQ ID NO: 6023 - protein, 279 aa, Zea mays
MAAAINLPGPSEDLMRAMESFMQDDAPSPLAMPPAPSFPAAAAHGAQYPATHLSPAQMQFIQAQLHLQRNPGLGPRAQPMKPAVPVPPAPAPQRPVKLYRGVRQRHWGKWVAEIRLPRNRTRLWLGTFDTAEQAALAYDQAAYRLRGDAARLNFPDNAESRAPLDPAVDAKLQAICATIAAASSSSKNSKAKSKAMPINASVLEAAAASPSNSSSDEGSGSGFGSDDEMSSSSPTPVVAPPVADMGQLDFSEVPWDEDESFVLRKYPSYEIDWDALLSN

SEQ ID NO: 6024 - protein, 410 aa, Zea mays
  unsure (1)..(410): unsure at all Xaa locations
MCGGAILSGFIPPSGVAAAAAAAKKKQQQRRVTADLLWPGPGSKGAPQDQEEDFEADFREFERGLGEDDVDSAGEGGDPEVQELPPPEPTRFAFATAAKAAVDGVMTTTPKDVKGDRPVKRGRKNQYRGIRQRPWGKWAAEIRDPNKGVRVWLGTYNTAEEAARAYDAEARKIRGKKAKVNFPDDDAPGTGHRPANAAPRLVAPPPPPKACADEIFNNLRTTTTTXNNNNDDLFAMFAGSFLVPAPAVAVVPGNKRRSSATNTMLSVSDDQRSNSYGSGSSDLVGSWSWDDDAAAAAMTSDYTSSVFAPDNAVLPAASYSYMQGGAPKSMRSSYGGAPPSLAHDAAMPGFGLDKVSYHYQALPPYYVGSSNASVGSLGLLQADDAPQDGASAGDIWSLDELLMLAAAGAY

SEQ ID NO: 6025 - protein, 148 aa, Zea mays
  unsure (1)..(148): unsure at all Xaa locations
MCGGAIISEFIPHRGAKRGLCAEDIWPHAAAADMHAYCTAEPPARKRERKTMYRGIRRRPWGKWAAEIRDPAKGARVWLGTFATAEAAERAYDRAARRIHGDKAKVNFPNEDPTXXSTTTTTTDTPTPTPTPAGNRGCSPCTTAEAGX

SEQ ID NO: 6026 - protein, 158 aa, Zea mays
  unsure (1)..(158): unsure at all Xaa locations
XSAAARVVGAAXKLYRGVRQRHWGKWVAEIRLPRNRTRLWLGTFDTAEDAAMAYDREAFKLRGDNARLNFPDLFLGKTETERVDNSEPEPNPELQSADHQGDGTTAMFQPSGGVWGPADEAWFSAWGPGSSVWDWDYDMDNAHGLLLQSRFASEATSM

SEQ ID NO: 6027 - protein, 275 aa, Zea mays
  unsure (1)..(275): unsure at all Xaa locations
MTNLSAMAASQSYVIRFDGHFDEPSPSSAGAEPPAPFAGRMISLEREHQVIVAALLHVVSGXXATPPPQVFTPPPAAARCQVCGMERCLGCEFFAAGEGALXAAARRRQPRQEARRXAGGGAXRRRRKKKNKYRGVRQRPWGKWAAEIRDPRRAVRKWLGTFDTAEEAARAYDQAAIEFRGPRAKLNFPFPEQPPTGHDEPISSNGDASAAASADAEERGQPEWPSAGQEAGDQLLWEGLQDLMRLDEGXALAPSSLKRLELKFETPAIRSQPFN

SEQ ID NO: 6028 - protein, 222 aa, Zea mays
MQFIQAQLHLQRNPGLGPRAQPMKPAVPVPPAPAPQRPVKLYRGVRQRHWGKWVAEIRLPRNRTRLWLGTFDTAEQAALAYDQAAYRLRGDAARLNFPDNAESRAPLDPAVDAKLQAICATIAAASSSSKNSKAKSKAMPINASVLEAAAASPSNSSSDEGSGSGFGSDDEMSSSSPTPVVAPPVADMGQLDFSEVPWDEDESFVLRKYPSYEIDWDALLSN

SEQ ID NO: 6029 - protein, 232 aa, Zea mays
PAGPGVFLPLKTHTLAPPRRTPRPMAPRTSERAMTSAAAGLGGAGPHYRGVRKRPWGRYAAEIRDPAKKSRVWLGTFDTPEDAARAYDAAAREYRGAKATAAWADAGGLPLAAAGSTTTTTTVDSFGGDVQAPPMQAMPLPPSLCATGAVRFPFSSYPVTHPYYFFGQAAAGCHMLKLPPTTVTVAQSDSDSSSVEDLSPSPSPSPPAAVSATRSATFDLDLNCPPPAEAEA

SEQ ID NO: 6030 - protein, 432 aa, Zea mays
MHAHALTDSPYSILDGVMTPKDGEGDMPTTATNSAANKRRRKNQYRGIRRRPWGKWAAEIRDPSKGVRVWLGTYSTAEEAARAYDAEARRIRGKKAKVNFRDEAAAAAAPTACGNAARLGPPPPPPKFRADEVFGNMNGGTGSNDLFAIMFAFSDSSSKVVRVEPPLLPGSKRSAANMLLLSGQSSDSYGSCDLGWEWDWDDDTMTSDYASVFAPAAPSNVVPAWYTQGGPASKRTRSSYGYGVAMLQQGDGAQAMPGGFDPETNYQYLVELRSSKEKCYEKSIECVGKIKTSFANVGAYSSEDNFVRGDPEGPIDWISNKAEAFEEILSGHGDVCAFSGARGIAAIMEKSGCDHVKALAQAEATLSINDTKDPSAEASLIDGKFFADIWENGGRGMAHEIIKKSEKDSHDAREAAEAAEKIAELERRICIA

SEQ ID NO: 6031 - protein, 316 aa, Zea mays
  unsure (1)..(316): unsure at all Xaa locations
MCGGAILSGFIPPSRGGGGGGGGGQEEAAAAVPCDCGPAMAGARXSKGAPQDKEEDFEADFREFERGXLGEDDVEQRRRRRRPRGPGASSAGADEVCLRHRGQGSRKNQYRGIRQRPWGKWAAEIRDPNKGXVRVWLGTYNTAXEEAARAYDAEARKIRGKKAKVNFPDDDATGTXSQANERRERSEASSSTPTPEGLRRXDVXNNLKNDDGDNNNNDDLFAMFAFGDNKKEAVXLQRSQPPPRVAVAVADWFNXVAASSSLRLRWRRRCPVIRGGRPRPTLWSPSPTTRAATPTAPAPPTWWGRGRGTTPPPPPP

SEQ ID NO: 6032 - protein, 238 aa, Zea mays
MGTNPHLQELAASAVAASEPPPRARVVRILVHDADATDSSSSEDEAPPLLPRRRSRGGSSSLSVRRRVMEPAGASSAVRFRGVRRRPWGRWAAEIRDPHNRRRLWLGTFDTAEEAANAYDAANIRFRGVSATTNFPAARYSPPPKPAKPIISLTPEPGKVITLPPVPVKPTFPVQVKEVGGSWGGLIKGARSEVKAFAPKPVWKMIPRVHQKFPGCADGSGLRAVHAASIYVEEVGGG

SEQ ID NO: 6033 - protein, 310 aa, Zea mays
MCGGAILANLREPAPRRLTERDIWQQKKKLKRGGGGGRRSFAAEDDEDFEADFEGFEADSSDSDLELREGTDDDVVEIKPFAAKRTFSSDGLSAMTSAVARSVKRKRKNLYRGIRQRPWGKWAAEIRDPQKGVRVWLGTFNSPEEAARAYDAEARRIRGKKAKVNFPDAPAVGQKHRSGSASAKASKSSFGQKPIVKGSNSFGCSDLGWENDTKTPDITSIAPISTIAEGDESAFVDSNSNSSFVLPALENSAVDLTDGLTDLESYMRFLLDGGPSDSVDSLLNLDGSQDVGSDMDLWSFDDMPIVGDFF

SEQ ID NO: 6034 - protein, 111 aa, Zea mays
MAPRTSERAMTSAAAGLARGAGPHYRGVRKRPWGRYAAEIRDPAKKSRVWLGTFDTPEDAARAYDAAAREYRGAKAKTNFSFPSCLPLAAGNSSSTTTTVDSFGGDVQATL

SEQ ID NO: 6035 - protein, 163 aa, Zea mays
ARDHYLEHPNRKNHPSLYRGVRRRPWGKWAAEIRDPRRAARKWLGTFDTAEDAARAYDVAAVELRGQRAKLNFPAQPPHPVHCPISRASARTADPTPQKKVAGARGAGADHAAGHLGGFERDHDDGGGTQLLVYAMILPAPSPMHPSPYLLLFNAFILSYSIS

SEQ ID NO: 6036 - protein, 231 aa, Zea mays
MNFSSYFFSSSSSDKKSSSKRQQQQAAQPQTDANTTRYLGVRRRPWGRYAAEIRDPATKERHWLGTFDTAEEAAVAYDRAARSLRGARARTNFAYPDLPPGSSVTPYLSPDPPATTPPTAIVPRTCPLSYDLTIPDDLTADYGAEDAGGSVDMSSMYGGGGSSANASSASSGGGGWCDASEFSAYGASAASHGVYFEEGYVHSPLFSPMPAVDDACADGFQLGGSSSSYYY

SEQ ID NO: 6037 - protein, 341 aa, Zea mays
  unsure (1)..(341): unsure at all Xaa locations
FARFEPRLLVISCNEIXGGGLAVAAVDLRPTAMSAADSLTSGRGRRAEPPLPRLKRVRVYFVDADATDTDSSGNEDERGNRRXXREVIHIDVESASAXDAVGAAAGAPEEAAAAXSQAAAAALVRRRSSGAGFRRRFPGVRLRPWGKYAAEIRDPHQRKRLWLGTFDTAEEAAAAYDDAALRLKXXRATSSPASPLRRLPPXAAPGAPSSPGAKEAAEGAAEEDGEALASAPAPVPAAAPGSLDSQAVDGTALSKKKKKVCPFSSPISVLRHAADETPAAHALPAFEFLYSGLGELGDLGTATAPSKAVAAEFDCLPWWEGEDFVTVTGLTASAGAAVSVI

SEQ ID NO: 6038 - protein, 181 aa, Zea mays
  unsure (1)..(181): unsure at all Xaa locations
MGSFFDAVTCLLPRLTGLEVIFFYCLSGTIYSSTRSSAGTPFRPKKILRKRGRGREWASGVEEVKKTNGSVAAPRYRGVRKRPWGRFAAEIRDPAKRARVWLGTFDSAEAAARAYDVAARALRGPLARTNFPALTSRPPAXPARAHAHVQLKLHRRVLQRAPRRGAQGGQARCWEAACPAA

SEQ ID NO: 6039 - protein, 203 aa, Zea mays
  unsure (1)..(203): unsure at all Xaa locations
RPASRXDPASAPLPPTTRTPKPHPIHLPSSSQLPPLYSSPYAAPCMAGQMGLNQLGPAQIQQIQAQXHVPAAXQQQQRGLHAAFLGPRAQPMKQSXVAVAAAAAGAGAXSKLYRGVRQRHWGKWVAEIRLPKNRTRLWLGTFDTVEDAALAYDKAVFRLRGDTVRLNFPVLRRGGAHLAGPLHASVDAKLTGICQSLAESKSK

SEQ ID NO: 6040 - protein, 411 aa, Zea mays
  unsure (1)..(411): unsure at all Xaa locations
MCGGAILSGFIPPSGVAAAAAAAKKKQQQRCRVTADLLWPGPGSKEAPQDQEEDFEADFREFERGLGEDDVDSAXXEGGDPEVQELPPPEPTKVXAFATAAKAAVDGVMTTPPKDVQGDRAVKKRGRKNQYRGIRQRPWGKWAAEIRDPNKGVRVWLGTYNTAEEAARAYDAEARKIRGKKAKVNFPDEPPGTRHRPAPKACARXDVXQPEERRCNDDLFAMFAFGDNKKKVPAAKPAAAPAPAVAAVPGNKRRSSATNIMLSVSDDQSSNSYGSGSSDLVGSWSWDDDAAAAAMTSDYTSSVFAPDNAVLPAASYSYMQGGAPKRMRSSYGGAPPQPRTXRGHAWLWPXXXVSYHYQALPPYYVGSSNASVGNLGLLQQADDAPAPQDGASAGDIWSLDELLMLAAAGAY

SEQ ID NO: 6041 - protein, 217 aa, Zea mays
  unsure (1)..(217): unsure at all Xaa locations
MEDASAALLRPLKKIGRAPDRLQPLSTTSSSVPPSPRSSAAGATSPASLSPPASPQQQQQQQAQAPVQRQQQMISFGAPPQYQAQFLLPEGAQQQQHLLRYWSEALNLSPRGGQAAGVLPSLYQHLLRPPPPQKLYRGVRQRHWGKWVAEIRLPRNRTRLWLGTFDSAEDAAMAYDREAFKLRGENARLNFPDRFFGKGXRRGERPHQRHTRSRADX

SEQ ID NO: 6042 - protein, 414 aa, Zea mays
MCGGAILSGFIPPSGVAAAAAAAKKQQQQRRVTADLLWPGPGSKGAPQDKEEDFEADFREFERGLGEDDVDSAGEGGDPEVQELPPPEPTRFAFATAAKAAVDGVMTTTPKDVQGDRAVKKRGRKNQYRGIRQRPWGKWAAEIRDPNKGVRVWLGTYNTAEEAARAYDAEARKIRGKKAKVNFPDDDATGTRQTNAANAARLVAPPPPPKACADEMFNNLKNDDGDNNNNDDLFAMFAGSFLVPAPAVAAVPGNKRRSSATNIMLSVSDDQSSNSYGSGSSADLVGSWSWDDDDAAAAAAAAAMTSVFAPDNAVLPAASYSYMQGGAPKRMRRSYGGAPPSLAHDAAMPGFGLDKVSYHYQALPPYYVGSSNASVGNLGLLQQADDAPAPQDGASAGDIWSLDELLMLAAAGAY

SEQ ID NO: 6043 - protein, 277 aa, Zea mays
MCGGAIIFDYIPARRRVSTADFWPGSEADAEDNASHSPDPQRAPPPRAKAKPGRRKNQYRGIRQRPWGKWAAEIRDPVKGVRVWLGTYPTAEEAARAYDAEARKIRGKKAKVNFPDDDATGTRHRPTNAANAARLVAPPPPPKACADEMFNNLKNDDGDNNNNDDLFAISSVFAPASYSYMQGGAPKRMRSSYGGAPPSLAHDAAMPGFGLDKVSYHHYQALPPYYVGSSNASVGNLGLLQQADDAPAPQDGARAGDIWSLDELLMLAAGGSLESSA

SEQ ID NO: 6044 - protein, 192 aa, Zea mays
LLLRASSGPPKLYRGVRQRHWGKWVAEIRLPRNRTRLWLGTFDTAEDAAMAYDREAFKLRGDNARLNFPDLFLGKGRVGGSGRTSAAASCSSELQSADHQGDGTTAMFQPSGGVWGPADEAWFSAWGPGSSVWDYDMDNAHGLFLQSRFASEATSMDYVPSTPEVPAVGTAVASLSPPPPPPRSPTYMKEKD

SEQ ID NO: 6045 - protein, 159 aa, Zea mays
LLLRASSGPPKLYRGVRQRHWGKWVAEIRLPRNRTRLWLGTFDTAEDAAMAYDREAFKLRGDNARLNFPDLFLGKGRVGGSGRTSAAASCSSELQSADHQGDGTTAMFQPSGGVWGPADEAWFSAWGPGSSVWDYDMDNAHGLFLQSRFASEATSMDYV

SEQ ID NO: 6046 - protein, 109 aa, Zea mays
  unsure (1)..(109): unsure at all Xaa locations
PCPSAQPPPPPPGRNVTRSPPSMAPRNALPAASAVANGMVMEPRFRGVRKRPWGRFAAEIRDPARKARVWLGTFDTAEAAARAYDAAALHFRGPKGKTNFPIDCLVLIX

SEQ ID NO: 6047 - protein, 166 aa, Zea mays
MCGGALIHDYGDDDWEAAFREFIAGDDDDDPAAAVVERPRRRRRVRRNPYRGVRQRPWGRWASEIRDPVKGARVWLGTFDTAVEAARAYDAEARRIHGHKARTNFPPDEPPLPAPSQAPKKVLLPARRRRRRRRRGPWKQPGVVVGAGQSLRLHDVVDGGVRRARR

SEQ ID NO: 6048 - protein, 395 aa, Zea mays
  unsure (1)..(395): unsure at all Xaa locations
MCGGAILSGFIPPSGVAAAAAAAKKQQQQRRVTADLLWPGARRKGAPQDKEEDFEADFREFERGLGEDDVDSAGEGGDPEVQELPPPEPTRFAFATAAKAAVDGVMTPPPKDVQGDRAVKKRGRKNQYRGIRQRPWGKWAAEIRDPNKGVRVWLGTYNTAEEAARAYDAEARKIRGKKAKVNFPDDATGTRHRPTTDEIFXXNLKNDDNNNNDDLFAMFAFGDNKKKVPAAKPAAAPAPAVAVVPGNKRRSSATNTMLSVSDDQRSNSYGSGSSDLVGSWSWDDDAAAAAMTSDYTSSVFAPDNAVPSYTQGGAPKRMRSSYGGAEPHASAMPGFGLDKVSYHYQALPPYYVGSSNASVGSLGLLQADDAPQDGASAGDIWSLDELLMLAAAGAY

SEQ ID NO: 6049 - protein, 198 aa, Zea mays
  unsure (1)..(198): unsure at all Xaa locations
LLRAPKLYRGVRQRHWGKWVAEIRLPRNRTRLWLGTFDTAEDAAMAYDREAFKLRGENAKLNFPDLFLGKGXRRRERPHQCQCSRNSQLQSADHHGGDGSTVMLAVGGVERHVGPGRXEAWFSAWGPGSSVWDYDMDNAHGLFLQSRFASEAASMDYVSSMPEAPATPAAGTAVASAASLSSPPPLPLPRSPTYRGSE

SEQ ID NO: 6050 - protein, 167 aa, Zea mays
  unsure (1)..(167): unsure at all Xaa locations
LPCDSSRILLLRAPKLYRGVRQRHWGKWVAEIRLPRNRTRLWLGTFDTAEDAAMAYDREAFKLRGENAKLNFPDLFLGKGXRRRERPHQCQCSRNSQLQSADHHGGDGSTVMLAVGGVERHVGPGRXEAWFSAWGPGSSVWDYDMDNAHGLFLQSRFASEAASMDYV

SEQ ID NO: 6051 - protein, 363 aa, Zea mays
MCGGAILANLREPAPRRLTERDIWQQKKKLKRGGGGGRRSFAAEDDEDFEADFEVFEADSSDSDLELREGTDDDVVEIKPFTAKRTFSSDGLSTMTSAVARSAKRKRKNLYRGIRHAPWGKWAAEIRDPQKGVRVWLGTFNSPEEAARAYDAEARRIRGKKAKVNFPDAPAVGQKHRSGSASAKASKSSFGQKPIVKVAMNNLANTNASFFQSASYPSNLFVQHGNMPFVPAMNSTASVDDLIMNLHSDQGSNSFGCSDLGWENDTKTPDITSIAPISTIAEGDESAFVDSNSNSSFVLPALENSAVDLTDGLTDLESYMRFLLDGGPSDSVDSLLNLDGSQDVGSDMDLWSFDDMPIVGDFF

SEQ ID NO: 6052 - protein, 320 aa, Zea mays
  unsure (1)..(320): unsure at all Xaa locations
RPGKAEPQPRRSCVASFSQLVTVPLVSFTPGPPNQXSIDPSAAATPLRRCAAAAAKKKQQQQRCRVTADLLWPGPGSKGAPQDQEEDFEADFREFERGLGEDDVDSAGEGGDPEVQELPPPEPTRFAFATAAKAAVDGVMTTTPKDVQGDRAVKKRGRKNQYRGIRQRPWGKWAAEIRDPNKGVRVWLGTYNTAEEAARAYDAEARKIRGKKAKVNFPDDATGTRHRPTTDEIFXXNLKNDDNNNNDDLFAMFAFGDNKKKVPAAKPAAAPAPAVAVVPGNKRRSSATNTMLSVSDDQRSNSYGSGSSDLVGSWSWDDDX

SEQ ID NO: 6053 - protein, 154 aa, Zea mays
  unsure (1)..(154): unsure at all Xaa locations
MCGGAIIFDYIPARRRVSTADFWPGSEADAEDIHASHSPDPQRGKRRRKNQYRGIRQRPWGKWAAEIRDPVKGVRVWLGTYPTAEEAARAYDAEARKIRGKKAKVNFPDDDATASTPTPEGLRRXDVXQPEERRRRQQQLLMLAAGGSLESSAX

SEQ ID NO: 6054 - protein, 175 aa, Zea mays
  unsure (1)..(175): unsure at all Xaa locations
XAETATVPKLVRVFCDDLDATDSSGDDEGGGVAARGARKFILEIXSRRGIERVAMPRRLFRRLAVARGKRRRXTLAPEEPRYRGVRRRPWGKYAAEIRDPHKGERLWLGTFDTAEEAAREYDSAARRLRGPSATTNFPAPPTPSDRVPAVRELSSAEESDSDETHTVSSPVSVLX

SEQ ID NO: 6055 - protein, 240 aa, Zea mays
  unsure (1)..(240): unsure at all Xaa locations
MVKARWDASLIKGHLARVPLLGRPCSAVQDEGPSRHGRPHYRPERAAHPSMDASLRTLPPAGTSSFPGEGYNVRSAVSSLLLSSPGTSALDTVFSHLPPPVTIPPLGSSVYYRQCELLRHFAASQSQPQARQHAAACSASSSSPSSAAASSXPVPAVRAARRHAXRQKLYRGVRQRQWGKWVAEIRLPQNRVRVWLGTYDSPETAAHAYDRAAHRLRGEYARLNFPGAMDGPDXXGLPRA

SEQ ID NO: 6056 - protein, 136 aa, Zea mays
  unsure (1)..(136): unsure at all Xaa locations
MQQQTAMPTPTPMGWSEQSLAAETAAIVSALTHVVASGRGPPPRRRRSSCRGTVRTAAPSSTGRXAAQGTTPAPAPAAAGPARKYRGVRRRPWGKWAAEIRDPQKAARVWLGTFPTAEDAARAYDAAALRFRGGXX

SEQ ID NO: 6057 - protein, 281 aa, Zea mays
MAQELHETSSCSATTTSSCTTSCCSSTVTDSSSSPPSPAAANAAPATRKRQALEAEAEAEAGGEEEEEEEEGCAGNKAAPAKKRPRGSEGKHPTFRGVRMRAWGKWVSEIREPRKKSRIWLGTFPTAEMAARAHDVAALAIKGRAAHLNFPDLAGALPRAASAAPKDVQAAAALAAAFTSPSSEPGAGAHEEPAAKDGAAPEEAAADAQAPVPVALPPPAASRPGTPSSGVEDERQLFDLPDLLLDIRDGFGRFPPMWAPLTDVEEVVNAELRLEEPLLWE

SEQ ID NO: 6058 - protein, 281 aa, Zea mays
MAQELHETSSCSATTTSSCTTSCCSSTVTDSSSSPPSPAAANAAPATRKRQALEAEAEAEAGGEEEEEEEEGCAGNKAAPAKKRPRGSEGKHPTFRGVRMRAWGKWVSEIREPRKKSRIWLGTFPTAEMAARAHDVAALAIKGRAAHLNFPDLAGALPRAASAAPKDVQAAAALAAAFTSPSSEPGAGAHEEPAAKDGAAPEEAAADAQAPVPVALPPPAASRPGTPSSGVEDERQLFDLPDLLLDIRDGFGRFPPMWAPLTDVEDVVNAELRLEEPLLWE

SEQ ID NO: 6059 - protein, 411 aa, Zea mays
  unsure (1)..(411): unsure at all Xaa locations
SFPKKSLSFPLYLSSLNDLSLSTQXSSLPASXASSSPLLLSPSIPASFSPSHXRAMVEAAAVKRSRPKIKQEPAETTAIRKIVRVFCDDRDGTDSSGDDGGGAGAAAGARKFLVEIPVEKHRPGCNATAPAXXRAAGGGKRKAAAXXGTPAEPRYRGVRRRPWGRYAAEIRDPHKGERLWLGTFDTAEEAARRYDSETRRLRGPSAITNFPATPGVPLPAPALSLHGVAAVGEHSSAEEESCDESQLVVGSPVSVLRAMPDETARATLPPKIADAAAGCATKKDAPDGRGGLSPFSADDALLPQLGEDAFSFGGVPFDDDLPTPQXXASTTSPPTPRXDLGSLPMWPGVDGCRFSDIGDDDLFSLPALXTIVDQRGRHRPKPFVLSPVRTDGAKCCSFLLLFTLLETLGVV

SEQ ID NO: 6060 - protein, 281 aa, Zea mays
MAQELHETSSCSATTTSSCTTSCCSSTVTDSSSSPPSPAAANAAPATRKRQALEAEAEAEAGGEEEEEEEGSCAGNKAAPAKKRPRGSEGKHPTFRGVRMRAWGKWVSEIREPRKKSRIWLGTFPTAEMAARAHDVAALAIKGRAAHLNFPDFAGALPRAASAAPKDVQAAAALAAAFTSPSSEPGAGAHEEPAAKDGAAPEEAAADAQAPVPVALPPPAASRPGTPSSGVEDERQLFDLPDLLLDIRDGFGRFPPMWAPLTDVEEVVNAELRLEEPLLWE

SEQ ID NO: 6061 - protein, 129 aa, Zea mays
  unsure (1)..(129): unsure at all Xaa locations
SCSAAGRQQALASRSATAKPFAERSRPAQRGMGGPDNTRHNYRGVRQRRWGKWVAEIREPNRGKRHWLGTFDNPVDAAVAYDRAAVSIHGAHAHLNFPCSMASRERIASMRGSMATPFTRRCGHWXXDX

SEQ ID NO: 6062 - protein, 192 aa, Zea mays
  unsure (1)..(192): unsure at all Xaa locations
RGRPGRHSHSHPSIHPPKLLGRQAAARESKQGRGSCVAGRSVHGXPKRPVSAAAAAEQPRLRGVRKRPWGRYAAEIRDPVRKARVWLGTFDTPEQAARAYDAAARKLRGPGAATNYPAPERPXRRRRRWRRLQRRAGAGAPWCTSRRRRRRRRRRAPCRWRPRRWTSAWRCRLRRRPQSRTSCSRTRRRRPP

SEQ ID NO: 6063 - protein, 408 aa, Zea mays
  unsure (1)..(408): unsure at all Xaa locations
MCGGAILSGFIPPSGVPAAAAAAKKKQQRRATADLLWPGPGKKGAPREEDFEADFREFERGLGEDDDVDGAGDEVQXXLPLPEPARLAFAAAVGAPRTAVDGVMTPKDGEGDMPTTATNSAANKRRAXKNQYRGIRGGPWGKWAAEIRDPSKGXVRVWLGTYSTAEEAARAYDAXEARRIRGKKAKVNFRDEAAAAAAPTACGNAARLAPPPPPPKFRADEVFGNMNGGTGSNDLFAIMFAFSDSSSKVVRVEPPLLPGSKRSAANMLLLSDQSSDSYGSCDLGWEWDWDDDTMTSDYASVFAPAAPSNVVPAWYTQGGPVSKRTRSSYGYGAAMPGGFDPETNYQYQPLPYVVESSPSDGASTDDMDCLQMMRAGDVPQDGASSGGGGGDGGDIWSLDELLMAAGAY

SEQ ID NO: 6064 - protein, 174 aa, Zea mays
  unsure (1)..(174): unsure at all Xaa locations
MAMSEPSSDTSCTSSCSSGPSTSTSPRAAPSSAAAAASGGGKKRRPRSNAPPPTYRGVRMRAWGKWVSEIREPRKKSRIWLGTFATAEMAARAHDVAALAIKGRAAHLNFPELANDLPRPATAAPKDVQAAAALAAAADFQAXXANAAAATDPDDGPDAGADSASASPPPPPPQ

SEQ ID NO: 6065 - protein, 112 aa, Zea mays
  unsure (1)..(112): unsure at all Xaa locations
XWRTWPTHTSTPTPTGASVPSRPRSKTGTGTSTXSMKGARYRGVRRRPWGRFAAEIRDPMSKERRWLGTFDTAEQAACAYDIAARAMRGNKARTNFVAAPPSVPTRRGRRGX

SEQ ID NO: 6066 - protein, 398 aa, Zea mays
  unsure (1)..(398): unsure at all Xaa locations
MCGGAILSGFIPPSGVAAAAAAAKKQQQQRRVTADLLWPGARRKGAPQDKEEDFEADFREFERGLGEDDVDSAGEGGDPEVQELPPPEPTRFAFATAAKAAVDGVMTPPPKDVQGDRAVKKRXARKNQYRGIRQRPWGKWAAEIRDPNKGVRVWLGTYNTAXEEAARAYDAEARKIRGKKAKVNFPDDATGTRHRPTTDEIFXXNLKNDDNNNNDDLFAMFAFGDNKKKVPAAKPAAAEGPAVAVVPGNKRRSSATNTMLSVSDDQRSNSYGSGSWSWDDDDAAAAAAAAAMTSASVLAPASYSYMQGGAPKRMRHSYSGAPPHDAAMPGFGLDKVSYHYQPLPLPPYYVGSSSGSSDDASVGSLGLLQADGAPQDGASAGDIWSLDELLMLATAGAY

SEQ ID NO: 6067 - protein, 273 aa, Zea mays
  unsure (1)..(273): unsure at all Xaa locations
GPRGRPAKCKRKTPYRGIRRRPWGKWAAEIRDPTKGVRVWLGTYKTPKDAARAYDAEARKIRGNKAKVNFPNEPPNMVSNAPKLIVTAMTTMAIPADKLNDELMCHKNYSNEDFFSMVNFSGXTMVTLFLLRPLXLQCIKKPRVPYDIPRMGECSNQNRMTYGLSNGLGNEASRNLNGCSFLPQAGMPIFIQPTFDGPSRMIGRNDGVIVPTLTNATPMAGVDAAKKMNQQPIFQEMESEDIPSILQGDVSEDVAAEISMWEFYDNLLDNKEN

SEQ ID NO: 6068 - protein, 183 aa, Zea mays
  unsure (1)..(183): unsure at all Xaa locations
MCGGAILSGFIPPSGRCRVTADLLWXXGPGSKGAPQDQEEDFEADFREFERGLGEDDVDSAGEGGDPEVQELPPPEPDEVCLRHRGQGGRDRPVKRGRKNXQYRGIRQRPWGKWAAEIRDPNKGXVRVWLGTYNTAEEAARAYDAEARKIRGKKGEGXNFPKTLGVXDDDAPGTGHRPANAAP

SEQ ID NO: 6069 - protein, 241 aa, Zea mays
APPAEAAAGSGPAGGEGRKGKAPKGGPENGKFRYRGVRQRSWGKWVAEIREPRKRSRKWLGTFATAEDAARAYDRAALLLYGPRAHLNLTSPPPPTLAAPRSHPHSSSATSSAPPALRPLLPRPPLHQLSSDGAPAPDFHYHNQFQRRLLPQPTPTLYYANTATASTVTTSVPTRVAVPQEPAIAPAVGSLTSPGEPQVGRKEEARGEAGWDYNGGEEEDYAAALLWDEPEPFFWFDVFLK

SEQ ID NO: 6070 - protein, 137 aa, Zea mays
  unsure (1)..(137): unsure at all Xaa locations
MQSYGRKRAWKKGPTRGKGGPQNAACEYRGVRQRTWGKWVAEIREPNKRTRLWLGSFATAEEAALAYDEAARRLYGPDAFLNLPHLRASAVSSAAAHQRIRWLPASARGAAAAAVPAYGLLNLNAQHNVHVIHQRLX

SEQ ID NO: 6071 - protein, 276 aa, Zea mays
MCGGAILANLREPAPRRLTERDIWQQKKKLKRGGGGGRRSFAAEDDEDFEADFEVFEADSSDSDLELRERTDDDVVEIKPFTAKRTFSSDGLSTMTSAVARSAKRKRKNLYRGIRQRPWGKWAAEIRDPQKGVRVWLGTFNSPEEAARAYDAEARRIRGKKAKGSNSFGCSDLGWENDTKTPDITSIAPISTIAEGDESAFVDSNSNSSFVLPALENSAVDLTDGLTDLESYMRFLLDGGPSDSVDSLLNLDGSQDVGSDMDLWSFDDMPIVGDFF

SEQ ID NO: 6072 - protein, 276 aa, Zea mays
MCGGAILANLREPAPRRLTERDIWQQKKKLKRGGGGGRRSFAAEDDEDFEADFEVFEADSSDSDLELRERTDDDVVEIKPFTAKRTFSSDGLSTMTSAVARSAKRKRKNLYRGIRQRPWGKWAAEIRDPQKGVRVWLGTFNSPEEAARAYDAEARRIRGKKAKGSNSFGCSDLGWENDTKTPDITSIAPISTIAEGDESAFVDSNSNSSFVLPALENSAVDLTDGLTDLESYMRFLLDGGPSDSVDSLLNLDGSQDVGSNMDLWSFDDMPIAGDFF

SEQ ID NO: 6073 - protein, 173 aa, Zea mays
  unsure (1)..(173): unsure at all Xaa locations
FSRTYWLVVVVATSYYKRWTRCWASTCRCLPXLRAPPASSRSRRRRRRSSSSXYRGVRKRKWGKWVSEIRQPGTKTXRIWLGSFESAEMAAVAHDVAALRLRGRDAQLNFPGCVAWLPRPATSHARGLRAAARAAAAARPCSWTRRAGPPASSATRRRWPCAGHTAPSGTPAX

SEQ ID NO: 6074 - protein, 155 aa, Zea mays
  unsure (1)..(155): unsure at all Xaa locations
LDLDPRRDERERSGGRSTGRSTKVDPRRHGKRPLPADEEEEQPPPPPEAYAQYYYSARADHDATAMVSALSHVIRAXHRTSNKPTTPPDPPLSQENSSNAAAAAAIAEEQGRKRHYRGVRQRPWGKWAAEIRDPKKAARVWLGTFDTAEDAAIAX

SEQ ID NO: 6075 - protein, 176 aa, Zea mays
  unsure (1)..(176): unsure at all Xaa locations
VVGVGRRGGGGGQGTTSRTRRQAGQGRAGQRGRKRRRRRSAWRSGMRRARLPPVPVPTAPGDAGPEVKYRGVRRRPSGRYAAEIRDPARKTPIWLGTFDSAEAAARAYDAAARTIRGAAARTNFPSAPTSAAVAPPPPLPASTAAAAGAATSSLSSTVESWSGGGGGGAPAGIXRA

SEQ ID NO: 6076 - protein, 318 aa, Zea mays
  unsure (1)..(318): unsure at all Xaa locations
MMNTRACGSSGSGGRNDQTMMGFSEHPKPAASGQAQPSPPSSPSERPPAGRGRRRAQEPGRFLGVRRRPWGRYAAEIRDPTTKERHWLGTFDTAQEAALAYDRAALSMKGAQARTNFVYTHATYNYPPFLAPFHHPSXGAAAAXYGAAPHVGSYGHHHYHHXXGSAAAVGASSGECSSXXMATAVPPVERADGTLLLDRGGGGHHHHPEFLFASADDNSGYLSSVVPESCLRPRSSAAAVXXDLRRYSDADAYGMGVGLREDVDDLAQMVAGFWGGGAGDADQLCGGGFPSGGAGDSMAVASSQGSSDGYSPFSFLSH

SEQ ID NO: 6077 - protein, 313 aa, Zea mays
MNTRACGSSGSGGRNDQTMMGFSEHPKPAASGQAQPSPPSSPSERPPAGRGRRRAQEPGRFLGVRRRPWGRYAAEIRDPTTKERHWLGTFDTAQEAALAYDRAALSMKGAQARTNFVYTHAAYNYPPFLAPFHHPSSVQQQHYGAAPHVGSYGHHHYHHQGSAAAVGASSGECSSTMATAVPPVERADGTLLLDRGGGGHHHHPEFLFASADDNSGYLSSVVPESCLRPRSSAAAVEDLRRYSDADAYGMGVGLREDVDDLAQMVAGFWGGGAGDADQLCGGGFPSGGAGDSMAVASSQGSSDGYSPFSFLSH

SEQ ID NO: 6078 - protein, 244 aa, Zea mays
  unsure (1)..(244): unsure at all Xaa locations
MARPQQRYRGVRQRHWGSWVSEIRHPLLKTRIWLGTFETAEDAARAYDEAARIMCGSRVRTNFPEDAGGGGGGDGQQQQQAAPSLLSPALVAKLHRSNLASAQAAQGKADASAAAAAALPRVAAAVPAGMGVSASPSASASAAGDWSGGLLEEQYVDQMIEELLDYFSMEISYXSCAPARTTRHPAPPASSAPSHLNSHLISLFGFVGQVGKCSAVSYLVLAVSLAMPGVTRGYFGLLARRVGS

SEQ ID NO: 6079 - protein, 325 aa, Zea mays
  unsure (1)..(325): unsure at all Xaa locations
MSSQWPQPYTCTSTGITAPHLIASSSPSDQELAKALEPFITSASSPYHRYSLAPDSSCLHPPSYTTSPLPTPTSSPFSQLPPLYSSPYAASTASAMGLNQLGPAQIQQIQAQXHVPAPXSRGACTRGSLGPRAQPMKEXSGSPPAQSKLYRGVRQRHWGKWVAXRSRLPKNRTRLWLGTFDTPXRARALAYDEAAFRLRGDTARLNFPSLRRGGRRAPRXXPLHASVDAKLTAICQSLSESKSKSGSSGDESAGSPPDSPKCSASASTEGEEESGSAGSPPSXDAGAARAGDGEAGLPEAPWDETETFHLRKYPSWEIDWDSILS

SEQ ID NO: 6080 - protein, 219 aa, Zea mays
  unsure (1)..(219): unsure at all Xaa locations
MEMVLDNSAPGVVAAGQKHHQSYRGVRKRKWGKWVSEIREPGKKTRIWLGSFESPEMAAVAHDVAALRLRGREARLNFPGLVHRFRRPATAEPDDVRAAALEAAAQVRFRPDLVAMQASGGEGGCRFGGAGGSDDTGSPEPLAAGEDDVAWDXLARDRRGGGXXSRPRCGMSWPNARGPAASVGGRYGGHXRLEGGNLWDLPVWALGPTGRCSFTSFGF

SEQ ID NO: 6081 - protein, 278 aa, Zea mays
  unsure (1)..(278): unsure at all Xaa locations
XPLKEEAGSARPFRGNRPRPLAFPGRKRKSNGPGPGPNPRFRGLRRGPWGKSPAEIRNPWRRLPFWFGTFNTAEEAAKVYNSAAFQFRGADATTNFKHAAVPVPVPDKVGVRLPKPPPVPASKNASSSATSSYDSGKESHAGAASPTSVLRTFPPSSAAADATSRNRRRPPDESTGVGGSRSSVYAYPXXFANDDCFGGDFPPLYTDFDLLADFPEPTLDFLADIPEEKLPLPEPFPAASPDECPSDAEAASPARWQQVDDFFQDITDLFQIDPLPVV

SEQ ID NO: 6082 - protein, 214 aa, Zea mays
  unsure (1)..(214): unsure at all Xaa locations
MTENLHSRKMVQPKKFRGVRQRHWGSWVSEIRHPLLKRRVWLGTFETAEEAARAYDEAAVLMSGRNAKTNFPIQRSSTGEPTPAAGRDARSNFSSGSSTTNLSQILSAKLRKCCKAPSPSLTCLRLDPEKSHIGVWQKRAGARADSNWVMTVELNKDAASTDAASQSTSATTAPPATPXXDEEERIALQMIEELLSSSSPASPSNGDDQGRFII

SEQ ID NO: 6083 - protein, 141 aa, Zea mays
  unsure (1)..(141): unsure at all Xaa locations
HASASRTRRQAGRQRGRKRRKRRRSAWRSGMRRARLPPVPVPTAPGDAGPEVKYRGVRRRPSGRYAAEIRDPARKTPIWLGTFDSAEAAARAYDAAARTIRGAAARTNFPSAPTSAAVAPPLPLPASTAAAAVTPPVQNXX

SEQ ID NO: 6084 - protein, 248 aa, Zea mays
MEASNNESAPTAEAAAGSGPAGGEGRKGKAPKGGPENGKFRYRGVRQRSWGKWVAEIREPRKRSRKWLGTFATAEDAARAYDRAALLLYGPRAHLNLTSPPPPTLAAPRSHPHSSATSSAPPALRPLLPRPPLHQLSSDGAPAPDFHYHNQFQRRLLPQPTPTLYYANTATASTVTTSVPTRVAVPQEPAIAPAVGSSTSLQEPQVGTPEEARGEAGWDYNGGEEEDYAAALLWDEPEPFFWFDVFLK

SEQ ID NO: 6085 - protein, 205 aa, Zea mays
  unsure (1)..(205): unsure at all Xaa locations
AEAAAAATATGAASRSRSGYKHPSYRGVRRRSWGKWVSEIREPRKKSRIWLGTFPTAEMAARAHDVAALAIKGRGAHLNFPERAHELPRPASTSPADVQAAAAQAAAAADVQCDAPPSPSPSPETAAASPDDAACCLEAATTTTXCTAAATVEENALFDLPDLLLNLRDGLWWPPVWPSSAIMAIEEYDGCDVVGMHEPLLWAEX

SEQ ID NO: 6086 - protein, 333 aa, Zea mays
  unsure (1)..(333): unsure at all Xaa locations
MELHFQPQPPVFQLEGYTSSSSYYYYYQQEAAAQAKPSKPRCRKKGSNNHSKFVGVRQRPSGRWVAEIKDTTQKIRMWLGTFETAEAAAKAYDEAARLLRGSDARTNFAPRISPDCPLAVRIRGLLHQRRSRRPRPPRRPPPPSSRRRALLPPVXTTSNSNSNSHSHSTNSVLGAGEVYRPEFATAGAEEFDSWMFDSAFAQFPALDSFVAVDSVVPVAGATDEXGRRRDAGRRDXAEFERIKVERRISASLYAMNGLQEYFDRVLDASAXXDSLWDLSPLCHXISFTCCPVLCSDLPPSGLWPWPLLVKVTSVRCMCFCSTKGANVRGSSLL

SEQ ID NO: 6087 - protein, 269 aa, Zea mays
  unsure (1)..(269): unsure at all Xaa locations
ARDPGLPRPXXQRPPSPPAKXPIQILAQQIDSQRARKPRQRPKQLSITRRATPACTTLSRAAGERERDRKRDSANSGSQQRRLELLPMQGEYRSSSEESAXPLQQPQPXAPLAAAAAAAVKMXGGAGGDGGRQYRGVRMRKWGKWVAEIREPHKRTRIWLGSYATAVAAARAYDTAVFYLRGRSARLNFPXDPLVRAGGWRGRGGARARAAAAAPAXAVRXARVDALHGMVAPAAAPPRAPXAPQPPAAGRVKNPDLNRAPSPESSDAE

SEQ ID NO: 6088 - protein, 156 aa, Zea mays
  unsure (1)..(156): unsure at all Xaa locations
MSSSPETEAAGSSSSSRKFKGVRKRKWGKWVSEIRLPNSRERIWLGSYDAPDKAARAFDAAFVCLRGPGADLNFPDSPPPCPGGCSSDPREVQAAALSHAXTAPPSRPSRRPPRSPWTAAAPMARRRHGTTTTTTPWRTTRXGVLGGAAGTSSTAX

SEQ ID NO: 6089 - protein, 139 aa, Zea mays
  unsure (1)..(139): unsure at all Xaa locations
KPHEKAGRQAERKEEEEEEEKRVEERDAAGEAAAGPGPXTAPGDAGPEVKYRGVRRRPSGRYAAEIRDPARKTPIWLGTFDSAEAAARAYDAAARTIRGAAARTNFPSAPTSGKAAEEDCRSYCGSSSSVRYPPRSKLK

SEQ ID NO: 6090 - protein, 252 aa, Zea mays
  unsure (1)..(252): unsure at all Xaa locations
MSLLVTASFAQCSSPMEERALFPVSDSSTTCSSSGCTGPNSPVSSSQYLDDTSDGAGSSSSRKRPRRELKHPTYRGVRMRAWGKWVSEIREPRKKSRIWLGTFDTPEMAARAHDVAALAIKGRAAHLNFPEMSHELPRAASAAPEDVRAAAALAAAMEMESVAPPTSSESRDGARNDENEGPAASSSSGNDADNALFELPDVLLEFGFAPPPPSTSCGYDLSWDEPLLLXGALTSKRGQRDMHANVKLDRCS

SEQ ID NO: 6091 - protein, 169 aa, Zea mays
  unsure (1)..(169): unsure at all Xaa locations
MARPQQRYRGVRQRHWGSWVSEIRHPLLKARIWLGTFETAEDAARAYDEAARIMCGPRARTNFPADANGPPPSXXLSAALVDKLHRFNLASVQAXXQRQREAAAAAAAAAATSAPATPPTPPATQWGGGGRSLEEQHVEQMIEELLDYFSMEICCXCXASRDATCLATG

SEQ ID NO: 6092 - protein, 275 aa, Zea mays
  unsure (1)..(275): unsure at all Xaa locations
ARDHYLEPKNPLLHPQNPNTNTXXQQIDSQRDGGGKPRKPRQRPKQLSITRRATPACTTLSRAAGERERDRKRDSANSGSQQRRLELLPMQGEYRSSSEESAXPLQQPQPXAPLAAAAAAAVKMXGGAGGDGGRQYRGVRMRKWGKWVAEIREPHKRTRIWLGSYATAVAAARAYDTAVFYLRGRSARLNFPDEIGDGDGGEPARDPADGGGTLSAASIRKKAIEVGSRVDALQTGIGAAAAPPRAPEAPPPPPPRRVKNPDLNRAPSPESSDAE

SEQ ID NO: 6093 - protein, 206 aa, Zea mays
  unsure (1)..(206): unsure at all Xaa locations
XCSSSGCTGPNSPVSSSQYLDDTSGGASSSSSRKRPRRELKHPTYRGVRMRAWGKWVSEIREPRKKSRIWLGTFDTPEMAARAHDVAALAIKGRAAHLNFPEMSHELPRAASAAPEDVRAAAALAAAMEMESVAPPTSSESRDGGKNDENEGPAASSSSGNNADNALFELPDILLEFGFALPLPPPSTSCSYDLSWDEPLLLWEHX

SEQ ID NO: 6094 - protein, 183 aa, Zea mays
GGGGGGRTLRDPGAPAWKNLWSRGKYPESCSRQTNRKKRPRRSRDGPNSVSETIRRWKEVNQQLEHEKRARKPPAKGSKKGCMQGKGGPENTQCGFRGVRQRTWGKWVAEIREPNRVSRLWLGTFPTAEDAARAYDEAARAMYGALARTNFPVHPAQAPAVAVAAAIEGVVRGASASCESTTT

SEQ ID NO: 6095 - protein, 184 aa, Zea mays
  unsure (1)..(184): unsure at all Xaa locations
LGRQRSRVAIAMPKLQRFRGVRQRHWGSWVSEIRHPLLKTRIWLGTYETAEDAARAYDEAARLMSGPSARTNFPLSXXSGGGGTLSPTLRAKLEKCCTALAQEPQHGADVSRAGGGRDDDSSSRGAPRXXDAGAVKVDPDADGEDQYIEEMIRELTYYGPVEIXAPPVRVLRRRRRRRLLELSD

SEQ ID NO: 6096 - protein, 150 aa, Zea mays
  unsure (1)..(150): unsure at all Xaa locations
MARKRKASDSAAGIDGVHSLPPPLALASTDACAWASSGGTSMAAVAEAAAAQQQRRGRKRFVGVRQRPSGRWVAEIKDTIQKIRVWLGTFDTAEEAARAYDEAACLLRGANTRTNFWPRPSPASSVAVAAAAHLNYSSSKKKKKKKKKKX

SEQ ID NO: 6097 - protein, 130 aa, Zea mays
  unsure (1)..(130): unsure at all Xaa locations
XTXSGGGGGKGTNKRPRRDLKHPTYRGVRMRAWGKWVSEIREPRKKSRIWLGTFDNPEMAARAHDAAAVAIKGRAAHLNFPDLAHDLPRAASAAPKDVQAAAALAAATDLPPQQCNAGMREREPAGSALX

SEQ ID NO: 6098 - protein, 99 aa, Zea mays
SWRRRRTAAGQLVPPRSTSRGRRFVGVRQRPSGRWVAEIKDSAQRVRLWLGTFDTADEAARAYDEAARALRGENTRTNFTYRARSRRPRRRRLRRGQGQ

SEQ ID NO: 6099 - protein, 200 aa, Zea mays
  unsure (1)..(200): unsure at all Xaa locations
MARPQQRYRGVRQRHWGSWVSDIRHPLLKTRIWLGTFETAEDAARAYDEAARIMCGPRVRTNFPEDAAADGQGQPAATALLSPALVAKLHRFNLASVQAARGRXXDDSAAAAASAPAVXARIAPMPASNASMRIAPLTSAAVAAGHWSGDFLEEQYVDQMIEELLDYFSVEIYXFHPTPLLRLISLFGFVSSAQLGSVVS

SEQ ID NO: 6100 - protein, 183 aa, Zea mays
  unsure (1)..(183): unsure at all Xaa locations
GXRPSGRYAAEIRDPAKKSRVWLGTYDTAEDAARAYDAAAREYRGAKAKTNFPYPSCVPLSAAGCRSSNSSTVESFSSDAQAPMQAMPLPPSLELDLFRXXRFPFGSIPVTHPYYFFGQAAAAAAEAGCRVLKLAPAVTVAQSDSDCSSVVDLSPSPPAAVSARKPAAFDLDLNCSPPTEAEA

SEQ ID NO: 6101 - protein, 159 aa, Zea mays
  unsure (1)..(159): unsure at all Xaa locations
XXXISGSKSSSXVSSSXRDQAAGPPSXPRRPRAHTAVRRPRALDAXXNAGGLRRRRQPGVDAGQRAQEGRGRGRGWEKRRPAYRGVRMRAWGKWVSEIREPRKKSRIWLGTFPTAEMAARAHDAAALVVKGRGAVLNFPEMAARLPRPASAAPRDVQAA

SEQ ID NO: 6102 - protein, 217 aa, Zea mays
  unsure (1)..(217): unsure at all Xaa locations
SPLRCRSGPAARPPPLRRQEAAKDMDDAQEPPSPPSPSQSSSSSSSSSSVAPNPKKRARKDGSRPTYRGVRMRSWGKWVSEIREPRKKSRIWLGTFDTPEMAARAHDVAALAIKGRDAHLNFPGLAHLLPRPATAAPEDVQAAAALAAAMEMESSSSSGSASDNAKAASRAAPSEHSLQAAEPIPDVAVFDLPDLLLELSFGPTSPILSCAKKKKKX

SEQ ID NO: 6103 - protein, 95 aa, Zea mays
  unsure (1)..(95): unsure at all Xaa locations
LQRFRGVRQRHWGSWVSEIRHPLLKTRIWLGTYETAEDAARAYDEAARLMSGPSARTNFPLSLSATPTPTARISTSRRXSGSSPTTAPGRYSTTX

SEQ ID NO: 6104 - protein, 184 aa, Zea mays
  unsure (1)..(184): unsure at all Xaa locations
XGAGGGAGGGHGHGHGTGTAGXRRVRADTRHPVYRGIRYRGGKWVSEIREPRKSSRIWLGTYPAPEMAAAAYDTAALALRGAEAALNFPGAALSRPVPASRSPDDIRAAAASAARSQSPQVGGEAAAAAGGGGGGASTIVDEDDVFQVPRLLAGMAEGLMMSPPRLAGAALLEEDVVVSLWDHS

SEQ ID NO: 6105 - protein, 160 aa, Zea mays
  unsure (1)..(160): unsure at all Xaa locations
NQHPSPSWTKSSSLALTAPSRPAQHFRCPRAHTLQASLLGGTGSGTGGNAGXSDVPSPASSPLGSVQKIARGRKSRRGGGRSPAYRGVRMRAWGKWVSEIREPRKKSRIWLGTFPTAEMAARAHDAAALVVKGRGAVLNFPEMAASLPRPASAAPRDVQA

SEQ ID NO: 6106 - protein, 215 aa, Zea mays
  unsure (1)..(215): unsure at all Xaa locations
EGKPRKPRHRQXAAADTTAAAPAQPSAGGRERDREREGGGSGSVSQQRRRLAARAVADAGRVPVFQRGVGGGRRYRGVRMRKWGKWVAEIREPHKRTRIWLGSYATAVAAARAYDTAVFYLRGRSARLNFPEEIPSLGXGGWRGRGGPRARRTLSAASIRKKAIEVGSRVDALQTGIGPAAAPPRAPXAPQPPAAGRVKNPDLNRAPSPESSDAE

SEQ ID NO: 6107 - protein, 149 aa, Zea mays
  unsure (1)..(149): unsure at all Xaa locations
XAVRRAHLTLTMPADSDDVASPASPLGLGSVHKRGGGGGGKSGGRRRPGPAYRGVRMRAWGKWVSEIREPRKKSRIWLGTFPTAEMAARAHDAAALVVKGRGAVLNFPEMAARLPRPASAAPRDVQAAAARAAAMDVXTCPWARAAAAX

SEQ ID NO: 6108 - protein, 250 aa, Zea mays
MKGKGGPDNTQCGYRGVRQRTWGKWVAEIREPNRVDRLWLGTFPTAEDAARAYDEAARAMYGDLARTNFPGQDATTSAQAALASTSAQADPTAVEALQTGTSCESTTTSNYSDIASTSHKPEPEASDISSSLKAKCPAGSCGIQDGTPSVADKEVFGPLEPITNLPDGGDGFDIGEMLRMMESDPHNAGGADAGMGQPWYLDELDSSVLESMLQPEPEPEPEPFLMSEEPDMFLAGFESAGFVEGLERLN

SEQ ID NO: 6109 - protein, 169 aa, Zea mays
  unsure (1)..(169): unsure at all Xaa locations
MARPQQRYRGVRQRHWGSWVSEIRHPLLKARIWLGTFETAEDAARAYDEAARIMCGPRARTNFPADANGPPPSXXLSAALVDKLHRFNLASVQAAQRQREAAAAAAAAAATSRARDASDAAGHXXWGGGGRSLEEQHVEQMIEELLDYFSMEICCXCXASRDATCLATG

SEQ ID NO: 6110 - protein, 191 aa, Zea mays
  unsure (1)..(191): unsure at all Xaa locations
XSTEDNEASASVGEKAEAAAAATATGAASRSRSGXXKHPSYRGVRRRSWGKWVSEIREPRKKSRIWLGTFPTAEMAARAHDVAALAIKGRGAHLNFPERAHELPRPASTSPADVQAAAAQAAAAADVQCDXAAVAVAXSPETAAASPDDAXXAASENALFDLPDLLLNLRDGLWWPPVWPSSAIMAIEEYX

SEQ ID NO: 6111 - protein, 203 aa, Zea mays
  unsure (1)..(203): unsure at all Xaa locations
MEADALLHAPMTSSSSSSSSSSDSVGGSCVVNGAQELPSNTGKPHKNVKRKRTASPSAAPGGGVAPAPPEAAIADDDCGGXAAQEGERRHXRHPTFRGVRMRVWGKWVSEIREPRKKSRIWLGTFPTAEMAARAHDVAALAIKGRGAHLNFPHLAHDLPRPXSTSPXDIQXRAAKAAAAAADADVXVEQCESSHAVETPSSSX

SEQ ID NO: 6112 - protein, 172 aa, Zea mays
  unsure (1)..(172): unsure at all Xaa locations
GAAAMGGHYSPTGSAAEAGGXXRGVRGVRERPWGKWAGEIRDPHKGGVVGVXTFNTAEAAGRAYYEAALRFRGSRAKLNFPEDARLTTGPSAAGAPAGGGSTRTMAVAGSGGGSYQQEASAXVXFADYLQYQMMLRGTSGQGSSSHGGDPXYYYYGGHRGAGAGAGGGAMSX

SEQ ID NO: 6113 - protein, 126 aa, Zea mays
  unsure (1)..(126): unsure at all Xaa locations
MCGGAIIADFVPAGARRPATDDTMSASSSEDHPELPLPLPAPAPGRKTAYRGIRRRPWGRWAXAVIRDPRKGARVWLGTYATPEDAARAYDVAAREIRGPKAKLEYAXSRGAGPAPAPARAKVPSL

SEQ ID NO: 6114 - protein, 134 aa, Zea mays
  unsure (1)..(134): unsure at all Xaa locations
XQQPQPXAPLAAAAAAAVKMXGGAGGDGGRQYRGVRMRKWGKWVAEIREPHKRTRIWLGSYATAVAAARAYDTAVFYLRGRSARLNFPDEIDGDGGEPARDPADGGGGTLSAASIRKKAIEVGSRVDALHEYQG

SEQ ID NO: 6115 - protein, 173 aa, Zea mays
  unsure (1)..(173): unsure at all Xaa locations
MPCRCSPRPCSPEEHMEQRAVLWCMVPSEQPRGRRKKRPRRSRDGPTSVAAVIQRWAERNKHLEYEESARKAPAKGSKKGCMKGKGGPDNTQCGYRGVRQRTWGKWVAEIREPNRVDRLWLGTFPTAEDAARAYDEAARAMYGDLARTNFPGQDATTSSACFRFLKKRKKXAA

SEQ ID NO: 6116 - protein, 273 aa, Zea mays
  unsure (1)..(273): unsure at all Xaa locations
XRVRVRDLLASAVHSXYSSHLYLSAHAGGEQAAHDVQGAAAMEGHYSPTASAAEAGGXXRRFRGVRQRPWGKWAAEIRDPHKAARVWLGTFDTAESSASAWSYPATTGSWSASSQYPPSTLRGLPKKTYKIDDFVQDACIRARSNRRLQYFVSXSADYLQYQMMLLQGAATSGQGSSSSXXGGYPLYYDYGGHGGAGAGAGGGAMSSSYSFPASTVTVASVPSSSASSAPSYGEAAQWAGSWPESSAWSYPATTASWSGSSQYEYPPSTRPPQ

SEQ ID NO: 6117 - protein, 202 aa, Zea mays
  unsure (1)..(202): unsure at all Xaa locations
MVKGAHFQDAAVDGGAGGNAEAAMQGGAKRQYKGVRMRSWGSWVSEVRAPSQKTRIWLGSYSTAEAAARAYDAALLCLKGSAAADLNFPVHLPFHVPAAAAMSPKSIQRVAAAAAASGGATCSPPQLQAGAAASAPYSAGAGAADGASPPCSYGDASSGVSCYDGPMQHVLXAPAPMATDAASEWEWEEEGQIDLWSFSSLN

SEQ ID NO: 6118 - protein, 113 aa, Zea mays
  unsure (1)..(113): unsure at all Xaa locations
MDMAMSQHSSDTSSTSSYSSDPSSTSSTTSGKKRPXXPHAAAAPAYRGVRMRAWGKWVSEIREPRKKSRIWLGTFPRPEMAARAHDAAALSVKGARAVLNFPALACRLLRPVX

SEQ ID NO: 6119 - protein, 122 aa, Zea mays
  unsure (1)..(122): unsure at all Xaa locations
XPRVRPRVRPRVRPRVRGKASAEIRDPHKGVRVWLGTYNTAEEAARAYDEAAKRIRGEKAKLNFPQTPHLTQPPAKKRCMMAPELTPPSSETKSPPTPQLFMGFGYENGVYRPSEAMESEME

SEQ ID NO: 6120 - protein, 182 aa, Zea mays
  unsure (1)..(182): unsure at all Xaa locations
RPAAAAGLSTQARVNLKRNGGNGTDGTARASEPGAAAARAAHDDDRFVRGMVKGAQLQDAAADAARNAAAAAARQQGCGGGGPAGCGKKYKGVRMRSWGSWVSEIRAPNQKTRIWLGSYSTAEAAARAYDAALLCLKGSAADLNFPVHLPFHIXXAAAMSPKSIQRVAAAAAANATCGSPLX

SEQ ID NO: 6121 - protein, 215 aa, Zea mays
  unsure (1)..(215): unsure at all Xaa locations
STRARSGAARDMVKGAHFQDAAVDGGAGGNAEAAMQGGAKRQYKGVRMRSWGSWVSEVRAPSQKTRIWLGSYSTAEAAARAYDAALLCLKGSAAADLNFPVHLPFHVPAAAAMSPKSIQRVAAAAAAASGGATCSPPXATPPCSYGDASSSSGVSSPETGRNAGLCYGTTHYDDMDMDLAGDADADLAAPPVATDAASEWAEEGEIDLWSFSSLN

SEQ ID NO: 6122 - protein, 147 aa, Zea mays
  unsure (1)..(147): unsure at all Xaa locations
PVSMQVAAMQRHQQQQQFVHHLQQVHQQGTQHXXATAATAPERQQQQRRQDRRRPXKCCPLRRSRKGCMKGKGGPDNQQCPFRGVRQRTWGKWVAEIREPNRGARLWLGTFGSALEAARAYDAAARTLYGDCARLNLQLYTLKKKKK

SEQ ID NO: 6123 - protein, 205 aa, Zea mays
  unsure (1)..(205): unsure at all Xaa locations
LKHLKSTHHRTDRDRGAEWPPIAMPKLQRFRGVRQRHWGSWVSEIRHPLLKTRIWLGTYETAEDAARAYDEAARLISGPAARTNFPLTDGGGGGGTLSPTLRAKLEKCXAARRRRRSRSTAATARTRRGRVRVGATTAVAAAIAGGTATRRXEEAGVKVEPDADADGEEYIEEMIRELTYYGPVEIQHHPSAAGGGGACSSSAIG

SEQ ID NO: 6124 - protein, 102 aa, Zea mays
  unsure (1)..(102): unsure at all Xaa locations
KWAAEIRDPVKGVRVWLGTFPSAEAAALAYDEAARAIRGPRAKLNFSSSSAVAXPRPRERASAXXAAPPAAKPAPVITLVDDEEEXXRRAFVKHEDEASEGS

SEQ ID NO: 6125 - protein, 276 aa, Zea mays
  unsure (1)..(276): unsure at all Xaa locations
SRAYYIVHQESCVANHRVVDRVSKSKRRRRLGTTKPKPESYTIPVIQPASQPSHHIMVKTAASSSSXXDAAAAKRRTYKGVRMRSWGSWVSEVRAPGQKTRIWLGSHATAEAAARAHDAALLCLRGSAADLNFPLRLPFDLPPAATMSPKAIQRVAAAAASASSSSFAPRAENNGTSACSDGDGDATPASSTTSSPTSHADDVSSPDSTVSSAGDVDYYTSLADIDAFFQSPNVVDYALMDPCSAFFAPDSTAADDDGGWDGGGIALWSFSATLDC

SEQ ID NO: 6126 - protein, 193 aa, Zea mays
  unsure (1)..(193): unsure at all Xaa locations
XITSSQSVDDTCGGAGSSSSRKRPRRELKHPTYRGVRMRAWGKWVSEIREPRKKSRIWLGTFDTPEMAARAHDVAALAIKGRAAHLNFPGMSHELPRAASAAPEDVRAAAALAAAMEMESSSSSGNDADNAQSEEQAAPSEHSVLADGHVLDLALFELPDVLLEFGFALPPTLTSCAYDLSWDEPLLXSGSTX

SEQ ID NO: 6127 - protein, 168 aa, Zea mays
  unsure (1)..(168): unsure at all Xaa locations
SCTYSSSSNATSGSLNGSSSPTSSDDSGGGGGKGTNKRPRRDLKHPTYRGVRMRAWGKWVSEIREPRKKSRIWLGTFDNPEMAARAHDAAAVAIKGRAAHLNFPDLAHDLPRAASAAPKDVQAAAALAAATVPDTLDDDADTETEEDLPPQQCNAGMREREPAGSALX

SEQ ID NO: 6128 - protein, 73 aa, Zea mays
  unsure (1)..(73): unsure at all Xaa locations
MPKLQRFRGVRQRHWGSWVSEIRHPLLKTRIWLGTYETAEDAARAYDEAARLISGPAARTNFPLNTCRLPHLX

SEQ ID NO: 6129 - protein, 223 aa, Zea mays
  unsure (1)..(223): unsure at all Xaa locations
MAQELHETSSSSATTTASSCTTSCCSSTVTDSSSSPPSPAAANAAPAPRKAEAETGGDEDGCAGKAAPAKKRERSSEGKHPTYRGVRMRAWGKWVSEIREPRKKSRIWLGTFPTAEMAARAHDAAALAIKGRATXEVPATRAAAVRLAGPAPRRPGRVRALPADVGPVPXRVGGQCGGGAAALGIAVLQLQRGSKQXXVPVVXPISSSLFSPSLSFFFLWKSS

SEQ ID NO: 6130 - protein, 222 aa, Zea mays
  unsure (1)..(222): unsure at all Xaa locations
MAQELHETSSCSATTTSSCTTSCCSSTVTDSSSSPPSPAAANAAPAPRKAEAETGGDEDGCAGKAAPAKKRERSSEGKHPTYRGVRMRAWGKWVSEIREPRKKSRIWLGTFPTAEMAARAHDAAALAIKGRATXEVPATRAAAVRLAGPAPRRPGRVRALPADVGPVPXRVGGQCGGGAAALGIAVLQLQRGSKQXXVPVVXPISSSLFSPSLSFFFLWKSS

SEQ ID NO: 6131 - protein, 191 aa, Zea mays
  unsure (1)..(191): unsure at all Xaa locations
SGEPSPRSSGKHAFYRGIRCRSGKWVSEIREPRKARRIWLGTYPMAEMAAAAYDVAARALRGADAVLNFPGAIASRAAPASASPEDIRAAAAAXAARVLASGSYRQSSPSSCFSSSAAAAQDWHQQHDAASYTQAGTDEFMDEEAIFXMPQLLRNMAAGMMMSPPXXLSPDTSDESPDPSDGESLWSYRDP

SEQ ID NO: 6132 - protein, 86 aa, Zea mays
  unsure (1)..(86): unsure at all Xaa locations
MAPKRKERAAAEQEQEQPRLRGVRKRPWGRYAAEIRDPVRKARVWLGTFDTPEQAARAYDXRRAQALAASASGNTESSSSSSSRDX

SEQ ID NO: 6133 - protein, 289 aa, Zea mays
  unsure (1)..(289): unsure at all Xaa locations
IGRDGSKLFHTGIALEKSAGLVFNSFLLTRIRYMTLYISYDDGLPCWVRKKRMRRKSTGPDSIAETIKWWKEQNQKLQDESGSRKAPAKGSKKGCMMGKGGPENVNCVYRGVRQRTWGKWVAEIREPNRGRRLWLGSFPTAVEAAHAYDEAAKAMYGPKARVNFSESSADANSGCTSALSLLASSVPAAALQRSDEKVETEVESVETEEVVHEVKTEAKNGXTWEASRSPASFSPRRRXVLHKEGDVSYDYFNVEDVVEMIIVELNADKKFEAHEEYLDGDDGFSLFAY

SEQ ID NO: 6134 - protein, 119 aa, Zea mays
  unsure (1)..(119): unsure at all Xaa locations
GGTSKATVAXAAAAQQQRRGRKRFVGVRQRPSGRWVAEIKDTIQKIRVWLGTFDTAEEAARAYDEAACLLRGANTRTNFSSKVTNLLLLRLRARNNQQQLLLNATPARQQEAAAAALLQ

SEQ ID NO: 6135 - protein, 157 aa, Zea mays
PTPCYLCIFAFLIALLLLLTVDITRTHRTLYSSQSTRARSGAARDMVKGARLQDAAVAGGNAETAMQGAGGGAKRQYKGVRMRSWGSWVSEVRAPSQKTRIWLGSYSTAEAAARAYDAALLCLKGSAAADLNFPVHLPFHVPAAAAMSPKSIQRVAA

SEQ ID NO: 6136 - protein, 157 aa, Zea mays
  unsure (1)..(157): unsure at all Xaa locations
HSPRPAPLQPQSPSGPPAAPPPPLRRQAKAAMDTDDAQEPASPTSPSPSSSSSSSSSSSVPXKKRARRDGGRHPTYRGVRMRSWGKWVSEIREPRKKSRIWLGTFATAEMAARAHDVAALAIKGARDAHLNFPGLARLLPRPATAAPRDVQAAAALA

SEQ ID NO: 6137 - protein, 149 aa, Zea mays
  unsure (1)..(149): unsure at all Xaa locations
RCCRVKNPSSNGVLTAAAAFSDSKAMRESGKAAAARPYKGVRMRSWGSWVSEIRAPNQKRRIWLGSYATPEAAARAYDAALLCLKGSDAVLNFPSSSAGGRPDDDDPGASGGMSPRSIQRAAAAAAAAFGDAAPTPASLSTQGSTDHAX

SEQ ID NO: 6138 - protein, 109 aa, Zea mays
  unsure (1)..(109): unsure at all Xaa locations
MAPEQAAATTARNRRGCRRSXRYKGVRLRKWGRWVSEIRMPNSRERVWLGSYESAEKAARAFDAAAVCLRGSRAGFNFPESPPNVRYVPGALLTPEQIQAEAARHANQQ

SEQ ID NO: 6139 - protein, 252 aa, Zea mays
MELHFQAQPPVFQLENYSSSSASSYYYYYQQQEAAAQAKPSKPRGRKKGSNNHSKFVGVRQLPSGRWVAEIKDTTQKIRMWLGTFETAEAAAKAYDEAARLLRGTDARTNFAPRISPDCPLAVRIRGLLHHKEDQEGQGRRRSRQQQASSSSPASTTSNSNSNSHSTNSARTGALDAGEVYRPGFATAGTEEEFDSWMFDSAFPALDSFAAVDSAVPAAGTTEEPGAEMAEFERIKVERRISASLYAMNGLQ

SEQ ID NO: 6140 - protein, 189 aa, Zea mays
  unsure (1)..(189): unsure at all Xaa locations
WLSSSRPILLTRRCKCNDRDRQQATAARLVRLQPRLILLLQWCRATTTGRRRRPRRARGSRRRGXSGKHAFYRGIRCRSGKWVSEIREPRKARRIWLGTYPTPEMAAAAYDVAARALRGADAVLNFPGAIASRAAPASASPADIRAAAAAAAQAQLEYSQSQGAASNPLAAAAAQGRHQQQHHGASSTA

SEQ ID NO: 6141 - protein, 197 aa, Zea mays
  unsure (1)..(197): unsure at all Xaa locations
XRSXSRSYYSSPSTSRARIELRQYKGVRMRSWGSWVSEVRAPSQKTRIWLGSYSTAEAAARAYDAALLCLKGSAAADLNFPVHLPFHVPAAAAMSPKSIQRVAAAAAAATGAAASAPYSAGGGAGATPPCSYGDASSSSGVSSPETGRNAGLCYGTAHYDDMDMDLAGVAPAPVATDAASEWAEEGEIDLWSFSSLN

SEQ ID NO: 6142 - protein, 201 aa, Zea mays
  unsure (1)..(201): unsure at all Xaa locations
MWPMEEEEVFVTVRRTEHVDVTSRAVVVAAGRAAVAGPRTVRVFCDDYDATDSSGDEAEEEETARRRVKRYVQEIRLERAAKXRRXEEEEATAAASLGAVLPGRKRKRKPDGEASEPRFRGVRQRPWGKXYAAEIRDPWRRXWRVWXLGTFDXTAEEAAKVYDSAAAKXLRGRDATTNFQAAGGPRALSQGRAGSKSAATS

SEQ ID NO: 6143 - protein, 176 aa, Zea mays
  unsure (1)..(176): unsure at all Xaa locations
DPDATDSDSDSDDEEAGARTKRFSFEAFIGKAPAKPVLPAAAVAACTSGGAXXERYRGVRLRKWGKWAAEIRNPFTGKRQWLGTFDTAGAASAAYLSASRSFADEKRRRRGLPVAASTPDTPASGSTPTASSSSSASTAPFAHPSPSSVLEPSKEAQNTQSPELTPAPPSTESAQX

SEQ ID NO: 6144 - protein, 93 aa, Zea mays
  unsure (1)..(93): unsure at all Xaa locations
RHTPGKDCINGGGSKPGGRSPLRRSRKGCMKGKGGPDNQQCPFRGVRQRTWGKWVAEIREPNRGARLWLGTFGSALEAARAYDAAARALYGDX

SEQ ID NO: 6145 - protein, 226 aa, Zea mays
  unsure (1)..(226): unsure at all Xaa locations
IYQATCSRISVTLPSPPPRHGQRKIXAPRRTATYMMVKNPSSNGVLTATAFSDSKTRPERAVGGEAARRPYRGVRMRSWASWVSEIRAPNQKRRIWLGSYATPEAAARAYDAALLCLKGSNAVLNFPAASSSSHPDDDPAAAGGDMSPRSIQRAAAAAAAAIDDDAGMGASAADDRCSSSAGATTPTSASLSTQGSTADHVGQEQHATTTXAAASTGSPPEGKEEX

SEQ ID NO: 6146 - protein, 179 aa, Zea mays
  unsure (1)..(179): unsure at all Xaa locations
LPTLCDGAILLEFIPSVLVRRGVTPGHGRGVKVRLTAANDDDDFEAAFRDLCEDSEKQPVWXXFYRRRSGXAGSGSRRSISPYXSVRCRPWGKWAAEVPVPVRGVRVWLGTFATAEDLARAXDHSARDLRGATTRLNFPSNSTPLRSRQGGAARERARALERERVRRRXENQDRPVVPX

SEQ ID NO: 6147 - protein, 220 aa, Zea mays
  unsure (1)..(220): unsure at all Xaa locations
MVQSKKKFRGVRQRHWGSWVSEIRHPLLKRRVWLAXTFETAEEAARAYDEAAVLMSGRNAKTNFPVPRSGTGELLAPAVPAAREARGGGGGGTSLSQILSAKLRRCCKTPSPSLTCLRLDPEKSHIGVWQKRAGARADSSWVMTVELNKDAPPPPSSGEEPAPRATTSTSTPTSSTITAGSPPPEMMDDEESVALQMIEELLGSHGMMLQVQGAAGSLVI

SEQ ID NO: 6148 - protein, 316 aa, Zea mays
LCCSSCAVQETAPTLSKKFPPSHLWSIWKRCVKMRPSVQKVRIFCSDPDATDSSDDEDGQIIAVKKMVMEILVPVTNSKTSNSLKTLVPCGAKDLEVSEKKGKSSRFRGVRRRRWGRWAAEIRDPVRKTRKWIGSYDSEEAAAAAYQAYAKQIREELLAIKNQRSVSERAALSSSSSVSCVSSSPPCEQTGHEPQTRVLVEKDPEPVDEVFLNFSLTPKGISMDDLLGRIDEIPVCDDPVSPADELPLDNFTSLEDAFPISDFIGSRDEHLYEHYIGLADISHLPLPMDDPAFNLDAELDWSGFDFAAIEGELDVL

SEQ ID NO: 6149 - protein, 262 aa, Zea mays
  unsure (1)..(262): unsure at all Xaa locations
MGAAVKEEEVPPRQAAPLGLLGSPTSPSRCSSGAVRPATMDAAVGAPRAXVEAAVRGVGQSHWGSWVSEIRHPLLKRRVWLGXTFETAEEAARAYDEAAVLMSGRNAKTNFPVPRSRPRALPAPAGPAGRAAGGGGGGCTSLSQVLSAKLRRCCKTPSPSLTCLRLDPERSHIGVWHKGAGARADSSWVMTVQLSDKDAAPAPSATSSATATTXXTAASHPPPATVVVVDDEEGIALRIVGYLLDPLGKVLQTAEEAAGLVC

SEQ ID NO: 6150 - protein, 82 aa, Zea mays
  unsure (1)..(82): unsure at all Xaa locations
XDAWARGWWRASPPSSSSPRPRRRSPEHRTRRRRPDQNQSRGVRGRPWGRWAARIRDPVKGVRVWLGTFPSAEAARRAYNHA

SEQ ID NO: 6151 - protein, 134 aa, Zea mays
  unsure (1)..(134): unsure at all Xaa locations
CARTRVPCCWRRSAAXAAERKARARRQKLSSWTGVRFRHWGKWAAEIRVPRTREKLWIGTFESARQAALAYDAAVFCFYGERGKPNFPAMPRPEVDEGSRLHLSVAEVKVIAERHARDVXTPSSRRWRTRTAQG

SEQ ID NO: 6152 - protein, 326 aa, Zea mays
  unsure (1)..(326): unsure at all Xaa locations
MAPLNHHQHVLLKKALAKKPKAKRMSRFGLKPSAXSPPEVPAAAAAAQPRRRVRVLFEDPDATDSDSDDEEAGGPAEAKRFSFEAFVGKVPAKPVLPAAAVAACTSGGAXXERYRGVRLRKWGKWAAEIRNPFTGKRQWLGTFDTAGAASAAYLSASRSFADEKRRRRGLPVAASSADTPASGSTPTASSSSSASTAPFAHPSPSSVLEPSKEARNTQSPEATPARPSTDSAQLPEDPEFYQDLLRGLQLPDIDPLDFRAGLDALDLSDADFGLDDEHDLLLGDFGDEEMEIDLDLDDINDVFPEMPGCDLGRGMDDFLQTVDFCV

SEQ ID NO: 6153 - protein, 280 aa, Zea mays
KKKTSPPPTPSLPPSLTQWGSQSRAATAKILRGLLSPARHCAARAIHPRFTQPTIHPPPHPAAAMCGGAILSGFIPPSGVPAAAKKKQQRRATADLLWPGPGKKGAPREEDFEADFREFERGLEEDDVDDGAGGEVQELPLPEPARLAFAAAVGAPRTAVDGVMTPKDAEGDMPTTANNSAANKRRRKNQYRGIRRRPWGQVGGRDQRPQQGASASGSAHTAPAEEAARAYDAEARRIRGKKAKVNFRDEAAAAGAQKPPAATATTPTACASAARLAPRP

SEQ ID NO: 6154 - protein, 371 aa, Zea mays
  unsure (1)..(371): unsure at all Xaa locations
SPTAAAPEDSSSAASTATTESAAAAQPPPAAAPPGGGAVGGGDAVAVSPAADEQAVTSQPSAVPQGSSRFKGVVPQPNGRWGAQIYERHARVWLGTFADEEAAARAYDVAALRYRGREAATNFPGAGASAPELAFLAAHSKAEIVDMLRKHTYADELRQGLRRGRSRAQPTPAWARVLLFDKAVTPSDVGKLNRLVVPKQHAEKHFPLKRAPPSVEAQAPTTAKGVLLNFEDGEGKVWRFRYSYWNSSQSYVLTKGWSRFVKEKGLQAGDVVGFYRSAAGADSKLFIDCKXVDTAASTTSRVGSSPPPAPVAKAVRLFGVDLLTAPAXRHGPVQXSQGLGLAPXQAAIKKQLVELALASVDQCYGAGRSFS

SEQ ID NO: 6155 - protein, 111 aa, Zea mays
SLPHNTQVLIFPPASSAHHHKPNRELSLSRSFNSRMLLNPASVLDTIRQHLLEEPPAAADESFGILVADQWSGSLPFRTDDADDDDDPTDEAGQAAGDRTLLGREEERIVQ

SEQ ID NO: 6156 - protein, 117 aa, Zea mays
RPAPRRAQWLGTFDTAEDAARAYDAAAVELRGRRAKLNFPDAAAAAAARDVQPRRPLPGQSLRENCGSNAASPLHVAVARAPTTLQGTGPAPPKDQDIWDGLNEILTMDDRSFWSMP

SEQ ID NO: 6157 - protein, 263 aa, Zea mays
  unsure (1)..(263): unsure at all Xaa locations
SPCSLVRTTHTHTHTEEERTLRYNPVAADYADRVHGNQAKQSKRRIGRSRRPTDRPSYLATAHQPMVKTATATATAAARHGGAHKRTYKGVRMRSWGSWVSEVRAPGQKTRIWLGSHSTAEAAARAYDAALLCLRGSAAPDLNFPPRRPLADGLHPLPPAAMSPKAIQRVAAAAAACNGIGSACGHAETAPALSGSPPSSDSDVSSPEAGSTASSDGELARYGDGDGDXXGVSVDYGSLADIDAFFQSPNIALWSFSFPALDC

SEQ ID NO: 6158 - protein, 225 aa, Zea mays
VAACTSGGAPERYRGVRLRKWGKWAAEIRNPFTGKRQWLGTFDTAGAASAAYLSASRSFADEKRRRRGLPVAASSADTPASGSTPTASSSSSASTAPFAHPSPSSVLEPSKEARNTQSPEATPARPSTDSAQLPEDPEFYQDLLRGLQLPDIDPLDFRAGLDALDLSDADFGLDDEHDLLLGDFGDEEMEIDLDLDDINDVFPEMPGCDLGRGMDDFLQTVDFCV

SEQ ID NO: 6159 - protein, 195 aa, Thellungiella halophila
MTKMGFKPDSNPSPNPNESNAKEIRYRGVRKRPWGRYAAEIRDPGKKTRVWLGTFDTAQQAARAYDAAAREFRGAKAKTNFPTFLELNAAKDGGFARSPSQSSTVDSVSPTSARLVTPPQLELSLGGGGGGACYQIPVARRPVYFYNMTTFPAAAAATCGVQSESDSSSVVDFECGAEKKYRPLDLDLNLAPPAE

SEQ ID NO: 6160 - protein, 235 aa, Matricaria chamomilla
MIRNNAFDSDFALLESVRRHLLDDNAPPMSCRSNNFLFPHLSDSWGELPLQQNDSEDMLIAKFLNEALPLQQNDSEGIITPEMTSSSENIFFVKSEPETSSFQPKSLGSQKGKHYRGVRRRPWGKYAAEIRDPAKNGARVWLGTYETAEDAAVAYDMAAYRMRGSRALLNFPLRINSGEPEPVRITSKRKTTSPSEGLVVKKVKVELEMSTQAEFPLVYGCYYCVILGPFLVKCF

SEQ ID NO: 6161 - protein, 475 aa, Streptomyces coelicolor A3(2)
MSLHQGPRPSRDSDRDRRRLAVNPFHAAANPLGGMTEAPPAHRLPDSPLPPESAYRLVHDELMLDGNARLNLATFVTTWMEPQAGVLMSECRDKNMIDKDEYPRTAELERRCVAMLADLWHAPDPSTAVGCSTTGSSEACMLAGMALKRRWALRNADRYPAKDVRPNLVMGVNVQVCWDKFCNFWEVEARQVPMEGDRFHLDPQAAAELCDENTIGVVGILGSTFDGSYEPVADLCAALDALQERTGLDVPVHVDGASGAMVAPFLDEDLVWDFRLPRVASINTSGHKYGLVYPGVGWALWRDAEALPEELVFRVNYLGGDMPTFALNFSRPGAQVVAQYYNFLRLGREGYRAVQQSARDIAGSLAERVAALGDFRLLTRGDQLPVFAFTTADDVTAYDVFDVSRRLREGGWLVPAYTFPPHREDLSVLRVVCRNGFSADMADLLLADLERLLPELRRQPGPLTRDKGAATGFHH

SEQ ID NO: 6162 - protein, 568 aa, Mus musculus
MPGTDLLKLKDFEPYLEILESYSTKAKNYVNGYCTKYEPWQLIAWSVLCTLLIVWVYELIFQPESLWSRFKKKLFKLIRKMPFIGRKIEQQVSKAKKDLVKNMPFLKVDKDYVKTLPAQGMGTAEVLERLKEYSSMDGSWQEGKASGAVYNGEPKLTELLVQAYGEFTWSNPLHPDIFPGLRKLEAEIVRMTCSLFNGGPDSCGCVTSGGTESILMACKAYRDLALEKGIKTPEIVAPESAHAAFDKAAHYFGMKIVRVALKKNMEVDVQAMKRAISRNTAMLVCSTPQFPHGVMDPVPEVAKLAVRYKIPLHVDACLGGFLIVFMEKAGYPLEKPFDFRVKGVTSISADTHKYGYAPKGSSVVMYSNEKYRTYQFFVGADWQGGVYASPSIAGSRPGGIIAACWAALMHFGENGYVEATKQIIKTARFLKSELENIKNIFIFGDPQLSVIALGSNDFDIYRLSNMMSAKGWNFNYLQFPRSIHFCITLVHTRKRVAIQFLKDIRESVTQIMKNPKAKTTGMGAIYGMAQATIDRKLVAEISSVFLDCLYTTDPVTQGNQMNGSPKPR

SEQ ID NO: 6163 - protein, 568 aa, Mus musculus
MPGTDLLKLKDFEPYLEILESYSTKAKNYVNGYCTKYEPWQLIAWSVLCTLLIVWVYELIFQPESLWSRFKKKLFKLIRKMPFIGRKIEQQVSKAKKDLVKNMPFLKVDKDYVKTLPAQGMGTAEVLERLKEYSSMDGSWQEGKASGAVYNGEPKLTELLVQAYGEFTWSNPLHPDIFPGLRKLEAEIVRMTCSLFNGGPDSCGCVTSGGTESILMACKAYRDLALEKGIKTPEIVAPESAHAAFDKAAHYFGMKIVRVALKKNMEVDVQAMKRAISRNTAMLVCSTPQFPHGVMDPVPEVAKLTVRYKIPLHVDACLGGFLIVFMEKAGYPLEKPFDFRVKGVTSISADTHKYGYAPKGSSVVMYSNEKYRTYQFFVGADWQGGVYASPSIAGSRPGGIIAACWAALMHFGENGYVEATKQIIKTARFLKSELENIKNIFIFGDPQLSVIALGSNDFDIYRLSNMMSAKGWNFNYLQFPRSIHFCITLVHTRKRVAIQFLKDIRESVTQIMKNPKAKTTGMGAIYGMAQATIDRKLVAEISSVFLDCLYTTDPVTQGNQMNGSPKPR

SEQ ID NO: 6164 - protein, 568 aa, Mus musculus
MPGTDLLKLKDFEPYLEILESYSTKAKNYVNGYCTKYEPWQLIAWSVLCTLLIVWVYELIFQPESLWSRFKKKLFKLIRKMPFIGRKIEQQVSKAKKDLVKNMPFLKVDKDYVKTLPAQGMGTAEVLERLKEYSSMDGSWQEGKASGAVYNGEPKLTELLVQAYGEFTWSNPLHPDIFPGLRKLEAEIVRMTCSLFNGGPDSCGCVTSGGTESILMACKAYRDLALEKGIKTPEIVAPESAHAAFDKAAHYFGMKIVRVALKKNMEVDVQAMKRAISRNTAMLVCSTPQFPHGVMDPVPEVAKLAVRYKIPLHVDACLGGFLIVFMEKAGYPLEKPFDFRVKGVTSISADTHKYGYAPKGSSVVMYSNEKYRTYQFFVGADWQGGVYASPSIAGSRPGGIIAACWAALMHFGENGYVEATKQIIKTARFLKSELENIKNIFIFGDPQLSVIALGSNDFDIYRLSNMMSAKGWKFNYLQFPRSIHFCITLVHTRKRVAIQFLKDIRESVTQIMKNPKAKTTGMGAIYGMAQATIDRKLVAEISSVFLDCLYTTDPVTQGNQMNGSPKPR

SEQ ID NO: 6165 - protein, 568 aa, Rattus norvegicus
MPSTDLLKLKDFEPYLEILEAYSTKAKNYVNGYCTKYEPWQLIAGSVLCTLLVVWVYELIFQPESLWSRFKNKLFRLIRKMPFIGRKIQQQLTKAKKDLVKNMPFLKLDKDYVKTLPAQGLSTAEVLERLKEYSSMDVFWQEGKASGAVYSGEPKLTELLVQAYGEFTWSNPLHPDIFPGLRKLEAEIVRMTCSLFNGGPDSCGCVTSGGTESILMACKAYRDLALEKGIKTPEIVAPESAHAAFDKAAHYFGMKIVRVAQKKNMEVDVRAMKRAISRNTAMLVCSAPQFPHGVIDPIPEVAKLAVKYKIPFHVDACLGGFLIVFMEKAGYPLEKPFDFRVKGVTSISADTHKYGYAPKGSSVVMYSNEKYRKYQFFVDADWQGGIYASPSIAGSRPGGIIAACWAALMHFGENGYVEATKQIIKTARFLKSELENIKNIFILGDPQLSVIALGSNDFDIYRLSNMMSAKGWNFNYLQFPRSIHFCITLVHTRKRVAIQFLKDIRESVTQIMKNPKAKTTGMGAIYGMAQATIDRKMVAEISSVFLDSLYSTDPVTQGNQMNGSPKPR

SEQ ID NO: 6166 - protein, 488 aa, Rattus norvegicus
MPFIGRKIQQQLTKAKKDLVKNMPFLKLDKDYVKTLPAQGLSTAEVLERLKEYSSMDVFWQEGKASGAVYSGEPKLTELLVQAYGEFTWSNPLHPDIFPGLRKLEAEIVRMTCSLFNGGPDSCGCVTSGGTESILMACKAYRDLALEKGIKTPEIVAPESAHAAFDKAAHYFGMKIVRVAQKKNMEVDVRAMKRAISRNTAMLVCSAPQFPHGVIDPIPEVAKLAVKYKIPFHVDACLGGFLIVFMEKAGYPLEKPFDFRVKGVTSISADTHKYGYAPKGSSVVMYSNEKYRKYQFFVDADWQGGIYASPSIAGSRPGGIIAACWAALMHFGENGYVEATKQIIKTARFLKSELENIKNIFILGDPQLSVIALGSNDFDIYRLSNMMSAKGWNFNYLQFPRSIHFCITLVHTRKRVAIQFLKDIRESVTQIMKNPKAKTTGMGAIYGMAQATIDRKMVAEISSVFLDSLYSTDPVTQGNQMNGSPKPR

SEQ ID NO: 6167 - protein, 467 aa, Synechocystis sp. PCC 6803
MVHKKIDLNQLSEAESLLTPTYAARGLANSVSKYEMPETEMLPAIAYNLIHDELGLDGNSRLNLATFVTTWMEPEARQLMADTFDKNMIDKDEYPQTAEIELRCVNILSRLWNAPASAEATGCSTIGSSEAAMLGGMAMKWKWRQRRQAAGKPGDRPNLVMGINVQVCWEKFCRYWEVEPRFVPMEGDRYHISPEEAVKLIDENTIGVIGILGSTFDGSYEPIEALNDALETLNQRTGWQVPLHIDAASGGFIAPFLDPDLRWDFRLPWVKSINTSGHKYGLVYPGVGWIIWRDKEELPEELIFHCNYLGGDLPNFALNFSRPGNQVVAQYYNFLRLGKEGYRKIQQTCRDTALYLSGKIAQLGPFELLTDGGDIPVFAWRLKDEVLANTCYTLYDMADKLRERGWLVPAYRMPKNREDLVVQRIVVKEGFSRDMADLLLADMERAIAYFASQPDHKPKQEGSHFSH

SEQ ID NO: 6168 - protein, 468 aa, Ralstonia metallidurans
MSTLRGVSMSDMQEHKVTPYDQFNYEVPENVFPREGISANAAAAIVISDEWTDTNPMLNMSSFVTTFAEPEAREVAARNIFKNYIDHDMYPRLFAMEGRMVRWLHELWNGPKGVEPYGTCTVGSSEACMLGGLAHKWNWRQRRQAEGKDATRPNMVTGGNVQIVWKKFLRYFDVEPRIVPLKPGNYCLTAEDLDKYVDENTICVVAIAGQTFTGEDDDIQGIHDWLDAYEKRTGISIPMHIDGASGGFVNPFLYPDYKWDFRLPRVQSINASGHKYGLTPPGLGWVVFRERKIFNEELVFYVNYLGGEMPTATLNFSRNAFQVAVQYYQFLRLGFDGYKRVMQHTLDNAIFLRQQLVDSGYFDIMNTTQRIPVVAVTLNKKYKNFNEFDVSNKVREKGWVLSAYTMPPNAESVTSLRVVVRPHVNHNVAQLLANDIINACKFLEANGGNAKPPALHKHAEAQSTSLKC

SEQ ID NO: 6169 - protein, 519 aa, Burkholderia fungorum
MPRRRDAVRHRTDFDRRDAHRGSGSFSAYLTSSFHSLRHSSRDRHEPGTLTSNQELHAMTFLKSPPPTPEDVADEYAATISGSSLPKYRIPEASSDRRAVFDLVRDELFMDGNSRQNVATFCTTYADDEVRHLMDLSIDKNMIDKDEYPQTAEIEMRCVHMLADLWHASKAWKTTGCSTTGSSEACMLGGLALKWQWKKRREAQGKPTDKPNFVCGPVQVCWAKFARYFDVEMRQVPLRGEATGLTPEDLAEYCDENTIGVVATLGITFTCVYEPVKALAGALDALQANVGLDIPIHVDAASGGFVAPFIQPDLEWDFSVPRVKSINASGHKYGLAPLGVGWVVWRSTQDLPDELIFRVDYLGGDMPTFALNFSRPAGQIIAQYYMLLRLGREGYRRIQQECADTAQALADGLAKIDQLEMIYDGRGALPAVCYKLKHPETAGFTLFDLSDQVRMRGWQIASYELPAGREDTIVQRVLIRRGVTRDMAAMLLEDIRHAIGHLTKNPVLHSSAGPTFHHN

SEQ ID NO: 6170 - protein, 461 aa, Burkholderia fungorum
MTFLKSPPPTPDAVADEYAAMISGSSLPKYRIPEASSDRRAVFDLVRDELFMDGNSRQNVATFCTTYADDEVRRLMDLSIDKNMIDKDEYPQTAEIEMRCVHMLADLWHATKSWKTTGCSTTGSSEACMLGGLALKWQWKKRREAQGKPTGKPNFVCGPVQVCWAKFARYFDVEMRQVPLSGDATGLRPEDLAQYCDENTIGVVATLGITFTCVYEPVKALAGALDALQANVGLDIPIHVDAASGGFVAPFIQPDLEWDFSVPRVKSINASGHKYGLAPLGVGWIVWRSTQDLPDELIFRVDYLGGDMPTFALNFSRPAGQIIAQYYMLLRLGREGYRHIQQECADTAQALADGLAKIDALDMIYDGRGALPAVCYKLKHPDTAGFTLFDLSDRVRMRGWQIASYELPAGREDTIVQRVLIRRGVTRDMAAMLLEDIKHAIAHLTKNPVPNSTAGPTFHHD

SEQ ID NO: 6171 - protein, 466 aa, Enterococcus faecium
MLYGKDNQEEKNYLEPIFGSASEDVDLPKYKLNKESIEPRIAYQLVQDEMLDEGNARLNLATFCQTYMEPEAVKLMTQTLEKNAIDKSEYPRTTEIENRCVNMIADLWHAPNNEKFMGTSTIGSSEACMLGGMAMKFAWRKRAEKLGLDIQAKKPNLVISSGYQVCWEKFCVYWDVELREVPMDEKHMSINLDTVMDYVDEYTIGIVGIMGITYTGRYDDIKGLNDLVEAHNKQTDYKVYIHVDAASGGFYAPFTEPDLVWDFQLKNVISINSSGHKYGLVYPGVGWVLWRDQQYLPEELVFKVSYLGGEMPTMAINFSHSAAQLIGQYYNFVRYGFDGYRDIHQRTHDVAVYLAKEIEKTGIFEIINDGSELPVVCYKLKEDPNREWTLYDLSDRLLMKGWQVPAYPLPKDLDQLIIQRLVVRADFGMNMAGDYVQDMNQAIEELNKAHIVYHKKQDVKTYGFTH

SEQ ID NO: 6172 - protein, 219 aa, Lactococcus lactis
GGLYAPFVEPELEWDFRLKNVISINTSGHKYGLVYPGVGWVLWRDKKYLPEELIFKVSYLGGELPTMAINFSHSASQLIGQYYNFVRYGFDGYKAIHERTHKVAMFLAKEIEKTGMFEIMNDGSQLPIVCYKLKEDSNRGWNLYDLADRLLMKGWQVPAYPLPKNLENEIIQRLVIRADFGMNMAFNYVQDMQEAIEALNKAHILYHEEPENKTYGFTH

SEQ ID NO: 6173 - protein, 163 aa, Lactococcus lactis
GGLYAPFVEPELEWDFRLKNVISINTSGHKYGLVYPGVGWVLWRDKKYLPEELIFKVSYLGGELPTMAINFSHSASQLIGQYYNFVRYGFDGYKAIHERTHKVAMYLAEEIEKTGMFEIMNDGSQLPIVCYKLKENSNLGWNLYDLADRLFNEGMASACLSTS

SEQ ID NO: 6174 - protein, 157 aa, Lactococcus lactis
FVDPELEWDFRLKNVISINTSGHKYGLVYTGVGWVLWRDKKYLPEELIFKVSYLGGELPTMAINFSHSASQLIGQYYNFVRYGFDGYKAIHERTHKVAMYLAEEIEKTGMFEIMNDGSQLPIVCYKLKENSNLGWNLYDLADRLFNEGMASACLSTS

SEQ ID NO: 6175 - protein, 105 aa, Lactococcus lactis
MLYGKENRDEAEFLEPIFGSESEQVDLPKYKLAQQSIEPRVAYQLVQDEMLDEGNARLNLATFCQTYMEPEAVKLMSQTLEKNAIDKSEYPRTTEIENRCVNMIA

SEQ ID NO: 6176 - protein, 466 aa, Lactococcus lactis subsp. cremoris
MLYGKENRDEAEFLEPIFGSESEQVDLPKYKLAQQSIEPRVAYQLVQDEMLDEGNARLNLATFCQTYMEPEAVKLMSQTLEKNAIDKSEYPRTTEIENRCVNMIADLWNASEKGKIYGTSTIGSSEACMLGGMAMKFSWRKRAEKLGLDINAKKPNLVISSGYQVCWEKFCVYWDIEMREVPMDREHMSINLEKVMDYVDEYTIGVVGIMGITYTGRYDDIKALDNLIEEYNKQTDYKVYIHVDAASGGLYAPFVEPELEWDFRLKNVISINTSGHKYGLVYPGVGWVLWRDKKYLPEELIFKVSYLGGELPTMAINFSHSASQLIGQYYNFVRYGFDGYKAIHERTHKVAMYLAEEIEKTGMFEIMNDGAQLPIVCYKLKENSNRGWNLYDLADRLLMKGWQVPAYPLPKNLENEIIQRLVIRADFGMNMAFNYVQDMQEAIDALNKAHILFHQEPENKTYGFTH

SEQ ID NO: 6177 - protein, 466 aa, Lactococcus lactis subsp. lactis
MLYGKENRDEAEFLEPIFGSESEQVDLPKYKLAQQSIEPRVAYQLVQDEMLDEGNARLNLATFCQTYMEPEAVKLMSQTLEKNAIDKSEYPRTTEIENRCVNMIADLWNASEKEKFMGTSTIGSSEACMLGGMAMKFSWRKRAEKLGLDINAKKPNLVISSGYQVCWEKFCIYWDIEMREVPMDKEHMSINLDKVMDYVDEYTIGVVGIMGITYTGRYDDIKALDNLIEEYNKQTDYKVYIHVDAASGGLYAPFVEPELEWDFRLKNVISINTSGHKYGLVYPGVGWVLWRDKKYLPEELIFKVSYLGGELPTMAINFSHSASQLIGQYYNFVRYGFDGYKAIHERTHKVAMFLAKEIEKTGMFEIMNDGSQLPIVCYKLKEDSNRGWNLYDLADRLLMKGWQVPAYPLPKNLENEIIQRLVIRADFGMNMAFNYVQDMQEAIEALNKAHILYHEEPENKTYGFTH

SEQ ID NO: 6178 - protein, 466 aa, Escherichia coli O157:H7 EDL933
MDQKLLTDFRSELLDSRFGAKAISTIAESKRFPLHEMRDDVAFQIINDELYLDGNARQNLATFCQTWDDENVHKLMDLSINKNWIDKEEYPQSAAIDLRCVNMVADLWHAPAPKNGQAVGTNTIGSSEACMLGGMAMKWRWRKRMEAAGKPTDKPNLVCGPVQICWHKFARYWDVELREIPMRPGQLFMDPKRMIEACDENTIGVVPTFGVTYTGNYEFPQPLHDALDKFQADTGIDIDMHIDAASGGFLAPFVAPDIVWDFRLPRVKSISASGHKFGLAPLGCGWVIWRDEEALPQELVFNVDYLGGQIGTFAINFSRPAGQVIAQYYEFLRLGREGYTKVQNASYQVAAYLADEIAKLGPYEFICTGRPDEGIPAVCFKLKEGEDPGYTLYDLSERLRLRGWQVPAFTLGGEATDIVVMRIMCRRGFEMDFAELLLEDYKASLKYLSDHPKLQGIAQQNSFKHT

SEQ ID NO: 6179 - protein, 466 aa, Escherichia coli O157:H7 EDL933
MDKKQVTDLRSELLDSRFGAKSISTIAESKRFPLHEMRDDVAFQIINDELYLDGNARQNLATFCQTWDDENVHKLMDLSINKNWIDKEEYPQSAAIDLRCVNMVADLWHAPAPKNGQAVGTNTIGSSEACMLGGMAMKWRWRKRMEAAGKPTDKPNLVCGPVQICWHKFARYWDVELREIPMRPGQLFMDPKRMIEACDENTIGVVPTFGVTYTGNYEFPQPLHDALDKFQADTGIDIDMHIDAASGGFLAPFVAPDIVWDFRLPRVKSISASGHKFGLAPLGCGWVIWRDEEALPQELVFNVDYLGGQIGTFAINFSRPAGQVIAQYYEFLRLGREGYTKVQNASYQVAAYLADEIAKLGPYEFICTGRPDEGIPAVCFKLKDGEDPGYTLYDLSERLRLRGWQVPAFTLGGEATDIVVMRIMCRRGFEMDFAELLLEDYKASLKYLSDHPKLQGIAQQNSFKHT

SEQ ID NO: 6180 - protein, 464 aa, Listeria monocytogenes
MLYSKENKESYLEPVFGSSAEDRDIPKYTLGKEPLEPRIAYRLVKDELLDEGSARQNLATFCQTYMEDEATKLMSETLEKNAIDKSEYPRTPELENRCVNIIADLWHAPKDQKFMGTSTIGSSDACMLGGMAMKFAWRKRAEKLGLDIYAKKPNLVISSGYQVCWEKFCVYWDIDMRVVPMDKEHMQLNTDQVLDYVDEYTIGVVGILGITYTGRYDDIYALNEKLEEYNSKTDYKVYIHVDAASGGFFTPFVEPDIIWDFRLKNVISINTSGHKYGLVYPGIGWVLWKDESYLPEELIFKVSYLGGEMPTMQINFSRSASHIIGQYYNFLRYGFEGYRTIHQKTSDVAQYLAHAVEQTGYFDIFNDGSHLPIVCYKLKTTANVNWTLYDLADRLQMRGWQVPAYPLPKSLENIIIQRYVCRADLGFNMAEEFIQDFQASIQELNNAHILFHDTQQSGVHGFTH

SEQ ID NO: 6181 - protein, 464 aa, Listeria monocytogenes
MLYSKENKESYLEPVFGSSAEDRDIPKYTLGKEPLEPRIAYRLVKDELLDEGSARQNLATFCQTYMEDEATKLMSETLEKNAIDKSEYPRTAELENRCVNIIADLWHAPKDQKFMGTSTIGSSEACMLGGMAMKFAWRKRAEKLGLDIYAKKPNLVISSGYQVCWEKFCVYWDIDMRVVPMDKEHMQLNTDQVLDYVDEYTIGVVGILGITYTGRYDDIYALNEKLEEYNSKTDYKVYIHVDAASGGFFTPFVEPDIIWDLRLKNVISINTSGHKYGLVYPGIGWVLWKDESYLPEELIFKVSYLGGEMPTMQINFSRSASHIIGQYYNFLRYGFEGYRTIHQKTSDVAQYLAHAVEQTGYFDIFNDGSHLPIVRYKLKDDANVNWTLYDLADRLQMRGWQVPAYPLPKSLENIIIQRYVCRADLGFNMAEEFIQDFQASIQELNNAHILFHDTQQSGVHGFTH

SEQ ID NO: 6182 - protein, 462 aa, Listeria monocytogenes
MFKTNVEQNNVPVFGSFESGQDLPEKRMNKESVDPRIAYQLVKDQLIDEGSARQNLATFCQTYMEPEAEQIMAETMEKNAIDKSEYPQTAKLESSCVNMLADLWNVDESEHYMGTSTVGSSEACMLGGMAMKFRWRSAALKNGLDIHAKKPNLVISSGYQVCWEKFCVYWDIELREVPMSEEHLSINTDIIMDYVDEYTIGIVGILGITYTGKFDDIMTLNDLVEDYNNTHDNEVVIHVDGASGAMFTPFVEPGLEWDFRLPNVVSINTSGHKYGLVYPGVGWILWRDKEYLPEELVFDVSYLGGHMPTMAINFSRSASQIIGQYYNFLRFGYEGYRQIHMRTRDGALQLSQAVAETGLFEIYNDGANLPIVCYKLKDDANVAWTLYDLADRLQMKGWQVPAYPLPKEMGNTIIQRYVCRGDLGQNMVTAFKNDLSESIEELNNAHILYHDVNTSKTHGFTH

SEQ ID NO: 6183 - protein, 464 aa, Listeria innocua
MLYSKENKESYLEPVFGSSAEDRDIPKYTLAKEPLEPRIAYRLVKDELLDEGSARQNLATFCQTYMEDEATKLMSETLEKNAIDKSEYPRTAELENRCVNIIADLWHAPKDQKFMGTSTIGSSEACMLGGMAMKFAWRKRAEKLGLDIYAQKPNLVISSGYQVCWEKFCVYWDIDMRVVPMDKDHMQLNTDQVLDYVDEYTIGVVGILGITYTGRYDDIYALNEKLEEYNSKTDYKVYIHVDAASGGFFTPFVEPDIIWDFRLKNVISINTSGHKYGLVYPGIGWVLWKDESYLPEELIFKVSYLGGEMPTMQINFSRSASHIIGQYYNFLRYGFEGYRTIHQKTSDVAQYLAHAVEQTGYFDIYNDGSHLPIVCYKLKDDANVKWTLYDLADRLQMRGWQVPAYPLPKNLENIIIQRYVCRADLGFNMAEEFIQDFQASIQELNNAHILFHDTQQSGVHGFTH

SEQ ID NO: 6184 - protein, 467 aa, Listeria innocua
MLYSENDKRKHESYRIPLFGSEEESTSIPKYVLKKEPMEPRIAYQLVKDQLMDEGNARQNLATFCQTYMEKEAEILMAETLEKNAIDKSEYPQTAELENRCVNILADLWNAPKEMSYLGTSTVGSSEACMLGGLAMKFRWRNNAEKRGLDIQAKRPNLIISSGYQVCWEKFCVYWDVDMRVVPMDKEHLSLDVEKVFELVDEYTIGIVGILGITYTGKFDDIALLDEKVEAYNEANEHQLVIHIDGASGAMFTPFVNPELPWDFRLKNVVSINTSGHKYGLVYPGVGWILWKDKEYLPKELIFEVSYLGGSMPTMAINFSRSASQIIGQYYNFLRYGFEGYREIHEKTKKTALYLSKTVEKSGYFEIINDGSNLPIVCYKLKDDLDVEWTLYDLADQLLMKGWQVPAYPLPADLSDTIIQRFVCRADLGYNVAEEFAADFADALHNLEHARVLYHDKERNDSYGFTH

SEQ ID NO: 6185 - protein, 464 aa, Listeria monocytogenes EGD-e
MLYSKENKESYLEPVFGSSAEDRDIPKYTLGKEPLEPRIAYRLVKDELLDEGSARQNLATFCQTYMEDEATKLMSETLEKNAIDKSEYPRTAELENRCVNIIADLWHAPKDQKFMGTSTIGSSEACMLGGMAMKFAWRKRAEKLGLDIYAKKPNLVISSGYQVCWEKFCVYWDIDMRVVPMDKEHMQLNTDQVLDYVDEYTIGVVGILGITYTGRYDDIYALNEKLEEYNSKTDYKVYIHVDAASGGFFTPFVEPDIIWDFRLKNVISINTSGHKYGLVYPGIGWVLWKDESYLPEELIFKVSYLGGEMPTMQINFSRSASHIIGQYYNFLRYGFEGYRTIHQKTSDVAQYLAHAVEQTGYFDIFNDGSHLPIVCYKLKDDANVNWTLYDLADRLQMRGWQVPAYPLPKSLENIIIQRYVCRADLGFNMAEEFIQDFQASIQELNNAHILFHDTQQSGVHGFTH

SEQ ID NO: 6186 - protein, 467 aa, Listeria monocytogenes EGD-e
MLYSEDDKRKQESYRIPLFGSEEESTSIPKYVLKKEPMEPRIAYQLVKDQLMDEGNARQNLATFCQTYMEKEAEILMAETLEKNAIDKSEYPQTAELENRCVNILADLWNAPKDMSYLGTSTVGSSEACMLGGLAMKFRWRNNAEKRGLDIQAKRPNLIISSGYQVCWEKFCVYWDVDMRVVPMDKNHLSLDVDKVFDLVDEYTIGVVGILGITYTGKFDDIQLLDEKVEAYNETNEHQLVIHIDGASGAMFTPFVNPELPWDFRLKNVVSINTSGHKYGLVYPGVGWILWKDKEYLPKELIFEVSYLGGSMPTMAINFSRSASQIIGQYYNFLRYGFEGYREIHEKTKKTAIYLAKTVEKSGYFEIINDGANLPIVCYKMKEGLDVEWTLYDLADQLLMKGWQVPAYPLPADLSDTIIQRFVCRADLGYNVAEEFAADFADAIHNLEHARVLYHDKERNDSYGFTH

SEQ ID NO: 6187 - protein, 462 aa, Listeria monocytogenes EGD-e
MFKTNVEQNNVPVFGSFESGQDLPEKRMNKESVDPRIAYQLVKDQLIDEGSARQNLATFCQTYMEPEAEQIMAETMEKNAIDKSEYPQTAKLESSCVNMLADLWNVDESEHYMGTSTVGSSEACMLGGMAMKFRWRSAALKNGLDIHAKKPSLVISSGYQVCWEKFCVYWDIELREVPMSEEHLSINTDIIMDYVDEYTIGIVGILGITYTGKFDDIMTLNDLVEDYNNTHDNEVVIHVDGASGAMFTPFVEPGLEWDFRLPNVVSINTSGHKYGLVYPGVGWILWRDKEYLPEELVFDVSYLGGHMPTMAINFSRSASQIIGQYYNFLRFGYEGYRQIHMRTRDGALQLSQAVAETGLFEIYNDGANLPIVCYKLKDDANVAWTLYDLADRLQMKGWQVPAYPLPKEMGNTIIQRYVCRGDLGQNMVTAFKNDLSESIEELNNAHILYHDVNTSKTHGFTH

SEQ ID NO: 6188 - protein, 363 aa, Methanothermobacter thermautotrophicus str. Delta H
MTYTSGRILGSMCTSSHPLARRVYCDFLESNLGDPGLFRGTRELESGVIGMLGELLSEPDAAGHIITGGTEANLMAMRAARNMAGAEKPEIIVPKSAHFSFRKAADILGLRLREAELDQDYRVDVESVRKLISENTVAVVGVAGTTELGRIDPVEELSEICLDEDIHLHIDAAFGGFIIPFLRETGAELPEFDFKLQGVSSITVDPHKMGLAPIPSGCILFRDASYLDAMSIETPYLTEKQQSTIVGTRTGASAAATWAIMKHMGREGYRKLALRVMGVTRRLRDGLVELDYQLVVEPELNIVAFNHPAMGPHELADRLEELGWAVSVSSCPPAIRVVLMPHIMEEHIELLLRDLEGIRLREE

SEQ ID NO: 6189 - protein, 468 aa, Methanosarcina acetivorans C2A
MISRKMNLESLDESKKYRVGAYSARYVPKTKEKGIPKYEFPEEGMSPRAAYQLVHDEQSLDGNPFLNLASFVNTWMEPEADKLVMENISKNIIDIFEYPQTSRVIHHNMVNMLGRLFNGHHTDFVGTSTAGSSEAIMLGLLAHKWSWKKSGRGTDKPNIIFGNDAHVCWDKFARYFDVDTRKVPIDKDRRTITAEAVAERIDENTICVGCVLGTTFTGEIDPVKDINDLLLEYKEEKGWDIPIHIDAASGGFILPFTEPDFEWDFRLERVKSINVSGHKYGLTYPGLGWLIFRNKNALPEDLIFHVNYLGEMEDSYTLNFSGGSAMVAAQYYNFLRFGRAGYTGIMKKILAVSQDLAEKVDRLGRFEMLNKGERLPIIAFRQKEKTGYSLLQLSHKLREKGWIVPAYCLPENAADIEIMRIVVRENLTPDMASIIVEDLEKACQFLENGTEAGAEKPCPSGKDMAHIC

SEQ ID NO: 6190 - protein, 464 aa, Clostridium perfringens str. 13
MLFGKNELGSQFETPIFGTVESNESIPKYELAKKSIAPQVAYRLIKDDLLDEGNARQNLCTFCQTYMDDEAVKLMAETLEKNAIDKSEYPQTTDLENRCVNILADLWHAPKDESFMGTSTVGSSEACMLGGMAMKFRWRNRAKALGMDVTSRKPNLVISSGYQVCWEKFCVYWDIEMRLVPMDEEHMSINVDKVLDYVDDYTIGVVGILGITYTGKYDDIKALDKKLEEYNKTAKLTVPMHIDAASGGMFAPFIEPELEWDFRLKNVVSISTSGHKYGLVYPGIGWVLWRDKEYLPQELVFDVSYLGGKIPTMAINFSRSASQIIGQYYNFLRYGFEGYRQIHQRTKDVAMFLASELEKTGLFQIYNNGENLPIVCYKLRDDVNVDWTLYDLADRLLMKGWQVPAYPLPADLQDTIIQRIVCRADLSHNLAELYLRDLKAAIEDLNNARVLNQKSKTGVQGFTH

SEQ ID NO: 6191 - protein, 487 aa, Shigella flexneri 2a str. 301
MLPLRINPTFLLPSNKFKEFEMDQKLLTDFRSELLDSRFGAKAISTIAESKRFPLHEMRDDVAFQIINDELYLDGNARQNLATFCQTWDDENVHKLMDLSINKNWIDKEEYPQSAAIDLRCVNMVADLWHAPAPKNGQAVGTNTIGSSEACMLGGMAMKWRWRKRMEAAGKPTDKPNLVCGPVQICWHKFARYWDVELREIPMRPGQLFMDPKRMIEACDENTIGVVPTFGVTYTGNYEFPQPLHDALDKFQADTGIDIDMHIDAASGGFLAPFVAPDIVWDFRLPRVKSISASGHKFGLAPLGCGWVIWRDEEALPQELVFNVDYLGGQIGTFAINFSRPAGQVIAQYYEFLRLGREGYTKVQNASYQVAAYLADEIAKQGPYEFICTGRPDEGIPAVCFKLKDGEDPGYTLYDLSERLRLRGWQVPAFTLGGEATDIVVMRIMCRRGFEMDFAELLLEDYKASLKYLSDHPKLQGIAQQNSFKHT

SEQ ID NO: 6192 - protein, 489 aa, Shigella flexneri 2a str. 301
MHLLTLSINPTFLMRSNHFKEFKMDKKQVTDLRSELLDSRFGAKSISTIAESKRFPLHEMRDDVAFQIINDELYLDGNARQNLATFCQTWDDENVHKLMDLSINKNWIDKEEYPQSAAIDLRCVNMVADLWHAPAPKNGQAVGTNTIGSSEACMLGGMAMKWRWRKRMEAAGKPTDKPNLVCGPVQICWHKFARYWDVELREIPMRPGQLFMDPKRMIEACDENTIGVVPTFGVTYTGNYEFPQPLHDALDKFQADTGIDIDMHIDAASGGFLAPFVAPDIVWDFRLPRVKSISASGHKFGLAPLGCGWVIWRDEEALPQELVFNVDYLGGQIGTFAINFSRPAGQVIAQYYEFLRLGREGYTKVQNASYQVAAYLADEIAKLGPYEFICTGRPDEGIPAVCFKLKDGEDPGYTLYDLSERLRLRGWQVPAFTLGGEATDIVVMRIMCRRGFEMDFAELLLEDYKASLKYLSDHPKLQGIAQQNSFKHT

SEQ ID NO: 6193 - protein, 165 aa, Shigella flexneri 2a str. 301
MAFIMKNKSGNSCYREAVDIHSSLELSFILHKYHLRVDEKKSRNVFSAIRDELILDGDSRQNLATFCQTWLDDEIRELLNLAIDKNMIYKDEYPQMAEPEGRCVRMLSDSWSFPDSRHTLGCSTIGSSEAAMLGRLALKWQWCKKREVQGKSTEPDLRSCANMLA

SEQ ID NO: 6194 - protein, 466 aa, Shigella flexneri 2a str. 2457T
MDQKLLTDFRSELLDSRFGAKAISTIAESKRFPLHEMRDDVAFQIINDELYLDGNARQNLATFCQTWDDENVHKLMDLSINKNWIDKEEYPQSAAIDLRCVNMVADLWHAPAPKNGQAVGTNTIGSSEACMLGGMAMKWRWRKRMEAAGKPTDKPNLVCGPVQICWHKFARYWDVELREIPMRPGQLFMDPKRMIEACDENTIGVVPTFGVTYTGNYEFPQPLHDALDKFQADTGIDIDMHIDAASGGFLAPFVAPDIVWDFRLPRVKSISASGHKFGLAPLGCGWVIWRDEEALPQELVFNVDYLGGQIGTFAINFSRPAGQVIAQYYEFLRLGREGYTKVQNASYQVAAYLADEIAKQGPYEFICTGRPDEGIPAVCFKLKDGEDPGYTLYDLSERLRLRGWQVPAFTLGGEATDIVVMRIMCRRGFEMDFAELLLEDYKASLKYLSDHPKLQGIAQQNSFKHT

SEQ ID NO: 6195 - protein, 489 aa, Escherichia coli CFT073
MHLLTLSINPTFLMRSNHFKEFKMDKKQVTDLRSELLDSRFGAKSISTIAESKRFPLHEMRDDVAFQIINDELYLDGNARQNLATFCQTWDDDNVHKLMDLSINKNWIDKEEYPQSAAIDLRCVNMVADLWHAPAPKNGQAVGTNTIGSSEACMLGGMAMKWRWRKRMEAAGKPTNKPNLVCGPVQICWHKFARYWDVELREIPMRPGQLFMDPKRMIEACDENTIGVVPTFGVTYTGNYEFPQPLHDALDKFQADTGIDIDMHIDAASGGFLAPFVAPDIVWDFRLPRVKSISASGHKFGLAPLGCGWVIWRDEEALPQELVFNVDYLGGQIGTFAINFSRPAGQVIAQYYEFLRLGREGYTKVQNASYQVAAYLADEIAKLGPYEFICTGRPDEGIPAVCFKLKDGEDPGYTLYDLSERLRLRGWQVPAFTLGGEATDIVVMRIMCRRGFEMDFAELLLEDYKASLKYLSDHPKLQGIAQQNSFKHT

SEQ ID NO: 6196 - protein, 487 aa, Escherichia coli CFT073
MLPLRINPTFLLPSNKFKEFEMDQKLLTDFRSELLDSRFGAKAISTIAESKRFPLHEMRDDVAFQIINDELYLDGNARQNLATFCQTWDDENVHKLMDLSINKNWIDKEEYPQSAAIDLRCVNMVADLWHAPAPKNGQAVGTNTIGSSEACMLGGMAMKWRWRKRMEAAGKPTDKPNLVCGPVQICWHKFARYWDVELREIPMRPGQLFMDPKRMIEACDENTIGVVPTFGVTYTGNYEFPQPLHDALDKFQADTGIDIDMHIDAASGGFLAPFVAPDIVWDFRLPRVKSISASGHKFGLAPLGCGWVIWRDEEALPQELVFNVDYLGGQIGTFAINFSRPAGQVIAQYYEFLRLGREGYTKVQNASYQVAAYLADEIAKLGPYEFICTGRPDEGIPAVCFKLKDGEDPGYTLYDLSERLRLRGWQVPAFTLGGEATDIVVMRIMCRRGFEMDFAELLLEDYKASLKYLSDHPKLQGIAQQNSFKHT

SEQ ID NO: 6197 - protein, 396 aa, Methanocaldococcus jannaschii
MRNMQEKGVSEKEILEELKKYRSLDLKYEDGNIFGSMCSNVLPITRKIVDIFLETNLGDPGLFKGTKLLEEKAVALLGSLLNNKDAYGHIVSGGTEANLMALRCIKNIWREKRRKGLSKNEHPKIIVPITAHFSFEKGREMMDLEYIYAPIKEDYTIDEKFVKDAVEDYDVDGIIGIAGTTELGTIDNIEELSKIAKENNIYIHVDAAFGGLVIPFLDDKYKKKGVNYKFDFSLGVDSITIDPHKMGHCPIPSGGILFKDIGYKRYLDVDAPYLTETRQATILGTRVGFGGACTYAVLRYLGREGQRKIVNECMENTLYLYKKLKENNFKPVIEPILNIVAIEDEDYKEVCKKLRDRGIYVSVCNCVKALRIVVMPHIKREHIDNFIEILNSIKRD

SEQ ID NO: 6198 - protein, 469 aa, Lactobacillus plantarum WCFS1
MAMLYGKHNHEAEEYLEPVFGAPSEQHDLPKYRLPKHSLSPREADRLVRDELLDEGNSRLNLATFCQTYMEPEAVELMKDTLAKNAIDKSEYPRTAEIENRCVNIIANLWHAPDDEHFTGTSTIGSSEACMLGGLAMKFAWRKRAQAAGLDLNAHRPNLVISAGYQVCWEKFCVYWDVDMHVVPMDEQHMALDVNHVLDYVDEYTIGIVGIMGITYTGQYDDLAALDKVVTHYNHQHPKLPVYIHVDAASGGFYTPFIEPQLIWDFRLANVVSINASGHKYGLVYPGVGWVVWRDRQFLPPELVFKVSYLGGELPTMAINFSHSAAQLIGQYYNFIRFGMDGYREIQTKTHDVARYLAAALDKVGEFKMINNGHQLPLICYQLASREDREWTLYDLSDRLLMNGWQVPTYPLPANLEQQVIQRIVVRADFGMNMAHDFMDDLTKAVHDLNHAHIVYHHDAAPKKYGFTH

SEQ ID NO: 6199 - protein, 367 aa, Archaeoglobus fulgidus DSM 4304
MDIIEELRAYREKDIPYSRVLSSMCTVPHPVAVEAHRMFIETNLGDPGIFRGTVELEAKLMRLIGDILHCETPAGYICSGGTEANIQGIRAARNVQKKENPNIVIPKTAHFSFEKIGDILGVKIKRAGVDEEYKVDVGQVEDLMDENTVAIVGIAGTTELGQIDPIVELSKLAEERQVELHVDAAFGGLVIPFMDNPYPFDFQNRGVSSITIDPHKMGMATIPAGGIIFRNESYLRALEVETPYLTSKTQFTLTGTRPGTGVASAYAVLKSLGFEGMREVVKNCLKNTRILVEEMRDLGFEPVIEPVMNVVSFRTDEAERIKEELYRMRWVISTIREPKAIRFVVMPHVTEEVIKNFISDFRKVLRR

SEQ ID NO: 6200 - protein, 304 aa, Brucella melitensis 16M
MCWHKFARYWDVEIREIPMEPGRLFMGPEQMLEAVDENTIGVVPTFGVTYTGNYEFPEPLQDALDKLQKTKGLDIDIHVDAASGGFLAPFCAPDIPWDFRLPRVKSISASGHKYGLAPLGCGWVVWRDKEALPEELIFNVDYLGGQVGTFAINFSRPAGQVISQYYEFMRLGREGYTKVQQAAYRVAQYIAREIEPLGPYEFICAGEEKGGIPAVCFRIREGEDPGYSLYDLSERLRLTGWQVPAFALSGKASDITVMRVMCRRGFEMDLAALFIRDFKAGIEFFKSHPSPKITPSMGTGFHHT

SEQ ID NO: 6201 - protein, 167 aa, Brucella melitensis 16M
MKITLEVIMTGSNYPARDLIASVFGTEALQEIAASRGFREKEMQANAVYQIIHDELFLDGNARQNLATFCQTWDDDYVHKLMDLSINKNWIDKEEYPQSAAIDLRCVNMVADLWNAPKFADNATGTNTIGSSEACMLGGMAMKWRWRKKMQEMGKPTDKPNFVCGPV

SEQ ID NO: 6202 - protein, 481 aa, Bacteroides thetaiotaomicron VPI-5482
MEDLNFRKGDAKTDVFGSDRMLQPSPVERIPDGPTTPEVAYQMVKDETFAQTQPRLNLATFVTTYMDDYATKLMNEAININYIDETEYPRIAVMNGKCINIVANLWNSPEKDTWKTGALAIGSSEACMLGGVAAWLRWRKKRQAQGKPFDKPNFVISTGFQVVWEKFAQLWQIEMREVPLTLEKTTLDPEEALKMCDENTICVVPIQGVTWTGLNDDVEALDKALDAYNAKTGYDIPIHVDAASGGFILPFLYPDTKWDFRLKWVLSISVSGHKFGLVYPGLGWVCWKGKEYLPEEMSFSVNYLGANITQVGLNFSRPAAQILGQYYQFIRLGFQGYKEVQYNSLQIAKYIHGEIAKMAPFVNYSENVVNPLFIWYLKPEYAKSAKWTLYDLQDKLSQHGWMVPAYTLPSKLEDYVVMRVVVRQGFSRDMADMLLGDIKNAIAELEKLDFPTPTRMAQEKNLPVEAKMFNHGGRRHKTVKK

SEQ ID NO: 6203 - protein, 470 aa, Streptomyces avermitilis MA-4680
MPLHKGPVKSDERPMSFNPFFGEANPVSGMTEAPPKHRLADGPLPPSTAYQLVHDELMLDGNARLNLATFVTTWMEPQAGVLMAECQDKNMIDKDEYPRTAELEKRCVAMLADLWNAPDAGAAVGCSTTGSSEACMLAGLALKRRWARRNADRYPARDVRPNLVMGINVQVCWEKFCNFWEVEMRQVPLEGERYHLDPGAAAELCDENTIGVVGILGSTFDGSYEPIAELCAALDALQERTGLDIPVHVDGASGAMIAPFLDEDLVWDFRLPRVASINTSGHKYGLVSPGVGWALWRDSEALPEELVFRVNYLGGNMPTFALNFSRPGAQVVAQYYTFLRLGREGFRAVQQTTRNVARSLAERVAALGDFHLLTRGDELPVFAFTTAPEVASYDVFDVSRRMREHGWLVPAYTFPPNREDLSVLRVVCRNGFSTDLAELFVEDLSRLLPDLRRQARPQTHDKDAATGFHH

SEQ ID NO: 6204 - protein, 454 aa, Streptomyces avermitilis MA-4680
MTKRDVAALFGNRFLTEPAPSQTFPEEGMTATDTMRLLDEDLVMEGDPQRNLATFVTTWMEPEAQRIIAENLHRNFIDHAEYPISAEIEQRCVRMLADLFHAPGKTTGCRTQGSSEAIMLGALSLKWKWRERRQAANLPADRPNLVFGGDVHVVWEKFCRYFDVEPRIVPLAEDKYTIGPEDVEPHIDENTIGVVAVVGTTFTGHKDDVVGIDKLLRDVRKERDLDIPIHVDGASGGFVWPFLYPDSKWDFRLEQVRSINVSGHKYGLVYPGIGWLVFREESDLAKDLVFYENYLGKTDATFTLNFSTGASMVLAQYYNFVRLGRQGYTYVMETMQKNAHALADNLRSSGRFEVIGSDLEQLPLVAFRLAGEHAYDESDIAWQLSAERGWMVPAYTLPPNAERVKILRALVKETLSREQIERLTQDIADACATLDHKGGTTEVERAQIKRGTGY

SEQ ID NO: 6205 - protein, 502 aa, Arabidopsis thaliana
MVLSHAVSESDVSVHSTFASRYVRTSLPRFKMPENSIPKEAAYQIINDELMLDGNPRLNLASFVTTWMEPECDKLIMSSINKNYVDMDEYPVTTELQNRCVNMIAHLFNAPLEEAETAVGVGTVGSSEAIMLAGLAFKRKWQNKRKAEGKPVDKPNIVTGANVQVCWEKFARYFEVELKEVKLSEGYYVMDPQQAVDMVDENTICVAAILGSTLNGEFEDVKLLNDLLVEKNKETGWDTPIHVDAASGGFIAPFLYPELEWDFRLPLVKSINVSGHKYGLVYAGIGWVIWRNKEDLPEELIFHINYLGADQPTFTLNFSKGSSQVIAQYYQLIRLGHEGYRNVMENCRENMIVLREGLEKTERFNIVSKDEGVPLVAFSLKDSSCHTEFEISDMLRRYGWIVPAYTMPPNAQHITVLRVVIREDFSRTLAERLVIDIEKVMRELDELPSRVIHKISLGQEKSESNSDNLMVTVKKSDIDKQRDIITGWKKFVADRKKTSGIC

SEQ ID NO: 6206 - protein, 502 aa, Arabidopsis thaliana
MVLSHAVSESDVSVHSTFASRYVRTSLPRFKMPENSIPKEAAYQIINDELMLDGNPRLNLASFVTTWMEPECDKLIMSSINKNYVDMDEYPVTTELQNRCVNMIAHLFNAPLEEAETAVGVGTVGSSEAIMLAGLAFKRKWQNKRKAEGKPVDKPNIVTGANVQVCWEKFARYFEVELKEVKLSEGYYVMDPQQAVDMVDENTICVADILGSTLNGEFEDVKLLNDLLVEKNKETGWDTPIHVDAASGGFIAPFLYPELEWDFRLPLVKSINVSGHKYGLVYAGIGWVIWRNKEDLPEELIFHINYLGADQPTFTLNFSKGSSQVIAQYYQLIRLGHEGYRNVMENCRENMIVLREGLEKTERFNIVSKDEGVPLVAFSLKDSSCHTEFEISDMLRRYGWIVPAYTMPPNAQHITVLRVVIREDFSRTLAERLVIDIEKVMRELDELPSRVIHKISLGQEKSESNSDNLMVTVKKSDIDKQRDIITGWKKFVADRKKTSGIC

SEQ ID NO: 6207 - protein, 494 aa, Arabidopsis thaliana
MVLATNSDSDEHLHSTFASRYVRAVVPRFKMPDHCMPKDAAYQVINDELMLDGNPRLNLASFVTTWMEPECDKLIMDSVNKNYVDMDEYPVTTELQNRCVNMIANLFHAPVGEDEAAIGCGTVGSSEAIMLAGLAFKRKWQHRRKAQGLPIDKPNIVTGANVQVCWEKFARYFEVELKEVKLSEDYYVMDPAKAVEMVDENTICVAAILGSTLTGEFEDVKQLNDLLAEKNAETGWETPIHVDAASGGFIAPFLYPDLEWDFRLPWVKSINVSGHKYGLVYAGVGWVVWRTKDDLPEELVFHINYLGADQPTFTLNFSKGSSQIIAQYYQFIRLGFEGYKNIMENCMDNARRLREGIEMTGKFNIVSKDIGVPLVAFSLKDSSKHTVFEIAESLRKFGWIIPAYTMPADAQHIAVLRVVIREDFSRGLADRLITHIIQVLKEIEGLPSRIAHLAAAAAVSGDDEEVKVKTAKMSLEDITKYWKRLVEHKRNIVC

SEQ ID NO: 6208 - protein, 494 aa, Arabidopsis thaliana
MVLATNSDSDEHLHSTFASRYVRAVVPRFKMPDHCMPKDAAYQVINDELMLDGNPRLNLASFVTTWMEPECDKLIMDSVNKNYVDMDEYPVTTELQNRCVNMIANFFHAPVGEDEAAIGCGTVGSSEAIMLAGLAFKRKWQHRRKAQGLPIDKPNIVTGANVQVCWEKFARYFEVELKEVKLSEDYYVMDPAKAVEMVDENTICVAAILGSTLTGEFEDVKQLNDLLAEKNAETGWETPIHVDAASGGFIAPFLYPDLEWDFRLPWVKSINVSGHKYGLVYAGVGWVVWRTKDDLPEELVFHINYLGADQPTFTLNFSKGSSQIIAQYYQFIRLGFEGYKNIMENCMDNARRLREGIEMTGKFNIVSKDIGVPLVAFSLKDSSKHTVFEIAESLRKFGWIIPAYTMPADAQHIAVLRVVIREDFSRGLADRLITHIIQVLKEIEGLPSRIAHLAAAAAVSGDDEEVKVKTAKMSLEDITKYWKRLVEHKRNIVC

SEQ ID NO: 6209 - protein, 494 aa, Arabidopsis thaliana
MVLTKTATNDESVCTMFGSRYVRTTLPKYEIGENSIPKDAAYQIIKDELMLDGNPRLNLASFVTTWMEPECDKLIMDSINKNYVDMDEYPVTTELQNRCVNIIARLFNAPLEESETAVGVGTVGSSEAIMLAGLAFKRKWQNKRKAEGKPYDKPNIVTGANVQVCWEKFARYFEVELKEVNLSEGYYVMDPDKAAEMVDENTICVAAILGSTLNGEFEDVKRLNDLLVKKNEETGWNTPIHVDAASGGFIAPFIYPELEWDFRLPLVKSINVSGHKYGLVYAGIGWVVWRAAEDLPEELIFHINYLGADQPTFTLNFSKGSSQIIAQYYQLIRLGFEGYKNVMENCIENMVVLKEGIEKTERFNIVSKDQGVPVVAFSLKDHSFHNEFEISEMLRRFGWIVPAYTMPADAQHITVLRVVIREDFSRTLAERLVADISKVLHELDTLPSKISKKMGIEGIAENVKEKKMEKEILMEVIVGWRKFVKERKKMNGVC

SEQ ID NO: 6210 - protein, 494 aa, Arabidopsis thaliana
MVLTKTATNDESVCTMFGSRYVRTTLPKYEIGENSIPKDAAYQIIKDELMLDGNPRLNLASFVTTWMEPECDKLIMDSINKNYVDMDEYPVTTELQNRCVNIIARLFNAPLEESETAVGVGTVGSSEAIMLAGLAFKRKWQNKRKAEGKPYDKPNIVTGANVQVCWEKFARYFEVELKEVNLSEGYYVMDPDKAAEMVDENTICVAAILGSTLNGEFEDVKRLNDLLVKKNEETGWNTPIHVDAASGGFIAPFIYPELEWDFRLPLVKSINVSGHKYGLVYAGIGWVVWRAAEDLPEELIFHINYLGADQPTFTLNFSKGSSQIIAQYYQLIRLGFEGYKNVMENCIENMVVLKEGIEKTERFNIVSKDQGVPVVAFSLKDHSFHNEFEISEMLRRFGWIVPAYTMPADVQHITVLRVVIREDFSRTLAERLVADISKVLHELDTLPSKISKKMGIEGIAENVKEKKMEKEILMEVIVGWRKFVKERKKMNGVC

SEQ ID NO: 6211 - protein, 500 aa, Arabidopsis thaliana
MVLSKTASKSDDSIHSTFASRYVRNSISRFEIPKNSIPKEAAYQIINDELKFDGNPRLNLASFVTTWMEPECDKLMMESINKNNVEMDQYPVTTDLQNRCVNMIARLFNAPLGDGEAAIGVGTVGSSEAVMLAGLAFKRQWQNKRKALGLPYDRPNIVTGANIQVCLEKFARYFEVELKEVKLREGYYVMDPDKAVEMVDENTICVVAILGSTLTGEFEDVKLLNDLLVEKNKKTGWDTPIHVDAASGGFIAPFLYPDLEWDFRLPLVKSINVSGHKYGLVYAGIGWVVWRTKTDLPDELIFHINYLGADQPTFTLNFSKGSSQVIAQYYQLIRLGFEGYRNVMDNCRENMMVLRQGLEKTGRFNIVSKENGVPLVAFSLKDSSRHNEFEVAEMLRRFGWIVPAYTMPADAQHVTVLRVVIREDFSRTLAERLVADFEKVLHELDTLPARVHAKMASGKVNGVKKTPEETQREVTAYWKKFVDTKTDKNGVPLVASITNQ

SEQ ID NO: 6212 - protein, 493 aa, Arabidopsis thaliana
MVLSKTVSESDVSIHSTFASRYVRNSLPRFEMPENSIPKEAAYQIINDELMLDGNPRLNLASFVTTWMEPECDKLMMESINKNYVDMDEYPVTTELQNRCVNMIARLFNAPLGDGEAAVGVGTVGSSEAIMLAGLAFKRQWQNKRKAQGLPYDKPNIVTGANVQVCWEKFARYFEVELKEVNLREDYYVMDPVKAVEMVDENTICVAAILGSTLTGEFEDVKLLNDLLVEKNKQTGWDTPIHVDAASGGFIAPFLYPELEWDFRLPLVKSINVSGHKYGLVYAGIGWVVWRTKTDLPDELIFHINYLGADQPTFTLNFSKGSSQVIAQYYQLIRLGFEGYRNVMDNCRENMMVLRQGLEKTGRFKIVSKENGVPLVAFSLKDSSRHNEFEVAHTLRRFGWIVPAYTMPADAQHVTVLRVVIREDFSRTLAERLVADFEKVLHELDTLPARVHAKMANGKVNGVKKTPEETQREVTAYWKKLLETKKTNKNTIC

SEQ ID NO: 6213 - protein, 419 aa, Arabidopsis thaliana
MDSINKNYVDMDEYPVTTELQNRCVNIIARLFNAPLEESETAVGVGTVGSSEAIMLAGLAFKRKWQNKRKAEGKPYDKPNIVTGANVQVCWEKFARYFEVELKEVNLSEGYYVMDPDKAAEMVDENTICVAAILGSTLNGEFEDVKRLNDLLVKKNEETGWNTPIHVDAASGGFIAPFIYPELEWDFRLPLVKSINVSGHKYGLVYAGIGWVVWRAAEDLPEELIFHINYLGADQPTFTLNFSKGSSQIIAQYYQLIRLGFEGYKNVMENCIENMVVLKEGIEKTERFNIVSKDQGVPVVAFSLKDHSFHNEFEISEMLRRFGWIVPAYTMPADAQHITVLRVVIREDFSRTLAERLVADISKVLHELDTLPSKISKKMGIEGIAKNVKEKKMEKEILMEVIVGWRKFVKERKKMNGVC

SEQ ID NO: 6214 - protein, 194 aa, Arabidopsis thaliana
MTGTGQKLNIRRRVGEVNSLSFCCLSPTPTSLDNRCVNMIANLFHAPVGQDEAVISCGIVASSESAGLAFKMKWQHRRKAQGLPIDKPNIVTGVNVQVCWEKFARYFEVELKEVKLSEDYYVMDPAKAVEMVDENSICVAAILGSTFTGEFEYVKLLNDLLAEKNAKTAWETPIHVDAASGGFIASMGEEYQCQ

SEQ ID NO: 6215 - protein, 177 aa, Arabidopsis thaliana
MTGTGQKLNIRRRVGENRCVNMIANLFHAPVGQDEAVISCGIVASSESAGLAFKMKWQHRRKAQGLPIDKPNIVTGVNVQVCWEKFARYFEVELKEVKLSEDYYVMDPAKAVEMVDENSICVAAILGSTFTGEFEYVKLLNDLLAEKNAKTAWETPIHVDAASGGFIASMGEEYQCQ

SEQ ID NO: 6216 - protein, 499 aa, Glycine max
  unsure (1)..(499): unsure at all Xaa locations
MVFPKPSSESDLFLCSNFASHYARDSLPRFSMPENSMPKEAAYQNIHDELQLDAIPKLNLASFVTTSMEEECNKLIMESINKNYVDMDEYPATTDLHNRCVNMIARMFHAEIGENENATGAGTVGSSEAIMLAGLAFKKKWQNKRKAEGKPYDKPNLVTGSNVQVCWEKFARYFEVELREVEVREGYYVMDPAKAVELVDENTICVAAILGSTYNGEFEDVKLLNDLLLEKNKQTGWDTPIHVDAASGGFIAPFLYPELEWDFRLPLVKSINVSGHKYGLVYAGIGWVIWRTKDDLPEDLVFHINYLGADQPTFTLNFSKGSSQIIAQYYQLIRLGHEGYRSIMENCRDNAMVLKESLEKSGHFNILSKDNGVPVVAFSLKDRSQYDEYKISEMLRRHGWIVPAYPMPPAAQHINVLRVVIRAEFSRTLAERLVFDIYNVLHELEKLHPPKVTNFIKEENKALVETGVKKTALDAHRXNHCSRIKQASENYGCLTHYVN

SEQ ID NO: 6217 - protein, 504 aa, Glycine max
  unsure (1)..(504): unsure at all Xaa locations
MVLSKTASETDVSVHSTFASRYVRTSLPRFKMAEESIPKEAAYQIIHDELMLDGNPRLNLASFVTTWMEPECDKLIMAAINKNYVDMDEYPVTTELQNRCVNMIAHLFNAPLEESETAVGVGTVGSSEAIMLAGLAFKRRWQNRRKLEGKPYDNPNIVTGANVQVCWEKFARYFEVELKEVKLRDGYYVMDPEKAVEMVDENTICVAAILGSTLNGEFEDVKLLNDLLVEKNKETGWDTPIHVDAASGGFIAPFLYPELEWDFRLPLVKSINVSGHKYGLVYAGIGWVIWRSKEDLPEELIFHINYLGADQPTFTLNFSKGSSQVIAQYYQLIRLGYEGYKMVMENCNDNMAVLKEGLEKTGRFEIISKDIGVPLVAFTLKDHTHFNEFQISDMLRRYGWIVPAYTMPPDAQHVTVLRVVIREDFSRTLAERLVIDVTKVVHELDLLPARVIXHQHHNGYRRSRXEENDEKVLFAKKSEIETQREITKAWKKFVMDRKKMNGVC

SEQ ID NO: 6218 - protein, 504 aa, Glycine max
  unsure (1)..(504): unsure at all Xaa locations
MVLSKTASETDVSVHSTFASRYVRTSLPRFKMAEESIPKEAAYQIIHDELMLDGNPRLNLASFVTTWMEPECDKLIMAAINKNYVDMDEYPVTTELQNRCVNMIAHLFNAPLEESETAVGVGTVGSSEAIMLAGLAFKRRWQNRRKLEGKPYDNPNIVTGANVQVCWEKFARYFEVELKEVKLRDGYYVMDPEKAVEMVDENTICVAAILGSTLNGEFEDVKLLNDLLVEKNKETGWDTPIHVDAASGGFIAPFLYPELEWDFRLPLVKSINVSGHKYGLVYAGIGWVIWRSKEDLPEELIFHINYLGADQPTFTLNFSXGSSQVIAQYYQLIRLGYEGYKMVMENCNDNMAVLKEGLEKTGRFEIISKDIGVPLVAFTLKDHTHFNEFQISDMLRRYGWIVPAYTMPPDAQHVTVLRVVIREDFSRTLAERLVIDVTKVVHELDLLPARVIXHQHHNGYRRSRXEENDEKVLFAKKSEIETQREITKAWKKFVMDRKKMNGVC

SEQ ID NO: 6219 - protein, 500 aa, Glycine max
  unsure (1)..(500): unsure at all Xaa locations
MVLTSTATHPDEQDQSLNYTFASRYVREPIPKFKMPEKSIPKDAAYQIINDELMLDGAPRLNLASFVTTWMEPECDKLIMASLNKNYVDMDEYPVTTELQNRCVNIIANLFHAPISDDETAVGVGTVGSSEAIMLAGLAFKRKWQTKRKAEGKPYDKPNIVTGANVQVCWEKFARYFEVELKEVKLKEGYYVMDPAKAVEMVDENTICVAAILGSTMTGEFEDVKLLDELLTKKNNETGWDTPIHVDAASGGFIAPFLYPDLEWDFRLPLVKSINVSGHKYGLVYPGVGWVVWRSKDDLPDELVFHINYLGSDQPTFTLNFSKGSSQIIAQYYQLIRLGFEGYKNIMENCWENARVLKEGIERTGRFNIISKDIGVPLVAFSLKDSSQHTVFEIADHLRKFGWIVPAYTMPPDAQHIAVLRVVIREDFSRGLAERLAADIEKVAKLLDTLPSPLTTKAVHITAITSETGEKIKXXAAIETQKEIAFYWKRLVDGKRLGAC

SEQ ID NO: 6220 - protein, 505 aa, Glycine max
  unsure (1)..(505): unsure at all Xaa locations
MVLSKTTSESDVSVHSTFASRYVRTSLPRFKMPEESIPKEAAYQIINDELMLDGNPRLNLXASFVTTWMEPECDKLIMAAINKNYVDMDEYPVTTELQNRCVNMIAHLFNAPLEETEAAVGVGTVGSSEAIMLAGLAFKRKWQNRRKQEGKPFDKPNIVTGANVQVCWEKFARYFEVELKEVKLRDDYYVMDPEKAVELVDENTICVAAILGSTLNGEFEDVKRLNDLLIEKNKITGWDTPIHVDAASGGXFIAPFLYPELEWDFRLPLVKSINVSGHKYGLVYAGIGWVIWRSKEDLPEELIFHINYLGADQPTFTLNFSKGSSQVIAQYYQLIRLGFEGYRNVMENCRDNMLVLKEGLEKTGRFSIVSKDNGVPLVAFTLKDHTHFDEFQISDFLRRFGWIVPAYTMPPDAQHVTVLRVVIREDFSRTLAERLVADVEKVLHELDSLPARVISSTSVTVTAEENGKVVVAKKSAMETQREITAIWKKFVLERKKNNDKMNGVC

SEQ ID NO: 6221 - protein, 506 aa, Glycine max
  unsure (1)..(506): unsure at all Xaa locations
MVLSKTASESDVSVHSTFASRYVRTSLPRFKMAEESIPKEAAYQIINDELMLDGNPRLNLASFVTTWMEPECDKLIMAAINKNYVDMDEYPVTTELQNRCVNMIAHLFNAPLEETEAAVGVGTVGSSEAIMLAGLAFKRKWQNRRKQEGKPYDKPNIVTGANVQVCWEKFARYFEVELKXEVKLRDDYYVMDPEKAVELVDENTICVAAILGXSTLNGEFEDVKRLNDLLIEKNKITGWDTPIHVDAASGGFIAPFIYPELEWDFRLQLVKSINVSGHKYGLVYAGIGWVIWRSKQDLPEELIFHINYLGADQPTFTLNFSKGSSQVIAQYYQLIRLGFEGYRNVMENCRDNSLVLKEGLEKTGRFSIVSKDNGVPLVAFTLKDHTHFDEFQISDFLRRFGWIVPAYTMPPDAQHVTVLRVVIREDFSRTXLAERLVSDVEKVLHELDSLPARVISSTTVTLSAEENGKVVVAKKNPMETQREITAIWKKFVLERKKNNDKMNGVC

SEQ ID NO: 6222 - protein, 343 aa, Glycine max
  unsure (1)..(343): unsure at all Xaa locations
VEESIKQIYELVSIETRLISLFVMKMLXSRFKMPEKSIPKDAAFQIINDELMLDGAPRLNLASFVTTWMEPECDKLIMASLNKNYVDMDEYPVTTELQNRCVNIIANLFHAPISEEETAVGVGTVGSSEAIMLAGLAFKRKWQTKRKAEGKPYDKPNIVTGANVQVCWEKFARYFEVELKEVKLKEGYYVMDPAKAVEMVDENTICVAAILGSTMTGEFEDVKLLNELLTEKNKETGWDTPIHVDAASGGFIAPFLYPDLEWDFRLPLVKSINVSGHKYGLVYPGVGWVVWRSKDDLPDELVFHINYLGSDQPTFTLNFSKGSSQIIAQYYQLIRLGFEGYKX

SEQ ID NO: 6223 - protein, 253 aa, Glycine max
  unsure (1)..(253): unsure at all Xaa locations
MVLTSTATHPDEQDQSLNYTFASRYVREPIPKFKMPEKSIPKDAAYQIINDELMLDGAPRLNLASFVTTWMEPECDKLIMASLNKNYVDMDEYPVTTELQNRCVNIIANLFHAPISDDETAVGVGTVGSSEAIMLAGLAFKRKWQTKRKAEGKPYDKPNIVTGANVQVCWEKFARYFEVELKEVKLKEGYYVMDPAKAVEMVDENTICVAAILGSTMTGEFEDVKLLDELLTKKNXETGWDTPIHVDAARGGV

SEQ ID NO: 6224 - protein, 202 aa, Glycine max
  unsure (1)..(202): unsure at all Xaa locations
MVLTSTATHPDEKDQSLNSTFASRYVRDPIPKFKMPEKSIPKDAAFQIINDELMLDGAPRLNLASFVTTWMEPECDKLIMASLNKNYVDMDEYPVTTELQNRCVNIIANLFHAPISEEETAVGVGTVGSSEAIMLAGLAFKRKWQTKRKAEGKPYDKPNIVTGANVQVCWEKXFARYFEVELKEVKLKEGYYVMDPAKAVKX

SEQ ID NO: 6225 - protein, 147 aa, Glycine max
  unsure (1)..(147): unsure at all Xaa locations
WVCNFLTSRSITSVHSALEAQFLPPPILLTCSTKILFLLFTSSSEAIMLAGLAFKRKWQNRRKQEGKPFDKPNIVTGANVQVCWEKFARYFEVELKEVKLRDDYYVMDPEKAVELVDENTICVAAILGSTLNGEFEDVKRLNDLLIX

SEQ ID NO: 6226 - protein, 163 aa, Glycine max
  unsure (1)..(163): unsure at all Xaa locations
MVRSKTAYQTDVSDHSTFAYRYDRTYLARDKIAEESILEEAAYQIIHDQLMLDGNSRLNLAAFETTWMEPERDKVIVADIDKNDDHMDEDPVSTELQNRSXNMIPHLFNAPLXEXHTAIGGGTVGSSEAIMWDGLAFHRXWRNRKTLDGKPYDIPNIVTGANX

SEQ ID NO: 6227 - protein, 81 aa, Glycine max
  unsure (1)..(81): unsure at all Xaa locations
VKQLNDLLTEKNKDTGWDVPIHVDAAIGGFIAPFLYPELEWDFRLPLVKSINVSGHKYGLVYPGVGWVIWRSKDDLPEELX

SEQ ID NO: 6228 - protein, 125 aa, Glycine max
VVAFTLTNKFHKEFPHVKQKAVSNLLRAKQYIIPNYPLPPGEEKTEILRVVVRKSLSLTMIDRLVTDICGVTEMLMHKTDAVDLSAFQPGASPSIEKQHANKGLRKEHKHKAQRPSSDGVYRTVC

SEQ ID NO: 6229 - protein, 501 aa, Oryza sativa (japonica cultivar-group)
MVVSVAATDSDTAQPVQYSTFFASRYVRDPLPRFRMPEQSIPREAAYQIINDELMLDGNPRLNLASFVTTWMEPECDKLIMDSVNKNYVDMDEYPVTTELQNRCVNMIAHLFNAPIKEDETAIGVGTVGSSEAIMLAGLAFKRKWQNKRKEQGKPCDKPNIVTGANVQVCWEKFARYFEVELKEVKLSEGYYVMDPVKAVEMVDENTICVAAILGSTLTGEFEDVKLLNNLLTEKNKETGWDVPIHVDAASGGFIAPFLYPELEWDFRLPLVKSINVSGHKYGLVYPGVGWVIWRSKEDLPEELIFHINYLGTDQPTFTLNFSKGSSQIIAQYYQLIRLGFEGYKNIMQNCMENTAILREGIEATGRFEILSKEAGVPLVAFSLKDSGRYTVFDISEHLRRFGWIVPAYTMPANAEHVAVLRVVIREDFSRSLAERLVSDIVKILHELDAHSAQVLKISSAIAKQQSGDDGVVTKKSVLETEREIFAYWRDQVKKKQTGIC

SEQ ID NO: 6230 - protein, 513 aa, Oryza sativa (japonica cultivar-group)
MVLSHGVSGSDESVHSTFASRYVRTSLPRHARSPLSRAPLAPIDSVIDWEFRMPEQSIPKEAAYQIINDELMLDGNPRLNLASFVTTWMEPECDKLIQASVNKNYVDMDEYPVTTELQNRCVNMIAHLFNAPLGDSETAVGVGTVGSSEAIMLAGLAFKRRWQNKMKAAGKPCDKPNIVTGANVQVCWEKFARYFEVELKEVKLSDGYYVMDPAKAVDMVDENTICVAAILGSTLNGEFEDVKLLNDLLTKKNAETGWDTPIHVDAASGGFIAPFLYPELEWDFRLPLVKSINVSGHKYGLVYAGIGWCIWRSKEDLPEELIFHINYLGADQPTFTLNFSKGSSQVIAQYYQLIRLGFEGYKNIMENCQENAMVLKQGLEKTGRFNIVSKDNGVPLVAFSLKDSARHNEFEISDFLRRFGWIVPAYTMPPDAQHVTVLRVVIREDFSRTLAERLVLDVEKVLHELDALPARVVANGGDAAAASASEREMEKQREVISLWKRAVLAKKKTNGVC

SEQ ID NO: 6231 - protein, 492 aa, Oryza sativa (japonica cultivar-group)
MVLSKAVSESDMSVHSTFASRYVRASLPRYRMPENSIPKEAAYQIINDELMLDGNPRLNLASFVTTWMEPECDKLIMAAINKNYVDMDEYPVTTELQNRCVNMIAHLFHAPLGEDETAVGVGTVGSSEAIMLAGLAFKRRWQNKRKAEGKPFDKPNIITGANVQVCWEKFARYFEVELKEVKLRDGYYVMDPEKAVDMVNENTICVAAILGSTLNGEFEDVKLLNDLLDKKNKETGWETPIHVDAASGGFIAPFLYPELEWDFRLPWVKSINVSGHKYGLVYAGIGWCIWRNKEDLPEELIFHINYLGTDQPTFTLNFSKGSSQVIAQYYQLIRHGFEGYRNIMENCHENAMVLKEGLVKTGRFDIVSKDEGVPLVAFSLKDRSRHDEFEISDMLRRFGWIVPAYTMPPDAQHVTVLRVVIREEFSRTLAERLVLDIEKVMYQLDALPSRLMPPVPPAPLLVVAKKSELETQRSVTEAWKKFVLAKRTNGVC

SEQ ID NO: 6232 - protein, 484 aa, Oryza sativa (japonica cultivar-group)
MALSTAQTGESMHSSTFASRYVRTALPRFRMPEKSIPKDAAYQIINDELMLDGNPRLNLASFVTTWMEPECDKLMMAAINKNYVDMDEYPVTTELQNRCVNMIAHLFNAPIGDDETAVGVGTVGSSEAIMLAGLAFKRKWQNRMKAEGKPHDKPNIVTGANVQVCWEKFARYFEVELKEVKLTQGYYVMNPEKAVEMVDENTICVAAILGSTLNGEFEDVKMLNDLLTAKNAETGWNTPIHVDAASGGFIAPFIYPELEWDFRLPLVKSINVSGHKYGLVYAGVGWVIWRNKEDLPDELIFHINYLGADQPTFTLNFSKGSNQIIAQYYQLIRLGFEGYKDIMQNCRDNATVLREGIEKTGHFDVVSKDSGVPLVAFSLKDSSRYTVFEVAESLRRFGWIVPAYTMPADAEHVAVMRVVIREDFSRGLAERLITDLTKTVADMDAHAVKKAAAEPAKKTVREIEKEVTTYWRSFVARKKSSLVC

SEQ ID NO: 6233 - protein, 500 aa, Oryza sativa (japonica cultivar-group)
MVLTHVEAVEEGSEAAAAVFASRYVQDPVPRYELGERSISKDAAYQIVHDELLLDSSPRLNLASFVTTWMEPECDRLILEAINKNYADMDEYPVTTELQNRCVNIIARLFNAPVGDGEKAVGVGTVGSSEAIMLAGLAFKRRWQNRRKAAGKPHDKPNIVTGANVQVCWEKFARYFEVELKEVKLTEGCYVMDPVKAVDMVDENTICVAAILGSTLTGEFEDVRRLNDLLAAKNKRTGWDTPIHVDAASGGFIAPFIYPELEWDFRLPLVKSINVSGHKYGLVYAGVGWVIWRNKEDLPEELIFHINYLGADQPTFTLNFSKGSSQIIAQYYQFLRLGFEGYKSVMKNCMESARTLREGLEKTGRFTIISKEEGVPLVAFTFKDGAGAQAFRLSSGLRRYGWIVPAYTMPAALEHMTVLRVVVREDFGRPLAERFLSHVRMALDEMDLAARAPVPRVQLTIELGPARTAGEEASIRVVKSEAVPVRKSVPLVAGKTKGVC

SEQ ID NO: 6234 - protein, 500 aa, Oryza sativa (japonica cultivar-group)
MVLTHVEAVEEGSEAAAAVFASRYVQDPVPRYELGERSISKDAAYQIVHDELLLDSSPRLNLASFVTTWMEPECDRLILEAINKNYADMDEYPVTTELQNRCVNIIARLFNAPVGDGEKAVGVGTVGSSEAIMLAGLAFKRRWQNRRKAAGKPHDKPNIVTGANVQVCWEKFARYFEVELKEVKLTEGCYVMDPVKAVDMVDENTICVAAILGSTLTGEFEDVRRLNDLLAAKNKRTGWDTPIHVDAASGGFIAPFIYPELEWDFRLPLVKSINVSGHKYGLVYAGVGWVIWRNKEDLPEELIFHINYLGADQPTFTLNFSKGSSQIIAQYYQFLRLGFEGYKSVMKNCMESARTLREGLEKTGRFTIISKEEGVPLVAFTFKDGAGAQAFRLSSGLRRYGWIVPAYTMPAALEHMTVVRVVVREDFGRPLAERFLSHVRMALDEMDLAARAPVPRVQLTIELGPARTAGEEASIRVVKSEAVPVRKSVPLVAGKTKGVC

SEQ ID NO: 6235 - protein, 502 aa, Lycopersicon esculentum
MVLTTTSIRDSEESLHCTFASRYVQEPLPKFKMPKKSMPKEAAYQIVNDELMLDGNPRLNLASFVSTWMEPECDKLIMSSINKNYVDMDEYPVTTELQNRCVNMLAHLFHAPVGDDETAVGVGTVGSSEAIMLAGLAFKRKWQSKRKAEGKPFDKPNIVTGANVQVCWEKFARYFEVELKEVKLKEGYYVMDPAKAVEIVDENTICVAAILGSTLTGEFEDVKLLNELLTKKNKETGWETPIHVDAASGGFIAPFLWPDLEWDFRLPLVKSINVSGHKYGLVYAGVGWVIWRSKEDLPDELVFHINYLGSDQPTFTLNFSKGSYQIIAQYYQLIRLGFEGYKNVMKNCLSNAKVLTEGITKMGRFDIVSKDVGVPVVAFSLRDSSKYTVFEVSEHLRRFGWIVPAYTMPPDAEHIAVLRVVIREDFSHSLAERLVSDIEKILSELDTQPPRLPTKAVRVTAEEVRDDKGDGLHHFHMDTVETQKDIIKHWRKIAGKKTSGVC

SEQ ID NO: 6236 - protein, 496 aa, Nicotiana tabacum
MVLSKTASESDVSIHSTFASRYVRTSLPRFKMPENSIPKEAAYQIINDELMLDGNPRLNLASFVTTWMEPECNKLMMDSINKNYVDMDEYPVTTELQNRCVNMIAHLFNAPLGDGETAVGVGTVGSSEAIMLAGLAFKRKWQNKMKAQGKPCDKPNIVTGANVQVCWEKFARYFEVELKEVKLSDGYYVMDPEKAVEMVDENTICVAAILGSTLNGEFEDVKRLNDLLIEKNKETGWDTPIHVDAASGGFIAPFLYPELEWDFRLPLVKSINVSGHKYGLVYAGIGWAIWRNKEDLPDELIFHINYLGADQPTFTLNFSKGSSQVIAQYYQLIRLGFEGYKNVMENCQENARVLREGLEKSGRFNIISKEIGVPLVAFSLKDNSQHNEFEISETLRRFGWIIPAYTMPPNAQHVTVLRVVIREDFSRTLAERLVIDIEKVLHELDTLPARVNAKLAVAEANGSGVHKKTDREVQLEITTAWKKFVADKKKKTNGVC

SEQ ID NO: 6237 - protein, 496 aa, Nicotiana tabacum
MVLSKTASESDVSIHSTFASRYVRTSLPRFKMPENSIPKEAAYQIINDELMLDGNPRLNLASFVTTWMEPECNKLMMDSINKNYVDMGEYPVTTELQNRCVNMIAHLFNAPLGDGETAVGVGTVGSSEAIMLAGLAFKRKWQNKMKAQGKPCDKPNIVTGANVQVCWEKFARYFEVELKEVKLSDGYYVMDPEKAVEMVDENTICVAAILGSTLNGEFEDVKRLNDLLIEKNKETGWDTPIHVDAASGGFIAPFLYPELEWDFRLPLVKSINVSGHKYGLVYAGIGWAIWRNKEDLPDELIFHINYLGADQPTFTLNFSKGSSQVIAQYYQLIRLGFEGYKNVMENCQENARVLREGLEKSGRFNIISKEIGVPLVAFSLKDNSQHNEFEISETLRRFGWIIPAYTMPPNAQHVTVLRVVIREDFSRTLAERLVIDIEKVLHELDTLPARVNAKLAVAEANGSGVHKKTDREVQLEITAAWKKFVADKKKKTNGVC

SEQ ID NO: 6238 - protein, 496 aa, Nicotiana tabacum
MVLSKTASESDVSIHSTFASRYVRTSLPRFKMPENSIPKEAAYQIINDELMLDGNPRLNLASFVTTWMEPECNKLMMDSINKNYVDMDEYPVTTELQNRCVNMIAHLFNAPLGDGETAVGVGTVGSSEAIMLAGLAFKRKWQNKMKAQGKPCDKPNIVTGANVQVCWEKFARYFEVELKEVKLSDGYYVMDPEKAVEMVDENTICVAAILGSTLNGEFEDVKRLNDLLIEKNKETGWDTPIHVDAASGEFIAPFLYPELEWDFRLPLVKSINVSGHKYGLVYAGIGWAIWRNKEDLPDELIFHINYLGADQPTFTLNFSKGSSQVIAQYYQLIRLGFEGYKNVMENCQENARVLREGLEKSGRFNIISKEIGVPLVAFSLKDNSQHNEFEISETLRRFGWIIPAYTMPPNAQHVTVLRVVIREDFSRTLAERLVIDIEKVLHELDTLPARVNAKLAVAEANGSGVHKKTDREVQLEITTAWKKFVADKKKKTNGVC

SEQ ID NO: 6239 - protein, 496 aa, Nicotiana tabacum
MVLSKTASESDVSIHSTFASRYVRTSLPRFKMPENSIPKEAAYQIINDELMLDGNPRLNLASFVTTWMEPECNTLMMDSINKNYVDMDEYPVTTELQNRCVNMIAHLFNAPLGDGETAVGVGTVGSSEAIMLAGLAFKRKWQNKMKAQGKPFDKPNIVTGANVQVCWEKFARYFEVELKEVKLSDGYYVMDPEKAVEMVDENTICVAAILGSTLNGEFEDVKRLNDLLIEKNKETGWDTPIHVDAASGGFIAPFLYPELEWDFRLPLVKSINVSGHKYGLVYAGIGWAIWRNKEDLPDELIFHINYLGADQPTFTLNFSKGSSQVIAQYYQLIRLGFEGYKNVMENCQENARVLREGIEKSGRFNIISKEIGVPLVAFSLKDNSQHNEFEISETLRRFGWIVPAYTMPPNAQHVTVLRVVIREDFSRTLAERLVIDIEKVLHELDTLPARVNAKLAVAEANGSGVHKKTDREVQLEITTAWKKFVADKKKKTNGVC

SEQ ID NO: 6240 - protein, 496 aa, Nicotiana tabacum
MVLSKTASESDVSVHSTFASRYVRTSLPRFKMPENSIPKEAAYQIINDELMLDGNPRLNLASFVTTWMEPECNTLMMDSINKNYVDMDEYPVTTELQNRCVNMIAHLFNAPLGDGETAVGVGTVGSSEAIMLAGLAFKRKWQNKMKAQGKPFDKPNIVTGANVQVCWEKFARYFEVELKEVKLSDGYYVMDPEKAVEMVDENTICVAAILGSTLNGEFEDVKRLNDLLIEKNKETGWDTPIHVDAASGGFIAPFLYPELEWDFRLPLEKSINVSGHKYGLVYAGIGWAIWRNKEDLPDELIFHINYLGADQPTFTLNFSKGSSQVIAQYYQLIRLGFEGYKNVMENCQENARVLREGIEKSGRFNIISKEIGVPLVAFSLKDNSQHNEFEISETLRRFGWIVLAYTMPPNAQHVTVLRVVIREDFSRTLAERLVIDIEKVFHGVDTLPARVNAKLAVAEANGSGVHKKTDREVQLEITTAWLKFVADKKKKTNGVC

SEQ ID NO: 6241 - protein, 491 aa, Nicotiana tabacum
MVLSKTSSESDVSVHSTFASRYVRTSLPRFEMAENSIPKEAAFQIINDELMLDGNPRLNLASFVTTWMEPECDKLMMDSINKNYVDMDEYPVTTELQNRCVNMIARLFNAPLEEKETAVGVGTVGSSEAIMLAGLAFKRNWQNKRKAEGKPYNKPNIVTGANVQVCWEKFANYFEVELKEVKLREGYYVMDPVQAVEMVDENTICVAAILGSTLNGEFEDVKLLNDLLIEKNKQTGWNTPIHVDAASGGFIAPFLYPELEWDFRLPLVKSINVSGHKYGLVYAGIGWVIWRTKQDLPEELIFHINYLGADQPTFTLNFSKGSSQVIAQYYQLIRLGYEGYRNVMENCRENAIVLREGLEKTGRFNIVSKDEGVPLVAFSLKDNSRHNEFEVSETLRRFGWIVPAYTMPADAQHVTVLRVVIREDFSRTLAERLVLDIVKVLHELDTLPARLSAKLEEVKLVKNGKKFELEVQREVTNYWKKFVLARKAPVC

SEQ ID NO: 6242 - protein, 500 aa, Petunia x hybrida
MVLSKTVSQSDVSIHSTFASRYVRTSLPRFKMPDNSIPKEAAYQIINDELMLDGNPRLNLASFVTTWMEPECDKLMMDSINKNYVDMDEYPVTTELQNRCVNMIAHLFNAPLEDGETAVGVGTVGSSEAIMLAGLAFKRKWQNKMKAQGKPCDKPNIVTGANVQVCWEKFARYFEVELKEVKLSEGYYVMDPEKAVEMVDENTICVAAILGSTLNGEFEDVKRLNDLLVEKNKETGWDTPIHVDAASGGFIAPFIYPELEWDFRLPLVKSINVSGHKYGLVYAGIGWVVWRNKDDLPDELIFHINYLGADQPTFTLNFSKGSSQVIAQYYQLIRLGYEGYKNVMENCQENASVLREGLEKTGRFNIISKEIGVPLVAFSLKDNRQHNEFEISETLRRFGWIVPAYTMPPNAQHITVLRVVIREDFSRTLAERLVRDIEKVLHELDTLPARVNAKLAVAEEQAAANGSEVHKKTDSEVQLEMITAWKKFVEEKKKKTNRVC

SEQ ID NO: 6243 - protein, 494 aa, Oryza sativa
  unsure (1)..(494): unsure at all Xaa locations
MVLSHGVSGSDESVHSTFASRYVRTSLPRFRMPEQSIPKEAAYQIINDELMLDGNPRLNLASFVTTWMEPECDKLIQASVNKNYVDMDEYPVTTELQNRCVNMIAHLFNAPLGDSETAVGVGTVGSSEAIMLAGLAFKRRWQNKMKAAGKPCDKPNIVTGANVQVCWEKFARYFEVELKEVKLSDGYYVMDPAKAVDMVDENTICVAAILGSTLNGEFEDVKLLNDLLTKKNAETGWDTPIHVDAASGGFIAPFLYPELEWDFRLPLVKSINVSGHKYGLVYAGIGWCIWRSKEDLPEELIFHINYLGADQPTFTLNFSKGSSQVIAQYYQLIRLGFEGYKNIMENCQENAMVLKQGLEKTGRFNIVSKDNGVPLVAFSLKDSARHNEFEISDFLRRFGWIVPAYTMPPDAQHVTVLRVVIREDFSRTLAERLVLDVEKVLHELDALPARVVANGGDAAAASASXXREMEKQREVISLWKRAVLXXKKKTNGVC

SEQ ID NO: 6244 - protein, 494 aa, Oryza sativa; identical to SEQ ID NO: 6243
  unsure (1)..(494): unsure at all Xaa locations

SEQ ID NO: 6245 - protein, 501 aa, Oryza sativa; identical to SEQ ID NO: 6229

SEQ ID NO: 6246 - protein, 500 aa, Oryza sativa; identical to SEQ ID NO: 6234

SEQ ID NO: 6247 - protein, 488 aa, Oryza sativa
  unsure (1)..(488): unsure at all Xaa locations
EHMALSTAQTGESMHSSTFASRYVRTALPRFRMPEKSIPKDAAYQIINDELMLDGNPRLNLASFVTTWMEPECDKLMMAAINKNYVDMDXEYPVTTELQNRCVNMIAHLFNAPIGDDETAVGVGTVGSSEAIMLAGLAFKRKWQNRMKAEGKPHDKPNIVTGANVQVCWEKFARYFEVELKEVKLTQGYYVMNPEKAVEMVDENTICVAAILGSTLNGEFEDVKMLNDLLTAKNAETGWNTPIHVDAASGGFIAPFIYPELEWDFRLPLVKSINVSGHKYGLVYAGVGWVIWRNKEDLPDELIFHINYLGADQPTFTLNFSKGSNXQIIAQYYQLIRLGFEGYKDIMQNCRDNATVLREGIEKTGHFDVVSKDSGVPLVAFSLKDSSRYTVFEVAESLRRFGWIVPAYTMPADAEHVAVMRVVIREDFSRGLAERLITDLTKTVADMDAHAVKKAAAEPAKKTVREIEKEVTTYWRSFVARKKSSLVC

SEQ ID NO: 6248 - protein, 493 aa, Oryza sativa
  unsure (1)..(493): unsure at all Xaa locations
MVLSKAVSESDMSVHSTFASRYVRASLPRYRMPENSIPKEAAYQIINDELMLDGNPRLNLASFVTTWMEPECDKLIMAAINKNYVDMDEYPVTTELQNRCVNMIAHLFHAPLGEDETAVGVGTVGSSEAIMLAGLAFKRRWQNKRKAEGKPFDKPNIITGANVQVCWXKFARSFEVELKEVKLRDGYYVMDPEKAVDMVNENTICVAAILGSTLNGEFEDVKLLNDLLDKKNKETGWETPIHVDAASGGFIAPFLYPELEWDFRLPWVKSINVSGHKYGLVYAGIGWCIWRNKEDLPEELIFHINYLGTDQPTFTLNFSKGSRQVIAQYEQLIRHGFEGYRNIMENWHENAMVLKEGLVKTGRFDIVSKDEHEALVAFSLKDRSRHDEFEISDMLRRFGWIVPAYTMPPDAQHVTVLRVVIREEFSRTLAERLVLDIEKVMYQLDALPSRLMPPVPPAXXLLVVAKKSELETQRSVTEAWKKFVLAKRTNGVC

SEQ ID NO: 6249 - protein, 478 aa, Oryza sativa
  unsure (1)..(478): unsure at all Xaa locations
MVLSKAVSESDMSVHSTFASRYVRASLPRYRMPENSIPKEAAYQIINDELMLDGNPRLNLASFVTTWMEPECDKLIMAAINKNYVDMDEYPVTTELQNRCVNMIAHLFHAPLGEDETAVGVGTVGSSEAIMLAGLAFKRRWQNKRKAEGKPFDKPNIITGANVQEVKLRDGYYVMDPEKAVDMVNENTICVAAILGSTLNGEFEDVKLLNDLLDKKNKETGWETPIHVDAASGGFIAPFLYPELEWDFRLPWVKSINVSGHKYGLVYAGIGWCIWRNKEDLPEELIFHINYLGTDQPTFTLNFSKGSSQVIAQYYQLIRHGFEGYRNIMENCHENAMVLKEGLVKTGRFDIVSKDEGVPLVAFSLKDRSRHDEFEISDMLRRFGWIVPAYTMPPDAQHVTVLRVVIREEFSRTLAERLVLDIEKVMYQLDALPSRLMPPVPPAXXLLVVAKKSELETQRSVTEAWKKFVLAKRTNGVC

SEQ ID NO: 6250 - protein, 378 aa, Oryza sativa
  unsure (1)..(378): unsure at all Xaa locations
MIAHLFNAPLGDSETAVGVGTVGSSEAIMLAGLAFKRRWQNKMKAAGKPCDKPNIVTGANVQVCWEKFARYFEVELKEVKLSDGYYVMDPAKAVDMVDENTICVAAILGSTLNGEFEDVKLLNDLLTKKNAETGWDTPIHVDAASGGFIAPFLYPELEWDFRLPLVKSINVSGHKYGLVYAGIGWCIWRSKEDLPEELIFHINYLGADQPTFTLNFSKGSSQGYKNIMENCQENAMVLKQGLEKTGRFNIVSKDNGVPLVAFSLKDSARHNEFEISDFLRRFGWIVPAYTMPPDAQHVTVLRVVIREDFSRTLAERLVLDVEKVLHELDALPARVVANGGDAAAASASXXREMEKQREVISLWKRAVLXXKKKTNGVC

SEQ ID NO: 6251 - protein, 282 aa, Oryza sativa
GEFEDVKLLNNLLTEKNKETGWDVPIHVDAASGGFIAPFLYPELEWDFRLPLVKSINVSGHKYGLVYPGVGWVIWRSKEDLPEELIFHINYLGTDQPTFTLNFSKGSSQIIAQYYQLIRLGFEGYKNIMQNCMETPAILREGIEATGRFEILSKEAGVPLVAFSLKASGRYTVFDISEHLRRFGWIVPAYTMPANAEHVAILRVVIREDFSRSLAERLVSDIVKILHELDAHSAQVLKISSAIAKQQSGDDGAVTKKSVLETEREIFAYWRDQVKKKQTGIC

SEQ ID NO: 6252 - protein, 137 aa, Oryza sativa
MVLSHASSGRDDAVRCTFATRYACETLPRFRMPEQSIPREAAYQIINDELMLDGNPRLNLASFVTTWMEPECDKLIMDSVNKNYVDMDEYPVTTELQNRCVNMIAHLFNAPIKEDETAIGAGTVGSSEAIMLAGRPS

SEQ ID NO: 6253 - protein, 169 aa, Oryza sativa
  unsure (1)..(169): unsure at all Xaa locations
TKSSPTHPVELNEVKLIDGYYIMDPAKAXVDMVXDENTICIVAIPRSTLNGEYEDVKLLNDLLTKKNAETGWDTPIHVNAGSGWFIAPMLYPELKWDFRLTXLANSMIISGHKYGLVYAGIGWCIWTSKEDLSEELMFHMNYLGADQPTFTLNLWKGCSHVIAHDYQLX

SEQ ID NO: 6254 - protein, 116 aa, Oryza sativa
  unsure (1)..(116): unsure at all Xaa locations
RTLGRTRGRTRGGRTFNRRRQNKMNAACTPCDKPNIVGGANVQVCWEKFARYFEVELXEVKLSDGYYVMDPAKAADMVDENTICVAAILGSTLNGEFEDVKLLNDLLSKKNAETGX

SEQ ID NO: 6255 - protein, 491 aa, Triticum aestivum
APAAMVISHASSSAGEAVYSTFSSRYVREELPRYRMPEGSIPKEAAYQIISDELMLDGNPRLNLASFVTTWMEPECGKLMMDSVNKNYVDMDEYPVTTELQNRCVNMIAHLFNAPIGEDETAIGVSTVGSSEAIMLAGLAFKRKWANKMKEQGKPCDKPNIVTGANVQVCWEKFARYFEVELKEVKLTEGYYVMDPKKAVEMVDENTICVAAILGSTLTGEYEDVKLLNDLLVAKNKETGWDVPIHVDAASGGFIAPFLQPELEWDFRLPLVKSINVSGHKYGLVYPGVGWVIWRSKDDLPDELIFHINYLGTDQPTFTLNFSKGASQIIAQYYQLIRLGFEGYKHIMENCKLNAAVLKEGIDATGRFDVLSKADGVPLVAIRLKDSTNFSVFDISENLRRFGWIVPAYTMPADAEHVAVLRIVIREDFNRSLAQRLLADINKIVRELDAHAVHAIKLSNAAAAEGASKSTVDAVTEAFKGLAGNKKAGVC

SEQ ID NO: 6256 - protein, 492 aa, Triticum aestivum
  unsure (1)..(492): unsure at all Xaa locations
MVLSXASSDTDVSVHSTFASRYVRSSLPRYRMPENSIPKEAAYQIINDELMLDGNPRLNLAASGTTWMEPECDKLIMDSINKNYVDMDEYPVTTELQNRCVNMIAHLFNAPLGETETAVGVGTVGSSEAIMLAGLAFKRRWQNRRKAAGKPCDKPNIVTGANVQVCWEKFARYFEVELKEVKLSEGCYVMDPEKAVEMVDENTICVAAILGSTLNGEFEDVKMLNDLLVAKNEETGWDTPIHVDAASGGFIAPFLYPELEWDFRLPLVKSINVSGHKYGLVYAGIGWCIWRSKEDLPDELIFHINYLGADQPTFTLNFSKGSSQVIAQYYQLIRLGFEGYRNIMDNCQENAMVLKEGLERTGRFNIVSKDQGVPLVAFSLKDSSRHDEFEISEFLRRFGWIVPAYTMPPDAQHVTVLRVVIREDFSRTFAERLVIDIEKVLHELDALPSRSSGPALQHPSDTVSEKDLARQREVVSVWKRAVAARKKTQGVC

SEQ ID NO: 6257 - protein, 328 aa, Triticum aestivum
  unsure (1)..(328): unsure at all Xaa locations
MVVXVAATGSDTAEPLHSTTFASRYVRDQLPRYRMXXXSIXKEAAYQIISDELMLDGNPRLNLASFVTTWMEPECGKLMMDSVNKNYVDMDEYPVTTELQNRCVNMIAHLFNAPIGEDETAIGVSTVGSSEAIMLAGLAFKRKWANKMKEQGKPCDKPNIVTGANVQVCWEKFARYFEVELKEVKLTEGYYVMDPKKAVEMVDENTICVAAILGSTLTGEYEDVKLLNDLLVAKNKENRVELPIHVDAASGGFIAPFLQPELEWDFRLPLVKSINVSGHKYGFXVYPGVGWVIWRSKDDLPDXELIFHINYLGTDQPTFTLNFSKGLX

SEQ ID NO: 6258 - protein, 288 aa, Triticum aestivum
  unsure (1)..(288): unsure at all Xaa locations
XPAGYRYMEDEAEKLMAESFSKNFIDYEEYPQSADIQNRCVNMIGDLFHAPXXGSSVGTSTVGSSEAIMLGVLAMKRRWKNRRIAEGKSTEHPNIVMSSAVQVCWEKATRYFEIDEKLVYCTPDRFVMDPEQAVDLCDENTIGMCAILGTTYTGEYEDIKAINDLLVERNLDVPIHVDAASGGFVAPFVVPDLEWDFRCEKVVSINVSGHKYGLVYPGGGXVIWRSPEFXPQELVFNINYLGXDQSSFTLTFXKGASQVIGQYYQLIRLGKHGYRAIMSNLTRTXDYL

SEQ ID NO: 6259 - protein, 206 aa, Triticum aestivum
  unsure (1)..(206): unsure at all Xaa locations
MVLSHAASAGSSDESVHSTFASRYVRASLPRFRMPENSIPKEAAYQIINDELMLDGNPRLNLASFVTTWMEPECNKLMMDSVNKNYVDMDEYPVTTEFQNRCVNMIAHLFNAPIGEDETAVGVGTVGSSEAIMLAGLAFKRKWQNKMKAEGKPHDKPNIVTGANVQVCWEKFARYFEVELKEVKLREGYYVMDPAKAVELVDENTX

SEQ ID NO: 6260 - protein, 238 aa, Triticum aestivum
  unsure (1)..(238): unsure at all Xaa locations
MVISHASSSAGEAVYSTFSSRYVREELPRYRMPEGSIPKEAAYQIISDELMLDGNPRLNLASFATTWVEPEWGKHVMDSVNSNNRRMDYXTGAPSFGSSEAILLAGLAFKRKWANKMKEQGKPCDKPNIVTGANVQVCWEKFARYFEVELKEVKLTEGYYVMDPKKAIEMVDENTICVAAILGSTLTGEYEDVKLLNDLLVEKIKITGWNVPIHVDAXSGGFIAPFLQXELEWDFRLX

SEQ ID NO: 6261 - protein, 178 aa, Triticum aestivum
  unsure (1)..(178): unsure at all Xaa locations
MVFLSNAISNARIXXESHSKGELHHDAVETTIYGTRWASEDIPRFDLPEDEMPSNVAYRLIKDDLALDGNPALNLATFVTTYMEEEAEKLMAENLSKNFIDYEEYPQSVELCNRCVNMIARLYHAPMHSADEEALGCSTVGSSEAIILATLAMKRRWQNARKEKGLPTDKPNLIFGAX

SEQ ID NO: 6262 - protein, 147 aa, Triticum aestivum
  unsure (1)..(147): unsure at all Xaa locations
MALSRAQTNSGESLISSTFASRYVRTALPRFRIPEQSIPKDAAYQIINDELMLDGNPRLNLASFVTTWMEPECDKLIQNSVNKNYVDMDEYPVTTEFQNRCVNMIAHLFNAPIGEDETAVGVGTVGSSEAIMLAGLAFKRKWQNKMX

SEQ ID NO: 6263 - protein, 503 aa, Triticum aestivum
  unsure (1)..(503): unsure at all Xaa locations
SHTRAPHRLPTPSRTRVEPRRIGGDLAVTSREPAAAPGRPHATPPTRSVRVGRPRDRKPEDPPPNEAAYQSISDQPLLDGNPRRNQPASGTTWMDPECGKLMIDSVNQDYLDMHEYPVTTELQXSSEAIMLAGLAFKRKWANKMKEEGKPCDKPNIVTGANVQVCWEKFARYFEVELKEVKLTEGYYVMDHAKAVEMLDEDTIGVAGIMGSTLTVVCEDIKLXNDDVVLXNNKRGGMXQLHGDAASGPCQARLLQVERVWESGEAXGTSRHGVGGEEAVHAAPIGRGGWRRLHGLPXDRLLGWAFRRAVEKTASPTPGSDGACERLARFCQMNCPGLSAYXRPLLENYNLNAAELKEAIDAAGRFDELSKADGVPLVAVRLQDSTNFSVFDISENLRRFGWIVPAYTMPADAEHVAVLRIVIREDFNRSLAQRXPRRPQQDRARAGRARRPRHQAVQRRRRRGRLQEHRGRRHRGLQGPGREQEGRSLLMAVLCFNTSVYVVS

SEQ ID NO: 6264 - protein, 133 aa, Triticum aestivum
  unsure (1)..(133): unsure at all Xaa locations
MVISHSSSGPGESAYNTFSSRYARVELPRYRMPENSIPKETAYQMITDELMLDGNPRLDLASFVTTWMEPECDKLIMDSINKNYVDMDEYPVTTELQNRCVNMIAHLFNAPINEDEKAIGVSTVGSSEXIMLX

SEQ ID NO: 6265 - protein, 128 aa, Triticum aestivum
  unsure (1)..(128): unsure at all Xaa locations
MVLTHVQSDEXXAASAAVFASRYVQDPVPSYELGEKSISKDAAYQIIHDELLLDGSPRLNLASFVTTWMEPECDRLILEGMNKNYADMDEYPVTTELQNRCVNIIARLFNAPVGAGETAVGVGTVGSX

SEQ ID NO: 6266 - protein, 117 aa, Triticum aestivum
  unsure (1)..(117): unsure at all Xaa locations
MVLSHAASAGSSDDSVHSTFASRYVRASLPRFRMPENSIPKEAAYQIINDELMLDGNPRLNLASFVTTWMEPECNKLMMDSINKNYVDMDEYPVTTELQNRCVNMIAHLFNAPLGEX

SEQ ID NO: 6267 - protein, 493 aa, Zea mays
MVLSHGVGGSDESVHSTFASRYVRTSLPRYRMPEQSIPKEAAYQIINDELMLDGNPRLNLASFVTTWMEPECDKLIQASVNKNYVDMDEYPVTTELQNRCVNMIAHLFNAPLGDAETAVGVGTVGSSEAIMLAGLAFKRRWQNKMKAAGKPCDKPNIVTGANVQVCWEKFARYFEVELKEVKLSDGYYVMDPQKAVDMVDENTICVAAILGSTLNGEFEDVKLLNDLLTKKNAETGWDTPIHVDAASGGFIAPFLYPELEWDFRLPLVKSINVSGHKYGLVYAGIGWCIWRTKADLPEELIFHINYLGADQPTFTLNFSKGSSQVIAQYYQLIRLGFEGYKNIMENCQENATVLKQGLEKTGKFNIVSKDNGVPLVAFSLKGSSRHNEFEISDFLRRFGWIVPAYTMPPDAQPVTVLRVVIREDFSRTLAERLVLDIEKVLHELDALPARVPSGDLAALAAAESSEREMEKQRQVISLWKRAVLAKKKTNGVC

SEQ ID NO: 6268 - protein, 489 aa, Zea mays
MALSTTNTNAAESQLHCSTFASRYVRTALPRFKIPEQSIPKEAAYQIINDELMLDGNPRLNLASFVTTWMEPECDKLIQSSINKNYVDMDEYPVTTELQNRCVNMIAHLFNAPIGDDETAVGVGTVGSSEAIMLAGLAFKRKWQNKMKAAGKPYDKPNIVTGANVQVCWEKFARYFEVELKEVKLKEGYYVMDPEKAAEMVDENTICVAAILGSTLNGEFEDVKLLSDLLTAKNAETGWDTPIHVDAASGGFIAPFLYPELEWDFRLPLVKSINVSGHKYGLVYAGVGWVIWRSKEDLPDELIFHINYLGADQPTFTLNFSKGSSQIIAQYYQLIRLGFEGYKDVMQNCRDNAAVLREGINKMGYFDVVSKDSGVPLVAFSLKDSSKYTVFEVAESLRRFGWIVPAYTMPADAEHVAVMRVVIREDFSRGLAERLIADLGKTMADMDAHAGRKQAPEQPKKSVHDIEKEVTTFWRRLVANSKKKSSMVC

SEQ ID NO: 6269 - protein, 500 aa, Zea mays
  unsure (1)..(500): unsure at all Xaa locations
MVVSVAATGPGTDAEPVSSTFFASRYVRDPLPRYRMPERSIPREAAQQIISDELMLDGNPRLNLASFVTTWMEPECDKLIMDSINKNYVDMDEYPVTTELQNRCVNMIAHLFNAPIKEDETAIGVGTVGSSEAIMLAGLAFKRKWQNKRKEQGKPCDRPNIVTGANVQVCWEKFARYFEVELKEVKLSEGYYVMDPVKAVEMVDENTICVAAILGSTLTGEFEDVKQLNDLLTEKNKETGWDVPIHVDAASGGFIAPFLYPELEWDFRLPLVKSINVSGHKYGLVYPGVGWVIWRSKDDLPEELIFHINYLGTDQPTFTLNFSKGSCQIIAQYYQLIRLGFEGYRNIMENCQENAAILREGIAATGRFDVLSKDAGVPLVAFSLRDSSRFSVFDVSENLRRFGWIVPAYTMPADAEHVXAVLRVVVREDFSRSLAERLVSDVRKILRELDARATHAVRVATATAEQSGDGVVAKKSVLEIEREVAARWMNAVNKKKTGVC

SEQ ID NO: 6270 - protein, 494 aa, Zea mays
  unsure (1)..(494): unsure at all Xaa locations
MVLSHGVGGSDESVHSTFASRYVRTSLPRYRMPEQSIPKEAAYQIINDELMLDGNPRLNLASFVTTWMEPECDKLIQASVNKNYVDMDEYPVTTELQNRCVNMIAHLFNAPLGDAETAVGVGTVGSSEAIMLAGLAFKRRWQNKMKAAGKPCDKPNIVTGANVQVCWEKFARYFEVELKEVKLSDGYYVMDPQKAVDMVDENTICVAAILXGSTLNGEFEDVKLLNDLLTKKNAETGWDTPIHVDAASGGFIAPFLYPELEWDFRLPLVKSINVSGHKYGLVYAGIGWCIWRTKADLPEELIFHINYLGADQPTFTLNFSKGSSQVIAQYYQLIRLGFEGYKNIMENCQENATVLKQGLEKTGKFNIVSKDNGVPLVAFSLKDNSRHNEFEISDFLRRFGWIVPAYTMPPDAQHVTVLRVVIREDFSRTLAERLVLDIEKVLHELDALPARVPSGDLAALAAAESSEREMEKKRQVISLWKRAVLAKKKTNGVC

SEQ ID NO: 6271 - protein, 552 aa, Zea mays
WQLPFQPAARRPLVGQGTPRLPLLEYHYSISTSVPPPQTTTTTTENESQNSTAAAAMVLSHASSGRDDDAVASTFASRYVRERLPRYRMPERSIPREAAQQIISDELMLDGNPRLNLASFVTTWMEPECDKLIMDSINKNYVDMDEYPVTTELQNRCVNMIAHLFNAPIKEDETAIGVGTVGSSEAIMLAGLAFKRKWQNKRKEQGKPCDRPNIVTGANVQVCWEKFARYFEVELKEVKLSEGYYVMDPRQAVEMVDENTICVAAILGSTLTGEFEDVKQLNDLLTDKNKETGWDVPIHVDAASGGFIAPFLYPELEWDFRLPLVKSINVSGHKYGLVYPGVGWVIWRSKEDLPEELIFHINYLGTDQPTFTLNFSKGSSQIIAQYYQLIRLGFEGYRNIMENCQENAAILREGIAATGRFDVLSKDAGVPLVAFSLRDSSRFSVFDVSENLRRFGWIVPAYTMPADAEHVAVLRVVVREDFSRSLAERLVSDVRKILRELDARATHAVRVATATAEQSGDSVVAKKSVLEIEREVAARWRNAVNKKKTGVC

SEQ ID NO: 6272 - protein, 497 aa, Zea mays
MVLSHASSGRDDDDAVASTFASRYVRERLPRYRMPERSIPREAAQQIISDELMLDGNPRLNLASFVTTWMEPECDKLIMDSINKNYVDMDEYPVTTELQNRCVNMIAHLFNAPIKEDETAIGVGTVGSSEAIMLAGLAFKRKWQNKRKEQGKPCDRPNIVTGANVQVCWEKFARYFEVELKEVKLSEGYYVMDPVKAVEMVDENTICVAAILGSTLTGEFEDVKQLNDLLTEKNKETGWDVPIHVDAASGGFIAPFLYPELEWDFRLPLVKSINVSGHKYGLVYPGVGWVIWRSKDDLPEELIFHINYLGTDQPTFTLNFSKGSCQIIAQYYQLIRLGFEGYRNIMENCQENAAILREGIAATGRFDVLSKDAGVPLVAFSLRDSSRFSVFDVSENLRRFGWIVPAYTMPADAEHVAVLRVVVREDFSRSLAERLVSDVRKILRELDARATHAVRVATATAEQSGDGVVAKKSVLEIEREVAARWMNAVNKKKTGVC

SEQ ID NO: 6273 - protein, 499 aa, Zea mays
MVVSVAATGPGTDAEPVSSTFFASRYVRDPLPRYRMPERSIPREAAQQIISDELMLDGNPRLNLASFVTTWMEPECDKLIMDSINKNYVDMDEYPVTTELQNRCVNMIAHLFNAPIKEDETAIGVGTVGSSEAIMLAGLAFKRKWQNKRKEQGKPCDRPNIVTGANVQVCWEKFARYFEVELKEVKLSEGYYVMDPVKAVEMVDENTICVAAILGSTLTGEFEDVKQLNDLLTEKNKETGWDVPIHVDAASGGFIAPFLYPELEWDFRLPLVKSINVSGHKYGLVYPGVGWVIWRSKDDLPEELIFHINYLGTDQPTFTLNFSKGSCQIIAQYYQLIRLGFEGYRNIMENCQENAAILREGIAATGRFDVLSKDAGVPLVAFSLRDSSRFSVFDVSENLRRFGWIVPAYTMPADAEHVAVLRVVVREDFSRSLAERLVSDVRKILRELDARATHAVRVATATAEQSGDSVVAKKSVLEIEREVAARWRNAVNKKKTGVC

SEQ ID NO: 6274 - protein, 499 aa, Zea mays
MVVSVAATGPGTDAEPVSSTFFASRYVRDPLPRYRMPERSIPREAAQQIISDELMLDGNPRLNLASFVTTWMEPECDKLIMDSINKNYVDMDEYPVTTELQNRCVNMIAHLFNAPIKEDETAIGVGTVGSSEAIMLAGLAFKRKWQNKRKEQGKPCDRPNIVTGANVQVCWEKFARYFEVELKEVKLSEGYYVMDPVKAVEMVDENTICVAAILGSTLTGEFEDVKQLNDLLTEKNKETGWDVPIHVDAASGGFIAPFLYPELEWDFRLPLVKSINVSGHKYGLVYPGVGWVIWRSKDDLPEELIFHINYLGTDQPTFTLNFSKGSCQIIAQYYQLIRLGFEGYRNIMENCQENAAILREGIAATGRFDVLSKDAGVPLVAFSLRDSSRFSVFDVSENLRRFGWIVPAYTMPADAEHVAVLRVVVREDFSRSLAERLVSDVRKILRELDARATHAVRVSTATAEQSGDGVVAKKSVLEIEREVAARWMNAVNKKKTGVC

SEQ ID NO: 6275 - protein, 552 aa, Zea mays
WQLPFQPAARRPLVGQGTPRLPLLEYHYSISTSVPPPQTTTTTTENESQNSTAAAAMVLSHASSGRDDDAVASTFASRYVRERLPRYRMPERSIPREAAQQIISDELMLDGNPRLNLASFVTTWMEPECDKLIMDSINKNYVDMDEYPVTTELQNRCVNMIAHLFNAPIKEDETAIGVGTVGSSEAIMLAGLAFKRKWQNKRKEQGKPCDRPNIVTGANVQVCWEKFARYFEVELKEVKLSEGYYVMDPVKAVEMVDENTICVAAILGSTLTGEFEDVKQLNDLLTDKNKETGWDVPIHVDAASGGFIAPFLYPELEWDFRLPLVKSINVSGHKYGLVYPGVGWVIWRSKEDLPEELIFHINYLGTDQPTFTLNFSKGSSQIIAQYYQLIRLGFEGYRNIMQNCQDNAAILREGIAATGRFGVLSKDAGVPLVAFSLRDSSRFSVFDVSENLRRFGWIVPAYTMPADAEHVAVLRVVVREDFSRSLAERLVSDVRKILRELDARATHAVRVATATAEQSGDGVVAKKSVLEIEREVAARWMNAVNKKKTGVC

SEQ ID NO: 6276 - protein, 499 aa, Zea mays
MVVSVAATGPGTDAEPVSSTFFASRYVRDPLPRYRMPERSIPREAAQQIISDELMLDGNPRLNLASFVTTWMEPECDKLIMDSINKNYVDMDEYPVTTELQNRCVNMIAHLFNAPIKEDDTAIGVGTVGSSEAIMLAGLAFKRKWQNKRKEQGKPCDRPNIVTGANVQVCWEKFARYFEVELKEVKLSEGYYVMDPVKAVEMVDENTICVAAILGSTLTGEFEDVKQLNDLLTEKNKETGWDVPIHVDAASGGFIAPFLYPELEWDFRLPLVKSINVSGHKYGLVYPGVGWVIWRSKDDLPEELIFHINYLGTDQPTFTLNFSKGSCQIIAQYYQLIRLGFEGYRNIMENCQENAAILREGIAATGRFDVLSKDAGVPLVAFSLRDSSRFSVFDVSENLRRFGWIVPAYTMPADAEHVAVLRVVVREDFSRSLAERLVSDVRKILRELDARATHAVRVATATAEQSGDGVVAKKSVLEIEREVAARWMNAVNKKKTGVC

SEQ ID NO: 6277 - protein, 491 aa, Zea mays
  unsure (1)..(491): unsure at all Xaa locations
MVLSKAVSESDMSVHSTFASRYVRSSLPRYRMPENSIPKEAAYQIINDELMLDGNPRLNLASFVTTWMEPECDKLIMAAINKNYVDMDEYPVTTELQNRCVNMIAHLFNAPLGESETAVGVGTVGSSEAIMLAGLAFKRRWQNKRRAEGKPFDKPNIVTGANVQVCWEKFARYFEVELREVKLRDGYYVMDPEKAVEMVDENTICVAAILGSTLNGEFEDVKLLNDLLQAKNRETRWETPIHVDAASGGFIAPFLYPDLEWDFRLPLVKSINVSGHKYGLVYAGIGWCIWRSKEDLPEELIFHINYLGADQPTFTLNFSKGSSQVIAQYYQLIRHGFEGYRNIMENCHENAMVLKEGLEKTGRFDIVSKDEGVPLVAFSLKDRSRHDEFEISDMLRRFGWIVPAYTMPPDAQHVTVLRVVIREEFSRTLAERLVLDIEKVMYQLDALPSRLXXPPPPAAPLLRKKTELETQRSVTEAWKKFVLAKKTNGVC

SEQ ID NO: 6278 - protein, 494 aa, Zea mays
  unsure (1)..(494): unsure at all Xaa locations
MVLSHAASAGSSDESVHSTFASRYVRASLPRFRMPENSIPKEAAYQIINDELMLDGNPRLNLASFVTTWMEPECNKLMMDSINKNYVDMDEYPVTTELQNRCVNMIAHLFNAPLGETETAVGVGTVGSSEAIMLAGLAFKRRWQNKMKAAGKPCDKPNIVTGANVQVCWEKFARYFEVELKEVKLSEGYYVMDPEKAVEMVDEXNTICVAAILGSTLTGEFEDVRRLNDLLAANNRRTGWDTPIHVDAASGGFIAPFLYPDLEWDFRLPLVKSINVSGHKYGLVYAGVGWVVWRSKEDLPDELIFHINYLGADQPTFTLNFSKGSSQIIAQYYQLIRLGFEGYKDVMQNCRDNAAVLREGINKMGYFDVVSKDSGVPLVAFSLKDSSKYTVFEVAESLRRFGWIVPAYTMPADAEHVAVMRVVIREDFSRGLAERLIADLGKTMADMDXARRQEAGAGAAQEVGARHREGENSKKRIIKDKVXAMTFLLVPLVX

SEQ ID NO: 6279 - protein, 520 aa, Zea mays
MVLSHASSGRDDDDAVASTFASRYVRERLPRYRMPERSIPREAAQQIISDELMLDGNPRLNLASFVTTWMEPECDKLIMDSINKNYVDMDEYPVTTELQNRCVNMIAHLFNAPIKEDETAIGVGTVGSSEAIMLAGLAFKRKWQNKRKEQGKPCDRPNIVTGANVQVCWEKFARYFEVELKEVKLSEGYYVMDPVKAVEMVDENTICVAAILGSTLTGEFEDVKQLNDLLTEKNKETGWDVPIHVDAASGGFIAPFLYPELEWDFRLPLVKSINVSGHKYGLVYPGVGWVIWRSKDDLPEELIFHINYLGTDQPTFTLNFSKGIFGSFLSGSSVVSLGAAGYRNIMENCQENAAILREGIAATGRFDVLSKDAGVPLVAFSLRDSSRFSVFDVSENLRRFGWIVPAYTMPADAEHVAVLRVVVREDFSRSLAERLVSDVRKILRELDARATHAVRVATATAEQSGDGVVAKKSVLEIEREVAARWMNAVNKKKTGLMYLDENIIITSVGIIVTTDTKKEK

SEQ ID NO: 6280 - protein, 504 aa, Zea mays
  unsure (1)..(504): unsure at all Xaa locations
MVLTHVHDLDEASAASAVVFASRYVQDPLPRYELGEKSVSKDAAYQIIHDELLLDSSPRLNLASFVTTWMEPECDKLILEGINKNYADMDEYPVTTELQNRCVNIIARLFHAPVGASEKAVGVGTVGSSEAIMLXAGLAFKRRWQNRRRAAGQPCDRPNIVTGANVQVCWEKFARYFEVELKEVRLREGCYVMDPDEAVRMVDDNTICVAAILGSTLTGEFEDVRRLNDLLAANNRRTGWDTPIHVDAASGGFIAPFLYPDLEWDFRLPLVKSINVSGHKYGLVYAGVGWVVWRSKEDLPDELIFHINYLGADQPTFTLNFSKGSSQIIAQYYQFLRLGFEGYRNVMENCMESARTLREGLERTGRFTIISKEQGVPLVAFTFKEDETPLAFKLSAELRRFGWIVPAYTMPANLEHMAVLRVVVREDFGRPLAERFLSHVRMALEELDHAAKGGPVPRMRLTIELGPPARGSGEEASARVVNREAVVPVHRSVSLAGGKTKGVC

SEQ ID NO: 6281 - protein, 498 aa, Zea mays
  unsure (1)..(498): unsure at all Xaa locations
MVLSHGVGGSDESVHSTFASRYVRTSLPRYRMPEQSIPKEAAYQIINDELMLDGNPRLNLASFVTTWMEPECDKLIQASVNRNYVDMDEYPVTTELQNRCVNMIAHLFNAPXLGDAETAVGVGTVGSSEAIMLAGLAFKRRWQNKMKAAXAKPCDKPNIVTGANVQVCXWEKFARYFEVELKEVKLSDGYYVMDPQKAVXDMVDENTICVAAILXGSTLNGEFEDVKLLNDLLTKKNAETGWDTPIHVDAASGGVIAPFLYPELEWDFRLPLVKSINVSGHKYGLVYAGIGWCIWRTKADLPEELIFHINYLGADQPTFTLNFSKGSSQVIAQYYQLIRLGFEGYKNIMENCQENAMVLKQGLEKTGKFNIVSKDNGVPLVAFSLKDSSRHNEFEISDFLRRFGWIVPAYTMPPDAQHVTVLRVVIREDFSRTLAERLVLDIEKVLHELDALPARVPSGDLAALAAAESSEREMEKQRQVISLWKRAVLAKKKTNGVC

SEQ ID NO: 6282 - protein, 484 aa, Zea mays
MVVSVAATGPGTDAEPVSSTFFASRYVRDPLPRYRMPERSIPREAAQQIISDELMLDGNPRLNLASFVTTWMEPECDKLIMDSINKNYVDMDEYPVTTELQNRCVNMIAHLFNAPIKEDETAIGVGTVGSSEAIMLAGLAFKRKWQNKRKEQGKPCDRPNIVTGANVQVCWEKFARYFEVELKEVKLSEGYYVMDPVKAVEMVDENTICVAAILGSTLTGEFEDVKQLNDLLTEKNKETGWDVPIHVDAASGGFIAPFLYPELEWDFRLPLVKSINVSGHKYGLVYPGVGWVIWRSKDDLPEELIFHINYLGTDQPTFTLNFSKGFEGYRNIMENCQENAAILREGIAATGRFDVLSKDAGVPLVAFSLRDSSRFSVFDVSENLRRFGWIVPAYTMPADAEHVAVLRVVVREDFSRSLAERLVSDVRKILRELDARATHAVRVATATAEQSGDGVVAKKSVLEIEREVAARWMNAVNKKKTGVC

SEQ ID NO: 6283 - protein, 578 aa, Zea mays
  unsure (1)..(578): unsure at all Xaa locations
STTTPLVPVYHPHKPPPPPPKTNPRTVPQRQPWWLCARGAPAGTDDDAVASTFASRYVRERLPRYRMPERSIPREAAQQIISDELMLDGNPLXLNLASXFVTTWXWRPEXADKLIMDSINKNYVDMDEYPVTTELQNRCVNMIAHLFNAPIKEDETAIGVGTVGSSEAIMLAGLAFKRKWQNKRKEQGKPCDRPNIVTGANVQVCWXEKFARYFEVELKEVKLSEGYYVMDPRXKAVEMVDENTICVAAILGSTLTXGEVRDVKQLNDLLQRKNRKTGWXDVPIHVDAXASGGFIAPFLYPELEWDFRLPLVKSINVSGHKYGLVYPGVGWVIWRSKEDLPEELIFHINYLGTDQPTFTLNFSKGSSQIIAQYYQLIRLGFEGYRNIMQNCQDNARVLREGIAATGRFGVLGRRRGCPLVAFSLRDSSRFSVFDVSENLRRFGWIVPAYTMPXPTAEHVAVLRVVVREDFSRSLAERLVSDVRKILRELDARPHAVRVATATAEQSGDGVVAKKSVLEIEREVAARWMNAVNKKKTGGLLMRRGSETGRFRHGSFVYMSRACLCLCRALGCVGPVPRM

SEQ ID NO: 6284 - protein, 331 aa, Zea mays
MVLSHGVGGSDESVHSTFASRYVRTSLPRYRMPEQSIPKEAAYQIINDELMLDGNPRLNLASFVTTWMEPECDKLIQASVNKNYVDMDEYPVTTELQNRCVNMIAHLFNAPLGDAETAVGVGTVGSSEAIMLAGLAFKRRWQNKMKAAGKPCDKPNIVTGANVQVCWEKFARYFEVELKEVKLSDGYYVMDPQKAVDMVDENTICVAAILGSTLNGEFEDVKLLNDLLTKKNAETGWDTPIHVDAASGGFIAPFLYPELEWDFRLPLVKSINVSGHKYGLVYAGIGWCIWRTKADLPEELIFHINYLGADQPHFTLNFSKGSSQVIAQYYQ

SEQ ID NO: 6285 - protein, 352 aa, Zea mays
  unsure (1)..(352): unsure at all Xaa locations
MVVSVAATGPGTDAEPVSSTFFASRYVRDPLPRYRMPERSIPREAAQQIISDELMLDGNPRLNLASFVTTWMEPECDKLIMDSINKNYVDMDEYPVTTELQNRCVNMIAHLFNAPIKEDETAIGVGTVGSSEAIMLAGLAFKRKWQNKRKEQGKPCDRPNIVTGANVQVCWEKFARYFEVELKEVKLSEGYYVMDPVKAVEMVDENTICVAAILGSTLTGEFEDVKQLNDLLTDKNKETGWDVPIHVDAASGGFIAPFLYPELEWDFRLPLVKSINVSGHKYGLVYPGVGWVIWRSKEDLPEELIFHINYLGTDQPTFTLNFSKGIFGSFLSGSSVVSLGXFSWCMDGIESA

SEQ ID NO: 6286 - protein, 283 aa, Zea mays
MVLSHGVGGSDESVHSTFASRYVRTSLPRYRMPEQSIPKEAAYQIINDELMLDGNPRLNLASFVTTWMEPECDKLIQASVNKNYVDMDEYPVTTELQNRCVNMIAHLFNAPLGDAETAVGVGTVGSSEAIMLAGLAFKRRWQNKMKAAGKPCDKPNIVTGANVQVCWEKFARYFEVELKEVKLSDGYYVMDPQKAVDMVDENTICVAAILGSTLNGEFEDVKLLNDLLTKKNAETGWDTPIHVDAASGGFIAPFLYPELEWDFRLPLVKSINVSGHKYGLVYA

SEQ ID NO: 6287 - protein, 248 aa, Zea mays
  unsure (1)..(248): unsure at all Xaa locations
IGTSSRRDAPPEDYGSTSTLNPLTMAGLARHFKIPQDGAPADVVHQLLKDELDLDGRPSLNLASFVGTYMEREGEQLMIENISKNLSDADEYPAMMDMHARCVSIIAHMWGVQKGEKAIGSATTGSSEAIHLGGLAMKRRWQEKRIAEGKDTSKPNIIMGANAQVAXLEKFARYFEVEARILPVSEDSSYRLDPKLVKENIDETLFXSFXVILGSHYTGHYEPGEEISEILDEFEKXDWSXEIPIHVX

SEQ ID NO: 6288 - protein, 393 aa, Zea mays
VDPRVRSAIAPCLSYARGTGSAPSASCCLIVGLAFKRKWQNKRKEQGKPCDRPNIVTGANVQVCWEKFARYFEVELKEVKLSEGYYVMDPVKAVEMVDENTICVAAILGSTLTGEFEDVKQLNDLLTDKNKETGWDVPIHVDAASGGFIAPFLYPELEWDFRLPLVKSINVSGHKYGLVYPGVGWVIWRSKEDLPEELIFHINYLGTDQPTFTLNFSKGSSQIIAQYYQLIRLGFEGYRNIMQNCQDNAAILREGIAATGRFGVLSKDAGVPLVAFSLRDSSRFSVFDVSENLRRFGWIVPAYTMPADAEHVAVLRVVVREDFSRSLAERLVSDVRKILRELDARATHAVRVATATAEQSGDGVVAKKSVLEIEREVAARWMNAVNKKKTGVC

SEQ ID NO: 6289 - protein, 262 aa, Zea mays
  unsure (1)..(262): unsure at all Xaa locations
XFGTRPRTVPQRQPWCSRTRAPAGTAQQIISDELMLDGNPRLNLASFVTTWMEPECDKLIMDSINKNYVDMDEYPVTTELQNRCVNMIAHLFNAPIKEDETAIGVGTVGSSEAIMLAGLAFKRKWQNKRKEQGKPCDRPNIVTGANVQVCWEKFARYFEVELKEVKLSEGYYVMDPVKAVEMVDENTICVAAILGSTLTGEFEDVKQLNDLLTEKNXETGWDVPIHVDAASGGFIAPFLYPELEWDFXLPLVKSINVSGHKX

SEQ ID NO: 6290 - protein, 214 aa, Zea mays
  unsure (1)..(214): unsure at all Xaa locations
MVLSHAASAGSSDDSVRSTFASRYVRASLPRFRMPENSIPKEAAYQIINDELMLDGNPRLNLASFVTTWMEPECNKLMMDSINKNYVDMDEYPVTTELQNRCVNMIAHLFNAPLGETETAVGVGTVGSSEAIMLAGLAFKRRWQNKMKAAGKPCDKPNIVTGANXVQVCXWEKFARYFEVELKEMKLSEGYYVMDPEEGVEMVDENTICVAAIL

SEQ ID NO: 6291 - protein, 182 aa, Zea mays
  unsure (1)..(182): unsure at all Xaa locations
MVVTVAATGSDTAEPLHSTTFASRYVRDQLPRYRMPEGSIPKEAAYQIISDELMLDGNPRLNLASFVTTWMEPECGKLMMDSVNKNYVDMDEYPVTTELQNRCVNMIAHLFNAPIGEDETAIGVSTVGSSEAIMLAGLAFKRKWANKMKEQGKPCDKPNIVTGANVQVCWEKFARYFEVELX

SEQ ID NO: 6292 - protein, 193 aa, Zea mays
  unsure (1)..(193): unsure at all Xaa locations
MVLSHAASAGSSDDSVHSTFASRYVRASLPRFRMPENSIPKEAAYQIINDELMLDGNPRLNLASFVTTWMEPECNKLMMDSINKNYVDMDEYPVTTELQNRCVNMIAHLFNAPLGETETAVGVGTVRSSEAIMLAGLAFKRRWQNKMKAAGKPCDKPNIVTGANVQVXCWEKFARYFEVELKEVKLSEGYYVX

SEQ ID NO: 6293 - protein, 207 aa, Zea mays
  unsure (1)..(207): unsure at all Xaa locations
MVVSVAATGPGTDAEPVSSTFFASRYVRDPLPRYRMPERSIPREAAQQIISDELMLDGNPRLNLASFVTTWMEPECDKLIMDSINKNYVDMDEYPVTTELQNRCVNMIAHLFNAPIKEDETAIGVGTVGSSEAIMLAGLAFKRKWQNKRKEQGKPCDRPNIVTGANVQXIQEPQIMDVNVGFKKKKKKKKKKKKKKKKKKKTKKKKX

SEQ ID NO: 6294 - protein, 254 aa, Zea mays
  unsure (1)..(254): unsure at all Xaa locations
RTGWEQSIHVDAASGGFIAPFLYPELEWDFRLPLVKSINVSGXKYGLVYAGIGWCIWRTKEDLPGELIFHINYLXADQPTFTLNFSKGSSQIIAQYYQLIRLGFEGYKDVMQNCRDNAAVLREGINKMGYFDVVSKDSGVPLVAFSLKDSSKYTGFEVAESLRRFGWIVPAYTMPADAEHVAVMRVVIREDFSRGLAERLIADLGKTMADMDAHAGRKQAPEQPKKSVHDIEKEVTTFWRRLVANSKKKSSMVC

SEQ ID NO: 6295 - protein, 139 aa, Zea mays
  unsure (1)..(139): unsure at all Xaa locations
EGVQQIIRTELMLDANPRLNLGSLVPRWMEPKCDKLIMDSTTKNXVDMAEYPVPPEPQNPWVNIKAPLFNAPIKEDETAIGVGTVGSSEAIMLAGLAFKRKWQNKRKEQGKPCPPPNMVPGANVQXIQDPQIMDVNVGF

SEQ ID NO: 6296 - protein, 514 aa, Aspergillus oryzae
MVHLAQVHRNADLDSTIKRVDSIQLENTDEDGFYSSVYGTRFATEQLPQTEMPEREMPREVAYRMIKDELSLDGNPMLNLASFVTTYMEDEAEKLMTESFSKNFIDYEEYPQSAEIQNRCVNMIARLFNAPVHSEDEHPMGTSTIGSSEAIMLGTLAMKRRWQNKRKAEGKDYSRPNIVMNSAVQVCWEKAARYFDVEERYVYCTEDRYVIDPQQAVDLVDENTIGICAILGTTYTGEYEDVKAINDLLIERNIDVPIHVDAASGGFVAPFINPKLEWDFRLPKVVSINVSGHKYGLVYPGVGWVVWRSPEYLPKDLIFNINYLGAEQASFTLNFSKGASQVIGQYYQMIRLGKRGYRSIMTNITVTADFLAQELEKMGFIIMSQRRGHGLPLVAFRLPAEREGQFDEFALAHQLRERGWIVPAYTMAPNSNNLKLMRVVVREDFTKSRCDALLSDIKLGLKTLGDMDKAMLDKYTQHVRTHATHSHKSKHNHPHYKGETHSLQGKHGKTHGVC

SEQ ID NO: 6297 - protein, 604 aa, Neurospora crassa
MSLSRHVDPEEIIHHLKDIKLQEKGSGSQRQNHLTPYNSSYASQEDIPKYKIPENGTPGDTVYAMLRDELDLDGRPNLNMASFVNTYIEKDAQKLFVENLGKNLSDNDEYPAMISFSDRCVSILAHLWGVQKGEKAIGTATVGSSEAVHLGGLAMKRRWQEKRRAEGKDAYKPNIIMGANAQVALEKFARYFDVEARILPVSAQSNYCLDPALVKENLDENTIGVFVILGSTYTGHYEPVEEIHKILDDFESQTGIDIPIHVDAASGGFVAPFTYAKTGGHKWNFELPRVKSINVSGHKYGLVTPGVGWIVWRDESFLPKHLIFELHYLGGTEYSYTLNFSRPGAQVIVQYYNLIHLGFQGYRAVVENCLSNARLLSKALEATGWYTCVSDIHRPPQKQAGSVKSGSSGYDGENDQSCCSESQNDDQKAESEESKTHASSSSLSSSKDTPETDRNREETSADYTPGLPVVSFRFTDEFQQEYPHVKQETVSLLMRARQWIIPNYALPPNEDQTEILRVVIRESFSFDLIDRLVTDLVSVTETLMENDEVDLSLLQQHQGGRRRPLTKDEKRIEKEEREREERKGEERGEEKGKRMGEGIHRSVC

SEQ ID NO: 6298 - protein, 520 aa, Neurospora crassa
MVHLTIIPKEDEIRDGLDIPLTGALKAVHLQLANDEDRFTTSVYGSKFAAADLPRHEMPDEEMPKEVAYRMIKDELSLDGNPLLNLASFVTTYMEEEAEKLMTESLPKNFIDYEEYPQTADIQNRCVSMIGRLFNAPVKDAEASSAVGTSSVGSSEAIMLGVLAMKKRWKNKRIAEGKPADKPNLIMSSAVQVCWEKATRYFEVEEKFVYCTPDRYVIDPKETVDLVDENTIGICCILGTTYTGEYEDVKAVNDLLVERGLDTPIHVDAASGGFVAPFVVPDLEWDFRLKNVVSINVSGHKYGLVYPGVGWVVWRSAEYLPQELVFNINYLGADQASFTLNFSKGASQVIGQYYQLIRLGKHGYRAIMSNLTRTADYLAESLAALGFIIMSQKSGQGLPLVAFRLKEDPDRTYDEFALAHQLRVRGWIVPAYTMAPKTEGLKMLRIVVREDFSRNRCDGLISDIRSCQGILEQMDKETVKKQQEFIHKHHVVSGKASHNHPKYHEKHSLQGKTGKTHSIC

SEQ ID NO: 6299 - protein, 520 aa, Neurospora crassa
MVHLTIIPKEDEIRDGLDIPLTGALKAVHLQLANDEDRFTTSVYGSKFAAADLPRHEMPDEEMPKEVAYRMIKDELSLDGNPLLNLASFVTTYMEEEAEKLMTESLPKNFIDYEEYPQTADIQNRCVSMIGRLFNAPVKDAEASSAVGTSSVGSSEAIMLGVLAMKKRWKNKRIAEGKPADKPNLIMSSAVQVCWEKATRYFEVEEKFVYCTPDRYVIDPKETVDLVDENTIGICCILGTTYTGEYEDVKAVNDLLVERGLDTPIHVDAASGGFVAPFVVPDLEWDFRLKNVVSINVSGHKYGLVYPGVGWVVWRSAEYLPQELVFNINYLGADQASFTLNFSKGASQVIGQYYQLIRLGKHGYRAIMSNLTRTADYLAESLAALGFIIMSQKSGQGLPLVAFRLKEDPDRTYDEFALAHQLRVRGWIVPAYTMAPKTEGLKMLRIVVREDFSRNRCDGLISDIRSCQGILEQMDKETVKKQQEFIHKHHVVSGKASHNHPKYHILWSESNSSRNQATPE

SEQ ID NO: 6300 - protein, 328 aa, Escherichia coli
MDKKQVTDLRSELLDSRFGAKSISTIAESKRFPLHEMRDDVAFQIINDELYLDGNARQNLATFCQTWDDENVHKLMDLSINKNWIDKEEYPQSAAIDLRCVNMVADLWHAPAPKNGQAVGTNTIGSSEACMLGGMAMKWRWRKRMEAAGKPTDKPNLVCGPVQICWHKFARYWDVELREIPMRPGQLFMDPKRMIEACDENTIGVVPTFGVTYTGNYEFPQPLHDALDKFQADTGIDIDMHIDAASGGFLAPFVAPDIVWDFRLPRVKSISASGHKFGLAPLGCGWVIWRDEEALPQELVFNVDYLGGQIGTFAINFSAGGSGNCTVL

SEQ ID NO: 6301 - protein, 361 aa, Escherichia coli
DLWHAPAPKNGQAVGTNTIGSSEACMLGGMAMKWRWRKRMEAAGKPTDKPNLVCGPVQICWHKFARYWDVELREIPMRPGQLFMDPKRMIEACDENTIGVVPTFGVTYTGNYEFPQPLHDALDKFQADTGIDIDMHIDAASGGFLAPFVAPDIVWDFRLPRVKSISASGHKFGLAPLGCGWVIWRDEEALPQELVFNVDYLGGQIGTFAINFSRPAGQVIAQYYEFLRLGREGYTKVQNASYQVAAYLADEIAKLGPYEFICTGRPDEGIPAVCFKLKDGEDPGYTLYDLSERLRLRGWQVPAFTLGGEATDIVVMRIMCRRGFEMDFAELLLEDYKASLKYLSDHPKLQGIAQQNSFKHT

SEQ ID NO: 6302 - protein, 284 aa, Escherichia coli
AGKPTDKPNLVCGPVQISWHKFARYWDVELREIPMRPGQLFMDPKRMIEACDENTIGVVPNFGVTYTGNYEFPQPLHDALDKFQADTGIDIDMHIDAASGGFLAPFVAPDIVWDFRLPRVKSISASGHKFGLAPLGCGWVIWRDEEAVPQELVFNVDYLGGQIGTFAINFSRPAGQVIAQYYEFLRLGREGYTKVQNASYQVAAYLADEIAKLGPYEFICTGRPDEGIPAVCFKLKDGEDPGYTLYDLSERLRLRGWQVPAFTLGGEATDIVVMRIMCRRGFEM

SEQ ID NO: 6303 - protein, 161 aa, Escherichia coli
MKNKSGNSYYREAVDIHSSLELSFILHKYHLRVDEKKSRNVFSAIRDELILDGDSRQNLATFCQTWIDDEIRELLNLSIDRNMIYKDEYPQMAEPEGRCVRMLSDSWSFPDSRHTLGCSTIGSSEAAMLGRLALKWQWCKKREVQGKSTEPDLRSCANMLA

SEQ ID NO: 6304 - protein, 542 aa, Caenorhabditis elegans
MDFALEQYHSAKDLLIFELRKFNPIVLVSSTIVATYVLTNLRHMHLDEMGIRKRLSTWFFTTVKRVPFIRKMIDKQLNEVKDELEKSLRIVDRSTEYFTTIPSHSVGRTEVLRLAAIYDDLEGPAFLEGRVSGAVFNREDDKDEREMYEEVFGKFAWTNPLWPKLFPGVRIMEAEVVRMCCNMMNGDSETCGTMSTGGSISILLACLAHRNRLLKRGEKYTEMIVPSSVHAAFFKAAECFRIKVRKIPVDPVTFKVDLVKMKAAINKRTCMLVGSAPNFPFGTVDDIEAIGQLGLEYDIPVHVDACLGGFLLPFLEEDEIRYDFRVPGVSSISADSHKYGLAPKGSSVVLYRNKELLHNQYFCDADWQGGIYASATMEGSRAGHNIALCWAAMLYHAQEGYKANARKIVDTTRKIRNGLSNIKGIKLQGPSDVCIVSWTTNDGVELYRFHNFMKEKHWQLNGLQFPAGVHIMVTMNHTHPGLAEAFVADCRAAVEFVKSHKPSESDKTSEAAIYGLAQSIPDRSLVHEFAHSYIDAVYALTE

SEQ ID NO: 6305 - protein, 606 aa, Caenorhabditis elegans
MGVAFDSSDRDLSFRIALEYFDDLRILFNAKCSGLEPWQIVSYAISLCFLIAYIKRMTRSNEPPLVQIRKSIFSFLRSLPWVRRKLEADLAKAQAEIEDEVHQSDHMREFYKFLPERCMDTEEILADGRRYAMMGERRYMQHYDPQTREEDMKLSAKLFDLFAHTDPHRSDAFPGVRKMEAEILKMTCAMFHGGKDSCGVVAGGGTEALMLACLAYRNRSRARGEWRAEIVAPSTAHPALDKAAAFFDMTIKRIQVSETDDRANVGAMKRAIGPRTCMIIASAPNHITGTVDPIEKLAKLAQRYHIPLHVDCTLGGFVLPFMEYADYSVPAFDFRLPGVTSISADLHRYGQCPGRLSVLMYREPAFLRHQFFTNSEWPGGCYATPTMSGGRDGGAVATAWAMMLRKGRDGYINAAQRIIEATRQLAYRLQGLDGVSLRGSADLCVVAFTTSEVNVYNLVDVMVQKGWHVDPLLSPAAARVPISLSMCEEGVLDHFLEDLEMAICNLKSMEPAEKLGTTASFYQMLQKVNDKTLVDELSLIRLAAHYSIPPPAERRSLRTLSVEGRKLSMLGATGDMGKKLEELRRGFQKEKEAKQEALKNENSEEK

SEQ ID NO: 6306 - protein, 552 aa, Caenorhabditis elegans
MDSVKHTTEIIVDLTKMHYHMINDRLSRYDPVVLVLAAFGGTLVYTKVVHLYRKSEDPILKRMGAYVFSLLRKLPAVRDKIEKELAAEKPKLIESIHKDDKDKQFISTLPIAPLSQDSIMELAKKYEDYNTFNIDGGRVSGAVYTDRHAEHINLLGKIYEKYAFSNPLHPDVFPGARKMEAELIRMVLNLYNGPEDSSGSVTSGGTESIIMACFSYRNRAHSLGIEHPVILACKTAHAAFDKAAHLCGMRLRHVPVDSDNRVDLKEMERLIDSNVCMLVGSAPNFPSGTIDPIPEIAKLGKKYGIPVHVDACLGGFMIPFMNDAGYLIPVFDFRNPGVTSISCDTHKYGCTPKGSSIVMYRSKELHHFQYFSVADWCGGIYATPTIAGSRAGANTAVAWATLLSFGRDEYVRRCAQIVKHTRMLAEKIEKIKWIKPYGKSDVSLVAFSGNGVNIYEVSDKMMKLGWNLNTLQNPAAIHICLTINQANEEVVNAFAVDLEKICEELAAKGEQKADSGMAAMYGMAAQVPKSVVDEVIALYIDATYSAPPSTSN

SEQ ID NO: 6307 - protein, 182 aa, Trichoderma atroviride
  unsure (1)..(182): unsure at all Xaa locations
QRQAEGKPTDKPNIIMSSAVQVCWEKAARYFEVEEKYVYCTPDRYTIDPQQAVDLXDENTIGIAAILGTTYTGHYEDVKGINDLLEEKGLDVSIHVDAASGGFVAPFVLPDLEWDFRLPRVVSINASGHKYGLVYPGVGWVVWRSHEYLPQDLIFNINYLGAEQSSFTLNFSKGASQVIGQY

SEQ ID NO: 6308 - protein, 464 aa, Edwardsiella tarda
  unsure (1)..(464): unsure at all Xaa locations
MKKGTDTRGGYLDSRFGSEAIRTAAEAHHFPQGEMREDIAFQVINDELFLDGNARQNLATFCQTWDDDYVHRLMDISINKNWIDKEEYPQSAAIDLRCVNMVADLWHAPRPADGQAVGTNTIGSSEACMLGGMAMKWRWRAKRLAQGKSVDKPNMVCGPVQVCWHKFARYWDVELREIPMAPGKLXMDPERMIAACDENTIGVVPTFGVTYTGNYEMPDVLHKALDDLQARTGLDIDMHVDAASGGFLAPFCAPDIVWDFRLPRVKSISASGHKFGLAPLGCGWVVWRDAASLPDDLIFKVDYLGGQVGTFAINFSRPAGRVIAQYYEFLRLGREGYTKVHTASYQVAQFLAAEIAKLGPYEFICSGDPQQGIPAVCFRIPAGKALGYSLYDLSERLRLRGWQVPAFALNGEMSDVVVMRIMCRRGFEMDFAQLLMEDFRAALAYLKAHPAVANVAHQNSFKHS

SEQ ID NO: 6309 - protein, 355 aa, Halobacterium sp. NRC-1
MTRGEARRPPQEFDRVLSSMCTTPHPAAREAAQAFLATNPGDPETYPAVAERERDAVALLGEIVGLSSPHGYIAAGGTEANLQAVRAARNRADADAVNVVAPASAHFSFQKAADVLGVELRLAPTDGDHRADVAAVADLVDGDTAVVVGVAGTTEYGRVDPIPALADIAAGVDANLHVDAAWGGFVLPFTDHDWSFADAPVNTMAIDPHKMGQAPVPAGGFLARDPETLDALAIETPYLESDTQPTLGGTRSGAGVAGALASLRALWPDGYREQYERTQGNAEYLAAELAARGYDVVDPELPLVAADMPDAEFQALREEGWRISRTASDALRVVCMPHVTREMLAAFLDDVDALA

SEQ ID NO: 6310 - protein, 545 aa, Drosophila melanogaster
MRPFSGSDCLKPVTEGINRAFGAKEPWQVATITATTVLGGVWLWTVICQDENLYIRGKRQFFKFAKKIPAVRRQVETELAKAKNDFETEIKKSNAHLTYSETLPEKGLSKEEILRLVDEHLKTGHYNWRDGRVSGAVYGYKPDLVELVTEVYGKASYTNPLHADLFPGVCKMEAEVVRMACNLFHGNSASCGTMTTGGTESIVMAMKAYRDFAREYKGITRPNIVVPKTVHAAFDKGGQYFNIHVRSVDVDPETYEVDIKKFKRAINRNTILLVGSAPNFPYGTIDDIEAIAALGVKYDIPVHVDACLGSFVVALVRNAGYKLRPFDFEVKGVTSISADTHKYGFAPKGSSVILYSDKKYKDHQFTVTTDWPGGVYGSPTVNGSRAGGIIAACWATMMSFGYDGYLEATKRIVDTARYIERGVRDIDGIFIFGKPATSVIALGSNVFDIFRLSDSLCKLGWNLNALQFPSGIHLCVTDMHTQPGVADKFIADVRSCTAEIMKDPGQPVVGKMALYGMAQSIPDRSVIGEVTRLFLHSMYYTPSQK

SEQ ID NO: 6311 - protein, 479 aa, Prochlorococcus marinus str. MIT 9313
MALHRSNPRSNDLEEHAIGETVDALVSPLPRTTFPQEYRPALTTFNLLKEELLLDGNSKQNLATFCQTYESQQVAELMALAVDKNLIDKDEYPQTAEIERRCVSMMADLWHAPGEAVGCSTIGSSEAAMLGGLAAKWRWREHRKAAGQSIDRPNMVCGSVQICWTKFARYWDVELREVEMTSGELCMSPERMLEQVDENTIVVVPTLGVTYHGLYEDVQAVSQALDELQQRKGLDIPIHVDAASGGFLAPFCAPDLAPWDFRLPRVKSINSSGHKFGLAPLGVGWVLWRESRDLPEGLVFHVSYLGGDMPTFQINFSRPAGQVISQYYDFVRLGRDGYQAIHGASYANAQYVAQELKKLGPFELINDGNPAGGIPTVVWTLRADQELGFNLYDLSDRLRLRGWQVPAYPFTGELAHQAFQRILVKRDFSREMADLLLTDIRNAITHFESHPVKISLNANEAASTNHLGRSMVECRDAHG

SEQ ID NO: 6312 - protein, 460 aa, Mycobacterium tuberculosis H37Rv
MSRSHPSVPAHSIAPAYTGRMFTAPVPALRMPDESMDPEAAYRFIHDELMLDGSSRLNLATFVTTWMDPEAEKLMAETFDKNMIDKDEYPATAAIEARCVSMVADLFHAEGLRDHDPTSATGVSTIGSSEAVMLGGLALKWRWRQRVGSWKGRMPNLVMGSNVQVVWEKFCRYFDVEPRYLPMERGRYVITPEQVLAAVDENTIGVVAILGTTYTGELEPIAEICAALDKLAAGGGVDVPVHVDAASGGFVVPFLHPDLVWDFRLPRVVSINVSGHKYGLTYPGVGFVVWRGPEHLPEDLVFRVNYLGGDMPTFTLNFSRPGNQVVGQYYNFLRLGRDGYTKVMQALSHTARWLGDQLREVDHCEVISDGSAIPVVSFRLAGDRGYTEFDVSHELRTFGWQVPAYTMPDNATDVAVLRIVVREGLSADLARALHDDAVTALAALDKVKPGGHFDAQHFAH

SEQ ID NO: 6313 - protein, 466 aa, Escherichia coli K12
MDQKLLTDFRSELLDSRFGAKAISTIAESKRFPLHEMRDDVAFQIINDELYLDGNARQNLATFCQTWDDENVHKLMDLSINKNWIDKEEYPQSAAIDLRCVNMVADLWHAPAPKNGQAVGTNTIGSSEACMLGGMAMKWRWRKRMEAAGKPTDKPNLVCGPVQICWHKFARYWDVELREIPMRPGQLFMDPKRMIEACDENTIGVVPTFGVTYTGNYEFPQPLHDALDKFQADTGIDIDMHIDAASGGFLAPFVAPDIVWDFRLPRVKSISASGHKFGLAPLGCGWVIWRDEEALPQELVFNVDYLGGQIGTFAINFSRPAGQVIAQYYEFLRLGREGYTKVQNASYQVAAYLADEIAKLGPYEFICTGRPDEGIPAVCFKLKDGEDPGYTLYDLSERLRLRGWQVPAFTLGGEATDIVVMRIMCRRGFEMDFAELLLEDYKASLKYLSDHPKLQGIAQQNSFKHT

SEQ ID NO: 6314 - protein, 568 aa, Homo sapiens
MPSTDLLMLKAFEPYLEILEVYSTKAKNYVNGHCTKYEPWQLIAWSVVWTLLIVWGYEFVFQPESLWSRFKKKCFKLTRKMPIIGRKIQDKLNKTKDDISKNMSFLKVDKEYVKALPSQGLSSSAVLEKLKEYSSMDAFWQEGRASGTVYSGEEKLTELLVKAYGDFAWSNPLHPDIFPGLRKIEAEIVRIACSLFNGGPDSCGCVTSGGTESILMACKAYRDLAFEKGIKTPEIVAPQSAHAAFNKAASYFGMKIVRVPLTKMMEVDVRAMRRAISRNTAMLVCSTPQFPHGVIDPVPEVAKLAVKYKIPLHVDACLGGFLIVFMEKAGYPLEHPFDFRVKGVTSISADTHKYGYAPKGSSLVLYSDKKYRNYQFFVDTDWQGGIYASPTIAGSRPGGISAAAWAALMHFGENGYVEATKQIIKTARFLKSELENIKGIFVFGNPQLSVIALGSRDFDIYRLSNLMTAKGWNLNQLQFPPSIHFCITLLHARKRVAIQFLKDIRESVTQIMKNPKAKTTGMGAIYGMAQTTVDRNMVAELSSVFLDSLYSTDTVTQGSQMNGSPKPH

SEQ ID NO: 6315 - protein, 568 aa, Homo sapiens
MPSTDLLMLKAFEPYLEILEVYSTKAKNYVNGHCTKYEPWQLIAWSVVWTLLIVWGYEFVFQPESLWSRFKKKCFKLTRKMPIIGRKIQDKLNKTKDDISKNMSFLKVDKEYVKALPSQGLSSSAVLEKLKEYSSMDAFWQEGRASGTVYSGEEKLTELLVKAYGDFAWSNPLHPDIFPGLRKIEAEIVRIACSLFNGGPDSCGCVTSGGTESILMACKAYRDLAFEKGIKTPEIVAPQSAHAAFNKAASYFGMKIVRVPLTKMMEVDVRAMRRAISRNTAMLVCSTPQFPHGVIDPVPEVAKLAVKYKIPLHVDACLGGFLIVFMEKAGYPLEHPFDFRVKGVTSISADTHKYGYAPKGSSLVLYSDKKYRNYQFFVDTDWQGGIYASPTIAGSRPGGISAACWAALMHFGENGYVEATKQIIKTARFLKSELENIKGIFVFGNPQLSVIALGSRDFDIYRLSNLMTAKGWNLNQLQFPPSIHFCITLLHARKRVAIQFLKDIRESVTQIMKNPKAKTTGMGAIYGMAQTTVDRNMVAELSSVFLDSLYSTDTVTQGSQMNGSPKPH

SEQ ID NO: 6316 - protein, 580 aa, Homo sapiens
KRGARRGGWKRKMPSTDLLMLKAFEPYLEILEVYSTKAKNYVNGHCTKYEPWQLIAWSVVWTLLIVWGYEFVFQPESLWSRFKKKCFKLTRKMPIIGRKIQDKLNKTKDDISKNMSFLKVDKEYVKALPSQGLSSSAVLEKLKEYSSMDAFWQEGRASGTVYSGEEKLTELLVKAYGDFAWSNPLHPDIFPGLRKIEAEIVRIACSLFNGGPDSCGCVTSGGTESILMACKAYRDLAFEKGIKTPEIVAPQSAHAAFNKAASYFGMKIVRVPLTKMMEVDVRAMRRAISRNTAMLVCSTPQFPHGVIDPVPEVAKLAVKYKIPLHVDACLGGFLIVFMEKAGYPLEHPFDFRVKGVTSISADTHKYGYAPKGSSLVLYSDKKYRNYQFFVDTDWQGGIYASPTIAGSRPGGISAACWAALMHFGENGYVEATKQIIKTARFLKSELENIKGIFVFGNPQLSVIALGSRDFDIYRLSNLMTAKGWNLNQLQFPPSIHFCITLLHARKRVAIQFLKDIRESVTQIMKNPKAKTTGMGAIYGMAQTTVDRNMVAELSSVFLDSLYSTDTVTQGSQMNGSPKPH

SEQ ID NO: 6317 - protein, 459 aa, Ferroplasma acidarmanus
MVSRKMNPERKIYGTYSNRDFNNPVPEFEFPEEGMASRAAYEMIHEELKLDGIPELNLATFVTTYMEPEAKNLYMENAHKNFIDSFEYPQIKKEETRIVNILSRLYNAPEGKDFTGTSTIGSSESIMLALLAHKWNWKSKMEALKKDASKPNIVFGADTHVVWDKFAKYFDVEARVVPLDAKTRVVDPDKLIENVDENTIAVGAVLGTTFTGAFDDVKRINSLLEELKSKKGLDIPIHVDAASAGFITPFIEPELEWDFRLSHVKSINVSGHKFGLVYPGLGWLLFKDKADLPDDLVFYVNYLGDDMPTYTLNFSKSAANIAPQYYNIIRLGKSGYRNIAENIMKNAKYLADKISEFPELEVVSRAEHIPVVTFRQKTSSSYTLFDLSAAIRSYGWIVPAYSLPDNANDTVLMRVVVREGFSRDLADIFLENLKQSMEKLSGKGIEKSKISSRRGHAVS

SEQ ID NO: 6318 - protein, 155 aa, Chlamydomonas sp. W80
GSPGLQALLEEAENERMHLLTFLEMRQPSWMFRAAVLLAQGAYFNMFFISYLISPKFCHAVVGYLEEEAVKTYTHLLHDIDAGHVWKDKPAPKTGIAYWKLSPDATMRDLILAVRADEASHSLVNHTLSEIPSDAPNPFIEPAKADAFSKAENKL

SEQ ID NO: 6319 - protein, 230 aa, Nostoc sp. PCC 7120
MIRLLVGILVFVINTVYRDRPYPRFYVLETVARVPYFSYLSVLHLYETLGWWRKADWLKVHFAESWNELHHLLIMESLGGAGFWGDRFLAKTAALIYYWIIIAVYFVSPHSAYNFMEQVEQHAYSSYDKFLTTHEAELKTQPAPEVAKTYYRDGDLYMFDEFQTAHSPSERRPNIDNLYDVFVAIRDDEMEHVKTMVACQQTNAKYSLKSPHNPEAKTVVLTNAQMNTQV

SEQ ID NO: 6320 - protein, 377 aa, Magnaporthe grisea
MLVHQVNTKLCSAKQFTHLAKVVTPALSYQASSVYSANLPRLAASPRLFSTTSSAQLRDFFPVKETEHIRQTPPTWPHHGLTEKEMVDVVPGHRKPRTLGDKFAWSLVRISRWGMDKVSGLSSEQQQINKGSPTTSIVAAKPLTEAQWLSRFIFLESIAAVPGMVAGMLRHLHSLRRLKRDNGWIETLLEEAYNERMHLLTFLKMCEPGWLMKILIIGAQGVYFNAMFVAYLISPKICHRFVGYLEEEAVHTYTRSIEELERGDLPKWSDPKFQVPEIAVSYWGMPEGHRTMRDLLLYIRADEANHRGVHHTLGNLNQVEDPNPFVSDYKGDKPRPVAASRPEGFEREEVIGKEVIGKEVIEKDVIGKEVLGKQVSV

SEQ ID NO: 6321 - protein, 351 aa, Aspergillus nidulans
MSTTGPIRVAAIPKHYLQFTVRTYTRSMASAGLRYSNPPLVKKCYDQPTGKRFISSTPQSQIKDYFPPPDAPKIVEVKTAWAHPVYSEEEMRAVTVGHREAKNWSDWVALGSVRLLRWGMDLVTGYKHPAPGQEDIKKFQMTEKEWLRRFVFLESVAGVPGMVGGMLRHLRSLRRMKRDNGWIETLLEEAYNERMHLLTFLKMAEPGWFMRLMVLGAQGVFFNGFFLSYLISPRTCHRFVGYLEEEAVLTYTRAIKDLESGRLPHWEKLEAPEIAVKYWKMPEGNRTMKDLLLYVRADEAKHREVNHTLGNLKQAVDVNPFAVEWKDPSKPHPGKGIKHLKTTGWEREEVV

SEQ ID NO: 6322 - protein, 354 aa, Aspergillus nidulans
MNSMSTTGPIRGGAIPKHYLQFTVRTYTRSMASAGLRYSNPPLVKKCYDQPTGKRFISSTPQSQIKDYFPPPDAPKIVEVKTAWAHPVYSEEEMRAVTVGHREAKNWSDWVALGSVRLLRWGMDLVTGYKHPAPGQEDIKKFQMTEKEWLRRFVFLESVAGVPGMVGGMLRHLRSLRRMKRDNGWIETLLEEAYNERLFLLTFLKMAGPGWFMRLMVLGAQGVFFNGFFLSYLISPRTCHRFVGYLEEEAVLTYTRAIKDLESGRLPHWEKLEAPEIAVKYWKMPEGNRTMKDLLLYVRADEAKHREVNHTLGNLKQAVDVNPFAVEWKDPSKPHPGKGIKHLKTTGWEREEVV

SEQ ID NO: 6323 - protein, 401 aa, Cryptococcus neoformans var. grubii
MSAIMLRSGNVARSTILAGGPLIGGPMTFRSAVSSTRTFSLFTKARIQSDDMKRASLSLQPSVREAEKSQGPVVGSEGREVEGPHYQDQVSHNVLSDASTTGAWTMLNPIYTEKELNTVQVVGRAPVTFGDKAAHRTVKFLRKCFDLLTGYTPYEVPASVLAQKPIPIAELRSKGKLLSDQKWLFRIILLESIAGVPGMVGGTLRHLRSMRLLKRDGGWIHSLLEEAENERMHLLTFMTIAQPGIFTRALVLAAQGVFYNAFFLTYLISPRIAHRFVGALEEEAVRTYTHCISDMEAGLIPEWKDMPAPAIAIDYWRLPASSSLLDVIRAVRADEATHRFVNHSLANLDQKRDFNPFALSEASPEERGSKWGYTREESAKFALEQQRKLMAASEKSSGLVE

SEQ ID NO: 6324 - protein, 362 aa, Gelasinospora sp. S23
MNTPKVNILYSPGQAAQLSRTLISTCHTRPFLLGGLRVATSLHPTQTNLSSSPPRGFTTTSVVRLKDFFPAKETAYIRQTPPAWPHHGWTEEEMISVVPEHRKPETVGDWLAWKLVRICRWGTDIATGIRPEQQVDKNHPTTATSADKPLTEAQWLVRFIFLESIAGVPGMVAGMLRHLHSLRRLKRDNGWIETLLEESYNERMHLLTFMKMCEPGLLMKTLILGAQGVFFNAMFLSYLVSPKITHRFVGYLEEEAVHTYTRCIREIEEGHLPKWSDERFEIPEMAVRYWRMPEGKRTMKDLIYYIRADEAVHRGVNHTLSNLDQKEDPNPFVNDYKEGEGGRRPVNPALKPTGFERAEVIR

SEQ ID NO: 6325 - protein, 318 aa, Mangifera indica
MTVMRGLLNGGRYGNRYIWTAISLRHPEVMEGNGLESAVMQWRRMLSNAGGAEAQVKEQKEEKKDAMVSNYWGISRPKITREDGSEWPWNCFMPWETYRSDLSIDLKKHHVPRTFMDKFAYRTVKILRVPTDIFFQRRYGCRAMMLETVAAVPGMVGGMLLHLKSLRKLEQSGGWIKALLEEAENERMHLMTMVELVQPKWYERLLVLAVQGVFFNSFFVLYVLSPKLAHRIVGYLEEEAIHSYTEYLKDIDSGAIKNIPAPAIAIDYWRLPKDATLKDVITVVRADEAHHRDVNHFASDVQVQGKELRDAPAPVGYH

SEQ ID NO: 6326 - protein, 274 aa, Mangifera indica
MLSNAGGAEAQVKEQKEEKKDAMVSNYWGISRPKITREDGSEWPWNCFMPWETYRSDLSIDLKKHHVPRTFMDKFAYRTVKILRVPTDIFFQRRYGCRAMMLETVAAVPGMVGGMLLHLKSLRKLEQSGGWIKALLEEAENERMHLMTMVELVQPKWYERLLVLAVQGVFFNSFFVLYVLSPKLAHRIVGYLEEEAIHSYTEYLKDIDSGAIKNIPAPAIAIDYWRLPKDATLKDVITVVRADEAHHRDVNHFASDVQVQGKELRDAPAPVGYH

SEQ ID NO: 6327 - protein, 144 aa, Mangifera indica
LETVAAVPGMVGGMLLHLKSLRKLEQSGGWIKALLEEAENERMHLMTMVELVQPKWYERLLVLAVQGVFFNSFFVLYVLSPKLAHRIVGYLEEEAIHSYTEYLKDIDSGAIKNIPAPAIAIDYWRLPKDATLKDVITVVRADEA

SEQ ID NO: 6328 - protein, 144 aa, Mangifera indica
LETVAAVPGTVGGMLLHCKSLRKFEHSGGWIKVLTEEAENERMHLMTFMEVAKPRWYERALILAVQGVFFNVYMLGYLISPKFAHRVVGYLEEEAILSYTEFLKELDKGNIENVPAPAIAIDYWRLPPESTLRDVVIVVRADEC

SEQ ID NO: 6329 - protein, 78 aa, Mangifera indica
MVGGMLLHCKSLRKFEHSGGWIKALLEEAENERMHLMTFMEVAQPRWYERALVFTVQGVFFNAYFLGYLISPKFAHRM

SEQ ID NO: 6330 - protein, 78 aa, Mangifera indica
GGGGMLLHFKSLRKFEHRGGWIKALLEEAENERTHLMIFVEVAKPRWYERALILRVQGVFLNAYSLGYLISPKFAHRI

SEQ ID NO: 6331 - protein, 339 aa, Chlamydomonas reinhardtii
MASASRLLGSIASVPPQHGGAGFQAVRGFATGAVSTPAASSPGHKPAATHAPPTRLDLKPGAGSFAAGAVAPHPGINPARMAADSASAAAGASGDAALAESYMAHPAYSDEYVESVRPTHVTPQKLHQHVGLRTIQVFRYLFDKATGYTPTGSMTEAQWLRRMIFLETVAGCPGMVAGMLRHLKSLRSMSRDRGWIHTLLEEAENERMHLITFLQLRQPGPAFRAMVILAQGVFFNAYFIAYLLSPRTCHAFVGFLEEEAVKTYTHALVEIDAGRLWKDTPAPPVAVQYWGLKPGANMRDLILAVRADEACHAHVNHTLSQLNPSTDANPFATGASQLP

SEQ ID NO: 6332 - protein, 360 aa, Chlamydomonas reinhardtii
MLQTAPMLPGLGPHLVPQLGALASASRLLGSIASVPPQHGGAGFQAVRGFATGAVSTPAASSPGHKPAATHAPPTRLDLKPGAGSFAAGAVAPHPGINPARMAADSASAAAGASGDAALAESYMAHPAYSDEYVESVRPTHVTPQKLHQHVGLRTIQVFRYLFDKATGYTPTGSMTEAQWLRRMIFLETVAGCPGMVAGMLRHLKSLRSMSRDRGWIHTLLEEAENERMHLITFLQLRQPGPAFRAMVILAQGVFFNAYFIAYLLSPRTCHAFVGFLEEEAVKTYTHALVEIDAGRLWKDTPAPPVAVQYWGLKPGANMRDLILAVRADEACHAHVNHTLSQLNPSTDANPFATGASQLP

SEQ ID NO: 6333 - protein, 347 aa, Chlamydomonas reinhardtii
MTSLPALVPFAALPALVPFAALASTGRLLGSMSGLVCGAQRRLPAHTAFARSHGTATGHAGIVGGAGLSHVKDAAQAFGANQSSSSPSFATSGVAPHPGMKAPSPPTDDEVEACWRPVYDTAYLEKVKPFHITPERLYQRIGFRAIMAARWTFDKLTGYGPNMTEAKWLQRMIFLETIAGVPGMVAGVLRHLKSLRSMKRDHGWIHTLLQEAENERMHLLTFFELRKPGPLFRASIIVAQGVFWNLYFIGYLVSPRTCHAAVGFLEEEAVKTYTHALQEIDAGRLWKGKVAPPIACEYWGLKPGASMRDLILAVRADEACHAHVNHTLSGLPATAPNPFAYGASQLP

SEQ ID NO: 6334 - protein, 358 aa, Blumeria graminis
MYLSRLPPRSIPCRSINQISRVVARSSKSRLEFVGSYQNSLTTNQTRCLRPFSSTSRSQLRDYFPEADHEHIKKTEAAWPHPNYPKEQMLTNISYAHRTPKDFSDRIALYLVRFLRFSTDLATGYKHDPVTITENGEKVLKKPYRMSERKWLIRMVFLESVAGVPGMVAGMLRHLHSLRRLKRDNGWIETLLEEAYNERMHLLTFLKMAKPGWFMKFMIIGAQGVFFNSMFLSYLISPRTCHRFVAYLEEEAVLTYSTAIQDIEAGLLPKWTSPEFRIPDLAVQYWKIPEGNRTMRDLLLYIRADEAKHREVNHTLGNLDQNEDPNPFVSEYRDKAAPHPSKGIEHIRPTGWERNEII

SEQ ID NO: 6335 - protein, 354 aa, Arabidopsis thaliana
MMITRGGAKAAKSLLVAAGPRLFSTVRTVSSHEALSASHILKPGVTSAWIWTRAPTIGGMRFASTITLGEKTPMKEEDANQKKTENESTGGDAAGGNNKGDKGIASYWGVEPNKITKEDGSEWKWNCFRPWETYKADITIDLKKHHVPTTFLDRIAYWTVKSLRWPTDLFFQRRYGCRAMMLETVAAVPGMVGGMLLHCKSLRRFEQSGGWIKALLEEAENERMHLMTFMEVAKPKWYERALVITVQGVFFNAYFLGYLISPKFAHRMVGYLEEEAIHSYTEFLKELDKGNIENVPAPAIAIDYWRLPADATLRDVVMVVRADEAHHRDVNHFASDIHYQGRELKEAPAPIGYH

SEQ ID NO: 6336 - protein, 305 aa, Arabidopsis thaliana
MDTRAPTIGGMRFASTITLGEKTPMKEEDANQKKTENESTGGDAAGGNNKGDKGIASYWGVEPNKITKEDGSEWKWNCFRPWETYKADITIDLKKHHVPTTFLDRIAYWTVKSLRWPTDLFFQRRYGCRAMMLETVAAVPGMVGGMLLHCKSLRRFEQSGGWIKALLEEAENERMHLMTFMEVAKPKWYERALVITVQGVFFNAYFLGYLISPKFAHRMVGYLEEEAIHSYTEFLKELDKGNIENVPAPAIAIDYWRLPADATLRDVVMVVRADEAHHRDVNHFASDIHYQGRELKEAPAPIGYH

SEQ ID NO: 6337 - protein, 353 aa, Arabidopsis thaliana
MMITRVEPRAQIAVSGGWTTFVLDGPYVSSHEALSRSHILKPGVTSAWIWTRAPTIGGMRFASTITLGEKTPMKEEDANQKKTENESTGGDAAGGNNKGDKGIASYWGVEPNKITKEDGSEWKWNCFRPWETYKADITIDLKKHHVPTTFLDRIAYWTVKSLRWPTDLFFQRRYGCRAMMLETVAAVPGMVGGMLLHCKSLRRFEQSGGWIKALLEEAENERMHLMTFMEVAKPKWYERALVITVQGVFFNAYFLGYLISPKFAHRMVGYLEEEAIHSYTEFLKELDKGNIENVPAPAIAIDYWRLPADATLRDVVMVVRADEAHHRDVNHFASDIHYQGRELKEAPAPIGYH

SEQ ID NO: 6338 - protein, 325 aa, Arabidopsis thaliana
MMMSRRYGAKLMETAVTHSHLLNPRVPLVTENIRVPAMGVVRVFSKMTFEKKKTTEEKGSSGGKADQGNKGEQLIVSYWGVKPMKITKEDGTEWKWSCFRPWETYKSDLTIDLKKHHVPSTLPDKLAYWTVKSLRWPTDLFFQRRYGCRAMMLETVAAVPGMVGGMLVHCKSLRRFEQSGGWIKALLEEAENERMHLMTFMEVAKPNWYERALVIAVQGIFFNAYFLGYLISPKFAHRMVGYLEEEAIHSYTEFLKELDNGNIENVPAPAIAIDYWRLEADATLRDVVMVVRADEAHHRDVNHYASDIHYQGRELKEAPAPIGYH

SEQ ID NO: 6339 - protein, 287 aa, Arabidopsis thaliana
LGEKTPMKEEDANQKKTENESTGGDAAGGNNKGDKGIASYWGVEPNKITKEDGSEWKWNCFRPWETYKADITIDLKKHHVPTTFLDRIAYWTVKSLRWPTDLFFQRRYGCRAMMLETVAAVPGMVGGMLLHCKSLRRFEQSGGWIKALLEEAENERMHLMTFMEVAKPKWYERALVITVQGVFFNAYFLGYLISPKFAHRMVGYLEEEAIHSYTEFLKELDKGNIENVPAPAIAIDYWRLPADATLRDVVMVVRADEAHHRDVNHFASDIHYQGRELKEAPAPIGYH

SEQ ID NO: 6340 - protein, 329 aa, Arabidopsis thaliana
MITTLLRRSLLDASKQATSINGILFHQLAPAKYFRVPAVGGLRDFSKMTFEKKKTSEEEEGSGDGVKVNDQGNKGEQLIVSYWGVKPMKITKEDGTEWKWSCFRPWETYKADLTIDLKKHHVPSTLPDKIAYWMVKSLRWPTDLFFQRRYGCRAIMLETVAAVPGMVGGMLMHFKSLRRFEQSGGWIKALLEEAENERMHLMTFMEVAKPKWYERALVISVQGVFFNAYLIGYIISPKFAHRMVGYLEEEAIHSYTEFLKELDNGNIENVPAPAIAVDYWRLEADATLRDVVMVVRADEAHHRDVNHYASDIHYQGHELKEAPAPIGYH

SEQ ID NO: 6341 - protein, 318 aa, Arabidopsis thaliana
MSYRSIYRTLRPVLSSSVQSSGLGIGGFRGHLISHLPNVRLLSSDTSSPVSGNNQPENPIRTADGKVISTYWGIPPTKITKPDGSAWKWNCFQPWDSYKPDVSIDVTKHHKPSNFTDKFAYWTVQTLKIPVQLFFQRKHMCHAMLLETVAAVPGMVGGMLLHLKSLRRFEHSGGWIKALLEEAENERMHLMTFIELSQPKWYERAIVFTVQGVFFNAYFLAYVISPKLAHRITGYLEEEAVNSYTEFLKDIDAGKFENSPAPAIAIDYWRLPKDATLRDVVYVIRADEAHHRDINHYASDIQFKGHELKEAPAPIGYH

SEQ ID NO: 6342 - protein, 318 aa, Arabidopsis thaliana
MSYRSIYRTLRPVLSSSVQSSGLGIGGFRGHLISHLPNVRLLSSDTSSPVSGNNQPENPIRTADGKVISTYWGIPPTKITKPDGSAWKWNCFQPWDSYKPDVSIDVTKHHKPSNFTDKFAYWTVQTLKIPVQLFFQRKHMCHAMLLETVAAVPGMVGWMLLHLKSLRRFEHSGGWIKALLEEAENERMHLMTFIELSQPKWYERAIVFTVQGVFFNAYFLAYVISPKLAHRITGYLEEEAVNSYTEFLKDIDAGKFENSPAPAIAIDYWRLPKDATLRDVVYVIRADEAHHRDINHYASDIQFKGHELKEAPAPIGYH

SEQ ID NO: 6343 - protein, 317 aa, Arabidopsis thaliana
MSYRSIYRTLRPVLSSSVQSSGLGIGGFRGHLISHLPNVRLLSSDTSSPVSGNNQPENPIRTADGKVISTYWGIPPTKITKPDGSAWKWNCFQPWDSYKPDVSIDVTKHHKPSNFTDKFAYWTVQTLKIPVQLFFQRKHMCHAMLLETVAVPGMVGGMLLHLKSLRRFEHSGGWIKALLEEAENERMHLMTFIELSQPKWYERAIVFTVQGVFFNAYFLAYVISPKLAHRITGYLEEEAVNSYTEFLKDIDAGKFENSPAPAIAMDYWRFPKDATLRDVVYVIRAEEAPPRDINHYASDIQFKGHELKEAPAPIGYH

SEQ ID NO: 6344 - protein, 282 aa, Arabidopsis thaliana
MGMSSASAMEKKDENLTVKKGQNGGGSVAVPSYWGIETAKMKITRKDGSDWPWNCFMPWETYQANLSIDLKKHHVPKNIADKVAYRIVKLLRIPTDIFFQRRYGCRAMMLETVAAVPGMVGGMLLHLKSIRKFEHSGGWIKALLEEAENERMHLMTMMELVKPKWYERLLVMLVQGIFFNSFFVCYVISPRLAHRVVGYLEEEAIHSYTEFLKDIDNGKIENVAAPAIAIDYWRLPKDATLKDVVTVIRADEAHHRDVNHFASDIRNQGKELREAAAPIGYH

SEQ ID NO: 6345 - protein, 353 aa, Arabidopsis thaliana
MSQLITKAALRVLLVCGRGNCNMFVSSVSSTSVMKSPYEITAPMRIHDWCGGFGDFKIGSKHVQGNFNLRWMGMSSASAMEKKDENLTVKKGQNGGGSVAVPSYWGIETAKMKITRKDGSDWPWNCFMPWETYQANLSIDLKKHHVPKNIADKVAYRIVKLLRIPTDIFFQRRYGCRAMMLETVAAVPGMVGGMLLHLKSIRKFEHSGGWIKALLEEAENERMHLMTMMELVKPKWYERLLVMLVQGIFFNSFFVCYVISPRLAHRVVGYLEEEAIHSYTEFLKDIDNGKIENVAAPAIAIDYWRLPKDATLKDVVTVIRADEAHHRDVNHFASDIRNQGKELREAAAPIGYH

SEQ ID NO: 6346 - protein, 287 aa, Arabidopsis thaliana
MSYRSIYRTLRPVLSSSVQSSGLGIGGFRGHLISHLPNVRLLSSDTSSPVSGNNQPENPIRTADGKVISTYWGIPPTKITKPDGSAWKWNCFQPWDSYKPDVSIDRKHMCHAMLLETVAAVPGMVGGMLLHLKSLRRFEHSGGWIKALLEEAENERMHLMTFIELSQPKWYERAIVFTVQGVFFNAYFLAYVISPKLAHRITGYLEEEAVNSYTEFLKDIDAGKFENSPAPAIAIDYWRLPKDATLRDVVYVIRADEAHHRDINHYASDIQFKGHELKEAPAPIGYH

SEQ ID NO: 6347 - protein, 358 aa, Monilinia fructicola
  unsure (1)..(358): unsure at all Xaa locations
MYVARLSTRPLSNPSTAQLSKAAAFFAQSYALPSTKCTAHVPSRRPFTSGAKIQVKGRDLFPEPXHGQIKRTEPAWPHPPYSVEQMRSKVYFAHRKPRDFSDRVALGMVRFLRWCTDFATGYKHNVEAPKTASDSNAVTATKPYQMSERKWLIRYVFLESVAGVPGMVAGMLRHLRSLRGLKRDNGWIETLLEEAYNERMHLLTFLKMYEPGLFMRTMILGAQGVFFNSFFLCYLFSPKTCHRFVGYLEEEAVLTYTLSIQDLENGHLPKWADPNFKAPDLAIEYWGMPEGHRSMRDLLYYIRADEAKHREVNHTLGNLKQDEDPNPFVSVYGKEVADKPGKGIESLRPLGWEREEVI

SEQ ID NO: 6348 - protein, 333 aa, Glycine max
MKLTALNSTVRRALLNGRNQNGNRLGSAALMPYAAAETRLLCAGGANGWFFYWKRTMVSPAEAKVPEKEKEKEKAKAEKSVVESSYWGISRPKVVREDGTEWPWNCFMPWESYRSNVSIDLTKHHVPKNVLDKVAYRTVKLLRIPTDLFFKRRYGCRAMMLETVAAVPGMVGGMLLHLRSLRKFQQSGGWIKALLEEAENERMHLMTMVELVKPKWYERLLVLAVQGVFFNAFFVLYILSPKVAHRIVGYLEEEAIHSYTEYLKDLESGAIENVPAPAIAIDYWRLPKDARLKDVITVIRADEAHHRDVNHFASDIHFQGKELREAPAPIGYH

SEQ ID NO: 6349 - protein, 333 aa, Glycine max; identical to SEQ ID NO: 6348

SEQ ID NO: 6350 - protein, 321 aa, Glycine max
MMMMMSRSGANRVANTAMFVAKGLSGEVGGLRALYGGGVRSESTLALSEKEKIEKKVGLSSAGGNKEEKVIVSYWGIQPSKITKKDGTEWKWNCFSPWGTYKADLSIDLEKHMPPTTFLDKMAFWTVKVLRYPTDVFFQRRYGCRAMMLETVAAVPGMVAGMLLHCKSLRRFEHSGGWFKALLEEAENERMHLMTFMEVAKPKWYERALVITVQGVFFNAYFLGYLLSPKFAHRMFGYLEEEAIHSYTEFLKELDKGNIENVPAPAIAIDYWQLPPGSTLRDVVMVVRADEAHHRDVNHFASDIHYQGRELREAAAPIGYH

SEQ ID NO: 6351 - protein, 321 aa, Glycine max; identical to SEQ ID NO: 6350

SEQ ID NO: 6352 - protein, 321 aa, Glycine max
MMMMMSRSGGNRVANTAMFVAKGLSGEVGGLRALYGGGVRSESTLALSEKEKIEKKVGLSSAGGNKEEKVIVSYWGIQPSKITKKDGTEWKWNCFRAWGTYKADLSIDLEKHMPPTTFLDKMAFWTVKVLRYPTDVFFQRRYGCRAMMLETVAAVPGMVAGMQLHCKSLRRFEHSGGWFKALLEEAENERMHLMTFMEVAKPKWYERALVITVQGVFFNAYFLGYLLSPKFAHRMVGYLEEEAIHSYTEFLKELDKGNIENVPAPAIAIDYWQLPPGSTLRDVVMVVRADEAHHRDVNHFASDIHYQGRELREAAAPIGYH

SEQ ID NO: 6353 - protein, 321 aa, Glycine max; identical to SEQ ID NO: 6352

SEQ ID NO: 6354 - protein, 321 aa, Glycine max
MMMMMSRSGANRVANTAMFVAKGLSGEVGGLRALYGGGVRSESTLALSEKEKIEKKVGLSSAGGNKEEKVIVSYWGIQPSKITKKDGTEWKWNCFSPWGTYKADLSIDLEKHMPPTTFLDKMAFWTVKVLRYPTDVFFQRRYGCRAMMLETVAAVPGMVAGMLLHCKSLRRFEHSGGWFKALLEEAENERMHLMTFMEVAWPKWYERALVITVQGVFFNAYFLGYLLSPKFAHRMFGYLEEEAIHSYTEFLKELDKGNIENVPAPAIAIDYWQLPPGSTLRDVVMVVRADEAHHRDVNHFASDIHYQGRELREAAAPIGYH

SEQ ID NO: 6355 - protein, 326 aa, Glycine max
MKNVLVRSAARALLGGGGRSYYRQLSTAAIVEQRHQHGGGAFGSFHLRRMSTLPEVKDQHSEEKKNEVNGTSNAVVTSYWGITRPKVRREDGTEWPWNCFMPWDSYHSDVSIDVTKHHTPKSLTDKVAFRAVKFLRVLSDIYFKERYGCHAMMLETIAAVPGMVGGMLLHLKSLRKFQHSGGWIKALLEEAENERMHLMTMVELVKPSWHERLLIFTAQGVFFNAFFVFYLLSPKAAHRFVGYLEEEAVISYTQHLNAIESGKVENVPAPAIAIDYWRLPKDATLKDVVTVIRADEAHHRDVNHFASDIHHQGKELKEAPAPIGYH

SEQ ID NO: 6356 - protein, 326 aa, Glycine max; identical to SEQ ID NO: 6355

SEQ ID NO: 6357 - protein, 152 aa, Glycine max
  unsure (1)..(152): unsure at all Xaa locations
XKFQHSGGWIKALXEESKNDRMHLMAMVELVKPSWPERLLIFPAQGVFFNALFVYGLLSPKAAHRFVGHLQEQSVISYTQHLNAIESGKVENALAPAMVMDSGRLPKDATVQDGVTVIRPDEAHHRDVNPCAFNIHQQGKGLKEAPAPIGYH

SEQ ID NO: 6358 - protein, 114 aa, Glycine max
  unsure (1)..(114): unsure at all Xaa locations
LLIFTAQGVVFDAFFVWDLLWPKSAHRFVGHPEEEAGISYTQHLNAIESGKVENVRAPAIAIDGWRLPKDATLKEEVTVICGGEAHHRDVNHFACDIHHQGKELKEAPAPIGYX

SEQ ID NO: 6359 - protein, 111 aa, Glycine max
  unsure (1)..(111): unsure at all Xaa locations
XIXAGQAVFVMAYAXLFYVLSXPRTAHRFVGYLEEEAVWTYTHRLHDMQQPGSLYNWNTEKAPETAVNYWSLNPNSTVRDMIVTIRADEMMHREVSHRFANLYEESKEFPL

SEQ ID NO: 6360 - protein, 160 aa, Glycine max
  unsure (1)..(160): unsure at all Xaa locations
XLSKLQHSGGWFKALFXPSXSHWMHMMKMVELVKPIWRDRLLIFTGQCVFFWAVLLFYLLCPEXAYXAAVGHGXGAAVCSGGPHLNACEXCGKVGGVAALASGIQDCRLPKGAPVKVVGPVFCGSQAHPRVVNHGAFDILHLGKXLKGLPAPCXINSPVL

SEQ ID NO: 6361 - protein, 40 aa, Glycine max
MTFMEVAKPKWYERALVITVQGVFFNAYFLGYLLSPKFAH

SEQ ID NO: 6362 - protein, 329 aa, Vigna unguiculata
MKFIALSCTVRRALLNGRNCNGLGSTAVMAYAAPETRFLCAGAANGGLFYWRRSMASQAEAKLPEKDKEKAEAEKSVVESSYWGISRPRIMREDGTEWPWNCFMPWETYHSNLSIDLTKHHVPKNFLDKVAYRTVKLLRIPTDLFFQRRYGCRAMMLETVAAVPGMVGGMLLHLRSLRKFQQSGGWIKALMEEAENERMHLMTMVELVKPKWYERLLVIAVQGVFFNAFFVLYILSPKVAHRIVGYLEEEAIHSYTEYLKDIESGAIENVPAPAIAIDYWRLPKDAKLKDVITVIRADEAHHRDVNHFASDIHFQGKELREAPAPIGYH

SEQ ID NO: 6363 - protein, 326 aa, Vigna unguiculata
MKHTLVRSAARALLGGGRSYYRHAPTAAIVEPTRQHGGGAFGSFYLRRMSTLPDIKDHNSEEKKNEVKDDNTNAVISSYWGISRPKVRREDGTEWPWNCFMPWDTYHSDVSIDVTKHHTPKSLTDKVAFRSVKFLRVLSDLYFKERYGCHAMMLETIAAVPGMVGGMLLHLKSLRKFQHSGGWIKALLEEAENERMHLMTMVELVQPKWHERLLIFTAQGVFFNAFFVFYLLSPKAAHRFVGYLEEEAVISYTQHLEAIESGKVENVPAPAIAIDYWRLPKDATLKDVVTVIRADEAHHRDVNHFASDIHHQGKELRDAPAPIGYH

SEQ ID NO: 6364 - protein, 335 aa, Oryza sativa (japonica cultivar-group)
MSSRMAGATLLRHLGPRLFAAEPVYSGLAASARGVMPAAARIFPARMASTSSAGADVKEGAAEKLPEPAATAAAAATDPQNKKAVVSYWGIQPPKLVKEDGTEWKWLSFRPWDTYTSDTSIDVTKHHEPKGLPDKLAYWTVRSLAVPRDLFFQRRHASHALLLETVAGVPGMVGGMLLHLRSLRRFEQSGGWIRALLEEAENERMHLMTFLEVMQPRWWERALVLAAQGVFFNAYFVGYLVSPKFAHRFVGYLEEEAVSSYTEYLKDLEAGKIENTPAPAIAIDYWRLPADATLKDVVTVIRADEAHHRDLNHFASDIQQQGMKLKDTPAPIGYH

SEQ ID NO: 6365 - protein, 361 aa, Botryotinia fuckeliana
MTTMYVSRVSTRPLSAQSAAQLSKAVAFFAQSYRLSSNACTAPTPSRRAFTSASKIQVKGRDLFPEPEHGQIKRTEPAWPHPPYTAEQMRSKVYFAHRKPRDFSDRVALGMVRFLRWCTDFATGYKHNVEAPKKASDSNALTATKPYQMSERKWLIRYVFLESVAGVPGMVAGMLRHLRSLRGLKRDNGWIETLLEEAYNERMHLLTFLKMYEPGIFMRTMILGAQGVFFNSFFLCYLFSPRTCHRFVGYLEEEAVLTYTLSIQDLENGHLPKWADPDFKAPDLAVEYWGMPEGNRSMRDLLYYIRADEAKHREVNHTLGNLKQDEDPNPFVSEYGKERGEKPGKGIESLKPVGWERDEVI

SEQ ID NO: 6366 - protein, 353 aa, Catharanthus roseus
MMSRGATRISRSLICQISPRYFSSAAVRGHEPSLGILTSGGTTTFLHGNPGNGSERTALTWIKLPMMRARSASTVATVDQKDKDEKREDKNGVADGENGNKAVVSYWGVEAPKLTKEDGTVWRWTCFRPWETYKPDTDIELKKHHVPVTLLDKVAFFTVKALRWPTDLFFQRRYGCRAMMLETVAAVPGMVGGMLLHCKSLRRFEHSGGWIKALLEEAENERMHLMTFMEVSKPRWYERALVFAVQGVFFNAYFLTYLASPKLAHRIVGYLEEEAIHSYSEFLNELDKGNIENVPAPAIAIDYWQMPPDSTLRDVVMVVRADEAHHRDVNHYASDIHYKGLELKEAAAPLDYH

SEQ ID NO: 6367 - protein, 353 aa, Catharanthus roseus
MMSRGATRISRSLICQISPRYFSSAAVRGHEPSLGILTSGGTTTFLHGNPGNGSERTALTWIKLPMMRARSASTVATVDQKDKDEKREDKNGVADGENGNKAVVSYWGVEAPKLTKEDGTVWRWTCFRPWETYKPDTDIELKKHHVPVTLLDKVAFFTVKALRWPTDLFFQRRYGCRAMMLETVAAVPGMVGGMLLHCKSLRRFEHSGGWIKALLEEAENERMHLMTFMEVSKPRWYERALVFAVQGVFFNAYFLTYLASPKLAHRIVGYLEEEAIHSYSEFLNELDKGNIENVPAPAIAIDYWQMPPDSTLRDVVMVVRADEALHRDVNHYASDIHYKGLELKEAAAPLDYH

SEQ ID NO: 6368 - protein, 318 aa, Lycopersicon esculentum
MNRNAAMKISGLLMRQLRGEFLPRGGMVQIRHWSNMNTSSKTKEEQKTHNQPSHTDATNAAGDKAKKIVSYWGVDPPKISKEDGTPWKWNSFRPWETYSADISIDVEKHHMPTNFMDKFAYWTVQSLKYPTYLFFQRRHMCHAMLLETVAAVPGMVGGMLLHCKSLRRFEHSGGWIKALLEEAENERMHLMTFIELSNPKWYERALVFAVQGVFVNAYFIAYLASPKLAHRIVGYLEEEAVNSYTEFLIDIEKGLFENSPAPAIAIDYWRLPADATLKDVVTVIRADEAHHRDLNHFASDIQCQGHELKGYPAPIGYH

SEQ ID NO: 6369 - protein, 358 aa, Lycopersicon esculentum
MMTRGATRMTRVVMGHMGPRYFSTTVLRNNPGTGVVGGVAAGLLHGLPANPSEKVAVTWVRHFSAMGSRSASTAALNDKQQEKESSDKKVENTATATAAVNGGVGKSVVSYWGVPPSKATKPDGTEWKWNCFRPWETYEADMSIDLTKHHAPVTFLDKFAYWTVKILRFPTDVFFQRRYGCRAMMLETVAAVPGMVGGMLLHCKSLRRFEQSGGWIKALLEEAENERMHLMTFMEVAKPNVYERALVFAVQGVFFNAYFAAYLISPKLAHRIVGYLEEEAVHSYTEFLKELDNGNIENVPAPAIAIDYWRLPKDATLRDVVLVVRADEAHHRDVNHYASDIHYQGQQLKDSPAPLGYH

SEQ ID NO: 6370 - protein, 353 aa, Nicotiana tabacum
MMTRGATRMTRTVLGHMGPRYFSTAIFRNDAGTGVMSGAAVFMHGVPANPSEKAVVTWVRHFPVMGSRSAMSMALNDKQHDKKAENGSAAATGGGDGGDEKSVVSYWGVQPSKVTKEDGTEWKWNCFRPWETYKADLSIDLTKHHAPTTFLDKFAYWTVKSLRYPTDIFFQRRYGCRAMMLETVAAVPGMVGGMLLHCKSLRRFEQSGGWIKTLLDEAENERMHLMTFMEVAKPNWYERALVFAVQGVFFNAYFVTYLLSPKLAHRIVGYLEEEAIHSYTEFLKELDKGNIENVPAPAIAIDYCRLPKDSTLLDVVLVVRADEAHHRDVNHFASDIHYQGQQLKDSPAPIGYH

SEQ ID NO: 6371 - protein, 297 aa, Nicotiana tabacum
MWVRHFPVMGPRSASTVALNDKQHDKKVENGGAAASGGGDGGDEKSVVSYWGVPPSKVTKEDGTEWKWNCFRPWETYKADLSIDLTKHHAPTTFLDKFAYWTVKALRYPTDIFFQRRYGCRAMMLETVAAVPGMVGGMLLHCKSLRRFEQSGGWIKALLEEAENERMHLMTFMEVAKPNWYERALVFAVQGVFINAYFVTYLLSPKLAHRIVGYLEEEAIHSYTEFLKELDKGNIENVPAPAIAIDYWRLPKDSTLRDVVLVVRADEAHHRDVNHFAPDIHYQGQQLKDSPAPIGYH

SEQ ID NO: 6372 - protein, 297 aa, Nicotiana tabacum
  unsure (1)..(297): unsure at all Xaa locations
MWVRHFPVMGPRSASTVALNDKQHDKKVENGGAAASGGGDGGDEKSVVSYWGVPPSKVTKEDGTEWKWNCFRPWETYKADLSIDLTKHHAPTTFLDKFAYWTVKALRYPTDIFFQRRYGCRAMMLETVAAVPGMVGGMLLHCKSLRRFEQSGGWIKALLEEAENERMHLMTFMEVAKPNWYERALVFAVQGVFINAYFVTYLLSPKLAXRIVGYLEEEAIHSYTEFLKELDKGNIENVPAPAIAIDYWRLPKDSTLRDVVLVVRADEAHHRDVNHFAPDIHYQGQQLKDSPAPIGYH

SEQ ID NO: 6373 - protein, 344 aa, Solanum tuberosum
MMSSRFAGTALRQLGPVLFASAPGARAAAEPAYALLAGAPAAAPTRAAVWLVRFPLSRAASTMSAPAAPEGETAAKGDVDVTKKAEGDTEQKAVVSYWGVPPSRVTKEDGSPWRWACFRPWEAYESDMSIDLKKHHAPTTFLDKMAFWTVKSLRWPTDIFFQRRYGCRAMMLETVAAVPGMVGGLLLHLKSLRRFEHSGGWIKALLEEAENERMHLMTFMEVSQPRWYERALVLAVQGVFFNAYFLGYLLSPKFAHRVVGYLEEEAIHSYTEFLKEIDKGTIDNVPAPAIALDYWRLPPGSTLRDVVMVVRADEAHHRDVNHFASDVHYQGHQLKEAPAPLGYH

SEQ ID NO: 6374 - protein, 349 aa, Sauromatum guttatum
MMSSRLVGTALCRQLSHVPVPQYLPALRPTADTASSLLHGCSAAAPAQRAGLWPPSWFSPPRHASTLSAPAQDGGKEKAAGTAGKVPPGEDGGAEKEAVVSYWAVPPSKVSKEDGSEWRWTCFRPWETYQADLSIDLHKHHVPTTILDKLALRTVKALRWPTDIFFQRRYACRAMMLETVAAVPGMVGGVLLHLKSLRRFEHSGGWIRALLEEAENERMHLMTFMEVAQPRWYERALVLAVQGVFFNAYFLGYLLSPKFAHRVVGYLEEEAIHSYTEFLKDIDSGAIQDCPAPAIALDYWRLPQGSTLRDVVTVVRADEAHHRDVNHFASDVHYQDLELKTTPAPLGYH

SEQ ID NO: 6375 - protein, 349 aa, Sauromatum guttatum
MISSRLAGTALCRQLSHVPVPQYLPALRPTADTASSLLHRCSAAAPAQRAGLWPPSWFSPPRHASTLSARAQDGGKEKAAGTAGKVPPGEDGGAEKEAVVSYWAVPPSKVSKEDGSEWRWTCFRPWETYQADLSIDLHKHHVPTTILDKLALRTVKALRWPTDIFFQRRYACRAMMLETVAAVPGMVGGVLLHLKSLRRFEHSGGWIRALLEEAENERMHLMTFMEVAQPRWYERALVLAVQGVFFNAYFLGYLLSPKFAHRVVGYLEEEAIHSYTEFLKDIDNGAIQDCPAPAIALDYWRLPQGSTLRDVVTVVRADEAHHRDVNHFASDVHYQDLELKTTPAPLGYH

SEQ ID NO: 6376 - protein, 337 aa, Dictyostelium discoideum
MFKYVTVLNKNNNLNKLLLNSISKGNTLNSNNGLASTSISINSSIRSFSSFSSSKVMLDKRSEKPQNPLYHRNSTLYSFTPRDVLIKIEKDFVMPPSYEAKSLSDNFAKFSVLFLRKFSNLFFKEKFLHYAIVLETVAAVPGLVAGMFLHLKTLRNMQSNNWIKILMDEMENERMHLLSFMELTKPTLLERGMVAVTQAIYWNLFLVFYVLSPKTAHRFTGYLEEQAVVTYTHMLEDIDSGKVPNYKAPQIAIEYWGLPEDATLRDLILVIRQDESDHRLVNHEISNKIVLNNNEPIILENHFHKPTIINPVGEEEIKEHSQEGIRIEKKINPTSEL

SEQ ID NO: 6377 - protein, 325 aa, Zea mays
MAGAALLRHLGPRLFAAEPVTGLAARGVMPAAARILPARMSSTAAEAAKEAAAPQQRQKPEAAAAAPEGQDKKAVVSYWGIEPRKLVKEDGTEWRWFCFRPWDTYRADTSIDMKKHHEPKALPDKLAYWLVKSLVVPKQLFFQRRHASHALLLETVAAVPGMVGGMLLHLRSLRRFEHSGGWIRALLEEAENERMHLMTFLEVAQPKWWERALVLAAQGVYFNAYFVAYLASPKFAHRFVGYLEEEAVHSYTEYLKDLEAGIIDNTPAPAIAIDYWRLPADARLKDVVAVVRADEAHHRDVNHFASDIHYQGMKLRDTPAPLGYH

SEQ ID NO: 6378 - protein, 333 aa, Zea mays
  unsure (1)..(333): unsure at all Xaa locations
MSSRMAGAALLRHLGPRLFAAGPAVSGLTARGGMPAAARLLPARMASTAAEAARXXDAGANKRHGGTEKHEEEAAGGQSKKAVVSYWGIDTPKLVKEDGTEWKWTSFRPWDAYTSDTSIDIGKHHAPTTLPDKAAYLIVKSLRVPMDLFFQRRHASHALLLETVAAVPGMVGGMLLHLRSLRRFEHSGGWIRALLEEAENERMHLMTFLEVTQPRWWERALVLTAQGVFFNAYFVGYLLSPKFAHRVVGYLEEEAVHSYTEYLKDLEAGIIDNTPAPAIAIDYWRLPADAKLKDVVTVVRADEAHHRDVNHFASDIHYQGMKLKDTPAPLSYH

SEQ ID NO: 6379 - protein, 332 aa, Zea mays
MSSRMAGAALLRHLGPRLFAAGPAVSGLTARGGMPAAARLLPARMASTAAEAAREDAGANKQHGGTEKHEEEAAGGQSKKAVVSYWGIDTPKLVKEDGTEWKWTSFRPWDAYTSDTSIDIGKHHAPTTLPDKAAYLIVKSLRVPMDLFFQRRHASHALLLETVAAVPGMVGGMLLHLRSLRRFEHSGGWIRALLEEAENERMHLMTFLEVTQPRWWERALVLTAQGVFFNAYFLGYLLSPKFAHRVVGYLEEEAVHSYTEYLKDLEAGIIDNTPAPAIAIDYWRLPADAKLKDVVTVVRADEAHHRDVNHFASDIHYQGMKLKDTPAPLSYH

SEQ ID NO: 6380 - protein, 333 aa, Zea mays
  unsure (1)..(333): unsure at all Xaa locations
MSSRMAGAALLRHLGPRLFAAGPAVSGLTARGGMSAATRLLPARMASTAAEAARXXDAGANKRHGGTEKHEEEAAGGQSKKAVVSYWGIDTPKLVKEDGTEWKWTSFRPWDAYTSDTSIDIGKHHAPTTLPDKAAYLIVKSLRVPMDLFFQRRHASHALLLETVAAVPGMVGGMLLHLRSLRRFEHSGGWIRALLEEAENERMHLMTFLEVTQPRWWERALVLTAQGVFFNAYFVGYLLSPKFAHRVVGYLEEEAVHSYTEYLKDLEAGIIDNTPAPAIAIDYWRLPADAKLKDVVTVVRADEAHHRDVNHFASDIHYQGMKLKDTPAPLSYH

SEQ ID NO: 6381 - protein, 351 aa, Populus tremula x Populus tremuloides
MMMASRGEGVKLASSMMLFSRSFSTAISRGIIAKEAVTAKAVECHGDVVRKNIGEFWVRGSVFGVRHGSTMSFGEKDQQKVEMKQTQSVAEGGDKEEKKEIASYWGVPPSRVTKEDGAEWKWNCFRPWETYSADLSIDLKKHHVPATFLDKMAYWMVKALRFPTDLFFQRRYGCRAMMLETVAAVPGMVGGMLLHCKSLRRFEHSGGWIKTLLDEAENERMHLMTFMEVAKPRWYERALVITVQGVFLNAYFLGYIISPKFAHRMVGYLEEEAIHSYTEFLKELDKGNIENVPAPAIAVDYWRLPPDATLRDVVLVVRADEAHHRDVNHFASDIHYQGRELKEAPAPIGYH

SEQ ID NO: 6382 - protein, 294 aa, Populus tremula x Populus tremuloides
MSSTRFASYGVRGWSASAPPVIPGEEEKPKAAANSFTTEDGKAIVSYWGVSPPKITKEDGTAWKWNCFRPWESYKPDISIDVKKHHKPGTTMDKFAYWTVQVLKYPTYLFFQRRHMCHAMLLETVAAVPGMVGGMLLHFKSLRRFEQSGGWIKALLEEAENERMHLMTFVEIAKPQWYERALVFAVQGVFFNAYFLAYLASPKLAHRIVGYLEEEAVNSYSEFLEDLDNCSFENVPAPAIAIDYWRLPPNSTLRDVVFVIRADEAHHRDLNHYASDIQCQGQELRYTPAPIGYH

SEQ ID NO: 6383 - protein, 229 aa, Novosphingobium aromaticivorans
MIPPFIDLSVHHKPGGLSDRIAFGFTKALRWCADTFFAERYGHRAVVLETVAAVPGMVGATINHLACLRRMCDDKGWIKTLMDEAENERMHLMTFIEISKPTLFERAVIMGVQWVFYLFFFGLYLVSPKTAHRVVGYFEEEAVISYTHYLAEIDQGRSANVPAPAIAKRYWGLPDNAMLRDVVLVVRADEAHHRDVNHGFANELAGLPVAEPAACPPHHALEPNWKKAA

SEQ ID NO: 6384 - protein, 357 aa, Pichia stipitis
MLSVQTTRAAKLQLGQLPLIAYTARSGRLHHQFYSTVAEKTANPTPNTSDKTNIFDIRTKVYDETDIRKHDDNQFITHPLFPHPTFSQEDCLKVGYEHRPPRTFGDKMAFRGIELVRGSFDFVTGYKKPKTQADIDSGFKGTRYEMTEGKWLTRCIFLESIAGVPGAVASFIRHLHSLRLLKRDKAWIETLLDEAFNERMHLLTFIKIGKPSWFTRTIIYVGQGVFCNLFFLFYLANPKYCHRFVGYLEEEAVSTYTHFVHELQSGKLPKFENIKIPTIAWQYWPELTENSSMLDLILRIRADEAKHREVNHTLANLDQRKDRNPFGLAIPDLKEPQPESGLKVTKPHGWEKEELKL

SEQ ID NO: 6385 - protein, 342 aa, Pichia anomala
MIKTYQYRSILNSRNVGIRFLKTLSPSPHSKDPNSKSIFDIGTKLIVNPPPQMADNQYVTHPLFPHPKYSDEDCEAVHFVHREPKTIGDKIADRGVKFCRASFDFVTGYKKPKDVNGMLKSWEGTRYEMTEEKWLTRCIFLESVAGVPGMVAAFIRHLHSLRLLKRDKAWIETLLDEAYNERMHLLTFIKIGNPSWFTRFIIYMGQGVFANLFFLVYLIKPRYCHRFVGYLEEEAVSTYTHLIKDIDSKRLPKFDDVNLPEISWLYWTDLNEKSTFRDLIQRIRADESKHREVNHTLANLEQKKDRNPFALKVEDVPKEQQPDEYSLKTPHPEGWNREQMRL

SEQ ID NO: 6386 - protein, 353 aa, Yarrowia lipolytica
MTVRDWANRGQTYVNARAPNLLGRFRSTDDEDENNPSTELATDTTSAYGSTAASVVTMANSKPDDVSLYATSSHHHEYFTGSAWIHPVYTKEQMDALEVNHRKTETFSDRVALRAILLMRIIFDLCTGYKHPKEGEAHLPKFRMTTRQWLDRFLFLESIAGVPGMVAGMIRHLHSLRALRRDRAWIESLVEEAYNERMHLLTFLKLQKPSVQMRTGLLIGQIIFYNLFFISYLISPATCHRFVGYLEEEAVITYTRCLEDIDAGRLPELASMEVPDIARTYWHMEDDCTMRDLIQYVRADEAKHCEVNHTFGNLHQTSDRNPFALVIDNGRPQPSKDLTTFRSVGWRRDEIAN

SEQ ID NO: 6387 - protein, 361 aa, Venturia inaequalis
MTLMFTSRTAVYCSNLTTQRSAVTILRTLSGTASNGIKSRSALTAYQQNPSLRTRNFHSTSVVQAKDFFPEPDTPHIKKTKTAWPHPIYTVEQMNQVAVAHRDTRNWSDKVALIAVKLLRWGLDTVSGYKHGKAQALHAQDPQEAQKRYGMTGKQYLVRNVFLESVAGVPGMVAGMLRHLHSMRRMKRDHGWIETLLEESYNERMHLLIFLKLYEPGWFMRLAVLGAQGVFFNAMFLSYLISPRTCHRFVGYLEEEAVVTYTRELADLEAGKLPEWETLAAPDIAVDYYNLPEGHRTMKDLLLHVRADEAKHREVNHTLGNLDQNSDPNPYASKYDNPNVPHPRKDIKYLKPSGWEREEVM

SEQ ID NO: 6388 - protein, 358 aa, Venturia inaequalis
  unsure (1)..(358): unsure at all Xaa locations
MYTSRTAVYCSNLTTQRSAVTILRTXSGTASNGIKSRSALTAYQQNPSLRTRNFHSTSVVQAKDFFPEPDTPHIXKTKTAWPHPIYTVEQMNQVAVAHRDTRNWSDKVALIAVKLLRWGLDTVSGYKHGKAQALHAQDPQEAQKRYGMTGKQYLVRNVFLXSVAGVPGMVAGMLRHLHSMRRMKRDHGWXETLLEESYNERMHLLIFLKLYEPGWFMRLAVLGAQGVFFNAMFLSYLISPRTCHRFVGYLEEEAVVTYTRELADLEAGKLPEWETLAAPDIAVDYYNLPEGHRTMKDLLLHVRADEAKHREVNHTLGNLDQNSDPNPYASKYDNPDVPHPRKDIKYLKPSGWEREEVM

SEQ ID NO: 6389 - protein, 356 aa, Ajellomyces capsulatus
MYPTSGCARVLMACPAPAMLRGPLLRPSTTAIRGLRGSPLLYHYAATSNSNMRYFSSTSRRWIKEFFAPPKETDHIVESVTTWKHPVFTEKQMKEIAIAHREAKNWSDWVALGTVRFLRWATDLATGYRHAAPGKQGVEVPEQFQMTERKWVIRFIFLETVAGVPGMVGGMLRHLRSLRRMKRDNGWIETLLEEAYNERMHLLSFLKLAQPGWFMRLMVLGAQGVFFNGFFISYLISPRTCHRFVGYLEEEAVMTYTHAIKDLESGKLPNWANQPAPDIAVAYWQMPEGKRTILDLLYYIRADEAKHREVNHTLANLKQGVDPNPYAAKYDNPEAPHPTKSAEIVKPTGWERDEVI

SEQ ID NO: 6390 - protein, 351 aa, Aspergillus niger
MNSLTATAPIRAAIPKSYMHIATRNYSGVIAMSGLRCSGSLVANRHQTAGKRFISTTPKSQIKEFFPPPTAPHVKEVETAWVHPVYTEEQMKQVAIAHRDAKNWADWVALGTVRMLRWGMDLVTGYRHPPPGREHEARFKMTEQKWLTRFIFLESVAGVPGMVGGMLRHLRSLRRMKRDNGWIETLLEEAYNERMHLLTFLKLAEPGWFMRLMVLGAQGVFFNGFFLSYLMSPRICHRFVGYLEEEAVITYTRAIKEIEAGSLPAWEKTEAPEIAVQYWKMPEGQRSMKDLLLYVRADEAKHREVNHTLGNLNQAIDPNPYAAKYKDPTKAHPNKGIADLKPTGWEREEVI

SEQ ID NO: 6391 - protein, 149 aa, Aspergillus fumigatus
VAGVPGMVGGMLRHLRSLRRMKRDNGWIETLLEEAYNERMHLLTFLKLAEPGWFMRLMVLGAQGVFFNGFFLSYLISPRTCHRFVGYLEEEAVITYTRAIKDIETGKLPDWEKLDAPEIAVQYWNMPEGQRKMRDLLLYVRADEAKHRE

SEQ ID NO: 6392 - protein, 375 aa, Neurospora crassa
MAHRLPDCSKLRLFNKGVSVGSSFFTPAPLVGYAALRHPRAISTSNTSKKPAVAIPTGPVSPLVPATHVGTSSASTSEVRDGNAFATLPLTWPHDGWKENVLLNVVPSHREPRTFGDWVAWKIVRTCRFWMDLVTGMRPEQQVDSKNPTTALAASKPLTERQWLVRFIFLESIAGVPGMVAGGLRHLQSIRRFQPDQGWIKSLLEESYNERMHLLTFLEMYKPGWFMRLVVLGAQGVFYNAMFISYLLSPKICHRFVGYLEEEAVHTYTRCLLELDHGCLKRWSDPNFRIPDIAVRYWNMPEGHRTMKDLILYVRADEASHRGVNHTFGNLDQVTDPNPFMECPGGGVVKAFPKHLSVTRPAGLEREEVVSKETH

SEQ ID NO: 6393 - protein, 362 aa, Neurospora crassa
MNTPKVNILHAPGQAAQLSRALISTCHTRPLLLAGSRVATSLHPTQTNLSSPSPRNFSTTSVTRLKDFFPAKETAYIRQTPPAWPHHGWTEEEMTSVVPEHRKPETVGDWLAWKLVRICRWATDIATGIRPEQQVDKHHPTTATSADKPLTEAQWLVRFIFLESIAGVPGMVAGMLRHLHSLRRLKRDNGWIETLLEESYNERMHLLTFMKMCEPGLLMKTLILGAQGVFFNAMFLSYLISPKITHRFVGYLEEEAVHTYTRCIREIEEGHLPKWSDEKFEIPEMAVRYWRMPEGKRTMKDLIHYIRADEAVHRGVNHTLSNLDQKEDPNPFVSDYKEGEGGRRPVNPALKPTGFERAEVIG

SEQ ID NO: 6394 - protein, 362 aa, Neurospora crassa
MNTPKVNILHAPGQAAQLSRALISTCHTRPLLLAGSRVATSLHPTQTNLSSPSPRNLSTTSVTRLKDFFPAKETAYIRQTPPAWPHHGWTEEEMTSVVPEHRKPETVGDWLAWKLVRICRWATDIATGIRPEQQVDKHHPTTATSADKPLTEAQWLVRFIFLESIAGVPGMVAGMLRHLHSLRRLKRDNGWIETLLEESYNERMHLLTFMKMCEPGLLMKTLILGAQGVFFNAMFLSYLISPKITHRFVGYLEEEAVHTYTRCIREIEEGHLPKWSDEKFEIPEMAVRYWRMPEGKRTMKDLIHYIRADEAVHRGVNHTLSNLDQKEDPNPFVSDYKEGEGGRRPVNPALKPTGFERAEVIG

SEQ ID NO: 6395 - protein, 363 aa, Podospora anserina
MISSKTSNRICLCSPQQTARITGIVVSSRPAYLTGLGYPVSLRLSSAVSQSSSQHTRSFSSTRAAHLKDFFPVKETAYIRKTPPAWPHHGYTEEEMLAVVPQHRKPGSLSDWLAWKLVRLCRWGTDIATGIKPEQQVDKSNPTTAVAAQKPLTEAQWLVRFIFLESIAGVPGMVAGMLRHLESLRRLKRDNGWIETLLEESYNERMHLLTFMKMCEPGWFMKTMILGAQGVFFNAMFLSYLISPRITHRFVGYLEEEAVHTYTRCIREIEQGDLPKWSDPNFQIPDLAVTYWKMPEGKRTMRDLILYIRADEAVHRGVNHTLSNLNHKEDPNPFVSDYKCDADHQRPNPALKPTGFERSEVIG

SEQ ID NO: 6396 - protein, 146 aa, Podospora anserina
GVPGMVAGMLRHLRSLRKMKRDNGWIETLLEEAFNERMHLLTFLKLAEPGWFMRVMVIGAQGVFFNGFFLSYLISPRICHRFVGYLEEEAVITYTRAIEELEAGNLPEWKDLDAPEIAVKYWQMPEGQRKMKDLLLFIRADEAKHR

SEQ ID NO: 6397 - protein, 365 aa, Candida albicans
MLTASLYKQLPVLTTTATSTYSFIRLSSTLATPPHSTTTTSPSSPAFHQPNHPQQFANPNTSVFDVSTRIYTQEGIDNNNDTKFLTKAPYPHPVFPQDECENVTVTHRETKTLGDKISFRSIQFMRQCFDLVTGYAVPKTNNPDEFKGTRWEMTEGKWLTRCIFLESVAGVPGSVAGFLRHLHSLRMLRRDKAWIETLLDEAYNERMHLLTFIKIGKPSWFTRSIIYVGQGVFTNVFFLLYLLNPRYCHRFVGYLEEEAVRTYSHLLDELAVPGKLPAFETMKIPEVAVQYWPELTPKSSFKDLILRIRADEAKHREVNHTFANLEQKTDRNPFALKIEGLNKPQPNHGINVMRPTGWEKQDLQL

SEQ ID NO: 6398 - protein, 379 aa, Candida albicans
MIGLSTYRNLPTLLTTTTVISTALRSKQLLRFTTTTSTKSRSSTSTAATTVGNSNPKSPIDEDNLEKPGTIPTKHKPFNIQTEVYNKAGIEANDDDKFLTKPTYRHEDFTEAGVYRVHVTHRPPRTIGDKISCYGTLFFRKCFDLVTGYAVPDPDKPDQYKGTRWEMTEEKWMTRCIFLESIAGVPGSVAGFVRHLHSLRMLTRDKAWIETLHDEAYNERMHLLTFIKIGKPSWFTRSIIYIGQGVFTNIFFLVYLMNPRYCHRFVGYLEEEAVRTYTHLIDELDDPNKLPDFQKLPIPNIAVQYWPELTPESSFKDLILRIRADEAKHREINHTFANLEQWQDRNPFALKIKDSDKPQPNYNLDVTRPQGWERKDLYL

SEQ ID NO: 6399 - protein, 329 aa, Trypanosoma brucei brucei
MFRNHASRITAAAAPWVLRTACRQKSDAKTPVWGHTQLNRLSFLETVPVVPLRVSDESSEDRPTWSLPDIENVAITHKKPNGLVDTLAYRSVRTCRWLFDTFSLYRFGSITESKVISRCLFLETVAGVPGMVGGMLRHLSSLRYMTRDKGWINTLLVEAENERMHLMTFIELRQPGLPLRVSIIITQAIMYLFLLVAYVISPRFVHRFVGYLEEEAVITYTGVMRAIDEGRLRPTKNDVPEVARVYWNLSKNATFRDLINVIRADEAEHRVVNHTFADMHEKRLQNSVNPFVVLKKNPEEMYSNQPSGKTRTDFGSEGAKTASNVNKHV

SEQ ID NO: 6400 - protein, 345 aa, Trypanosoma brucei brucei
MFRNHASRITAAAAPWVLRTACRQKSDAKTPVWGHTQLNRLSFLETVPVVPLRVSDESSEDRPTWSLPDIENVAITHKKPNGLVDTLAYRSVRTCRWLFDTFSLYRFGSITESKVISRCLFLETVAGVPGMVGGMLRHLSSLRYMTRDKGWINTLLVEAENERMHLMTFIELRQPGLPLRVSIIITQAIMYLFLLVAYVISPRFVHRFVGYLEEEAVITYTGVMRAIDEGSCPYQKCMFPKWLACTGTSAKMPHSATSSTCIRADEAEHRVVNHTFVTCTKNACKTVSTPSLYLKKNPEEMYSNQPSGKTRTDFASEGAKTASNVNKQRVRAGITFDGVPPFRVI

SEQ ID NO: 6401 - protein, 156 aa, Crocus sativus
NCNTTHYRANWVPGPPLEEAENERMHLMTFMEVSQPRWYERALVMTVQGSLLQCLLPRKPHLPKVCFIGVVGYLEEEAIHSYTEFLKELDKGSIENVPAPAIAIDYWRLSKSATLRDVVMVVRADEAHHRDVNHFASDIHCQGHELRVHPAPVGYH

SEQ ID NO: 6402 - protein, 345 aa, Oryza sativa (japonica cultivar-group)
MGSRAAGSVLLRHLCPRVSSSTSAAAHAHAQRPPLAGAGGGGVALWARLLSTSAAAAKEETAASKENTGSTAAAKAEATKAAKEGPASATASPVASSYWGIEASKLASKDGVEWKWSCFRPWETYSPDTTIDLKKHHEPKVLLDKVAYWTVKALRVPTDIFFQRRYGCRAMMLETVAAVPGMVGGMLLHLRSLRRFEHSGGWIRALLEEAENERMHLMTFMEVAKPRWYERALVLAVQGVFFNAYFLGYLLSPKLAHRVVGYLEEEAIHSYTEYLKDIEAGKIENVPAPPIAIDYWRLPAGATLKDVVVVVRADEAHHRDVNHFASDVHFQGMDLKDIPAPLDYH

SEQ ID NO: 6403 - protein, 332 aa, Oryza sativa (japonica cultivar-group)
MSSRMAGSAILRHVGGVRLFTASATSPAAAAAAAARPFLAGGEAVPGVWGLRLMSTSSVASTEAAAKAEAKKADAEKEVVVNSYWGIEQSKKLVREDGTEWKWSCFRPWETYTADTSIDLTKHHVPKTLLDKIAYWTVKSLRFPTDIFFQRRYGCRAMMLETVAAVPGMVGGMLLHLRSLRRFEQSGGWIRTLLEEAENERMHLMTFMEVANPKWYERALVITVQGVFFNAYFLGYLLSPKFAHRVVGYLEEEAIHSYTEFLKDLEAGKIDNVPAPAIAIDYWRLPANATLKDVVTVVRADEAHHRDVNHFASDIHYQGMELKQTPAPIGYH

SEQ ID NO: 6404 - protein, 335 aa, Oryza sativa; identical to SEQ ID NO: 6364

SEQ ID NO: 6405 - protein, 335 aa, Oryza sativa; identical to SEQ ID NO: 6364

SEQ ID NO: 6406 - protein, 335 aa, Oryza sativa; identical to SEQ ID NO: 6364

SEQ ID NO: 6407 - protein, 326 aa, Oryza sativa
  unsure (1)..(326): unsure at all Xaa locations
SVLLRHLCPRVSSSTSAAAHAHAQRPPLAGAGGGGVALWARLLSTSAAAAKEETAASKENTGSTAAAXXATASPVASSYWGIEASKLASKDGVEWKWSCFRPWETYSPDTTIDLKKHHEPKVLLDKVAYWTVKALRVPTDIFFQRRYGCRAMMLETVAAVPGMVGGMLLHLRSLRRFEHSGGWIRALLEEAENERMHLMTFMEVAKPRWYERALVLAVQGVFFNAYFLGYLLSPKLAHRVVGYLEEEAIHSYTEYLKDIEAGKIENVPAPPIAIDYWRLPAGATLKDVVVVVRADEAHHRDVNHFASDVHFQGMDLKDIPAPLDYH

SEQ ID NO: 6408 - protein, 345 aa, Oryza sativa; identical to SEQ ID NO: 6402

SEQ ID NO: 6409 - protein, 332 aa, Oryza sativa; identical to SEQ ID NO: 6403

SEQ ID NO: 6410 - protein, 362 aa, Oryza sativa
  unsure (1)..(362): unsure at all Xaa locations
NISFRTIASRIHFRGKNIKDFEILARXQVIDRSINGPASVAAAGRSPVAGLPKALPRPAISSLWMVGAAAPPRRFAGTAAVGGVDVXRADGDATAGEKEESEKEAASYWGVAPRRLVKEDGTPWDTYEADVAIDLTKHHNPATLGDKVARWTVKSLRWPVDLFFQRKYGCPAMMLETVAAAAGNVAGAVLHLRSLRRFQHSGGWIRALLEEAENERMHLMTFMEVSQPRWYERALVVAVQGAFFNAYLASYLLSPRFAHRIVGYLEEEAVHSYTEFLRDLDAGKIDDVPAPAIAIDYWRLPADATLRDVVMVVRADEAHHRDVNHYASXTLPSLPHLVLDDASCLAISKQNKKEKKFERILL

SEQ ID NO: 6411 - protein, 345 aa, Oryza sativa
  unsure (1)..(345): unsure at all Xaa locations
SIDRSMALVQSARRAAGPAAXACXFSTASVAAAGRSPVAGLPKALPRPAISSLWMVGAASAXAALPARRRLGGVRRDRADGDATAGEKEESEKEAASYWGVAPRRLVKEDGTVWKWSCFRPWDTYEADVAIDLTKHHNPATLGDKVARWTVKSLRWPVDLFFQRKYGCPAMMLETVAAAAGNVAGAVLHLRSLRRFQHSGGWIRALLEEAENERMHLMTFMEVSQPRWYERALVVAVQGAFFNAYLASYLLSPRFAHRIVGYLEEEAVHSYTEFLRDLDAGKIDDVPAPAIAIDYWRLPADATLREVVMVVRTDEAHHRDVNHYASDIHYQGHALREVAAPLGYH

SEQ ID NO: 6412 - protein, 158 aa, Oryza sativa
MKALGPFEVSGGWIRALLEEAENERMHLMTFMEVAKPRWYERTLVLAVQRVFFNAYFLGYLLSPKLAHRVVGYFPTELIRSGSYTEYLKDIEAGKIENVPAPPIAIDYWRLPAGATLKDVVVVVRADEAHHRDVNHFASDVHFQRMDLKDTPAPLDYH

SEQ ID NO: 6413 - protein, 210 aa, Oryza sativa
  unsure (1)..(210): unsure at all Xaa locations
MSSRMAGSAILRHVGGVRLFTASARPFLAGGEAVPGVWGLRLMSTSSVASTEAAAKAEAKKADAEKEVVVNSYWGIEQSKKLVREDGTEWKWSCFRPWETYTADTSIDLTKHHVPKTLLDKIAYWTVKSLRFPXDIFFXRRYGCRAMMLETVAGVPGMVGGMLLHLRSLRRFXQSGGWIRPLLEEAENERMHLMTFMEGANPKWYERALX

SEQ ID NO: 6414 - protein, 105 aa, Oryza sativa
  unsure (1)..(105): unsure at all Xaa locations
XXFPSRXXRTMMLETVAAVPATXGMVGGXMLLHLCSLRDIKHSDGWIRVLLEEAENERMHLMAFMAVPKRRWYERLIKNSLFPLFFPSLFKAHQASAHLNFPFLC

SEQ ID NO: 6415 - protein, 102 aa, Oryza sativa
  unsure (1)..(102): unsure at all Xaa locations
MMLETVAAVPATXGMVGGXMLLHLCSLRDIKHSDGWIRVLLEEAENERMHLMAFMAVPKRRWPTRHQPILIFLFFAAKESNYCTNKIQPKRKNQNIQLEIVX

SEQ ID NO: 6416 - protein, 329 aa, Triticum aestivum
  unsure (1)..(329): unsure at all Xaa locations
MSSRMAGSVLLRRAGAGAGRLFATTASPAARTALGGGEGAWVRMMSTSAASQVKDEAAKGVKAEAAKGDGEKKEVAISSYWGIEQSKKLVREDGXTEWKWSCFRPWETYTADTSIDLTKHHVPNTMLDKIAYYTVKSLRFPTDIFFQRRYGCRAMMLETVAAVPGMVGGMLLHLRSLRRFEQSGGWIRALLEEAENERMHLMTFMEVAQPRWYERALVIAVQGVFFNAYFFGYLISPKFAHRVVGYLEEEAVHSYTEFLKDLDDGKIDNVPAPAIAIDYWRLPANATLKDVVTVVRADEAHHRDVNHFASDVYYQGMQLKATPAPIGYH

SEQ ID NO: 6417 - protein, 293 aa, Triticum aestivum
CPPPRPRRSRTRRPRRSRRRRPKASQGGGRPRATGRRRRWRISSYWGIEQSKKLVREDGTEWKWSCFRPWETYTADTSIDPTKHHVPNTMLDKIAYYTVKSLRFPTDIFFQRRYGCRAMMLETVAAVPGMVGGMLLHLRSLRRFEQSGGWIRALLEEAENERMHLMTFMEVAQPRWYERALVIAVQGVFFNAYFFGYLISPKFAHRVVGYLEEEAVHSYTEFLKDLDDGKIDNVPAPAIAIDYWRLPANATLKDVVTVVRADEAHHRDVNHFASDVYYQGMQLKATPAPIGYH

SEQ ID NO: 6418 - protein, 274 aa, Triticum aestivum
RRPKASQGGGRPRATGRRRRWRISSYWGIEQSKKLVREDGTEWKWSCFRPWETYTADTSIDPTKHHVPNTMLDKIAYYTVKSLRFPTDIFFQRRYGCRAMMLETVAAVPGMVGGMLLHLRSLRRFEQSGGWIRALLEEAENERMHLMTFMEVAQPRWYERALVIAVQGVFFNAYFFGYLISPKFAHRVVGYLEEEAVHSYTEFLKDLDDGKIDNVPAPAIAIDYWRLPANATLKDVVTVVRADEAHHRDVNHFASDVYYQGMQLKATPAPIGYH

SEQ ID NO: 6419 - protein, 328 aa, Triticum aestivum
MSSRMAGSVLLRRAGAGAGRLFATTASPAARTALGGGGGAWVRMMSTSAASQVKDEAAKGVKAEAAKGDGEKKEVAISSYWGIDQSKKLVREDGTEWKWSCFRPWETYTADTSIDLTKHHVPNTMLDKIAYYTVKSLRFPTDIFFQRRYGCRAMMLETVAAVPGMVGGMLLHLRSLRRFEQSGGWIRALLEEAENERMHLMTFMEVAQPRWYERALVIAVQGVFFNAYFFGYLISPKFAHRVVGYLEEEAVHSYTEFLKDLDDGKIDNVPAPAIAIDYWRLPANATLKDVVTVVRADEAHHRDVNHFASDVYYQGMQLKATPAPIGYH

SEQ ID NO: 6420 - protein, 347 aa, Triticum aestivum
MSSRVAGSVLLRHLGPRVFGPTTPAAQRPLLAGGEGGAVAVAMWARPLSTSAAEAAREEATASKDNVASTAAATAEAMQAAKAGAVQAAKEGKSPAASSYWGIVPAKLVNKDGAEWKWSCFRPWEAYTSDTTIDLSKHHKPKVLLDKIAYWTVKSLRVPTDIFFQRRYGCRAMMLETVAAVPGMVDGMLLHLRSLRRFEQSGGWIRALLEEAENERMHLMTFMEVANPKWYERALVLAVQGVFFNAYFLGYIVSPKFAHRVVGYLEEEAIHSYTEFLRDLEAGRIENVPAPRIAIDYWRLPADARLKDVVTVVRADEAHHRDVNHFAADIHFQGLELNKTPAPLGYH

SEQ ID NO: 6421 - protein, 347 aa, Triticum aestivum; identical to SEQ ID NO: 6420

SEQ ID NO: 6422 - protein, 191 aa, Triticum aestivum
RAGSDLFFPRRHASHALLLETVAAVPPMVGGVLLHLRSLRRFEHSGGWIRALMEEAENERMHLMTFMEVTQPLWWERALVLATQGVFFNAYFVGYLVSPKFAHRFVGYLEEEAVHSYTEYLKDLEAGLIENTPAPAIAIDYWRLPADARLKDVVTAVRADEAHHRDANHYASDIHYQGMTLNQTPAPLGYH

SEQ ID NO: 6423 - protein, 191 aa, Triticum aestivum
RAGSDLFFQRRHASHALLLETVAAVPPMVGGVLLHLRSLRRFEHSGGWIRALMEEAENERMHLMTFMEVTQPLWWERALVLATQGVFFNAYFVGYLISPKFAHRFVGYLEEEAVHSYTEYLKDLEAGLIENTPAPAIAIDYWRLPADARLKDVVIAVRPDEAHHRDANHYASDIHYQGMTLNQTPAPLGYH

SEQ ID NO: 6424 - protein, 131 aa, Triticum aestivum
  unsure (1)..(131): unsure at all Xaa locations
XRPGLVMEVTQPLWWERALVLATQGVFFNAYFVGYLISPKFAHRFVGYLEEEAVHSYTEYLKDLEAGLIENTPAPAIAIDYWRLPADARLKDVVIAVRADEAHHRDANHYASDIHYQGMTLNQTPAPLGYH

SEQ ID NO: 6425 - protein, 245 aa, Triticum aestivum
  unsure (1)..(245): unsure at all Xaa locations
MSSRMAGATLLRHLGPRLFAAAEPASGLAASARGIMPAAARIFPARMASTEAAGPRAKQEEATEKPQGATTPEQNKKAVVSYWGIEPRKLVKDDGTEWPWFSFRPWDTYRPDTSIDVAKHHEPRAVADKVAYLIVRTLRKGSDLFFQRRHASHALLLETVAAVPPMVGGVLLHLRSLRRFEHSGGWIRALMEEGENERMHLMTFREVTHPLGWERALVLATHGVFFNAYFVGYLISPKXAHRFVX

SEQ ID NO: 6426 - protein, 277 aa, Triticum aestivum
  unsure (1)..(277): unsure at all Xaa locations
RPGRASVSYQINTNSKQKSFPSPPTKTDFPFDPLTSFSIGLVVQQSTANSSRMAGATLLRHLGPRLFAAAEPASGLAASARGIMPAAARIFPARMASTEAAAPHAKQXXDDAASPQAAATPEQQNKKPVVSYWGIEPRKLVKDDGTEWPWFCFRPWDTYRPDTSIDVTKHHLPKALADKVAYFVVRSLRVPRDLFFQRRHASHALLLETVAAVPPMVGGVLLHLRSLRRFEHSGGWIRALMEEGENERMHLMTFMEVTQPXRWWERALVLAAQGVFF

SEQ ID NO: 6427 - protein, 123 aa, Triticum aestivum
  unsure (1)..(123): unsure at all Xaa locations
XSQPRWWERALVLVVQGVCFNAYFLGCLISPKLAHRCPWYPEEEAVESYTEYLKDLRASLIENTTGPVIGVDYWRLLDDARLKDVVTAVRADEAHHRDANHYASDIHYQGMTLNQTPAPFGYY

SEQ ID NO: 6428 - protein, 208 aa, Triticum aestivum
  unsure (1)..(208): unsure at all Xaa locations
MSSRMAGATLLRHLGPRLFAAAEPASGLAASARGIMPAAARIFPARMASTEAAAPHAKQEDDAGTPQAAATXXEQQSKKAVVSYWGIEPRKLVKEDGTEWPWFCFRPWDTYRPDTSIDVTKHHEPKALADKVAYFVVRSLRVPRDLFFXQRRHASHAXLLLETVAAVPPMVGDVLLHLRSLRRFQHSGGWNRALMEEAENESMHLMTX

SEQ ID NO: 6429 - protein, 344 aa, Zea mays
  unsure (1)..(344): unsure at all Xaa locations
MSTRTAGSALLRHLGPRVFGPIFSPAVAPPRPLPLAGGGGGGALVWVRLLSTSAAEAKEEVAASKGNSGSTAAAKAEAAEAAKEGDGKXXDKVVSSYWGVAPSKLMNKDGAEWRWSCFRPWEAYKPDTTIDLNRHHEPKVLIDKIAYWTVKLLRVPTDIFFQRRYGCRAMMLETVAAVPGMVGGMLLHLRSLRRFEHSGGWIRTLLEEAENERMHLMTFMEVAKPKWYERALVLAVQGVFFNAYFLGYLISPKFAHRVVGYLEEEAIHSYTEYLKDLEAGKIENVPAPAIAIDYWQLPADATLKDVVVVVRSDEAHHRDVNHFASDIHFQGMQLKETPAPIEYH

SEQ ID NO: 6430 - protein, 326 aa, Zea mays
MMSSRAGSILLRHAGSRLFTAAAISPAAASRPLLAGGNGVPAVMLRLMSTSSPAAPTEAKDEAAKASKVEKAVVINSYWGIEQNNKLARDDGTEWKWTCFRPWETYTADTSIDLTRHHEPKTLMDKVAYWTVKSLRFPTDIFFQRRYGCRAMMLETVAAVPGMVGGMLLHLRSLRRFEQSGGWIRALLEEAENERMHLMTFMEVAKPRWYERALVITVQGVFFNAYFLGYLLSPKFAHRVVGYLEEEAIHSYTEYLKDLEAGKIENVPAPAIAIDYWRLPANATLKDVVTVVRADEAHHRDVNHFASDIHCQGMQLKQSPAPIGYH

SEQ ID NO: 6431 - protein, 329 aa, Zea mays
MMSSRAGSILLRHAGSRLFTAAAISPAAASRPLLAGGNGVPAVMLRLMSTSSPAAPTEAKDEAAKASKVGGDKKAVVINSYWGIEQNNKLARDDGTEWKWTCFRPWETYTADTSIDLTRHHEPKTLMDKVAYWTVKSLRFPTDIFFQRRYGCRAMMLETVAAVPGMVGGMLLHLRSLRRFEQSGGWIRALLEEAENERMHLMTFMEVAKPRWYERALVITVQGVFFNAYFLGYLLSPKFAHRVVGYLEEEAIHSYTEYLKDLEAGKIENVPAPAIAIDYWRLPANATLKDVVTVVRADEAHHRDVNHFASDIHCQGMQLKQSPAPIGYH

SEQ ID NO: 6432 - protein, 329 aa, Zea mays; identical to SEQ ID NO: 6431

SEQ ID NO: 6433 - protein, 346 aa, Zea mays
  unsure (1)..(346): unsure at all Xaa locations
MSTRAAGSALLRHLGPRVFGPVFSPAVAPPRPLPLAGGGGGGALVWVRVRLLSTSAAEAKEEVAASKGNSGSTAAAKAEAVEAAKEGDGKXXDKVVSSYWGVAPSKLMNKDGAEWRWSCFRPWEAYKPDTTIDLNRHHEPKVLLDKIAYWTVKLLRVPTDIFFQRRYGCRAMMLETVAAVPGMVGGMLLHLRSLRRFEHSGGWIRALLEEAENERMHLMTFMEVAKPKWYERALVLAVQGVFFNAYFLGYLISPKFAHRVVGYLEEEAIHSYTEYLKDLEAGKIENVPAPAIAIDYWQLPADATLKDVVVVVRSDEAHHRDVNHFASDIHFQGMQLKETPAPIEYH

SEQ ID NO: 6434 - protein, 347 aa, Zea mays
MSTRAAGSALLRHLGPRVFGPVFSPAVAPPRPLLALAGGGERGGALVWVRVRLLSTSAAEAKEEVAASKGNSGSTAAAKAEAVEAAKEGDGKRDKVVSSYWGVAPSKLMNKDGAEWRWSCFRPWEAYKPDTTIDLNRHHEPKVLLDKIAYWTVKLLRVPTDIFFQRRYGCRAMMLETVAAVPGMVGGMLLHLRSLRRFEHSGGWIRALLEEAENERMHLMTFMEVAKPKWYERALVLAVQGVFFNAYFLGYLISPKFAHRVVGYLEEEAIHSYTEYLKDLEAGKIENVPAPAIAIDYWQLPADATLKDVVVVVRSDEAHHRDVNHFASDIHFQGMQLKETPAPIEYH

SEQ ID NO: 6435 - protein, 221 aa, Zea mays
  unsure (1)..(221): unsure at all Xaa locations
IFPGTPVSRLEXXRGRVTLLKNWIFPEYYFANMTSXLSQRRYGCRAMMLETVAAVPGMVGGMLLHLRSLRRFEHSGGWIRALLEEAENERMHLMTFMEVAKPKWYERALVLAVQGVFFNAYFLGYLISPKFAHRVVGYLEEEAIHSYTEYLKDLEAGKIENIPAPAIAIDYWQLPADATLKDVVVVVRSDEAHHRDVNHFASDIHFQGMQLKETPAPIEYH

SEQ ID NO: 6436 - protein, 149 aa, Zea mays
AMMLETVAAVPGMVGGMLLHLRSLRRFEQSGGWIRALLEEAENERMHLMTFMEVAKPRWYERALVITVQGVFFNAYFLGYLLSPKFAHRVVGYLEEEAIHSYTEYLKDLEAGKIEKRPAPAIAIDYWRLPANATLKDVVTVVRADEAHH

SEQ ID NO: 6437 - protein, 254 aa, Zea mays
  unsure (1)..(254): unsure at all Xaa locations
APVRRRATAVLHLHCPRSAATPHANQESGAEKPESASTPEQSKRAVVSYWGIEPRKLVKDDGTEWPWFCFRPWDTYRPDTSIDVTKHHEPKALADKVAYFVVRSLRVPRDLFFQRRHASHALLLETVAAVPPMVGGVLLHLRSLRRFEHSGGWIRALMEEAENERMHLMTFMEVTQPLWYERALVIAVQGVFFNAYFFGYLISPKFAHRVVXYXLEEEAVHSYTEFLKDLDDGKIDXVPASXIAIDYWRLPANA

SEQ ID NO: 6438 - protein, 254 aa, Zea mays
  unsure (1)..(254): unsure at all Xaa locations
MSTRAAGSALLRHLGPRVFGPVFSPAVAPPRPLPLAGGGGGGALVWVRVRLLSTSAAEAKEEVAASKGNSGSTAAAKAEAVEAAKEGDGKXXDKVVSSYWGVAPSKLMNKDGAEWRWSCFRPWEAYKPDTTIDLNRHHEPKVLLDKIAYWTVKLLRVPTDIFFQRRYGCRAMMLETVAAVPGMVGGMLLHLRSLRRFEHSGGWIRTLLEEAENERMHLMTFMEVAKPKWYERALVLAVQGVFFNGYFLGXLISP

SEQ ID NO: 6439 - protein, 94 aa, Zea mays
  unsure (1)..(94): unsure at all Xaa locations
XPKFAHRVVGYLEEEAVHSYTEYLKDLEAGIIDNTPAPAIAIDYWRLPADAKLKDVVTVVRADEAHHRDVNHFASDIHYQGMKLKDTPAPLSYH

SEQ ID NO: 6440 - protein, 96 aa, Zea mays
  unsure (1)..(96): unsure at all Xaa locations
FLKVAEPKWYQRALVLAVQGVFPKADCLGYLISPKFAHRVVGDLEEEAIPSYTEYPKDLQAGKIENVPAPAIAIDLVGSPEKTLYPTVTSKFFFSX

SEQ ID NO: 6441 - protein, 525 aa, Mus musculus
MDLAVGPGAAGPSNVPAFLTKLWTLVSDPDTDALICWSPSGNSFHVFDQGQFAKEVLPKYFKHNNMASFVRQLNMYGFRKVVHIEQGGLVKPERDDTEFQHPCFLRGQEQLLENIKRKVTSVSTLKSEDIKIRQDSVTRLLTDVQLMKGKQECMDSKLLAMKHENEALWREVASLRQKHAQQQKVVNKLIQFLISLVQSNRILGVKRKIPLMLSDSNSAHSVPKYGRQYSLEHVHGPGPYSAPSPAYSSSSLYSSDAVTSSGPIISDITELAPTSPLASPGRSIDERPLSSSTLVRVKQEPPSPPHSPRVLEASPGRPSSMDTPLSPTAFIDSILRESEPTPAASNTAPMDTTGAQAPALPTPSTPEKCLSVACLDKNELSDHLDAMDSNLDNLQTMLTSHGFSVDTSALLDLFSPSVTMPDMSLPDLDSSLASIQELLSPQEPPRPIEAENSNPDSGKQLVHYTAQPLFLLDPDAVDTGSSELPVLFELGESSYFSEGDDYTDDPTISLLTGTEPHKAKDPTVS

SEQ ID NO: 6442 - protein, 517 aa, Mus musculus
MKQSSNVPAFLSKLWTLVEETHTNEFITWSQNGQSFLVLDEQRFAKEILPKYFKHNNMASFVRQLNMYGFRKVVHIESGIIKQERDGPVEFQHPYFKQGQDDLLENIKRKVSSSKPEENKIRQEDLTKIISSAQKVQIKQETIESRLSELKSENESLWKEVSELRAKHAQQQQVIRKIVQFIVTLVQNNQLVSLKRKRPLLLNTNGAPKKNLYQHIVKEPTDNHHHKVPHSRTEGLKSRERISDDIIIYDVTDDNVDEENIPVIPETNEDVVVDSSNQYPDIVIVEDDNEDEYAPVIQSGEQSEPAREPLRVGSAGSSSPLMSSAVQLNGSSSLTSEDPVTMMDSILNDNINLLGKVELLDYLDSIDCSLEDFQAMLSGRQFSIDPDLLVDSENKGLEATKSSVVQHVSEEGRKSKSKPDKQLIQYTAFPLLAFLDGNSASAIEQGSTTASSEVVPSVDKPIEVDELLDSSLDPEPTQSKLVRLEPLTEAEASEATLFYLCELAPAPLDSDMPLLDS

SEQ ID NO: 6443 - protein, 503 aa, Mus musculus
MDLAVGPGAAGPSNVPAFLTKLWTLVSDPDTDALICWSPSGNSFHVFDQGQFAKEVLPKYFKHNNMASFVRQLNMYGFRKVVHIEQGGLVKPERDDTEFQHPCFLRGQEQLLENIKRKVTSVSTLKSEDIKIRQDSVTRLLTDVQLMKGKQECMDSKLLAMKHENEALWREVASLRQKHAQQQKVVNKLIQFLISLVQSNRILGVKRKIPLMLSDSNSAHSVPKYGRQYSLEHVHGPGPYSAPSPAYSSSSLYSSDAVTSSGPIISDITELAPTSPLASPGRSIDERPLSSSTLVRVKQEPPSPPHSPRVLEASPGRPSSMDTPLSPTAFIDSILRESEPTPAASNTAPMDTTGAQAPALPTPSTPEKCLSVACLDKNELSDHLDAMDSNLDNLQTMLTSHGFSVDTSALLDIQELLSPQEPPRPIEAENSNPDSGKQLVHYTAQPLFLLDPDAVDTGSSELPVLFELGESSYFSEGDDYTDDPTISLLTGTEPHKAKDPTVS

SEQ ID NO: 6444 - protein, 535 aa, Mus musculus
MKQSSNVPAFLSKLWTLVEETHTNEFITWSQNGQSFLVLDEQRFAKEILPKYFKHNNMASFVRQLNMYGFRKVVHIESGIIKQERDGPVEFQHPYFKQGQDDLLENIKRKVSSSKPEENKIRQEDLTKIISSAQKVQIKQETIESRLSELKSENESLWKEVSELRAKHAQQQQVIRKIVQFIVTLVQNNQLVSLKRKRPLLLNTNGAPKKNLYQHIVKEPTDNHHHKVPHSRTEGLKSRERISDDIIIYDVTDDNVDEENIPVIPETNEDVVVDSSNQYPDIVIVEDDNEDEYAPVIQSGEQSEPAREPLRVGSAGSSSPLMSSAVQLNGSSSLTSEDPVTMMDSILNDNINLLGKVELLDYLDSIDCSLEDFQAMLSGRQFSIDPDLLVDLFTSSVQMNPTDNIKYTKSENKGLEATKSSVVQHVSEEGRKSKSKPDKQLIQYTAFPLLAFLDGNSASAIEQGSTTASSEVVPSVDKPIEVDELLDSSLDPEPTQSKLVRLEPLTEAEASEATLFYLCELAPAPLDSDMPLLDS

SEQ ID NO: 6445 - protein, 517 aa, Mus musculus
MKQSSNVPAFLSKLWTLVEETHTNEFITWSQNGQSFLVLDEQRFAKEILPKYFKHNNMASFVRQLNMYGFRKVVHIESGIIKQERDGPVEFQHPYFKQGQDDLLENIKRKVSSSKPEENKIRQEDLTKIISSAQKVQIKQETIESRLSELKSENESLWKEVSELRAKHAQQQQVIRKIVQFIVTLVQNNQLVSLKRKRPLLLNTNGAPKKNLYQHIVKEPTDNHHHKVPHSRTEGLKSRERISDDIIIYDVTDDNVDEENIPVIPETNEDVVVDSSNQYPDIVIVEDDNEDEYAPVIQSGEQSEPAREPLRVGSAGSSSPLMSSAVQLNGSSNLTSDDPVTMMDSILNDNINLLGKVELLDYLDSIDCSLEDFQAMLSGRQFSIDPDLLVDSENKGLEATKSSVVQHVSEEGRKSKSKPDKQLIQYTAFPLLAFLDGNSASAIEQGSTTASSEVVPSVDKPIEVDELLDSSLDPEPTQSKLVRLEPLTEAEASEATLFYLCELAPAPLDSDMPLLDS

SEQ ID NO: 6446 - protein, 517 aa, Mus musculus
MKQSSNVPAFLSKLWTLVEETHTNEFITWSQNGQSFLVLDEQRFAKEVLPKYFKHNNMASFVRQLNMYGFRKVVHIESGIIKQERDGPVEFQHPYFKQGQDDLLENIKRKVSSSKPEENKIRQEDLTKIISSAQKVQIKQETIESRLSELKSENESLWKEVSELRAKHAQQQQVIRKIVQFIVTLVQNNQLVSLKRKRPLLLNTNGAPKKNLYQHIVKEPTDNHHHKVPHSRTEGLKSRERISDDIIIYDVTDDNVDEENIPVIPETNEDVVVDSSNQYPEIVIVEDDNEDEYAPVIQSGEQSEPAREPLRVGSAGSSSPLMSSAVQLNGSSSLTSEDPVTMMDSILNDNINLLGKVELLDYLDSIDCSLEDFQAMLSGRQFSIDPDLLVDSENKGLEATKSSVVQHVSEEGRKSKSKPDKQLIQYTAFPLLAFLDGNSASAIEQGSTTASSEVVPSVDKPIEVDELLDSSLDPEPTQSKLVRLEPLTEAEASEATLFYLCELAPAPLDSDMPLLDS

SEQ ID NO: 6447 - protein, 492 aa, Mus musculus
MQEAPAALPTEPGPSPVPAFLGKLWALVGDPGTDHLIRWSPSGTSFLVSDQSRFAKEVLPQYFKHSNMASFVRQLNMYGFRKVVSIEQGGLLRPERDHVEFQHPSFVRGREQLLERVRRKVPALRGDDSRWRPEDLSRLLGEVQALRGVQESTEARLQELRQQNEILWREVVTLRQSHSQQHRVIGKLIQCLFGPLQTGPSSTGAKRKLSLMLDEGSACSASAKFNACPVSGALLQDPYFIQSPLPETTLGLSPHRARGPIISDIPEDSPSPEGHRLSPSGGCRRVKGLALLKEEPASPGGDGEAGLALAPNECDFCVTAPPPLPVAVVQAILEGKGSYSPEGPRSVQQPEPRGPREVPDRGTLGLDRGNRSPESLLPPMLLRPAPETLEPVAPVDVLGPSLHGREWTLMDLDMELSLMQPLAPETDEAELTVKELNSSGVGKDHTLGTPLMLDVQADLEGAALSVPGALTLYNVTESNASYLDPGASPSSP

SEQ ID NO: 6448 - protein, 492 aa, Mus musculus
MQEAPAALPTEPGPSPVPAFLGKLWALVGDPGTDHLIRWSPSGTSFLVSDQSRFAKEVLPQYFKHSNMASFVRQLNMYGFRKVVSIEQGGLLRPERDHVEFQHPSFVRGREQLLERVRRKVPALRGDDSRWRPEDLSRLLGEVQALRGVQESTEARLQELRQQNEILWREVVTLRQSHSQQHRVIGKLIQCLFGPLQTGPSSTGAKRKLSLMLDKGSACSASAKFNACPVSGALLQDPYFIQSPLPETTLGLSPHRARGPIISDIPEDSPSPEGHRLSPSGGCRRVKGLALLKEEPASPGGDGEAGLALAPNECDFCVTAPPPLPVAVVQAILEGKGSYSPEGPRSVQQPEPRGPREVPDRGTLGLDRGNRSPESLLPPMLLRPAPETLEPVAPVDVLGPSLHGREWTLMDLDMELSLMQPLAPETDEAELTVKELNSSGVGKDHTLGTPLMLDVQADLEGAALSVPGALTLYNVTESNASYLDPGASPSSP

SEQ ID NO: 6449 - protein, 462 aa, Mus musculus
MQEAPAALPTEPGPSPVPAFLGKLWALVGDPGTDHLIRWSPSGTSFLVSDQSRFAKEVLPQYFKHSNMASFVRQLNMYGFRKVVSIEQGGLLRPERDHVEFQHPSFVRGREQLLERVRRKVPALRGDDSRWRPEDLSRLLGEVQALRGVQESTEARLQELRQQNEILWREVVTLRQSHSQQHRVIGKLIQCLFGPLQTGPSSTGAKRKLSLMLDEGSACSASAKFNACPVSGALLQDPYFIQSPSPCSPSQRPRWASALTGPEGPSSLTSQKILHLLKDTGFLPPVVAGAPPPLPVAVVQAILEGKGSYSPEGPRSVQQPEPRGPREVPDRGTLGLDRGNRSPESLLPPMLLRPAPETLEPVAPVDVLGPSLHGREWTLMDLDMELSLMQPLAPETDEAELTVKELNSSGVGKDHTLGTPLMLDVQADLEGAALSVPGALTLYNVTESNASYLDPGASPSSP

SEQ ID NO: 6450 - protein, 492 aa, Mus musculus
  unsure (1)..(492): unsure at all Xaa locations
MQEAPAALPTEPGPSPVPAFLGKLWALVGDPGTDHLIRWSPSGTSFLVSDQSRFAKEVLPQYFKHSNMASFVRQLNMYGFRKVVSIEQGGLLRPERDHVEFQHPSFVRGREQLLERVRRKVPALRGDDSRWRPEDLSRLLGEVQALRGVQESTEARLQELRQQNEILWREVVTLRQSHSQQHRVIGKLIQCLFGPLQTGPSSTGAKRKLSLMLDEGSACSASAKFNACPVSGALLQDPYFIQSPLPETTLGLSPHRARGPIISDIPEDSPSPEGHGLSPSGGCRRVKGLALLKEEPASPGGDGEAGLALAPNECDFCVTAPPPLPVAVVQAILEGKGSYSPEGPRSVQQPEPRGPREVPDRGXLGXDRGNRSPESLLPPMLLRPAPETLEPVAPVDVLGPSLHGREWTLMDLDMELSLMQPLAPETDEAELTVKELNSSGVGKDHTLGTPLMLDVQADLEGAALSVPGALTLYNVTESNASYLDPGASPSSP

SEQ ID NO: 6451 - protein, 486 aa, Mus musculus
SGNSFHVFDQGQFAKEVLPKYFKHNNMASFVRQLNMYGFRKVVHIEQGGLVKPERDDTEFQHPCFLRGQEQLLENIKRKVTSVSTLKSEDIKIRQDSVTRLLTDVQLMKGKQECMDSKLLAMKHENEALWREVASLRQKHAQQQKVVNKLIQFLISLVQSNRILGVKRKIPLMLSDSNSAHSVPKYGRQYSLEHVHGPGPYSAPSPAYSSSSLYSSDAVTSSGPIISDITELAPTSPLASPGRSIDERPLSSSTLVRVKQEPPSPPHSPRVLEASPGRPSSMDTPLSPTAFIDSILRESEPTPAASNTAPMDTTGAQAPALPTPSTPEKCLSVACLDKNELSDHLDAMDSNLDNLQTMLTSHGFSVDTSALLDLFSPSVTMPDMSLPDLDSSLASIQELLSPQEPPRPIEAENSNPDSGKQLVHYTAQPLFLLDPDAVDTGSSELPVLFELGESSYFSEGDDYTDDPTISLLTGTEPHKAKDPTVS

SEQ ID NO: 6452 - protein, 513 aa, Rattus norvegicus
MKQSSNVPAFLSKLWTLVEETHTNEFITWSQNGQSFLVLDEQRFAKEILPKYFKHNNMASFVRQLNMYGFRKVVHIESGIVKQERDGPVEFQHPHFKQGQDDLLENIKRKVSSSKPEENKIRQEDLTKIISSAQKVQIKQETIESRLSELKSENESLWKEVSELRAKHAQQQQVIRKIVQFIVTLVQNNQLVSLKRKRPLLLNTNGAPKKNLFQHIVKEPTDNHHHKVPHSRTEGLKSRERISDDIIIYDVTEDNVDEENIPVIPETNEDVVVDPSSQYPDIVIVEDDNEDEYAPVIQSGEQSEPARVGSASSSSPLMSSAVQLNGSSNLTSEDPVTMMDSILNDNINLLGKVELLDYLDSIDCSLEDFQAMLSGRQFSIDPDLLVDSENKGLEATKNSVVQQVSEEGRKSKSKPDKQLIQYTAFPLLAFLDGNPASAVEQGTTTASSEVVPSVDKPIEVDELLDSNLDQEPTQSKLVRLEPLTEAEASEATLFYLCELAPAPLDSDMPLLDS

SEQ ID NO: 6453 - protein, 556 aa, Aspergillus nidulans
MLEDPSYAEIVRWGDDGDSFVVLECEKFTKTILPKHFKHSNFASFVRQLNKYDFHKVRQNNEENGQSPYGQNAWEFKHPEFRANSKESLDNIRRKAPAPRKQAQAHDDSVPTQQIDLLNQQIVAQQQQIQHISDRYAQMSVDHQLMLQEVLRVQKTVVNHENVIHQLVNYLVSIDARQKRDNKAGSFQAQVGASPSQVTPMDDGVSTPLQQASKLLSDMNAEVQFNLVPVESMGEPPKTGVVSTPTMETAPRRMEPVVYPVGATNGIDPMYGEHVNNVPYTVPPKQDMDDRRQFPDNRKKSNHVDPGWMRSPRILLVEDDATCRQIGGKFLYSFSCEIDTALDGLEAVNKVQDGSKYDLILMDIIMPNLDGVSACHLIRQFDRTPIIAMTSNIRSDDIQALLPAWYAASVICSRMDDVLPKPFTRKSLLEMLEKHLVHLKTVPQGMEGHQATTPVTIAGQSSAAQSVTIKEDTSSPSQSPAAAMTAWQSPNQFQPMAAVPANLQQVQGQYVPANPATTAYAMDQEWYAISSTAYGSDGRCWARSKCDRSHVGTSLN

SEQ ID NO: 6454 - protein, 214 aa, Anopheles gambiae str. PEST
HGADEGNIGADKKEGGEGAAAAAKMHTFSETGSVPAFLAKLWRLVEDSETNDLISWSTDGRSFIIQNQAQFAKELLPLNYKHNNMASFIRQLNMYGFHKITSIDNGGLRFDKDEMEFTHPCFQKDHPYLLEHIKRKIATSKQQQLQAQQQAEDKSALKLEAVSRVLSEVKNMRGRQDTLDSRFQTMKQENEALWREIAILRQKHHKQQQIVNKV

SEQ ID NO: 6455 - protein, 677 aa, Kluyveromyces lactis
MGHNDSVETMDEISNPNNILLPHDGTGLDATGISGSQEPYGMVDVLNPDSLKDDSNVDEPLIEDIVNPSLDPEGVVSAEPSNEVGTPLLQQPISLDHVITRPASAGGVYSIGNSSTSSAAKLSDGDLTNATDPLLNNAHGHGQPSSESQSHSNGYHKQGQSQQPLLSLNKRKLLAKAHVDKHHSKKKLSTTRARPAFVNKLWSMVNDKSNEKFIHWSTSGESIVVPNRERFVQEVLPKYFKHSNFASFVRQLNMYGWHKVQDVKSGSMLSNNDSRWEFENENFKRGKEYLLENIVRQKSNTNILGGTTNAEVDIHILLNELETVKYNQLAIAEDLKRITKDNEMLWKENMMARERHQSQQQVLEKLLRFLSSVFGPNSAKTIGNGFQPDLIHELSDMQVNHMSNNNHNNTGNINPNAYHNETDDPMANVFGPLTPTDQGKVPLQDYKLRPRLLLKNRSMSSSSSSNLNQRQSPQNRIVGQSPPPQQQQQQQQQQGQPQGQQFSYPIQGGNQMMNQLGSPIGTQVGSPVGSQYGNQYGNQYSNQFGNQLQQQTSRPALHHGSNGEIRELTPSIVSSDSPDPAFFQDLQNNIDKQEESIQEIQDWITKLNPGPGEDGNTPIFPELNMPSYFANTGGSGQSEQPSDYGDSQIEELRNSRLHEPDRSFEEKNNGQKRRRAA

SEQ ID NO: 6456 - protein, 92 aa, Kluyveromyces lactis
ARPAFVNKLWSMVNDKSNEKFIHWSTSGESIVVPNRERFVQEVLPKYFKHSNFASFVRQLNMYGWHKVQDVKSGSMLSNNDSRWEFENERHA

SEQ ID NO: 6457 - protein, 102 aa, Kluyveromyces lactis
GSRRASVGSMARPAFVNKLWSMVNDKSNEKFIHWSTSGESIVVPNRERFVQEVLPKYFKHSNFASFVRQLNMYGWHKVQDVKSGSMLSNNDSRWEFENERHA

SEQ ID NO: 6458 - protein, 90 aa, Kluyveromyces lactis
PAFVNKLWSMVNDKSNEKFIHWSTSGESIVVPNRERFVQEVLPKYFKHSNFASFVRQLNMYGWHKVQDVKSGSMLSNNDSRWEFENERHA

SEQ ID NO: 6459 - protein, 90 aa, Kluyveromyces lactis
PAFVNKLWSMVNDKSNEKFIHWSTSGESIVVPNRERFVQEVLAKYFKHSNFASFVRQLNMYGWHKVQDVKSGSMLSNNDSRWEFENERHA

SEQ ID NO: 6460 - protein, 90 aa, Kluyveromyces lactis
PAFVNKLWSMVNDKSNEKFIHWSTSGESIVVPNRERFVQEVLKKYFKHSNFASFVRQLNMYGWHKVQDVKSGSMLSNNDSRWEFENERHA

SEQ ID NO: 6461 - protein, 92 aa, Kluyveromyces lactis
  unsure (1)..(92): unsure at all Xaa locations
ARPAFVNKLWSXVNDKSNEKFIHWSTSGESIVVPNRERFVQEVLPKYFKHSNFASFVRQLNXYGWHKVQDVKSGSXLSNNDSRWEFENERHA

SEQ ID NO: 6462 - protein, 88 aa, Kluyveromyces lactis
ARPAFVNKLWSMVNDKSNEKFIHWSTSGESIVVPNRERFVQEVLPKYFKHSNFASFVRQLNMYGWHKVQDVKSGSNDSRWEFENERHA

SEQ ID NO: 6463 - protein, 454 aa, synthetic construct
MEYHSVGPGGVVVTGNNVPAFLTKLWTLVEDPDTDPLICWSPNGTSFHVFDQGRFSKEVLPKYFKHNNMASFVRQLNMYGFRKVVHIEQGGLVKPEKDDTEFQHPYFIRGQEQLLENIKRKVTTVSNIKHEDYKFSTDDVSKMISDVQHMKGKQESMDSKISTLKHENEMLWREVATLRQKHSQQQKVVNKLIQFLITLARSNRVLGVKRKMPLMLNDSSSAHSMPKFSRQYSLESPAPSSTAFTGTGVFSPEPPVKTGPIISDITELAQSSPVATDEWIEDRTSPLVHIKEEPSSPAHSPEVEEVCPVEVEVGAGSDLPVDTPLSPTTFINSILQESEPVSALTPPPSELVASDVGLDSLASIQDLLSPDPVKETESGLDTDSGKQLVQYTSQPIVLPDPLSTDSSSTDLPMLLELQDDSYFSSEPAEDPTIALLNLQPVPEDPKLSHHHHHH

SEQ ID NO: 6464 - protein, 503 aa, synthetic construct
MEYHSVGPGGVVVTGNNVPAFLTKLWTLVEDPDTDPLICWSPNGTSFHVFDQGRFSKEVLPKYFKHNNMASFVRQLNMYGFRKVVHIEQGGLVKPEKDDTEFQHPYFIRGQEQLLENIKRKVTTVSNIKHEDYKFSTDDVSKMISDVQHMKGKQESMDSKISTLKHENEMLWREVATLRQKHSQQQKVVNKLIQFLITLARSNRVLGVKRKMPLMLNDSSSAHSMPKFSRQYSLESPAPSSTAFTGTGVFSPEPPVKTGPIISDITELAQSSPVATDEWIEDRTSPLVHIKEEPSSPAHSPEVEEVCPVEVEVGAGSDLPVDTPLSPTTFINSILQESEPVSALTPPPSEQKCLSVACLDKTELHDHLESIDSGLENLQQILNAQSINFDSSPLFDIFSSAASDVGLDSLASIQDLLSPDPVKETESGLDTDSGKQLVQYTSQPIVLPDPLSTDSSSTDLPMLLELQDDSYFSSEPAEDPTIALLNLQPVPEDPKLSHHHHHH

SEQ ID NO: 6465 - protein, 339 aa, synthetic construct
MEYHSVGPGGVVVTGNNVPAFLTKLWTLVEDPDTDPLICWSPNGTSFHVFDQGRFSKEVLPKYFKHNNMASFVRQLNMYGFRKVVHIEQGGLVKPEKDDTEFQHPYFIRGQEQLLENIKRKVTTVSNIKHEDYKFSTDDVSKMISDVQHMKGKQESMDSKISTLKHENEMLWREVATLRQKHSQQQKVVNKLIQFLITLARSNRVLGVKRKMPLMLNDSSSAHSMPKFSRQYSLELVASDVGLDSLASIQDLLSPDPVKETESGLDTDSGKQLVQYTSQPIVLPDPLSTDSSSTDLPMLLELQDDSYFSSEPAEDPTIALLNLQPVPEDPKLSHHHHHH

SEQ ID NO: 6466 - protein, 411 aa, synthetic construct
MESVPESVPSPNSNTPSIPPPVNSVPPFLSKTYDMVDDPLTNEVVSWSSGNNSFVVWSAPEFSKVLLPKYFKHNNFSSFVRQLNTYGFRKVDPDRWEFANEGFLRGRKQLLKSIVRRKPSHVQQNQQQTQVQSSSVGACVEVGKFGIEEEVERLKRDKNVLMQELVRLRQQQQATENQLQNVGQKVQVMEQRQQQMMSFLAKAVQSPGFLNQLVQQNNNDGNRQIPGSNKKRRLPVDEQENRGDNVANGLNRQIVRYQPSINEAAQNMLRQFLNTSTSPRYEFSRGRTRNNYGSTIEGLLDLPDDDDAPAEAGLVAPRMSFLSAGQRPRRLSTTAPITDVSLVDELRLDGEEVDMTPADALDDFDLEMLGDVESPSPGMTHDPVSYGALDVDDFEFEQMFTDALGIDDFGG

SEQ ID NO: 6467 - protein, 402 aa, Phaseolus acutifolius
MDEALGSSCSLPPFLAKTYEMVDDLSTNSIVSWSVSSKSFIVWNPPEFARDLLPRFFKHNNFSSFIRQLNTYGFKKIDPEQWEFANDDFVRGQPHLMKNIHRRKPVHSHSLQNLQAQGPLGDSERQGFTDGIEKLKRDKERLLVELQKFQHEWQTYEIQIHCSNDRLEKLEQKQHKMVSSISHVLQKPVLAVNILPLTETMDRKRRLPRSGHYYDESSIEDAIETSQMLPRENAENTTVLTLNVERLDQLESSVAFWEAIAHDIGDNFAQIQSNMDFDESTSCADSPSISCAQLDVDVRPKSSGIDMNSEPTAAAVPDPLASKDQPAGITVAATGVNDVFWEQFLTEDPGASETQEVQSERKDCDGRKNEGKPNDHSKFWWNIRNANNLSEPMGHVGQAEKT

SEQ ID NO: 6468 - protein, 299 aa, Arabidopsis thaliana
MNSPPVDAMITGESSSQRSIPTPFLTKTFNLVEDSSIDDVISWNEDGSSFIVWNPTDFAKDLLPKHFKHNNFSSFVRQLNTYGFKKVVPDRWEFSNDFFKRGEKRLLREIQRRKITTTHQTVVAPSSEQRNQTMVVSPSNSGEDNNNNQVMSSSPSSWYCHQTKTTGNGGLSVELLEENEKLRSQNIQLNRELTQMKSICDNIYSLMSNYVGSQPTDRSYSPGGSSSQPMEFLPAKRFSEMEIEEEEEASPRLFGVPIGLKRTRSEGVQVKTTAVVGENSDEETPWLRHYNRTNQRVCN

SEQ ID NO: 6469 - protein, 291 aa, Arabidopsis thaliana
MITGESSSQRSIPTPFLTKTFNLVEDSSIDDVISWNEDGSSFIVWNPTDFAKDLLPKHFKHNNFSSFVRQLNTYGFKKVVPDRWEFSNDFFKRGEKRLLREIQRRKITTTHQTVVAPSSEQRNQTMVVSPSNSGEDNNNNQVMSSSPSSWYCHQTKTTGNGGLSVELLEENEKLRSQNIQLNRELTQMKSICDNIYSLMSNYVGSQPTDRSYSPGGSSSQPMEFLPAKRFSEMEIEEEEEASPRLFGVPIGLKRTRSEGVQVKTTAVVGENSDEETPWLRHYNRTNQRVCN

SEQ ID NO: 6470 - protein, 345 aa, Arabidopsis thaliana
MDENNGGSSSLPPFLTKTYEMVDDSSSDSVVAWSENNKSFIVKNPAEFSRDLLPRFFKHKNFSSFIRQLNTYGFRKVDPEKWEFLNDDFVRGRPYLMKNIHRRKPVHSHSLVNLQAQNPLTESERRSMEDQIERLKNEKEGLLAELQNQEQERKEFELQVTTLKDRLQHMEQHQKSIVAYVSQVLGKPGLSLNLENHERRKRRFQENSLPPSSSHIEQVEKLESSLTFWENLVSESCEKSGLQSSSMDHDAAESSLSIGDTRPKSSKIDMNSEPPVTVTAPAPKTGVNDDFWEQCLTENPGSTEQQEVQSERRDVGNDNNGNKIGNQRTYWWNSGNVNNITEKAS

SEQ ID NO: 6471 - protein, 495 aa, Arabidopsis thaliana
MFVNFKYFSFFIRTKMDGVTGGGTNIGEAVTAPPPRNPHPATLLNANSLPPPFLSKTYDMVEDPATDAIVSWSPTNNSFIVWDPPEFSRDLLPKYFKHNNFSSFVRQLNTYGFRKVDPDRWEFANEGFLRGQKHLLKKISRRKSVQGHGSSSSNPQSQQLSQGQGSMAALSSCVEVGKFGLEEEVEQLKRDKNVLMQELVKLRQQQQTTDNKLQVLVKHLQVMEQRQQQIMSFLAKAVQNPTFLSQFIQKQTDSNMHVTEANKKRRLREDSTAATESNSHSHSLEASDGQIVKYQPLRNDSMMWNMMKTDDKYPFLDGFSSPNQVSGVTLQEVLPITSGQSQAYASVPSGQPLSYLPSTSTSLPDTIMPETSQIPQLTRESINDFPTENFMDTEKNVPEAFISPSPFLDGGSVPIQLEGIPEDPEIDELMSNFEFLEEYMPESPVFGDATTLENNNNNNNNNNNNNNNNNNNNTNGRHMDKLIEELGLLTSETEH

SEQ ID NO: 6472 - protein, 482 aa, Arabidopsis thaliana
MDVSKVTTSDGGGDSMETKPSPQPQPAAILSSNAPPPFLSKTYDMVDDHNTDSIVSWSANNNSFIVWKPPEFARDLLPKNFKHNNFSSFVRQLNTYGFRKVDPDRWEFANEGFLRGQKHLLQSITRRKPAHGQGQGHQRSQHSNGQNSSVSACVEVGKFGLEEEVERLKRDKNVLMQELVRLRQQQQSTDNQLQTMVQRLQGMENRQQQLMSFLAKAVQSPHFLSQFLQQQNQQNESNRRISDTSKKRRFKRDGIVRNNDSATPDGQIVKYQPPMHEQAKAMFKQLMKMEPYKTGDDGFLLGNGTSTTEGTEMETSSNQVSGITLKEMPTASEIQSSSPIETTPENVSAASEATENCIPSPDDLTLPDFTHMLPENNSEKPPESFMEPNLGGSSPLLDPDLLIDDSLSFDIDDFPMDSDIDPVDYGLLERLLMSSPVPDNMDSTPVDNETEQEQNGWDKTKHMDNLTQQMGLLSPETLDLSR

SEQ ID NO: 6473 - protein, 483 aa, Arabidopsis thaliana
MFVNFKYFSFFIRTKMDGVTGGGTNIGEAVTAPPPRNPHPATLLNANSLPPPFLSKTYDMVEDPATDAIVSWSPTNNSFIVWDPPEFSRDLLPKYFKHNNFSSFVRQLNTYGFRKVDPDRWEFANEGFLRGQKHLLKKISRRKSVQGHGSSSSNPQSQQLSQGQGSMAALSSCVEVGKFGLEEEVEQLKRDKNVLMQELVKLRQQQQTTDNKLQVMVKHLQVMEQRQQQIMSFLAKAVQNPTFLSQFIQKQTDSNMHVTEANKKRRLREDSTAATESNSHSHSLDASDGQIVKYQPLRNDSMMWNMMKTDDKYPFLDGFSSPNQVSGVTLQEVLPTTSGQSQAYASVPSGQPLSYLPSTSTSLPDTIMPETSQIPQLTRESINDFPTENYMDTEKNVPEAFISPSPFLDGGSVPIQLEGIPEDPEIDELMSNFEFLEEYMPESPVFGDATTLENNNNNNNNTNGRHMDKLIEELGLLTSETEH

SEQ ID NO: 6474 - protein, 406 aa, Arabidopsis thaliana
MDPSFRFIKEEFPAGFSDSPSPPSSSSYLYSSSMAEAAINDPTTLSYPQPLEGLHESGPPPFLTKTYDLVEDSRTNHVVSWSKSNNSFIVWDPQAFSVTLLPRFFKHNNFSSFVRQLNTYGFRKVNPDRWEFANEGFLRGQKHLLKNIRRRKTSNNSNQMQQPQSSEQQSLDNFCIEVGRYGLDGEMDSLRRDKQVLMMELVRLRQQQQSTKMYLTLIEEKLKKTESKQKQMMSFLARAMQNPDFIQQLVEQKEKRKEIEEAISKKRQRPIDQGKRNVEDYGDESGYGNDVAASSSALIGMSQEYTYGNMSEFEMSELDKLAMHIQGLGDNSSAREEVLNVEKGNDEEEVEDQQQGYHKENNEIYGEGFWEDLLNEGQNFDFEGDQENVDVLIQQLGYLGSSSHTN

SEQ ID NO: 6475 - protein, 520 aa, Arabidopsis thaliana
RESLCLCKRYLSLRRTEETSRINQSINFSELTLDFSFEVMESVPESVPSPNSNTPSIPPPVNSVPPFLSKTYDMVDDPLTNEVVSWSSGNNSFVVWSAPEFSKVLLPKYFKHNNFSSFVRQLNTYGFRKVDPDRWEFANEGFLRGRKQLLKSIVRRKPSHVQQNQQQTQVQSSSVGACVEVGKFGIEEEVERLKRDKNVLMQELVRLRQQQQATENQLQNVGQKVQVMEQRQQQMMSFLAKAVQSPGFLNQLVQQNNNDGNRQIPGSNKKRRLPVDEQENRGDNVANGLNRQIVRYQPSINEAAQNMLRQFLNTSTSPRYESVSNNPDSFLLGDVPSSTSVDNGNPSSRVSGVTLAEFSPNTVQSATNQVPEASLAHHPQAGLVQPNIGQSPAQGAAPADSWSPEFDLVGCETDSGECFDPIMAVLDESEGDAISPEGEGKMNELLEGVPKLPGIQDPFWEQFFSVELPAIADTDDILSGSVENNDLVLEQEPNEWTRNEQQMKYLTEQMGLLSSEAQRK

SEQ ID NO: 6476 - protein, 481 aa, Arabidopsis thaliana
MESVPESVPSPNSNTPSIPPPVNSVPPFLSKTYDMVDDPLTNEVVSWSSGNNSFVVWSAPEFSKVLLPKYFKHNNFSSFVRQLNTYGFRKVDPDRWEFANEGFLRGRKQLLKSIVRRKPSHVQQNQQQTQVQSSSVGACVEVGKFGIEEEVERLKRDKNVLMQELVRLRQQQQATENQLQNVGQKVQVMEQRQQQMMSFLAKAVQSPGFLNQLVQQNNNDGNRQIPGSNKKRRLPVDEQENRGDNVANGLNRQIVRYQPSINEAAQNMLRQFLNTSTSPRYESVSNNPDSFLLGDVPSSTSVDNGNPSSRVSGVTLAEFSPNTVQSATNQVPEASLAHHPQAGLVQPNIGQSPAQGAAPADSWSPEFDLVGCETDSGECFDPIMAVLDESEGDAISPEGEGKMNELLEGVPKLPGIQDPFWEQFFSVELPAIADTDDILSGSVENNDLVLEQEPNEWTRNEQQMKYLTEQMGLLSSEAQRK

SEQ ID NO: 6477 - protein, 468 aa, Arabidopsis thaliana
MGTVCESVATAKSSTAVMSSIPPFLSKTYDMVDDPLTDDVVSWSSGNNSFVVWNVPEFAKQFLPKYFKHNNFSSFVRQLNTYGFRKVDPDRWEFANEGFLRGQKQILKSIVRRKPAQVQPPQQPQVQHSSVGACVEVGKFGLEEEVERLQRDKNVLMQELVRLRQQQQVTEHHLQNVGQKVHVMEQRQQQMMSFLAKAVQSPGFLNQFSQQSNEANQHISESNKKRRLPVEDQMNSGSHGVNGLSRQIVRYQSSMNDATNTMLQQIQQMSNAPSHESLSSNNGSFLLGDVPNSNISDNGSSSNGSPEVTLADVSSIPAGFYPAMKYHEPCETNQVMETNLPFSQGDLLPPTQGAAASGSSSSDLVGCETDNGECLDPIMAVLDGALELEADTLNELLPEVQDSFWEQFIGESPVIGETDELISGSVENELILEQLELQSTLSNVWSKNQQMNHLTEQMGLLTSDALRK

SEQ ID NO: 6478 - protein, 401 aa, Arabidopsis thaliana
MDENNHGVSSSSLPPFLTKTYEMVDDSSSDSIVSWSQSNKSFIVWNPPEFSRDLLPRFFKHNNFSSFIRQLNTYGFRKADPEQWEFANDDFVRGQPHLMKNIHRRKPVHSHSLPNLQAQLNPLTDSERVRMNNQIERLTKEKEGLLEELHKQDEEREVFEMQVKELKERLQHMEKRQKTMVSFVSQVLEKPGLALNLSPCVPETNERKRRFPRIEFFPDEPMLEENKTCVVVREEGSTSPSSHTREHQVEQLESSIAIWENLVSDSCESMLQSRSMMTLDVDESSTFPESPPLSCIQLSVDSRLKSPPSPRIIDMNCEPDGSKEQNTVAAPPPPPVAGANDGFWQQFFSENPGSTEQREVQLERKDDKDKAGVRTEKCWWNSRNVNAITEQLGHLTSSERS

SEQ ID NO: 6479 - protein, 468 aa, Arabidopsis thaliana
MGTVCESVATAKSSTAVMSSIPPFLSKTYDMVDDPLTDDVVSWSSGNNSFVVWNVPEFAKQFLPKYFNHNNFSSFVRQLNTYGFRKVDPDRWEFANEGFLRGQKQILKSIVRRKPAQVQPPQQPQVQHSSVGACVEVGKFGLEEEVERLQRDKNVLMQELVRLRQQQQVTEHHLQNVGQKVHVMEQRQQQMMSFLAKAVQSPGFLNQFSQQSNEANQHISESNKKRRLPVEDQMNSGSHGVNGLSRQIVRYQSSMNDATNTMLQQIQQMSNAPSHESLSSNNGSFLLGDVPNSNISDNGSSSNGSPEVTLADVSSIPAGFYPAMKYHEPCETNQVMETNLPFSQGDLLPPTQGAAASGSSSSDLVGCETDNGECLDPIMAVLDGALELEADTLNELLPEVQDSFWEQFIGESPVIGETDELISGSVENELILEQLELQSTLSNVWSKNQQMNHLTEQMGLLTSDALRK

SEQ ID NO: 6480 - protein, 284 aa, Arabidopsis thaliana
MTAVTAAQRSVPAPFLSKTYQLVDDHSTDDVVSWNEEGTAFVVWKTAEFAKDLLPQYFKHNNFSSFIRQLNTYGFRKTVPDKWEFANDYFRRGGEDLLTDIRRRKSVIASTAGKCVVVGSPSESNSGGGDDHGSSSTSSPGSSKNPGSVENMVADLSGENEKLKRENNNLSSELAAAKKQRDELVTFLTGHLKVRPEQIDKMIKGGKFKPVESDEESECEGCDGGGGAEEGVGEGLKLFGVWLKGERKKRDRDEKNYVVSGSRMTEIKNVDFHAPLWKSSKVCN

SEQ ID NO: 6481 - protein, 401 aa, Arabidopsis thaliana
EFRNNHGVSSSSLPPFLTKTYEMVDDSSSDSIVSWSQSNKSFIVWNPPEFSRDLLPRFFKHNNFSSFIRQLNTYGFRKADPEQWEFANDDFVRGQPHLMKNIHRRKPVHSHSLPNLQAQLNPLTDSERVRMNNQIERLTKEKEGLLEELHKQDEEREVFEMQVKELKERLQHMEKRQKTMVSFVSQVLEKPGLALNLSPCVPETNERKRRFPRIEFFPDEPMLEENKTCVVVREEGSTSPSSHTREHQVEQLESSIAIWENLVSDSCESMLQSRSMMTLDVDESSTFPESPPLSCIQLSVDSRLKSPPSPRIIDMNCEPDGSKEQNTVAAPPPPPVAGANDGFWQQFFSENPGSTEQREVQLERKDDKDKAGVRTEKCWWNSRNVNAITEQLGHLTSSERS

SEQ ID NO: 6482 - protein, 284 aa, Arabidopsis thaliana
MTAVTAAQRSVPAPFLSKTYQLVDDHRTDDVVSWNEEGTAFVVWKTAEFAKDLLPQYFKHNNFSSFIRQLNTYGFRKTVPDKWEFANDYFRRGGEDLLTDIRRRKSVIASTAGKCVVVGSPSESNSGGGDDHGSSSTSSPGSSKNPGSVENMVADLSGENEKLKRENNNLSSELAAAKKQRDELVTFLTGHLKVRPEQIDKMIKGGKFKPVESDEESECEGCDGGGGAEEGVGEGLKLFGVWLKGERKKRDRDEKNYVVSGSRMTEIKNVDFHAPLWKSSKVCN

SEQ ID NO: 6483 - protein, 374 aa, Arabidopsis thaliana
MVKSTDGGGGSSSSSSVAPFLRKCYDMVDDSTTDSIISWSPSADNSFVILDTTVFSVQLLPKYFKHSNFSSFIRQLNIYGFRKVDADRWEFANDGFVRGQKDLLKNVIRRKNVQSSEQSKHESTSTTYAQEKSGLWKEVDILKGDKQVLAQELIKVRQYQEVTDTKMLHLEDRVQGMEESQQEMLSFLVMVMKNPSLLVQLLQPKEKNTWRKAGEGAKIVEEVTDEGESNSYGLPLVTYQPPSDNNGTAKSNSNDVNDFLRNADMLKFCLDENHVPLIIPDLYDDGAWEKLLLLSPSRKKTKKQENIVKKGKDDLTLEEEEEDGTMELDKSYMLKLISEEMEKPDDFEFGQLTPERSRNLEILTEQMELLASNE

SEQ ID NO: 6484 - protein, 330 aa, Arabidopsis thaliana
MEDDNSNNNNNNNVIAPFIVKTYQMVNDPSTDWLITWGPAHNSFIVVDPLDFSQRILPAYFKHNNFSSFVRQLNTYGFRKVDPDRWEFANEHFLRGQKHLLNNIARRKHARGMYGQDLEDGEIVREIERLKEEQRELEAEIQRMNRRIEATEKRPEQMMAFLYKVVEDPDLLPRMMLEKERTKQQQQVSDKKKRRVTMSTVKSEEEEVEEDEGRVFRVMSSSTPSPSSTENLYRNHSPDGWIVPMTQGQFGSYETGLVAKSMLSNSTSSTSSSLTSTFSLPESVNGGGGGGCGSIQGERRYKETATFGGVVESNPPTTPPYPFSLFRGGF

SEQ ID NO: 6485 - protein, 447 aa, Arabidopsis thaliana
MVDDPLTNEVVSWSSGNNSFVVWSAPEFSKVLLPKYFKHNNFSSFVRQLNTYGFRKVDPDRWEFANEGFLRGRKQLLKSIVRRKPSHVQQNQQQTQVQSSSVGACVEVGKFGIEEEVERLKRDKNVLMQELVRLRQQQQATENQLQNVGQKVQVMEQRQQQMMSFLAKAVQSPGFLNQLVQQNNNDGNRQIPGSNKKRRLPVDEQENRGDNVANGLNRQIVRYQPSINEAAQNMLRQFLNTSTSPRYESVSNNPDSFLLGDVPSSTSVDNGNPSSRVSGVTLAEFSPNTVQSATNQVPEASLAHHPQAGLVQPNIGQSPAQGAAPADSWSPEFDLVGCETDSGECFDPIMAVLDESEGDAISPEGEGKMNELLEGVPKLPGIQDPFWEQFFSVELPAIADTDDILSGSVENNDLVLEQEPNEWTRNEQQMKYLTEQMGLLSSEAQRK

SEQ ID NO: 6486 - protein, 377 aa, Arabidopsis thaliana
MPGEQTGETPTVAGVGGGGAGCSAGNSGGSSGCGAGGGGGGSGGGGGGGGDSQRSIPTPFLTKTYQLVEDPVYDELISWNEDGTTFIVWRPAEFARDLLPKYFKHNNFSSFVRQLNTYGFRKVVPDRWEFSNDCFKRGEKILLRDIQRRKISQPAMAAAAAAAAAAVAASAVTVAAVPVVAHIVSPSNSGEEQVISSNSSPAAAAAAIGGVVGGGSLQRTTSCTTAPELVEENERLRKDNERLRKEMTKLKGLYANIYTLMANFTPGQEDCAHLLPEGKPLDLLPERQEMSEAIMASEIETGIGLKLGEDLTPRLFGVSIGVKRARREEELGAAEEEDDDRREAAAQEGEQSSDVKAEPMEENNSGNHNGSWLELGK

SEQ ID NO: 6487 - protein, 328 aa, Arabidopsis thaliana
RDSQRSIPTPFLTKTYQLVEDPVYDELISWNEDGTTFIVWRPAEFARDLLPKYFKHNNFSSFVRQLNTYGFRKVVPDRWEFSNDCFKRGEKILLRDIQRRKISQPAMAAAAAAAAAAVAASAVTVAAVPVVAHIVSPSNSGEEQVISSNSSPAAAAAAIGGVVGGGSLQRTTSCTTAPELVEENERLRKDNERLRKEMTKLKGLYANIYTLMANFTPGQEDCAHLLPEGKPLDLLPERQEMSEAIMASEIETGIGLKLGEDLTPRLFGVSIGVKRARREEELGAAEEEDDDRREAAAQEGEQSSDVKAEPMEENNSGNHNGSWLELGK

SEQ ID NO: 6488 - protein, 345 aa, Arabidopsis thaliana
MEELKVEMEEETVTFTGSVAASSSVGSSSSPRPMEGLNETGPPPFLTKTYEMVEDPATDTVVSWSNGRNSFVVWDSHKFSTTLLPRYFKHSNFSSFIRQLNTYGFRKIDPDRWEFANEGFLAGQKHLLKNIKRRRNMGLQNVNQQGSGMSCVEVGQYGFDGEVERLKRDHGVLVAEVVRLRQQQHSSKSQVAAMEQRLLVTEKRQQQMMTFLAKALNNPNFVQQFAVMSKEKKSLFGLDVGRKRRLTSTPSLGTMEENLLHDQEFDRMKDDMEMLFAAAIDDEANNSMPTKEEQCLEAMNVMMRDGNLEAALDVKVEDLVGSPLDWDSQDLHDMVDQMGFLGSEP

SEQ ID NO: 6489 - protein, 412 aa, Arabidopsis thaliana
MSPKKDAVSKPTPISVPVSRRSDIPGSLYVDTDMGFSGSPLPMPLDILQGNPIPPFLSKTFDLVDDPTLDPVISWGLTGASFVVWDPLEFARIILPRNFKHNNFSSFVRQLNTYGFRKIDTDKWEFANEAFLRGKKHLLKNIHRRRSPQSNQTCCSSTSQSQGSPTEVGGEIEKLRKERRALMEEMVELQQQSRGTARHVDTVNQRLKAAEQRQKQLLSFLAKLFQNRGFLERLKNFKGKEKGGALGLEKARKKFIKHHQQPQDSPTGGEVVKYEADDWERLLMYDEETENTKGLGGMTSSDPKGKNLMYPSEEEMSKPDYLMSFPSPEGLIKQEETTWSMGFDTTIPSFSNTDAWGNTMDYNDVSEFGFAAETTSDGLPDVCWEQFAAGITETGFNWPTGDDDDNTPMNDP

SEQ ID NO: 6490 - protein, 476 aa, Arabidopsis thaliana
MSYQSYPTESHGFYTCIIFAIFVCCFVPFLMLQIVKMYMTIVTGRKKKCSNGNNVRDIIYLSSPKGPKKDAVSKPTPISVPVSRRSDIPGSLYVDTDMGFSGSPLPMPLDILQGNPIPPFLSKTFDLVDDPTLDPVISWGLTGASFVVWDPLEFARIILPRNFKHNNFSSFVRQLNTYGFRKIDTDKWEFANEAFLRGKKHLLKNIHRRRSPQSNQTCCSSTSQSQGSPTEVGGEIEKLRKERRALMEEMVELQQQSRGTARHVDTVNQRLKAAEQRQKQLLSFLAKLFQNRGFLERLKNFKGKEKGGALGLEKARKKFIKHHQQPQDSPTGGEVVKYEADDWERLLMYDEETENTKGLGGMTSSDPKGKNLMYPSEEEMSKPDYLMSFPSPEGLIKQEETTWSMGFDTTIPSFSNTDAWGNTMDYNDVSEFGFAAETTSDGLPDVCWEQFAAGITETGFNWPTGDDDDNTPMNDP

SEQ ID NO: 6491 - protein, 466 aa, Arabidopsis thaliana
MNGALGNSSASVSGGEGAGGPAPFLVKTYEMVDDSSTDQIVSWSANNNSFIVWNHAEFSRLLLPTYFKHNNFSSFIRQLNTYGFRKIDPERWEFLNDDFIKDQKHLLKNIHRRKPIHSHSHPPASSTDQERAVLQEQMDKLSREKAAIEAKLLKFKQQKVVAKHQFEEMTEHVDDMENRQKKLLNFLETAIRNPTFVKNFGKKVEQLDISAYNKKRRLPEVEQSKPPSEDSHLDNSSGSSRRESGNIFHQNFSNKLRLELSPADSDMNMVSHSIQSSNEEGASPKGILSGGDPNTTLTKREGLPFAPEALELADTGTCPRRLLLNDNTRVETLQQRLTSSEETDGSFSCHLNLTLASAPLPDKTASQIAKTTLKSQELNFNSIETSASEKNRGRQEIAVGGSQANAAPPARVNDVFWEQFLTERPGSSDNEEASSTYRGNPYEEQEEKRNGSMMLRNTKNIEQLTL

SEQ ID NO: 6492 - protein, 834 aa, Arabidopsis thaliana
MEEDRESRVSAKPSGDRVDRLRNLPDCLLFKILLNLPTKDVVKLSVLSRRWRNVWRYVPGFNSESCLQKFKLTVNWYDDVQLETVHFTEWFNAVVKRKVQHLHILDKTWGRDEVVIPPTVFTCGSLISLNLYDVYLPNREFVSLPSLKVIVLDAVVFDEDFAFEMLVSGCPVLESLSVNKINLNDISENDDDYLEVVIDAPRLHYLKLNDKRTASFIMKNHGSLLKADIDFVFNLGSEYMFDPNYLPTRHIIRDFLVGLSGVKDMIISSSTLQVIYDYSRCEQLPLFRNVSFLRVEFADYRWEMLPIFLESCPNLKSLVLGFSIPPGKEGANILPGPRRFLTSLEYVKIAKPMAAEASEIKLKLVNSTMNGALGNSSASVSGGEGAGGPAPFLVKTYEMVDDSSTDQIVSWSANNNSFIVWNHAEFSRLLLPTYFKHNNFSSFIRQLNTYGFRKIDPERWEFLNDDFIKDQKHLLKNIHRRKPIHSHSHPPASSTDQERAVLQEQMDKLSREKAAIEAKLLKFKQQKVVAKHQFEEMTEHVDDMENRQKKLLNFLETAIRNPTFVKNFGKKVEQLDISAYNKKRRLPEVEQSKPPSEDSHLDNSSGSSRRESGNIFHQNFSNKLRLELSPADSDMNMVSHSIQSSNEEGASPKGILSGGDPNTTLTKREGLPFAPEALELADTGTCPRRLLLNDNTRVETLQQRLTSSEETDGSFSCHLNLTLASAPLPDKTASQIAKTTLKSQELNFNSIETSASEKNRGRQEIAVGGSQANAAPPARVNDVFWEQFLTERPGSSDNEEASSTYRGNPYEEQEEKRNGSMMLRNTKNIEQLTL

SEQ ID NO: 6493 - protein, 282 aa, Arabidopsis thaliana
MDYNLPIPLEGLKETPPTAFLTKTYNIVEDSSTNNIVSWSRDNNSFIVWEPETFALICLPRCFKHNNFSSFVRQLNTYGFKKIDTERWEFANEHFLKGERHLLKNIKRRKTSSQTQTQSLEGEIHELRRDRMALEVELVRLRRKQESVKTYLHLMEEKLKVTEVKQEMMMNFLLKKIKKPSFLQSLRKRNLQGIKNREQKQEVISSHGVEDNGKFVKAEPEEYGDDIDDQCGGVFDYGDELHIASMEHQGQGEDEIEMDSEGIWKGFVLSEEEMCDLVEHFI

SEQ ID NO: 6494 - protein, 251 aa, Arabidopsis thaliana
MDYNLPIPLEGLKETPPTAFLTKTYNIVEDSSTNNIVSWSRDNNSFIVWEPETFALICLPRCFKHNNFSSFVRQLNTYGFKKIDTERWEFANEHFLKGERHLLKNIKRRKTSSQTQTQSLEGEIHELRRDRMALEVELVRLRRKQESVKTYLHLMEEKLKVTEVKQEMMMNFLLKKIKKPSFLQSLRKRNLQGIKNREQKQEVISSHGFDYGDELHIASMEHQGQGEDEIEMDSESTPLIVQRRLSTFYFS

SEQ ID NO: 6495 - protein, 282 aa, Arabidopsis thaliana
MDPSSSSRARSMPPPVPMEGLQEAGPSPFLTKTFEMVGDPNTNHIVSWNRGGISFVVWDPHSFSATILPLYFKHNNFSSFVRQLNTYGFRKIEAERWEFMNEGFLMGQRDLLKSIKRRTSSSSPPSLNYSQSQPEAHDPGVELPQLREERHVLMMEISTLRQEEQRARGYVQAMEQRINGAEKKQRHMMSFLRRAVENPSLLQQIFEQKRDREEAAMIDQAGLIKMEEVEHLSELEALALEMQGYGRQRTDGVERELDDGFWEELLMNNENSDEEEANVKQD

SEQ ID NO: 6496 - protein, 348 aa, Arabidopsis thaliana
MAMMVENSYGGYGGGGGERIQLMVEGQGKAVPAPFLTKTYQLVDDPATDHVVSWGDDDTTFVVWRPPEFARDLLPNYFKHNNFSSFVRQLNTYGFRKIVPDRWEFANEFFKRGEKHLLCEIHRRKTSQMIPQQHSPFMSHHHAPPQIPFSGGSFFPLPPPRVTTPEEDHYWCDDSPPSRPRVIPQQIDTAAQVTALSEDNERLRRSNTVLMSELAHMKKLYNDIIYFVQNHVKPVAPSNNSSYLSSFLQKQQQQQPPTLDYYNTATVNATNLNALNSSPPTSQSSITVLEDDHTNHHDQSNMRKTKLFGVSLPSSKKRSHHFSDQTSKTRLVLDQSDLALNLMTASTR

SEQ ID NO: 6497 - protein, 244 aa, Arabidopsis thaliana
MEDAGEHLRCNDNVNDEERLPLEFMIGNSTSTAELQPPPPFLVKTYKVVEDPTTDGVISWNEYGTGFVVWQPAEFARDLLPTLFKHCNFSSFVRQLNTYGFRKVTTIRWEFSNEMFRKGQRELMSNIRRRKSQHWSHNKSNHQVVPTTTMVNQEGHQRIGIDHHHEDQQSSATSSSFVYTALLDENKCLKNENELLSCELGKTKKKCKQLMELVERYRGEDEDATDESDDEEDEGLKLFGVKLE

SEQ ID NO: 6498 - protein, 272 aa, Arabidopsis thaliana
MMNPFLPEGCDPPPPPQPMEGLHENAPPPFLTKTFEMVDDPNTDHIVSWNRGGTSFVVWDLHSFSTILLPRHFKHSNFSSFIRQLNTYGFRKIEAERWEFANEEFLLGQRQLLKNIKRRNPFTPSSSPSHDACNELRREKQVLMMEIVSLRQQQQTTKSYIKAMEQRIEGTERKQRQMMSFLARAMQSPSFLHQLLKQRDKKIKELEDNESAKRKRGSSSMSELEVLALEMQGHGKQRNMLEEEDHQLVVERELDDGFWEELLSDESLASTS

SEQ ID NO: 6499 - protein, 331 aa, Arabidopsis thaliana
MTAIPNVVDIESSSSSLCQETATETVTVERGSSDSSSKPDDVVLLIKEEEDDAVNLSLGFWKLHEIGLITPFLRKTFEIVDDKVTDPVVSWSPTRKSFIIWDSYEFSENLLPKYFKHKNFSSFIRQLNSYGFKKVDSDRWEFANEGFQGGKKHLLKNIKRRSKNTKCCNKEASTTTTETEVESLKEEQSPMRLEMLKLKQQQEESQHQMVTVQEKIHGVDTEQQHMLSFFAKLAKDQRFVERLVKKRKMKIQRELEAAEFVKKLKLLQDQETQKNLLDVEREFMAMAATEHNPEPDILVNNQSGNTRCQLNSEDLLVDGGSMDVNGRIEIE

SEQ ID NO: 6500 - protein, 346 aa, Arabidopsis thaliana
MTLDPVISWGLTGASFVVWDPLEFARIILPRNFKHNNFSSFVRQLNTYGFRKIDTDKWEFANEAFLRGKKHLLKNIHRRRSPQSNQTCCSSTSQSQGSPTEVGGEIEKLRKERRALMEEMVELQQQSRGTARHVDTVNQRLKAAEQRQKQLLSFLAKLFQNRGFLERLKNFKGKEKGGALGLEKARKKFIKHHQQPQDSPTGGEVVKYEADDWERLLMYDEETENTKGLGGMTSSDPKGKNLMYPSEEEMSKPDYLMSFPSPEGLIKQEETTWSMGFDTTIPSFSNTDAWGNTMDYNDVSEFGFAAETTSDGLPDVCWEQFAAGITETGFNWPTGDDDDNTPMNDP

SEQ ID NO: 6501 - protein, 291 aa, Arabidopsis thaliana
MSKNEGSLTSVSYFITTTYDMVDDLSLDSIISWSQSGKSFIIWNPEEFYNNLLQRFCFQRINTFFSFLFSHGFRKIDSGKWEFANDNFVRGQRHLINNIISDVIEQEVQYDQGMELFKAEKLFARLVKKVQDQLPPHNSYPTSKLPFPTKIYEMVDDPSSDAIISWSQSGKSFIIWNPQEFCKDHLRRLFNTLHIHFFFYKLKIFGFKKINPKKWEFANDNFVRGQRHLVEIIISNDKKKNDQLRKQDAREKKMAEAGELFKLQIEEMSDMRKKMKKAKEVKEQEVRLCKL

SEQ ID NO: 6502 - protein, 282 aa, Glycine max
MSQRSVPAPFLTKTYQLVEDQGTDQVISWGESGNTFVVWKHADFAKDLLPKYFKHNNFSSFVRQLNTYGFRKIVPDKWEFANEHFKRGQKELLSEIKRRKTVPQSSAHPPEAGKSGGDGNSPLNSGSDDAGSTSTSSSSSGSKNQGSVETNTTPSHQLSSENEKLKKDNETLSCELARARKQCDELVAFLRDRLMVGPDQIDRIMRQGSCGSENVVGEGGGGDCLKLFGVWLKGDTLTDKRNNHKRGREDQMGFGGPRLKESKPVVDFSRNRMMMINEKGKG

SEQ ID NO: 6503 - protein, 282 aa, Glycine max
MSQRSVPAPFLTKTYQLVEDQGTDQVISWGESGNTFVVWKHADFAKDLLPKYFKHNNFSSFVRQLNTYGFRKIVPDKWEFANEHFKRGQKELLSEIKRRKTVPQSSAHPPEAGKSGGDGNSPLNSGSDDAGSTSTSSSSSGSKNQGSVETNTTPSHQLSSENEKLKKDNETLSCELARARKQCDELVAFLRDRLMVGPDQIDRIMRQGSCGSENVVGEGGGGDCLKLFGVWLKGDTLTDKRNNHKRGREDQMGFGGPRLKESKPVVDFGAVNIMMKSNRVCN

SEQ ID NO: 6504 - protein, 282 aa, Glycine max; identical to SEQ ID NO: 6503

SEQ ID NO: 6505 - protein, 284 aa, Glycine max
MLQQRSVPAPFLTKTYQLVEDPGTDEVISWGESGNTFVVWKHADFAKDLLPKYFKHNNFSSFVRQLNTYGFRKIVPDKWEFANEHFKRGQKELLSEIKRRKTVPQSSTHSPDAGKPGAEGNSPSNPGGCDDAGSTSTSSSSSGSKNQGSVETNTTPSHQLSSENEKLKKDNETLSCELARARKQCDELVAFLRDRLMVGPDQIDRIMRQGSCGSENAVGEGGGGDCLKLFGVWLKGDTLTDKRNNHKRGREDQMGFGGPRLKESKPVVDFSRNRMMMINEKGKG

SEQ ID NO: 6506 - protein, 298 aa, Glycine max
  unsure (1)..(298): unsure at all Xaa locations
MSQQQRSMPAPFLTKSYLLVDDPATDDVVSWSEGGNTFVVWKHADFANDLLPKYFKHNNFSSFVRQLNTYGFRKTVPDKWEFANEYFKRGQKDLLAEIKRRKTVSSVSGKSGSGGNISASHSGGDDMGSTSTGSMEAATATVTTTQCADLSGENEKLKKDNEKLSDELARTKKHCDDLVAFLRDSLNVGPDVIDCIIRQGTCGSSNDDAKGDNGESLKLFGVWLKGQNGKENSIGSCRKRGRQDPIAATAKELKTLVXDISXGCXINYLIIFQETTIIVRSRTQKRTLSWSSWNMYGR

SEQ ID NO: 6507 - protein, 277 aa, Glycine max
  unsure (1)..(277): unsure at all Xaa locations
MSQQQRSTPAPFLTKTYLLVDDPATDDVVSWSEGGNTFVVWKHADFAKDLLPKYFKHNNFSSFVRQLNTYGFRKTVPDKWEFANEYFKRGQTDLLAEIRRRKVVSPVTGXXSTGGGVNISASHSGGDDMGSTSTGSMEAATAAGADISGENEKLKKDNEKLSGELALAKKQCEELVAFLRDSLNVSPDVIERIIRQGTCVSSNNDAKGDNGESLKLFGVWLKGQNGKENSIGKCRKRGRQDYPIAATAKELKTLVXYNISYSCXINYLLRNNYCSQI

SEQ ID NO: 6508 - protein, 277 aa, Glycine max; identical to SEQ ID NO: 6507
  unsure (1)..(277): unsure at all Xaa locations

SEQ ID NO: 6509 - protein, 376 aa, Glycine max
  unsure (1)..(376): unsure at all Xaa locations
MVKSNENGSGSVSVPPFLKKCYDMVEDRNTDSIIRWSDGGDSFVISDITQFSVTLLPTYFKHNNFSSFIRQLNIYGFRKIDTDCWEFANENFVRGQKHLLKNIRRRKHPHSADQQKALXHSKTIVMNHHKKHRIXGLWKEVENLKLDKNSLTQELVKLRQHQESAENKLLLLSDRLQGMEKHQQQMLSFLVMVVQSPGFMVQLLHPKENNWHLAESWNILDQDKQDDKPVASDGMIIKYKPPVGEXTKACSSSVSWFRKANRTRAFCRRENHSPFLLPDLPDDGSWEQLFLGSPFMGNIXXDSNKESEGHTNGGMEMEPTISETPNENSRTFESMIVEMEKTREXXVGVVCTWWAVFLESIRYFSAGLSHTELMEL

SEQ ID NO: 6510 - protein, 234 aa, Glycine max
  unsure (1)..(234): unsure at all Xaa locations
VRPRVRSIPLTSHRPQYTHPRQKISFQNCDMDGRASSSVGGEASPAPAPVPITNANAPPPFLSKTYEMVEDPSTDSIVSWSPTNNSFVVWNPPEFARDLLPKHFKHNNFSSFVRQLNTYGFRKVDPDRWEFANEGFLRGQKHLLRTITRRKPAHGHNHQQPQQPHGXXSSSVGACVEGGKFGLEEEVERLKRDKNVLMQELVRLRQQQQTTDNQLQTMVQRLISKQLLRFFFSY

SEQ ID NO: 6511 - protein, 522 aa, Glycine max
  unsure (1)..(522): unsure at all Xaa locations
GFPFPNNNATHSLISNYAFSFPIKFISPTWTAAGPLPAPIPNANAPPPFLSKTYDMVEDPSTDAIVSWSATNNSFIVWDPPQFARDLLPKYFKHNNFSSFVRQLNTYGFRKVDPDRWEFANEGFLKGQKHLLRSITRRKPAHGHHQQPQQPHGXXSSSVGACVEVGKFGLEEEVERLKRDKNVLMQELVRLRQQQQTTDNQLQTMVQRLQGMEQRQQQMMSFLAKAVQSPGFFAQFVQQQNDSNRRITEVNKKRRLKQEGMAETEHAATPDGQIIKYQPMVNEAAKAMLRQIMKWDTSXXVESLNKNSDNYVIGDGGMDSSSSSGWTSGVTLKEVSPASVQSXXHVPAATGTQGHVPSTVKPEXXLSVPQAVASEKVMKDGAHDPPSIPVSQADVMIPDLPPITEMVTGNILDIPEENYMATETDEGYMDSSLGAGGSFPIDFEGISPDADIDDLLANPIWDEILQTSVPEDIANVAEASKGNEVQPMENGWGKTQHMDHLTEQMGLLSXRCKKSLISMIYD

SEQ ID NO: 6512 - protein, 370 aa, Glycine max
MALLLDNCESILLSLDTHKSVPAPFLTKTYQLVDDPSTDHIVSWGEDDTTFVVWRPPEFARDLLPNYFKHNNFSSFVRQLNTYGFRKIVPDRWEFANEFFKKGEKNLLCEIHRRKTHHQHHQQVQAMNNHHHHHKFGLNVSSIFPFHNNRLSVSPSHDSDEVIIPNWCDSPPRGVAGVNNNNSSSNNYNTVTALSEDNERLRRSNNMLMSELAHMKKLYNDIIYFVQNHVKPVAPSNNNNFPSFLLCSDNSNINNNTSPQTQTQAQASPMSNVSTVQRQLKQFVGCYSNNTKQARAVNSPTNSSITIVEEEANSNSCKTKLFGVSLQSKKRVHPEYGSNNVLQSSETNKARLALENDELLGLNLMPPSTC

SEQ ID NO: 6513 - protein, 370 aa, Glycine max; identical to SEQ ID NO: 6512

SEQ ID NO: 6514 - protein, 382 aa, Glycine max
  unsure (1)..(382): unsure at all Xaa locations
MVKSNENGSGSVSVPPFLKKCYDMVEDRNTDSIIRWSDGGDSFVISDITQFSVTLLPTYFKHNNFSSFIRQLNIYGFRKIDTDSWEFANENFVRGQKHLLKNIHRRKHPHSADQQKALXHSKTIVTQEAPNHGLWKEVENLKLDKNSLTQELVKLRQHQESAESKLLLLSDRLQGMEKHQQQMLSFLVMVVQSPGFMVQLLHPKENNWRLAESWNRLDQDKQDDKPVASDGMPVVPLSPGFENQPEPELSADGLKDLCISSEFLKVLLDEKLSPLENHSPFLLPDLPDDGSWEQLFLGSPFLGNIQDSKNESEGHTNSGMEMEPTISETPNENSRTFESMIVEMEKTREXSWSCMHMVGCLHKIISIKYFSYGLSHTELMEL

SEQ ID NO: 6515 - protein, 399 aa, Glycine max
  unsure (1)..(399): unsure at all Xaa locations
MMEEAQGSSSSLPPFLTKIYEMVDDPSTNSIVSWSATNRSFIVWNPPEFSRDLLPKYFKHNNFSSFIRQLNTYGFRKIDPEQWEFANDDFVRGQPHLLKNIHRRKPVHSHSLQNIQGQGVSSLTESERQSFKDEIEKLKHEKEQLLRELEMHEQEWKMYEVQLQHSNDRLEKLEKKQENLVSSVSQVLQKPGIALNLLLLTENMDRKRRLPRSGLFSDDASIEDHMETSQVLPRENADGASIFSSSTERLDLLESSMTFWEDITHDVGDIFVQSHLNLDFDASTSCADSPAISCVQLEVEDQPKSPGINMNSEPSVVAVPDLDASKEQPVGKAPVTTGVNDIFWERFLTENPGSSEMQEAQSERKDSDGRSNAKFWWNIRNVNNPPEQMGHXLSQAQQT

SEQ ID NO: 6516 - protein, 299 aa, Glycine max
  unsure (1)..(299): unsure at all Xaa locations
MAKLPVEYNGDCATTASASASAAAESQRSIPTPFLTKTFQLVDDQSIDDVISWNDDGSTFIVWNPTVFARDLLPKYFKHNNFSSFVRQLNTYGFRKVVPDRWEFSNEYFRRGEKRLLCEIQRRKISSPASSPTAPATVSVTAPMPLTAIPIISPSNSGEEQVTSSNSXXPAELLDENERLRKENVQLTKELAEMRSLCNNIYSLMSNYANANGKGNSLESGMTAVKLLDLMPVMRSSDEDAAEMAPEEMNPKLFGVAIGAKRAREGGVKSEPLDFQNHRENQKTPWLSPCYRTNQRVCN

SEQ ID NO: 6517 - protein, 399 aa, Glycine max
  unsure (1)..(399): unsure at all Xaa locations
MMEEAQGSSSSLPPFLTKIYEMVDDPSTNSIVSWSATNRSFIVWNPPEFSRDLLPKYFKHNNFSSFIRQLNTYGFRKIDPEQWEFANDDFVRGQPHLLKNIHRRKPVHSHSLQNIQGQGVSSLTESERQSFKDEIEKLKHEKEQLLRELEMHEQEWKMYEVQLQHSNDRLEKLEKKQENLVSSVSQVLQKPGIALNLLLLTENMDRKRRLPRSGLFSDDASIEDHMETSQVLPRENADGASIFSSSTERLDLLESSMTFWENITHDVGDVFVQSHLNLDFDASTSCADSPAISCVQLEVEDQPKSPGINMNSEPSVVAVPDLDASKEQPVGKAPVTTGVNDIFWERFLTENPGSSEMQEAQSERKDSDGRSNAKFWWNIRNVNNPPEQMGHXLSQAQQT

SEQ ID NO: 6518 - protein, 399 aa, Glycine max
  unsure (1)..(399): unsure at all Xaa locations
MMEEAQGSSSSLPPFLTKIYEMVDDPSTNSIVSWSATNRSFIVWNPPEFSRDLLPKYFKHNNFSSFIRQLNTYGFRKIDPEQWEFANDDFVRGQPHLLKNIHRRKPVHSHSLQNIQGQGVSSLTESERQSFKDEIEKLKHEKEQLLRELEMHEQEWKMYEVQLQHSNDRLEKLEKKQENLVSSVSQVLQKPGIALNLLLLTENMDRKRRLPRSGLFSDDASIEDHMETSQVLPRENADGASIFSSSTERLDLLESSMTFWENITHDVGDVFVQSHLNLDFDESTSCADSPAISCVQLEVEDQPKSHGINVSSEPAVVAAPDLDASKEQPVETAPLTTGVNDIFWERFLTENPGSSEMQEAQSEREDSDGRSNAKFWWNIRNVNNPPEQMGHXLSKAEQT

SEQ ID NO: 6519 - protein, 399 aa, Glycine max; identical to SEQ ID NO: 6518
  unsure (1)..(399): unsure at all Xaa locations

SEQ ID NO: 6520 - protein, 299 aa, Glycine max
  unsure (1)..(299): unsure at all Xaa locations
MAPPLEHNGVSTSGDSQRSIPTPFLTKTYQLVDDHTIDDVISWNDSGSSFIVWNTTAFAKDLLPKYFKHNNFSSFVRQLNTYGFRKVVPDRWEFSNEYFRRGEKRLLCEIQRRKILSASXXPPAGATATVAVPSPLPLSAIPTAKPIVSPSNSAEEQVLSSNSSPARAPVELLDENERLRKENILLTKELVKMRSLCNNIFNLMSNYANAQADGSSAAAGCSGEDAVEEMNPKLFGVAIGKKRAREEEGHGAKYDTALSLHQPFHADVKSEALDLPGRGENKKTPWLNQCHRANQRVCN

SEQ ID NO: 6521 - protein, 143 aa, Glycine max
  unsure (1)..(143): unsure at all Xaa locations
MEXWNTTSSXNNNNVIAPFVIKTYNMVNDPTTDKLIMWGPANNSFIVLDPLDFSHSLLPAFFKHNNFSSFVRQLNTYGFRKVDPDRWEFANEWFLRGQKHLLRNIARRKHGGAGRSNFNLHSHHHPVKVEELDDETMVMEIAX

SEQ ID NO: 6522 - protein, 313 aa, Glycine max
  unsure (1)..(313): unsure at all Xaa locations
MEXWNTTSSXNNNVIAPFVIKTYNMVNDPTTDKLITWGPANNSFIVLDPLDFSHSLLPTFFKHNNFSSFVRQLNTYGFRKVDPDRWEFANEWFLRGQKHLLRNIVRKKHAHPLKLEELDDEAMVMEIARLKEEQKALEEELHEMNKRLETTEKRPQQMMAFLCKVVEDPQILSRILREREKKHLXERKSDASFRLRRRRQXTSSSSSSGIKTEFEEDEGNYNIKSSSPETGLEIDNNSNXYLFAAAAGVLGXXTGLLXGYNCASVPAPLXGGSAGVSDDGRRXYLRRGGFWGEMAAEGNAVPPYPFSLLEGGF

SEQ ID NO: 6523 - protein, 198 aa, Glycine max
  unsure (1)..(198): unsure at all Xaa locations
MEXWNTTSSXNNNVIAPFVIKTYNMVNDPTTDKLITWGPANNSFIVLDPLDFSHSLLPTFFKHNNFSSFVRQLNTYGFRKVDPDRWEFANEWFLRGQKHLLRNIVRKKHAHPLKLEELDDEAMVMEIARLKEEQKALEEELHEMNKRLETTEKRPQQMMAFLCKVVEDPQILSRILREREKKKKKKKKKKKKKKRAAX

SEQ ID NO: 6524 - protein, 301 aa, Glycine max
  unsure (1)..(301): unsure at all Xaa locations
MAPPPPVEHNGDSAATASASASAAAESQRSIPTPFLTKTYQLVDDQSIDDVISWNDDGSTFIVWNPTVFARDLLPKFFKHNNFSSFVRQLNTYGFRKVVPDRWEFSNDYFRRGEKRLLCEIQRRKISSPAPSPTAPTTVTVPMPLTAIPIISPSNSGEEQVISSNSSPLRAXXAELLDENERLRKENVQLTKELAEMRSLCNNIYSLMSSYGNKNGTQGSRESGMTAVKPLDLMPVKRSSGEDAADTVPTNPKLFGVAIGAKRAREGGXEEVEVVEIAEEEEEEETPWLSPCHRTNQRVCN

SEQ ID NO: 6525 - protein, 166 aa, Glycine max
  unsure (1)..(166): unsure at all Xaa locations
MKPLPAEQTGESAPTELQRSIPTPFLTKTYQLVDDPSADDLISWNEDGTSFIVWRPAEFARDLLPKYFKHNNFSSFVRQLNTYGFRKVVPDRWEFANDCFRRGERALLRDIQRRKLXAGSAACATGNAAEAELMVMISIIRIMTLIVGAIGKXNMXLLSLDLSTNX

SEQ ID NO: 6526 - protein, 305 aa, Glycine max
  unsure (1)..(305): unsure at all Xaa locations
SAPPLPWLHRRRWNTTATPPLXASASASAESQRSIPTPFLTKTYQLVDDQSIDDVISWNDDGSTFIVWNPTVFARDLLPKFFKHNNFSSFVRQLNTYGFRKVVPDRWEFSNDYFRRGEKRLLCEIQRRKISSPAPSPTAPTTVTVPMPLTAIPIISPSNSGEEQVISSNSSPLRAXXAELLDENERLRKENVQLTKELAEMRSLCNNIYSLMSSYGNKNGTQGSRESGMTAVKPLDLMPVKRSSGEDAADTVPTNPKLFGVAIGAKRAREGGXEEVEVVEIAEEEEEEETPWLSPCHRTNQRVCN

SEQ ID NO: 6527 - protein, 194 aa, Glycine max
  unsure (1)..(194): unsure at all Xaa locations
MAPLPAEQTGSSHGGESAPTELQRSIPTPFLTKTYQLVDDPSADDLISWNEDGTSFIVWRPAEFARDLLPKYFKHNNFSSFVRQLNTYGFRKVVPDRWEFANDCFRRGERALLRDIQRRKLXAGSAACATGNAAEAESLLIXVPKLFGVSIGLKRCRTECEAEPEGEDQNQMQTRAQTQSQSSQEPDHGFRCEI

SEQ ID NO: 6528 - protein, 490 aa, Glycine max
  unsure (1)..(490): unsure at all Xaa locations
XVTDFATQYQGITPSPRYCPSKPTAPLSTTTSSVAPFLSKTYDMVDDPSTDLVVSWGENNNSFVVWNVPQFATDILPNHFKHNNFSSFVRQLNTYGFRKVDPDRWEFANEGFLRGEKQLLKSISRRKSAHVNGSQQASQVHKSAAGACVEVGKFGLEEEVERLKRDKNVLMQELVRLRQKQQGTDNQLQNVGQRVQSMEQRQQQMMSFLAKAMQSPGFLAQFVQQQNESSKHIPGSNKKRRLQRQEEDSLATNLHSSLDGHIVKYQSSINEAAKALFRQILQINNSTTQSSIKNPDVFLIDDIPSAIASDSSSSSTQVSNVMVPPISELTSMEVGSQFPLSCMPSNISEVQSSPAVLGFCRSQGMAESSLLNHELNVMGADTRNMGEIDMMSTVLDEADEADHFSPDTDGISKLPEISDEFWELFLRPSPLTEDTEDLGCGLTEDQGLPSEMDKQENFDTIQHVDCLTQQMGLHALEYXLCVYMLLTTEG

SEQ ID NO: 6529 - protein, 458 aa, Glycine max
IRLEVVCVAPFLSKTYDMVDDPSTDLVVSWGENNNSFVVWNVPQFATDILPNHFKHNNFSSFVRQLNTYGFRKVDPDRWEFANEGFLRGEKQLLKSISRRKSAHVNGSQQASQVHKSAAGACVEVGKFGLEEEVERLKRDKNVLMQELVRLRQKQQGTDNQLQNVGQRVQSMEQRQQQMMSFLAKAMQSPGFLAQFVQQQNESSKHIPGSNKKRRLQRQEEDSLATNLHSSLDGHIVKYQSSINEAAKALFRQILQINNSTTQSSIKNPDVFLIDDIPSAIASDSSSSSTQVSNVMVPPISELTSMEVGSQFPLSCMPSNISEVQSSPAVLGFCRSQGMAESSLLNHELNVMGADTRNMGEIDMMSTVLDEADEADHFSPDTDGISKLPEISDEFWELLLRPSPLTEGTEETKCSSLGCGLTDDQGLPSEMGNKQENFDTILHVDRLTQQMGLHALEY

SEQ ID NO: 6530 - protein, 481 aa, Glycine max
  unsure (1)..(481): unsure at all Xaa locations
AXESVVXVDLPGMEGASWNSSVCVAPFLSKTYDMVDDPSTDLVVSWGENNNSFVVWNVPQFATDILPNHFKHNNFSSFVRQLNTYGFRKVDPDRWEFANEGFLRGEKQLLKSISRRKSAHVNGSQQASQVHKSAAGACVEVGKFGLEEEVERLKRDKNVLMQELVRLRQKQQGTDNQLQNVGQRVQSMEQRQQQMMSFLAKAMQSPGFLAQFVQQQNESSKHIPGSNKKRRLQRQEEDSLATNLHSSLDGHIVKYQSSINEAAKALFRQILQINNSTTQSSIKNPDVFLIDDIPSAIASDSSSSSTQVSNVMVPPISELTSMEVGSQFPLSCMPSNISEVQSSPAVLGFCRSQGMAESSLLNHELNVMGADTRNMGEIDMMSTVLDEADEADHFSPDTDGISKLPEISDEFWELFLXXPSPLTEDTEDLGCGLTEDQGLPSEMDKQENFDTIQHVDCLTQQMGLHALEYXLCVYMLLTTEG

SEQ ID NO: 6531 - protein, 193 aa, Glycine max
  unsure (1)..(193): unsure at all Xaa locations
MYMERIRVKEEEAVTCGGGSSSSSSSSSSFSPQPMEGLHEVGPPPFLSKIFDMVEDSSTDSIVSWSMARNSFVVWDSHKFSADILPRYFKHGNFSSFIRQLNAYGFRKVDPDRWEFANEGFLAGQRHLLKTIKRRRNVSQSLQQKGGSGACVEVGEFGLEGELERLKRDRNILMAEIVRLRHQQLNSREQLNX

SEQ ID NO: 6532 - protein, 192 aa, Glycine max
MYMERIRVKEEEAVTCGGGSSSSSSSSSSFSPQPMEGLHEVGPPPFLSKIFDMVEDSSTDSIVSWSMARNSFVVWDSHKFSADILPRYFKHGNFSSFIRQLNAYGFRKVDPDRWEFANEGFLAGQRHLLKTIKRRRNVSQSLQQKGGSGACVEVGEFGLEGELERLKRDRNILMAEIVRLRHQQLNSREQLN

SEQ ID NO: 6533 - protein, 193 aa, Glycine max
MYMERIRVKEEEAVTCGGGSSSSSSSSSSFSPQPMEGLHEVGPPPFLSKIFDMVEDSSTDSIVSWSMARNSFVVWDSHKFSADILPRYFKHGNFSSFIRQLNAYGFRKVDPDRWEFANEGFLAGQRHLLKTIKRRRNVSQSLQQKGGSGACVEVGEFGLEGELERLKRDRNILMAEIVRLRHQQLNSREQLNS

SEQ ID NO: 6534 - protein, 356 aa, Glycine max
  unsure (1)..(356): unsure at all Xaa locations
MAPLPAEQTGESAPTELQRSIPTPFLTKTYQLVDDPSADDLISWNEDGTSFIVWRPAEFARDLLPKYFKHNNFSSFVRQLNTYGFRKVVPDRWEFANDCFRRGERALLRDIQRRKLLPVPPAAAAPAAVTANTVTVAVAAPAVRTVSPTTSGDEQVLSSNSSPIAGNNNNNTVHRTTSCTTAPELLEENERLRKENIQLSNELSQLKGLCNNILSLMTNYASGFSRQQLESSTSAVRTVPVPDGKXAASSRIPSFVSSADEAGHVGGAAPCATANAGEAEVPKLFGVSIGLKRCRTECEGEAEGEDQNQVQTRAQAQTQTQSSQEPDHGSDVKSEPLDGDDSDDQDHDPRWLELGK

SEQ ID NO: 6535 - protein, 189 aa, Glycine max
MAPLPAEQTGESAPTELQRSIPTPFLTKTYQLVDDPSADDLISWNEDGTSFIVWRPAEFARDLLPKYFKHNNFSSFVRQLNTYGFRKVVPDRWEFANDCFRRGERALLRDIQRRKLLPVPPAAAAPAAVTANTVTVAVAAPAVRTVSPTTSGDEQPPAVRILHKRCEDRAGAGREGAAGAFARETCFIG

SEQ ID NO: 6536 - protein, 131 aa, Glycine max
  unsure (1)..(131): unsure at all Xaa locations
ILSSYLLLLLPSSLSDKAAKTXNXGFMEGASRNGSVCVAPFLSKTYDMVDDPSTDSVVSWGKNNNTFVVWNVPQFTTDILPKHFKHNNFSSFVRQLNTYGFRKVDPDRWEFANEGFLRGEKQLLKSIIVGF

SEQ ID NO: 6537 - protein, 355 aa, Glycine max
MKPLPAEQTGESAPTELQRSIPTPFLTKTYQLVDDPSADDLISWNEDGTSFIVWRPAEFARDLLPKYFKHNNYSSFVRQLNTYGFRKVVPDRWEFANDCFRRGERALLRDIQRRKLLPVPPAAAAPTAVTANTVTVAVAAPAVRTVSPTTSGDEQVLSSNSSPIAGNNNNTVHRTTSCTTAPELLDENERLRKENMQLSNELSQLKGLCNNILALMTNYASGFSRQQLESSTSAARTVPVPEGKAALELLPAKHVSSADEAGHVGGAAPCATANAGEAEVPKLFGVSIGLKRCRTECEGEAEGEDQNQMQTRAQAQTQTQSSQEPDHGSDVKSEPLDGDDSDDQDHDPRWLELGK

SEQ ID NO: 6538 - protein, 160 aa, Glycine max
  unsure (1)..(160): unsure at all Xaa locations
MAFTLDRLENMVFTLESQKSVPAPFLTKTYQLVDDPHTDHIVSWGEDETTFVVWRPPEFARDLLPNYFKHNNFSSFVRQLNTYGFKKVVADRWEFANEYFRKGAKHLLCEIHRRKAPQQHHQXSFMTNHHPKFFSKMKISXWSXHSSTISKTKHRYSNSX

SEQ ID NO: 6539 - protein, 373 aa, Glycine max
  unsure (1)..(373): unsure at all Xaa locations
GFLGESSSFCGGYDPQPIMVVPQPIEGLHETGPPPFLTKTYDIVDDPSTNHIVSWSTGNNSFVVWDPQAFSVTLLPKFFKHNNFSXFVRQLNTYGFKKVDPDKWEFANEMFLRGQRILLKNIRRRKXXNHHQSHQHAMQQGVEEPFVEVGQFELDGEIDRLRRDRQVLMVELVKLRQQQQSTKSHLQEMEGRIKMTEQKQKQMMNFLARAMQNPNFVQQLAQQKECSRELEEVFSNKKRRPIDQGPNVVEVADDDDGYXGCAEECSDFVKLEPQEYYSDDKVLEFEVPDLDLALNLDEENIESQKRIMEEEHVQLENSRERYIDEVFWQDLLNEGIEDQGVLGVEDVDVLAKQLGYLAXIGDYQGCIFYYSLN

SEQ ID NO: 6540 - protein, 449 aa, Glycine max
  unsure (1)..(449): unsure at all Xaa locations
IRLELSLPPPSSLHPPQPLEILQMNPVPPFLSKTFDLVDDPTLDPIISWGSTGFSFVVWDPLEFARIVLPRHFKHNNFSSFVRQLNTYGFRKIDTDKWEFFNEAFQRGKKHLLKNIQRRRSSQSQQVGSYIGSSTEAGRSDVDEIERLRKERTMLMEEVVDLKQEQRRMAHRAGEVNQRLQSTEQRQKQMVSFLVKLIQNPAFLARLRXXEEQKEIDSPRVVRKFVKQHQHETGTAETLQEGQIVRYQHDWRNIGMSSETPKLSPVSIEQSPXLPFTGFGRRSECRRRRSYCSNREYCIKXLGCSARDHRGLSSFGAEDPLFKGKSVMSPILEVPPEYFASFPEGLTKGKDFQDFSALGTEGMIKLEDIWDSGLNVSGAASGSGNELWSNHVNYVPEFGVTSGMSDSDIWDIGLGSLGIDKWPTDEPSLGETNGQAGQPKEDRPKNFGP

SEQ ID NO: 6541 - protein, 389 aa, Glycine max
  unsure (1)..(389): unsure at all Xaa locations
MGGEEVARVKAELFDDNESDRNDDDVLSESKDSGVTTAHAVKEEMDDGAANWSSSSSTSPKPMEGLHEVGPPPFLKKTFEMVEDPHTNPIVSWSQTRHSFVVWDSHEFSKTLLPKYFKHSNFSSFVRQLNTYGFRKVDSDRWEFANEGFQGGKKHLLKNIRRRSXVQQTASGSIQYDEARRGFXEVEKLKKDQNILKVEILKLRQQQENSHVQLTNVQERIRCAEMKQFQMMYFLTRMARRPAFVEQLVHKIRRKREIDGNDMVKRPRLMGNPCHVPFPKTMETTPNFDYRHQQGHKQFAARAQDASSSAYHVMSEKLMRENSIVDEELDVNANIYLELEDLITKPTDWSVGSASGLVEQTSXINLTSGIVPCNGCKSVLVWMLCCNTR

SEQ ID NO: 6542 - protein, 444 aa, Glycine max
  unsure (1)..(444): unsure at all Xaa locations
MNPNDANSPKPRPLEILQMNPVPPFLSKTFDLVDDPTLDPIISWGSTGFSFVVWDPLEFARIVLPRHFKHNNFSSFVRQLNTYGFRKIDTDKWEFFNEAFQRGKKHLLKNIQRRRSSQSQQVGSYIGSSTEAGRSDVDEIERLRKERTMLMEEVVDLKQEQRRMAHRAGEVNQRLQSTEQRQKQMVSFLVKLIQNPAFLARLRXXEEQKEIDSPRVVRKFVKQHQHETGTAETLQEGQIVRYQHDWRNIGMSSETPKLSPVSIEQSPXLPFTGFGRRSECRRRRSYCSNREYCIKXLGCSARDHRGLSSFGAEDPLFKGKSVMSPILEVPPEYFASFPEGLTKGKDFQDFSALGTEGMIKLEDIWDSGLNVSGAASGSGNELWSNHVNYVPEFGVTSGMSDSDIWDIGLGSLGIDKWPTDEPSLGETNGQAGQPKEDRPKNFGP

SEQ ID NO: 6543 - protein, 349 aa, Glycine max
  unsure (1)..(349): unsure at all Xaa locations
PRVRPRVRPRVRTAARRRQKGTAGRRRQKGTAARRRQKGTAARRRQKGTAARRPQKGNGVSTSGDSLRSIPTPFLTKTFQLVDDHTIDHVISWNDSGSSFIVWNTTVFDKDLLSKYFRHNNFSSFVRQLNTYGFRKVVPDRWEFSNEYFRRGEKRLLCEIQRRKILSASXXPPAGATATVAVPSPLPLSAIPTAKPIVSPSNSAEEQVLSSNSSPARAPVELLDENERLRKENILLTKELVKMRSLCNNIFNLMSNYANAQADGSSAAAGCSGEDAVEEMNPKLFGVAIGKKRAREEEGHGAKYDTALSLHQPFHADVKSEALDLPGRGENKKTPWLNQCHRANQRVCN

SEQ ID NO: 6544 - protein, 364 aa, Glycine max
  unsure (1)..(364): unsure at all Xaa locations
KLKKQWRMLMLLQLAQQHLQTSPRXPMEGLHEVGPPPFLTKTFDVVEDPSTNDIVSWSRSRNSFVVWDSHKFSTTILPRYFKHNNFSSFVRQLNTYGFRKIDPDKWEFANEGFLAGQRQLLKTIKRRRHVTVTQNEGGSGACVELGEFGLEGEMERLRRDRTVLMAEIVRLRQQQHNSREQLLSMETRLQATEKKHQQMMNFLAKALNNQAFIQQFLQRNAQNKELQGARRKRRLTATPSVENLQQDHFALSIEEGSATIESLESFFSAACNDPLESNSELXRPNIEXSVPVASGSNLGEVSDSVWEDLLNQDLVAGDXXEEEVVIGDFSQVDVPVEDLIADADEWSEDLQNLVDHMGYLGSKP

SEQ ID NO: 6545 - protein, 461 aa, Glycine max
  unsure (1)..(461): unsure at all Xaa locations
XLSATKLHSVSVVANSRFSSFSLAFTHSAGAGGPAPFLLKTYDMVDDASTNDIVSWSSTNNSFVVWNPPEFARLLLPTYFKHNNFSSFIRQLNTYGFRKIHPERWEFANDEFLKDQKHLLKNIYRRKPIHSHSHPPGSLVDPERAAFEEEIDKLSREKTSLESNIYNFKQHQSTAKPKLEDFLQRLDGIEKRQKQLLNFXDLSAYKIRRLPQVDHAQPGAGSCLQVNHSNFRVEFGKVRRRAFSRWLSRVLSPARPDLDWVPRSPQRANEDGESPQKKLSEVEPRGVQTRTALTFAPETLELADTGASFTFKMDSCLSRRATTAESSKLISLEPGSEEGDSLSCQLNLTLASCPLQVNRNSYSARSPQKSDSGVSSNLNVAAEATNLASSQEAPSNNQVNPAPPDRVNDVFWEQFLTERPGCSDNEEAISNYRANPYDEQDEGRSTHGISRNIKNMDQLTL

SEQ ID NO: 6546 - protein, 481 aa, Glycine max
  unsure (1)..(481): unsure at all Xaa locations
XLSLSKLHSVSVVANSRFSSFSLAFTHSAGAGGPAPFLLKTYDMVDDASTNDIVSWSSTNNSFVVWNPPEFARLLLPTYFKHNNFSSFIRQLNTYGFRKIHPERWEFANDEFLKDQKHLLKNIYRRKPIHSHSHPPGSLVDPERAAFEEEIDKLSREKTSLESNIYNFKQHQSTAKPKLEDFLQRLDGIEQRQKQLLNFFEKALQNPTFVEHLSRKIESMDLSAYKKRRLPQVDHVQPVAESSLVDNHSNFRMEFGNVFRQDFSNKLRLELSPAVSDMNLVSRSTQSSNEDGESPQKKLSEVEPRGVQTRTALTFAPETLELADTGASFTFKMDSCLSRRATTAESSKLISLEPGSEEGDSLSCQLNLTLASCPLQVNRNSYSARSPQKSDSGVSSNLNVAAEATNLASSQEAPSNNQVNPAPPDRVNDVFWEQFLTERPGCSDNEEAISNYRANPYDEQDEGRSTHGISRNIKNMDQLTL

SEQ ID NO: 6547 - protein, 468 aa, Glycine max
  unsure (1)..(468): unsure at all Xaa locations
GSGKINSXSEMDGAPQSAGGPAPFLLKTYEMVDDASTNDIVSWSSTNNSFVVWNPPEFARLLLPTYFKHNNFSSFIRQLNTYGFRKIHPERWEFANDEFLKDQKHLLKNIHRRKPIHSHSHPPGSLVDPERAAFEEEIDKLSREKNSLESNIRNFKQHQSTAKPKLEDFLQRLDGVDKRQKQLLNFFEKALQNPTFVEHLSRKIESMDLSAYKKRRLPQVDHVQPVAESSLVDNHSNFRMEFGNVFRQDFSNKLRLELSPAVSDMNLVSRSTQSSNEDGESSQKKLSEVEPRGVQTRTALTFAPETLELADTGASFTFKMDSCLSRRATTAESSKLISLEPSSEEGDSLSCQLNLTLASCPLQVNRNSYSARSPQKSDSGVSSNLNVAAEATNLASSQEAPSNNQVNPAPPDRVNDVFWEQFLTERPGCSDNEEAISNYRANPYDEQDEGRSTHGISRNIKNMDQLTL

SEQ ID NO: 6548 - protein, 279 aa, Glycine max
  unsure (1)..(279): unsure at all Xaa locations
MAPPLEHNGVSTSGDSLRSIPTPFLTKTFQLVDDHTIDHVISWNDSGSSFIVWNTTAFAKDLLPKYFKHNNFSSFVRQLNTYGFRKVVPDRWEFSNEYFRRDEKRLLCEIQRRKILPAXXPPTRATATAAVLSPLPLSTIPPAKLIVSPSNSAEEQVISSNSSPAELLDENDRLRKENILLTKELEEMRSLCNNIFNLMSNYANVQADGGSAGXXAARCFGEDAVEEXXNPKLFGVVIGTKRAREENDTVLTLDFARRGENKKTPWLNQCHRANQRVCN

SEQ ID NO: 6549 - protein, 342 aa, Glycine max
  unsure (1)..(342): unsure at all Xaa locations
MALLLDNCEGILLSLDSHKSVPAPFLTKTYQLVDDPATDHIVSWGEDDTTFVVWRPPEFARDLLPNYFKRNNFSSFVRXQLNTYGFRKIVPDRWEFANEFFKKGEKHLLCEIHRRKTAXXPQQGIMNHHHHHAHFNVNVPTFFPFSSRVSISTSNDSDDQXXNWCDSPPRGATSLVNGAAAAANYNTSVTALSEDNERLRRSNNMLMSELAHMKKLYNDIIYFVQNHVKPVAPSNSYSXXSLLLCNTPSCHSNNXWRQCFNDAKANEPAXXGYYSTNPKQXSYTNNSTXQTYVVNSPTNTSRSSITIVEGPNSNINSCKTKLFGVSLQSKKRVHPDYGSNPE

SEQ ID NO: 6550 - protein, 279 aa, Glycine max; identical to SEQ ID NO: 6548
  unsure (1)..(279): unsure at all Xaa locations

SEQ ID NO: 6551 - protein, 212 aa, Glycine max
  unsure (1)..(212): unsure at all Xaa locations
LFTHQKKHSMKGVTVKVEETMAYANAASTSPTTSSNLSPQPMEGLHEVGPPPFLTKTFDVVEDPSTNDIVSWSRSRNSFVVWDSHKFSTTILPRYFKHNNFSSFVRQLNTYGFRKIDPDKWXFANEGFLAGQRQLLKTIKRRRHVTVTQTQSHEGGSGACVELGEFGLEGEMERLRRDRTVLMAEIVRLRQQQHNSREQLGEVEERQDSVDG

SEQ ID NO: 6552 - protein, 476 aa, Glycine max
  unsure (1)..(476): unsure at all Xaa locations
GSSSSXLEPMNSSPSSSQLPSSSADFDKFNSLPRFRPLECLQGNPVPAFLSKTFELVDDPSLDPIISWGSTGVSFVVWDPTLFARHVLPRNFKHNNFSSFVRQLNTYGFRKIDTEKWEFFNEAFQRGKRHLLKNIRRRGPPQSHQVGGNIVPYSDADKAGLDELESLRKERSVLMQEVVELQQQQRTTLQRARQVNQRLQSAELIQKQMVSFLARLFEKPAFLTSLQHAKEQRDLGCPKVRRRFIKQHQGQTEISDFLNEGQIVRYQPDWRNVTTSSEIQEMYPVSLEESPNYLSQALAKEFSEGTENLISDEVMSIADTMGFKSSSFGLDGNLFKGKNVMSSNEGLLAEEFVSFPEDLTKETGFPEFSPLGTEGIIKREDKRNTNFDVSGADSSSGNEQWDPINYEVPEFVVTSGMTDMWDINYLXXSQQVTESIPTDDSTLDEKESNINKNMDASGFICFCTYCAVFSSQGSNY

SEQ ID NO: 6553 - protein, 450 aa, Glycine max
GSSFEQNPNDGNNSPSPKPLEMVNPVPPFLSKTFDLVDAPTLDPIISWNSTGLSFVVWDPLEFARIVLPRHFKHNNFSSFVRQLNTYGFRKIDTDKWEFFNEAFQRGKKHLLKNIQRRRSSQSQPVGSYIGIGSSTEAGGSEVDEIERLRKEKTMLMEEVVDLQQEQRRTAHHAGEVNLRLQSAEQRQKQMVSFLAKLIQNPAFLARLRHKKEQKEIDSPRVVRKFVKQHHETGTTTTAETLQEGQIVRYQPDWRNIAMSSETPKLSSVSIEQSPHYLLGAEDLTAQNNIVSDDLAAVHRITPSQEMMIGEGSSTFGAEDPLFKGKSVMSPILEVPPEYFPSFPEGLTKEKNFQDFSALGTEGMIKLEDIWDSGLNVSGAALSSGNELWGNHVNYVPQFGVTSGMSDSDIWDIGLGSFGIDTWPTDEPSLGETDGQSGQPNEDRSKNFDP

SEQ ID NO: 6554 - protein, 299 aa, Glycine max
  unsure (1)..(299): unsure at all Xaa locations
MAPPLEHNGVSTSGDSQRSIPTPFLTKTYQLVDDHTIDDVISWNDSGSSFIVWNTTAFAKDWLPKGSRHNNFSSFVRQLNTYGFRKVVPDRWEFSNEYFRRGEKRLLCEIQRRKILSASXXPPAGATATVAVPSPLPLSAIPTAKPIVSPSNSAEEQVLSSNSSPARAPVELLDENERLRKENILLTKELVKMRSLCNNIFNLMSNYANAQADGSSAAAGCSGEDAVEEMNPKLFGVAIGKKRAREEEGHGAKYDTALSLHQPFHADVKSEALDLPGRGENKKTPWLNQCHRANQRVCN

SEQ ID NO: 6555 - protein, 449 aa, Glycine max
IRLELSLPPPSSLHPPQPLEILQMNPVPPFLSKTFDLVDDPTLDPIISWGSTGFSFVVWDPLEFARIVLPRHFKHNNFSSFVRQLNTPGFRKIDTDKWEFFNEAFQRGKKHLLKNIQRRRSSQSQQVGSYIGSSTEAGRSDVDEIERLRKERTMLMEEVVDLKQEQRRMAHRAGEVNQRLQSAEQRQKQMVSFLVKLIQNPAFLARLRHKKEQKEIDSPRVVRKFVKQHHETGTTTTAETLQEGQIVRYQPDWRNIAMSSETPKLSSVSIEQSPHYLLGAEDLTAQNNIVSDDLAAVHGITPSQEMMIGEGSSTFGAEDPLFKGKSVMSPILEVPPEYFASFPEGLTKEKNFQDFSALGTEGMIKLEDIWDSGLNVSGAALSSGNELWGNHVNYVPQFGVTSGMSDSDIWDIGLGSLGIDTWPTDEPSLGETDGQSGQPNEDRSKNFDP

SEQ ID NO: 6556 - protein, 449 aa, Glycine max
  unsure (1)..(449): unsure at all Xaa locations
XALNMNPNDGNNSPSPKPLEMVNPVPPFLSKTFDLVDAPTLDPIISWNSTGLSFVVWDPLEFARIVLPRHFKHNNFSSFVRQLNTYGFRKIDTDKWEFFNEAFQRGKKHLLKNIQRRRSSQSQPVGSYIGIGSSTEAGGSEVDEIERLRKEKTMLMEEVVDLQQEQRRTAHHAGEVNLRLQSAEQRQKQMVSFLAKLIQNPAFLARLRHKKEQKEIDSPRVVRKFVKQHHETGTTTTAETLQEGQIVRYQPDWRNIAMSSETPKLSSVSIEQSPHYLLGAEDLTAQNNIVSDDLAAVHRITPSQEMMIGEGSSTFGAEDPLFKGKSVMSPILEVPPEYFPSFPEGLTKEKNFQDFSALGTEGMIKLEDIWDSGLNVSGAALSSGNELWGNHVNYVPQFGVTSGMSDSDIWDIGLGSFGIDTWPTDEPSLGETDGQSGQPNEDRSKNFDP

SEQ ID NO: 6557 - protein, 168 aa, Glycine max
  unsure (1)..(168): unsure at all Xaa locations
XSFVALDHSLVKDERRRRHGVXSGSGGTVAPFVAKTFAMVDDPATDAVVRWGPASNSFVVADPFTFSHALLPAHFKHANFSSFVRQLNTYGFRKVDPDRWEFAHASFLRGQTHLLPRIVRRRSGGKGGKEDADGEEDEDISSKMLAMEVVRLKEEQRATEDRLASMRX

SEQ ID NO: 6558 - protein, 236 aa, Glycine max
  unsure (1)..(236): unsure at all Xaa locations
EEARKRKEENIXSSCNSHELWSPPPFLLKTYMLVEDPATDDVISWNAKGTAFVVWQPPEFARDLLPTLFKHSNFSSFVRQLNTYGFRKIATSRWEFFNDRFKKGERELLHEIRRRKAWTSKQQPKAPNQATLQDSDEDQRSSSISSSSGYTTLVDENKRLKKENGVLNSELTSMKRKCKELLDLVAKYSSHAKEEKEDERPMLFGVRLDVQGEREMKRHRAEMSESASIMLSQSCK

SEQ ID NO: 6559 - protein, 363 aa, Glycine max
MAVLLDNCEGILLSLDSHKSVPAPFLTKTYQLVDAPPARAESARGEDDTTFVVWRPPEFARDLLPNYFKHNNFSSFVRQLNTYGFRKIVPDRWEFANEFFKKGEKHLLCEIHRRKTAQPQQGIMNHHHHHAHSPLGVNVNVPTFFPFSSRVSISTSNDSDDQSNWCDSPPRGATSLVNGAAAANYNTSVTALSEDNERLRRSNNMLMSELAHMKKLYNDIIYFVQNHVKPVAPSNSYSSSLLLCNTPSATPISSANNVSMMQRPMNQLLGYYSTNPKQGATQITQPQTYVVNSPTNTSRSSITIFEGPASSNINSCKTKLFGVSLQSKKRVHPDCGSNPETNRARLVLEKDDLGLNLMPPSTC

SEQ ID NO: 6560 - protein, 149 aa, Glycine max
  unsure (1)..(149): unsure at all Xaa locations
XLEVSWSRGNNSFVVWDPQAFSITLLPRYFKHNNFSSFVRQLNTYGFRKVDPDKWEFANEGFLRGQKHLLKNIRRKKTLTNQQQALPNHCVEVGRFGSLDGEVDALRRDKQVLMVELVKLRQQQQNTRSFLHXPLLNQLLQEVGVPRSX

SEQ ID NO: 6561 - protein, 159 aa, Glycine max
  unsure (1)..(159): unsure at all Xaa locations
XGCVGGNNSPSPKPLEMVNPVPPILSKTFDLVDAPTLDPIISWNSTGLSFVVWDPLEFARIVLPRHFKYNNFSSFVRQLNTYVTRCLSSXGFRKIDTDKWEFFNEAFQRGKKHLLKNIQRRRSSQSQRSYIGIGSSTEAGGSEVEIEIERLRKEKTMLX

SEQ ID NO: 6562 - protein, 100 aa, Glycine max
MKPLPAEQTGESAPTELQRSIPTPFLTKTYQLVDDPSADDLISWNEDGTSFIVWRPAEFARDLLPKYFKHNNYSSFVRQLNTYGFRKVVPDRWEFANYCF

SEQ ID NO: 6563 - protein, 130 aa, Glycine max
EQKNKNKKMEGTSNKGLLECGRKCTPPPFLLKTYMLVEDPATDDVISWNAKGTAFVVWQPPEFARDLLPTLFKHSNFSSFVRQLNTYVRGFRKVATSRWEFFNDKFKKGERELLHEIRRRKSEPMKHNLC

SEQ ID NO: 6564 - protein, 246 aa, Glycine max
  unsure (1)..(246): unsure at all Xaa locations
MWKEEAEKCTPPPFLLKTYMLVDDPATDDVVSWNSEGTAFVVWQPAEFARDLLPTLFKHSNFSSFVRQLNTYKCGFRKVATSRWELLNDKFKKGERELLHEIRRRKAWNXASNNLMHQXQGTPRDSDEDQRSSSSSSSSFHYSCEXNKRLKKENGVLNSELTSMKRKCKELLDLVATYSSHAKXEKKDERPMLFGVRLEVQGGREMKRHRAEMSESTSIMLSQVMQIARYDIIHRGFLRVLGIDTE

SEQ ID NO: 6565 - protein, 89 aa, Glycine max
  unsure (1)..(89): unsure at all Xaa locations
GCXIGNSSKAQPQRGSTPAAPIPNANAPPPFLSKTYDMVEDPSTDAIVSWSATNNSFIVWDPPEFARDLLPKYFKHNNFSSFVRQLNTX

SEQ ID NO: 6566 - protein, 142 aa, Glycine max
EFRFIVWRPAEFARDLLPKYFKHNNFSSFVRQLNTYGFRKVVPDRWEFANDCFRRGERALLRDIQRRKLLPVPPAAAAPAAVTANTVTVAVAAPAVRTVSPTTSGDEQPPAVRILHKRCEDRAGAGREGAAGAFARETCFIG

SEQ ID NO: 6567 - protein, 402 aa, Medicago sativa
MDEAGSSSSLPPFLAKTYEMVDDRSSDPIVSWSASNKSFVVWNPPEFARVLLSEILKHNNFSSFIRQLNTYGFRKVDPEQWEFANDDFIRGQPHLMKNIHRRKPVHSHSLHNLQAQASLTESERQSMIDEIEKLKQDREQLLVETKRYQHDWERHEIQMHCSKDQLEKLEHKQQKMLSSVSEALQKPMIAVNLLPLAEAMERKRRLPARSVCFNNEASVEDAMETSVALPRENSEDNFYFDVKHREIGSTSRHPWHFGKTLAHEVGDNFVHTHSNMDLDESTCCADRLSISCQQLDGEVRPKSPEIDMNVEPAAAALEAVAVKEQPARITTAATGVNDVFWEQFLTEDPGASEAQEVQSERKDNSSRKNEGKPSDHGRFWWNMRKSNNHPEQMGHVSQVEKI

SEQ ID NO: 6568 - protein, 95 aa, Pisum sativum
MEGLHETGPPPFLTKTFDVVEDPSTDGIVSWSRARNSFVVWDLSKFSTAILPRYFKHSNFSSFVRQLNTYGFRKVDPDRWEFANEGFLAGQRILL

SEQ ID NO: 6569 - protein, 440 aa, Oryza sativa (japonica cultivar-group)
MEGGGGGGSLPPFLSKTYEMVDDPSTDAVVGWTPAGTSFVVANQPEFCRDLLPKYFKHNNFSSFVRQLNTYGFRKVDPEQWEFANEDFIKGQRHRLKNIHRRKPIFSHSSHSQGAGPLTDNERKDYEEEIERLKSDNAALSSELQNNTLKKLNMEKRMQALEEKLFVVEDQQRSLISYVREIVKAPGFLSSFVQQQDHHRKKRRLPIPISFHEDANTQENQIMPCDLTNSPAQTFYRESFDKMESSLNSLENFLREASEEFGNDISYDDGVPGPSSTVVLTELHSPGESDPRVSSPPTRMRTSSAGAGDSHSSRDVAESTSCAESPPIPQMHSRVDTRAKVSEIDVNSEPAVTETGPSRDQPAEEPPAVTPGANDGFWQQFLTEQPGSSDAHQEAQSERRDGGNKVDEMKSGDRQHLWWGKRNVEQITEKLGLLTSTEKT

SEQ ID NO: 6570 - protein, 506 aa, Oryza sativa (japonica cultivar-group)
MEAAVAAAAAAAGAVTTAVAPPPGAAVSNGVATAPPPFLMKTYEMVDDPATDAVVSWGPGNNSFVVWNTPEFARDLLPKYFKHSNFSSFVRQLNTYGFRKVDPDRWEFANEGFLRGQKHLLKTINRRKPTHGNNQVQQPQLPAAPVPACVEVGKFGMEEEIEMLKRDKNVLMQELVRLRQQQQTTDHQLQTLGKRLQGMEQRQQQMMSFLAKAMHSPGFLAQFVQQNENSRRRIVASNKKRRLPKQDGSLDSESASLDGQIVKYQPMINEAAKAMLRKILKLDSSHRFESMGNSDNFLLENYMPNGQGLDSSSSTRNSGVTLAEVPANSGLPYVATSSGLSAICSTSTPQIQCPVVLDNGIPKEVPNMSAVPSVPKAVAPGPTDINILEFPDLQDIVAEENVDIPGGGFEMPGPEGVFSLPEEGDDSVPIETDEILYNDDTQKLPAIIDSFWEQFLVASPLSVDNDEVDSGVLDQKETQQGNGWTKAENMANLTEQMGLLSSHHTG

SEQ ID NO: 6571 - protein, 372 aa, Oryza sativa (japonica cultivar-group)
MDDPMLNAVKEEESHGDGGGLEVVAGEDGAAAVAAGVAPRPMEGLHDAGPPPFLTKTYDMVDDAGTDAAVSWSATSNSFVVWDPHAFATVLLPRFFKHNNFSSFVRQLNTYGFRKVDPDRWEFANENFLRGQRHLLKNIKRRKPPSHTASNQQSLGPYLEVGHFGYDAEIDRLKRDKQLLMAEVVKLRQEQQNTKANLKAMEDRLQGTEQRQQQMMAFLARVMKNPEFLKQLMSQNEMRKELQDAISKKRRRRIDQGPEVDDVGTSSSIEQESPALFDPQESVEFLIDGIPSDLENSAMDAGGLVEPQDFDVGASEQQQIGPQGELNDNFWEELLNEGLVGEENDNPVVEDDMNVLSEKMGYLNSNGPTAGE

SEQ ID NO: 6572 - protein, 459 aa, Oryza sativa (japonica cultivar-group)
MESSNLGGGGGGGGGGGPPPFLIKTYEMVEDAATNHVVSWGPGGASFVVWNPLDFSRDLLPKYFKHNNFSSFIRQLNTYGFRKIDPERWEFANEDFIRGHTHLLKNIHRRKPVHSHSLQNQINGPLAESERRELEEEINRLKYEKSILVADLQRQNQQQYVINWQMQAMEGRLVAMEQRQKNIVASLCEMLQRRGGAVSSSLLESDHFSKKRRVPKMDLFVDDCAAGEEQKVFQFQGIGTDAPAMPPVLPVTNGEAFDRVELSLVSLEKLFQRANDACTAAEEMYSHGHGGTEPSTAICPEEMNTAPMETGIDLQLPASLHPSSPNTGNAHLHLSTELTESPGFVQSPELPMAEIREDIHVTRYPTQADVNSEIASSTDTSQDGTSETEASHGPTNDVFWERFLTETPRSCLDESERQESPKDDVKAELGCNGFHHREKVDQITEQMGHLASAEQTLHT

SEQ ID NO: 6573 - protein, 376 aa, Oryza sativa (japonica cultivar-group)
MNPLRVIVKEEELDFAAAAAAAAAGEGSPSSWAVGVMDLPRPMEGLGEAGPPPFLCKTYEVVDDPGTDTVISWGFAGNSFVVWDANAFAAVLLPRYFKHSNFSSFVRQLNTYGFRKVDPDRWEFANEGFLRGKKELLKTIKRRRPPPSSPPSSSSSSSSSQHQQQPAAACLEVGQFGRDGVVNRLQRDKSVLIAEVVKLRQEQQTTRAQMQAMEERISAAEQKQQQMTVFLARAMKNPGFLQMLVDRQAGQHGARNRVLEDALSKKRRRPIEYLLTRNGETCAAGESAAMLAADGVAEPDGDTTPRGDGGGGGGGDTESFWMQLLSLGLEEKQREDGVAGGVQESNSGGADVDNDEEDDDDDVDVLVQSIYHLSPK

SEQ ID NO: 6574 - protein, 250 aa, Oryza sativa (japonica cultivar-group)
MMGGECKVHQLQAAGDGGPGAVAPFVAKTFHMVSDPSTNAVVRWGGAGNTFLVLDPAAFSDFLLPSYFKHRNFASFVRQLNTYGFRKVDPDRWEFAHESFLRGQAQLLPRIVRKKKKGGAAPGCRELCEEGEEVRGTIEAVQRLREEQRGMEEELQAMDQRLRAAESRPGQMMAFLAKLADEPGVVLRAMLAKKEELAAAGNNGSDPCKRRRIGADTGRGGVATGGDAAEMAQSRGTVPFPFSVLGQVFY

SEQ ID NO: 6575 - protein, 406 aa, Oryza sativa (japonica cultivar-group)
MGSKKRSPQHPAAAAPPPAVGGGGGGEVSGDGGASTANGPVVPKPSEVAPFLTKVYDMVSDPATDNVISWAEGGGSFVIWDSHAFERDLHRHFKHSNFTSFIRQLNTYGFRKVHPDRWEWANEGFIMGQKHLLKTIKRRKKSSQESPSEIQKAPVKTAPGTENIEIGKYGGLEKEVETLKRDKALLMQQLVDLRHYQQTSNLEVQNLIERLQVMEQNQQQMMALLAIVVQNPSFLNQLVQQQQQQRRSNWWSPDGSKKRRFHALEQGPVTDQETSGRGAHIVEYLPPVPETSGQVNPVEGAICSANSQPVPSPAVATPMDMQTSNVADTLGSSEEPFADNSTLHEWDDNDMQLLFDDNLDPILPPFENDGQMGPPLSVQDYDFPQLEQDCLMEAQYNSNNPQYGND

SEQ ID NO: 6576 - protein, 300 aa, Oryza sativa (japonica cultivar-group)
MVVSMEMGPHGGGGAAAGKPVPAPFLTKTYQLVDDPCTDHIVSWGEDDTTFVVWRPPEFARDLLPNYFKHNNFSSFVRQLNTYGFRKIVADRWEFANEFFRKGAKHLLAEIHRRKSSQPPPPPMPHQPYHHHHHLNPFSLPPPPPAYHHHHLIQEEPATTAHCTVAGDGGEGGDFLAALSEDNRQLRRRNSLLLSELAHMKKLYNDIIYFLQNHVAPVTTTTTTPSSTAMAAAQHHLPAAASCRLMELDSPDHSPPPPPPKTPATDGGDTVKLFGVSLHGRKKRAHRDDDDGVHDQGSEV

SEQ ID NO: 6577 - protein, 348 aa, Oryza sativa (japonica cultivar-group)
MDGLHTELALGLIGCCGGDGQQQTAPFVAKTYQMVCDPRTDALVRWGRDNNSFVVVDPAAFSQLLLPCFFKHGNFSSFVRQLNTYVSIIQSPAPGFRKVHPDRWEFAHESFLRGQTHLLPRIVRRKKRGEGGGGGGGASCSFGGGAGEHQVAAAAASVGMSGEEEDAAEDVLAKEAALFEEVQRLRHEQTAIGEELARMSQRLQATERRPDQLMSFLAKLADDPNAVTGHLLEQAAERKRRRQHLPSHEPTVCPLPPAPPPQPPQPLLALAGAAAMDGTYWWTTEHHHHHHHQMKPMTVLPSLEPPTASCGVHQVPELGGGGVMGLTTDGEAKVEPPFPFCLLGQAFF

SEQ ID NO: 6578 - protein, 379 aa, Oryza sativa (japonica cultivar-group)
MEKMMPGMVKEEWPPSSPEEGEAPRPMEGLHEVGPPPFLTKTFDLVADPATDGVVSWGRAGSSFVVWDPHVFAAVFLPRFFKHNNFSSFVRQLNTYFLVRTNYLNKRSHFYSLRFQGFRKIDPDRWEFANDGFLRGQRHLLKMIKRRRPLSYLPGSQQALGTCLEVGQFGLDEEIDRLKRDKNILLAEVVKLRHKQQSTKANMRAMEERLQHAEQKQVQMMGFLARAMQNPDFFHQLIHQQDKMKGLEDTFSKKRTRSIDIVPFLNPGEVSQGDQLESTLLFDPRPFAELNDEPAKSELENLALNIQGLGKGKQDVNRTRNQPRNQASNETELTDDFWEELLNEGARDDAGIPGMERRRPRYVDALAQKLGYLSNSSQK

SEQ ID NO: 6579 - protein, 411 aa, Oryza sativa (japonica cultivar-group)
MASSSSSSSLCRLLIPRPTTRRFSGGGGEGGMAAAAPVKREVKPEAGEGWGGGDLGVVPPPPRPMEGLGEAGPAPFVAKTYEMVADAATDAVVSWGPGGSGASFVVWDPHALAAGVLPRFFKHANFSSFVRQLNTYVRIPIARSAACAASRKTYRPLPVVAMQGFRKVTPDRWEFANEAFLAGQKHLLKNIKRRRVSKPLVDSQLRNKASVVFGQPEAPGEVVSLKRDRAALRAEVIMLKQQYNACKSQLIAMEEMVRNIERRQQQTIGFFAKVLTNPAFVQQVLLNYVNKNGLRGAAKRQRLMENEEQHADSPLNKGMEAASVMEADVSPGSTGCGTVGKVETTPMCNFQNIENMCDDVWEELDALPETGMEQEEKAGIGSFDVEEFVGRPCGWVDDCPYLVEPMQFVEH

SEQ ID NO: 6580 - protein, 527 aa, Lycopersicon esculentum
MEPNSYGSGKAAVGDGVGAPMLQTAPAPAPIPSANAPPPFLVKTYDMVDDPSTDKIVSWSPTNNSFVVWDPPEFAKDLLPKYFKHNNFSSFVRQLNTYGFRKVDPDRWEFANEGFLRGQKHLLKSISRRKPAHGHAQQQQQPHGNAQQQMQPPGHSASVGACVEVGKFGLEEEVERLKRDKNVLMQELVRLRQQQQATDNQLQGMVQRLQGMELRQQQMMSFLAKAVNRPGFLAQFVQQQNESNKRIAEGSKKRRIKQDIESQDPSVTPADGQIVKYQPGINEAAKAMLRELSKLDSSPRLDNFSNSPESFLIGDGSPQSNASSGRVSGVTLQEVPPTSGKPLLNTASAIAGQSLLPATSEMQSSHLGTCSEIINNQLSNIIPLVGGEDLHPGSLSASDMIMPELSQLQGILPENNTDVIGCDSFMDTSAVEGKVGLDIIGSCLSPGADIDWQSGLLDEIEEFPSVGDPFWEKFLQSPCSPDAAMDDDISNTSETKPQINGWDKTQNMEHLTEQMGATNIKQQKHMI

SEQ ID NO: 6581 - protein, 301 aa, Lycopersicon peruvianum
MSQRTAPAPFLLKTYQLVDDAATDDVISWNEIGTTFVVWKTAEFAKDLLPKYFKHNNFSSFVRQLNTYGFRKIVPDKWEFANENFKRGQKELLTAIRRRKTVTSTPAGGKSVAAGASASPDNSGDDIGSSSTSSPDSKNPGSVDTPGKLSQFTDLSDENEKLKKDNQMLSSELVQAKKQCNELVAFLSQYVKVAPDMINRIMSQGTPSGSSLEELVKEVGGVKDLEEQGSYNDNDDKEDDDEKGDTLKLFGVLLKEKKKKRGPDENIETCGGRGKMMKTVDYNGPWMKMSSPAGESSKVCN

SEQ ID NO: 6582 - protein, 527 aa, Lycopersicon peruvianum
MEPNSSGSGKAAVGDGGGGGAPMLQPAPAPAPMPSANAPPPFLVKTYDMVDDPSTDKIVSWSPTNNSFVVWDPPEFAKDLLPKYFKHNNFSSFVRQLNTYGFRKVDPDRWEFANEGFLRGQKHLLKSISRRKPAHGHAQQQQQPHGHAQQQMQPPGHSASVGACVEVGKFGLEEEVERLKRDKNVLMQELVRLRQQQQSTDNQLQGMVQRLQGMELRQQQMMSFLAKAVNSPGFLAQFVQQQNESNKRIAEGSKKRRIKQDIESQDPSVTPADGQIVKYQPGINEAAKAMLRELSKLDSSPRLENFSNSPESFLIGDGSPQSNASSGRVSGVTLQEVPPTSGKPLLNTASAIAGQSLLPATSEMQSSHLGTCSEIINNQLSNIIPLVGGEDLHPGSLSASDMIMPELSQLQGILPENNTDVIGCDSFMDTIAVEGKMGLDIGSLSPGADIDWQSGLLDEIQEFPSVGDPFWEKFLQSPSSPDAAMDDDISNTSETKPQINGWDKTQNMEHLTEQMGATNIKQQKHMI

SEQ ID NO: 6583 - protein, 508 aa, Lycopersicon peruvianum
MNPFDKKQEPDTDSKTPFLTEMDSEFAAFSPISLPFADPSSPFINFGSFATPLSQHPVGEGEREGEGEGGEIEQPAEGGLGVPQPMECLHGIQIPPFLSKTFDLVEDPLLDTIISWGTNGESFVVWDPVEFSRLVLPRNFKHSNFSSFVRQLNTYGFRKIDADRWEFANEGFSRGKRHLLKNIQRRRSQQGGSSSGSSAEAGKGTMDEIEKLRNEKSLMMQEVVELQQQQHGTVQLMESVNEKLQAAEQRQKQMVSFLAKVLQNPTFLARVRQMKEQGEITSPRTMRKFVKHQSHGPDGVGSSSMEGQIVKFRSDFQDLAGCFDSPDFNPVVDQQLPETGLGAEAMPFEGGPVADGLTVAHELLNCSDREIRGASFFNSGGSQFKGKNVASPQIEVMPEYFASFPEEMGKEKNISGFSAPAIGSMVKDEELWGMGFEASAGMPSTGPELWDSLSSYVPDFGVSSGLSDLWDIDPLQVAGSSGVDKWPADGSPFGQSESHANQPKNDSF

SEQ ID NO: 6584 - protein, 351 aa, Lycopersicon peruvianum
MEDVMKVKVEEDGIPTAVLPMEGLHDVGPPPFLSKTYEMVEDSSTDQVISWSTTRNSFIVWDSHKFSTTLLPRFFKHSNFSSFIRQLNTYGFRKVDPDRWEFANEGFLGGQKHLLKTIKRRRNVGQSMNQQGSGACIEIGYYGMEEELERLKRDKNVLMTEIVKLRQQQQSTRNQIIAMGEKIETQERKQVQMMSFLAKIFSNPTFLQQYLDKQVHRKDKQRIEVGQKRRLTMTPSVTGSDQPMNYSSSLQESEAELASIEMLFSAAMDNESSSNVRPDSVVTANGTDMEPVADDIWEELLSEDLISGDRAAEEVVVVEQPEFDVEVEDLVVKTPEWGEELQDLVDQLGFL

SEQ ID NO: 6585 - protein, 292 aa, Nicotiana tabacum
MSQRTVPAPFLTKTYQLVDDATTDDVVSWNESGTTFVVWKTAEFAKDLVPTYFKHNNFSSFVRQLNTYGFRKIVPDKWEFANENFKRGQKELLTAIRRRKTVTPTPAGGKSVVPGTSASPDNSGEDLGSSSTSSPDSKNPGSVDTPGKSQFADLSDENEKLKKDNQMLSSELAQAKKQCDELVAFLNQYVKVAPDMINRIISQGTSGSSYGELVKEVIGGVNDLEAQGSDDDEKGDTLKLFGVLLKENKKKRGPDENADISGSRGKMMKTMDYNLPWMKMSSAPGESNKVCN

SEQ ID NO: 6586 - protein, 408 aa, Nicotiana tabacum
MDEATCSTNALPPFLTKTYEMVDDPSSDAIVSWSSSNKSFVVWNPPDFARDLLPRYFKHNNFSSFIRQLNTYGFRKVDPEKWEFANEDNFFRGQPHLLKNIHRRKPVHSHSAQNLHGLSSPLTESERQGYKEDIQKLKHENESLHLDLQRHQQDRQGLELQMQVFTERVQHVEHRQKTMLSALARMLDKPVTDLSRMPQLQVNDRKRRLPGNSCLYNETDLEDTRAISSRALTWENMNPSSLLTINAELLNQLDSSLTFWENVLQDVDQAWIQQNCSLELDESTSCADSPAISYTQLNVDVGPKASDIDMNSEPNANTNPEVAAPEDQAAVAGTTTNVPTGVNDIFWEQFLTENPGSVDASEVQSERKDIGNKKNESKPVDSGKFWWNMKSVNSLAEQLGHLTPAEKT

SEQ ID NO: 6587 - protein, 371 aa, Helianthus annuus
MAGVVKEFDSSHDMFKVREEPKVVFNNKDLSEEMMKIKEEPMLVFDEHEDFVGGEEAPKPIEGLRDGGPPPFLKKTFEMVDDPTTDSIISWSSSKNSFILWDPHKFSTDLLPQRFKHNNFSSFVRQLNTYRFKKIDPDRWEFANEFFQKGKKHLLRDIKRRTNQPQNTQKQEEIRKQEQQQCCGHQTNSTMETELKNLRKERITLKQEILKMKQQQENTEKHLEMVEERMLRMEFKQQQLLVFMSKAFRNPIFVKLLQHLVQKQKTGSVEMCKKRKLEQMLNTDDLDRFQEMWNMIEPDAYTVLSSDGSVSPPEDQNTSDKSGSNGSDYNSESFILWEKLMEDELIFGGEQSGKDQTETYLQEWEELIPKA

SEQ ID NO: 6588 - protein, 441 aa, Oryza sativa
  unsure (1)..(441): unsure at all Xaa locations
MEGGGGGGSLPPFLSKTYEMVDDPSTDAVVGWTPAGTSFVVANQPEFCRDLLPKYFKHNNFSSFVRQLNTYGFRKVDPEQWEFANEDFIKGQRHRLKNIHRRKPIFSHSSHSQGAGPLTDNERKDYEEEIERLKSDNAALSSELQNNTLKKLNMEKRMQALEEKLFVVEDQQRSLISYVREIVKAPGFLSSFVQQQDHHRKKRRLPIPISFHEDANTQENQIMPCDLTNSPAQTFYRESFDKMESSXLNSLENFLREASEEFGNDISYDDGVPGPSSTVVLTELHSPGESDPRVSSPPTRMRTSSAGAGDSHSSRDVAESTSCAESPPIPQMHSRVDTRAKVSEIDVNSEPAVTETGPSRDQPAEEPPAVTPGANDGFWQQFLTEQPGSSDAHQEAQSERRDGGNKVDEMKSGDRQHLWWGKRNVEQITEKLGLLTSTEKT

SEQ ID NO: 6589 - protein, 227 aa, Oryza sativa
  unsure (1)..(227): unsure at all Xaa locations
VARRREAAHNCALWIFFSVSSPVSCERYSRPTGSSWRRRRRGRPAPFLTKTYAMVEDPSTDETISWNDSGTAFVVWRPAEFARDLLPKHFKHSNFSSFVRQLNTYGFKKVVADRWEFANDCFRRGEKHLLGGIQRRKGSGTGGAGAAPAGGIPTAIPISSPPTSSGGEPAVSSSPPRGAAGIAAGVSGXXVAELEEENARLRRENARLARELARARRLHCSSYQYQA

SEQ ID NO: 6590 - protein, 370 aa, Oryza sativa
  unsure (1)..(370): unsure at all Xaa locations
XLQPQGASPSPLPASEPDKEVQCTVPEDGAAAVAAGVAPRPMEGLHDAGPPPFLTKTYDMVDDAGTDAAVSWSATSNSFVVWDPHAFATVLLPRFFKHNNFSSFVRQLNTYGFRKVDPDRWEFANENFLRGQRHLLKNIKRRKPPSHTASNQQSLGPYLEVGHFGYDAEIDRLKRDKQLLMAEVVKLRQEQQNTKANLKAMEDRLQGTEQRQQQMMAFLARVMKNPEFLKQLMSQNEMRKELQDAISKKRRRRIDQGPEVDDVGTSSSIEQESPALFDPQESVEFLIDGIPSDLENSAMDAGGLVXXPQDFDVGASEQQQIGPQGELNDNFWEELLNEGQENDNPVVEDDMNVLSEKMGYLNSNGPTAGE

SEQ ID NO: 6591 - protein, 416 aa, Oryza sativa
  unsure (1)..(416): unsure at all Xaa locations
MNPLRVIVKEEELDFAAAAAAAAAVGVMDLPRPMEGLGEAGPPPFLCKTYEVVDDPGTDTVISWGFAGNSFVVWDANAFAAVLLPRYFKHSNFSSFVRQLNTYGFRKVDPDRWEFANEGFLRGKKELLKTIKRRRSSSSSSQHQQQPAAACLEVGQFGRDGVVNRLQRDKSVLIAEVVKLRQEQQTTRAQMQAMEERISAAEQKQQQMTVFLARAMKNPGFLQMLAVQTXVDRQAGQHGARNRVLEDALSKKRRRPSTMLAADGVAEPDGDTTPRRDGGGGGGGDTESFWMQLLSLGLEEKQREDGVAGGVQESNSGGADVDNDEEDDDDDVDVLVQSIYHLSPKRRKVQEVEKLLPRGKLLEVSKLAVAALQRNYSSQSATTPIGLQQDKHITALLQWPSAAMLQPFDYDYAVQT

SEQ ID NO: 6592 - protein, 686 aa, Oryza sativa
MINTIQRIATFYLFYFILSSGGTWHLTRGCIGVRSPAKGVLSGFQPIIFLYYIIISRLPLYHYLHWTYSRLFKPYRYPLLSASAIIGYRLELLHQLVSRSAVLSIICIFCQLQDQTDWHARISPTFGPALELSRSPRPYRSDASLPARHTSDDRFRSDRTTTGRASSGELLPSPWPWLIRTSWRSIGKSLSFGDSVRICAAVQCEKFWPVASWIWRRVHSELRGAVDMESSNLGGGGGGGGGGGPPPFLIKTYEMVEDAATNHVVSWGPGGASFVVWNPLDFSRDLLPKYFKHNNFSSFIRQLNTYGFRKIDPERWEFANEDFIRGHTHLLKNIHRRKPVHSHSLQNQINGPLAESERRELEEEINRLKYEKSILVADLQRQNQQQYVINWQMQAMEGRLVAMEQRQKNIVASLCEMLQRRGGAVSSSLLESDHFSKKRRVPKMDLFVDDCAAGEEQKVFQFQGIGTDAPAMPPVLPVTNGEAFDRVELSLVSLEKLFQRANDACTAAEEMYSHGHGGTEPSTAICPEEMNTAPMETGIDLQLPASLHPSSPNTGNAHLHLSTELTESPGFVQSPELPMAEIREDIHVTRYPTQADVNSEIASSTDTSQDGTSETEASHGPTNDVFWERFLTETPRSCLDESERQESPKDDVKAELGCNGFHHREKVDQITEQMGHLASAEQTLHT

SEQ ID NO: 6593 - protein, 410 aa, Oryza sativa
MESSNLGGGGGGGGGGGPPPFLIKTYEMVEDAATNHVVSWGPGGASFVVWNPLDFSRDLLPKYFKHNNFSSFIRQLNTYGFRKIDPERWEFANEDFIRGHTHLLKNIHRRKPVHSHSLQNQINGPLAESERRELEEEINRLKYEKSILVADLQRQNQQQYVINWQMQAMEGRLVAMEQRQKNIVASLCEMLQRRGGAVSSSLLESDHFSKKRRVPKMDLFVDDCAAGEEQKVFQFQGIGTDAPAMPPVLPVTNGEAFDRVELSLVSLEKLFQRANDACTAAEEMYSHGHGESPGFVQSPELPMAEIREDIHVTRYPTQADVNSEIASSTDTSQDGTSETEASHGPTNDVFWERFLTETPRSCLDESERQESPKDDVKAELGCNGFHHREKVDQITEQMGHLASAEQTLHT

SEQ ID NO: 6594 - protein, 143 aa, Oryza sativa
  unsure (1)..(143): unsure at all Xaa locations
LITCCIKRVVITYRPDRWHSSWRGXGGEMVVSMERSHGRSTTTAAPAPFLSKTYQLVDDPSTDDVVSWGEDEATFVVWRPPEFARDLLPNYFKHNNFSSFVRQLNTYGFRKIVADRWEFANEFFRKGAKHLLSEIHRRKSSSX

SEQ ID NO: 6595 - protein, 288 aa, Oryza sativa
  unsure (1)..(288): unsure at all Xaa locations
AAAEALAGQRSLPTPFLTKTYQLVEDPAVDDVISWNEDGSTFVVWRPAEFARDLLPKYFKHNNFSSFVRQLNTYGFRKIVPDRWEFANDCFRRGEKRLLCDIHRRKVVAAAAAAPPPPAHSSEEQVLSSNSGSGEEHRQASGSGSAPGGGXXGGSASGGDMGEENERLRRENARLTRELGHMKKLCNNILLLMSKYAATQHVEGSAAPGDTRSNALVPRPGHRRRXAAGLAIDGEPDPSARLFGVSIGLKRTRDDAAAAADEDGGGEDQAEHGGWVAAVNTNNAASCP

SEQ ID NO: 6596 - protein, 261 aa, Oryza sativa
  unsure (1)..(261): unsure at all Xaa locations
YLRITRSVVALXLGGECKVHQLQAAGDGGPGAVAPFVAKTFHMVSDPSTNAVVRWGGAGNTFLVLDPAAFSDFLLPSYFKHRNFASFVRQLNTYGFRKVDPDRWEFAHESFLRGQAQLLPRIVRKKKKGGAAPGCRELCEEGEEVRGTIEAVQRLREEQRGMEEELQAMDQRLRAAESRPGQMMAFLAKLADEPGVVLRAMLAKKEELAAAGNNGSDPCKRRRIGADTGRGGVATGGDAAEMAQSRGTVPFPFSVLGQVFY

SEQ ID NO: 6597 - protein, 424 aa, Oryza sativa
  unsure (1)..(424): unsure at all Xaa locations
WSSVVVASSYGRWSGAGGSDCEAAAAAAQKAVPAPFLTKTYQLVDDPATDHIVSWGDDRVSTFVVWRPPEFARDILPNYFKHNNFSSFVRQLNTYGFRKVVPERWEFANEFFRKGEKQLLTEIHRRKTSSASTASPSPPPFFAPPHFPXVPPPXRVSAAQHHHAFVGDDGPSPSSAEAGGAGRAATAAVLMEENERLRRSNTALLQELAHMRKLYNDIIYFVQNHVRPVAPSPAAAAFLQGLGMQARKKPAAANVLNNSGGSTTSSSSLTTSPPPQQQHLAGEKSGGEAGNSSAARSSAPTKLFGVHLSASSPEEHPPTSPATKPRLVLECDDLSLTVAPSSSSQQQLSAASSPTSTSYREADPWTVIMLQESNDLLDDXSXXXXXXXXXXXXXXXDYLSDRENRERRSVMIRRAVDEICSSEV

SEQ ID NO: 6598 - protein, 289 aa, Oryza sativa
  unsure (1)..(289): unsure at all Xaa locations
MGSKKRSPQHPAAAAPPPASEVAPFLTKVYDMVSDPATDNVISWAEGGGSFVIWDSHAFERXXLHRHFKHSNFTSFIRQLNTYGFRKVHPDRWEWANEGFIMGQKHLLKTIKRRKKSSQESPRQKAPVKTAPGTENIEIGKYGVERRVDPXXEDKALLMQQLVDLRHYQQTSNLEVQNLIERLQVMEQNQQQMMALLAVGVQNPSFLNQLVQQQQQQRRSNWWSPDGSKKRRFHALEQGPVTDQETSGRGAHIVEYLPPVPETSGQLLFVLXNMSSFVHLPCVSKKKKK

SEQ ID NO: 6599 - protein, 459 aa, Oryza sativa
MESSNLGGGGGGGGGGGPPPFLIKTYEMVEDAATNHVVSCGPGGASFVVWNPLDFSRDLLPKYFKHNNFSSFIRQLNTYGFRKIDPERWEFANEDFIRGHTHLLKNIHRRKPVHSHSLQNQINGPLAESERRELEEEINRLKYEKSILVADLQRQNQQQYVINWQMQAMEGRLVAMEQRQKNIVASLCEMLQRRGGAVSSSLLESDHFSKKRRVPKMDLFVDDCAAGEEQKVFQFQGIGTDAPAMPPVLPVTNGEAFDRVELSLVSLEKLFQRANDACTAAEEMYSHGHGGTEPSTAICPEEMNTAPMETGIDLQLPASLHPSSPNTGNAHLHLSTELTESPGFVQSPELPMAEIREDIHVTRYPTQADVNSEIASSTDTSQDGTSETEASHGPTNDVFWERFLTETPRSCLDESERQESPKDDVKAELGCNGFHHREKVDQITEQMGHLASAEQTLHT

SEQ ID NO: 6600 - protein, 459 aa, Oryza sativa; identical to SEQ ID NO: 6599

SEQ ID NO: 6601 - protein, 254 aa, Oryza sativa
  unsure (1)..(254): unsure at all Xaa locations
MAFLVERCGEMVVSMETGKPVPAPFLTKTYQLVDDPCTDHIVSWGEDDTTFVVWRPPEFARDLLPNYFKHNNFSSFVRQLNTYGFRKIVADRWEFANEFFRKGAKHLLAEIHRRKSSQPPPPPMPHQPYHHHHHLNPFSLPPPPPAYHHHHLIQEXSPPXTAHCTVAGDGGEGGDFLAALSEDNRQLRRRNSLLLSELAHMKKLYNDIIYFLQNHVAPVTTTTTTPSSTAMAAAQHGRTGTTTTASMTREARCX

SEQ ID NO: 6602 - protein, 430 aa, Oryza sativa
  unsure (1)..(430): unsure at all Xaa locations
MAEQGAGEADAGGGEPPPAAVMTAAAEALAGQRSLPTPFLTKTYQLVEDPAVDDVISWNEDGSTFVVWRPAEFARDLLPKYFKHNNFSSFVRQLNTYGFRKIVPDRWEFANDCFRRGEKRLLCDIHRRKVVAAAAAAPPPPSPGMATAAAAVASGAVTVAAAPIPMALPVTRAGSPAHSSEEQVLSSNSGSGEEHRQASGSGSAPGGGGGGSASGGDMGEENERLRRENARLTRELGHMKKLCNNILLLMSKYAATQHESSEAVPPPPPLPPAILDLMPSCPALATAAAAAGLAIDGEPDPSARLFGVSIGLKRTRDDAAAAADEDGGGEDQAEHGGXXDVKPEAADPHPAGGGGGSSTEASPESHPWPIYRPTPMYHAVRPTCNGPDRAGSDQDGSSSSVRSIRMPLLVFCTTWHQTATHRRMVVGQFS

SEQ ID NO: 6603 - protein, 559 aa, Oryza sativa
  unsure (1)..(559): unsure at all Xaa locations
MAADGVLAGGGGCRDHGLRRRVRDDGRRRWWRARVDDGRRHQSARRRQEAMGGATIAGGGTRASTAGGRTAPARGETTASGAMRSAAWRPTPHPRNVSLIPPPPTNDLNLPEQTKSIKKDTETSRTFPHPFSHLPHATQPSLRPISRATPIQPPKQPDTTVYPGQICAAAGGGGGMADQTAAAVVVGGGAAATMGEPSPPPPAPAAEAAGVGVGQQQRTVPTPFLTKTYQLVDDPAVDDVISWNDDGSTFVVWRPAEFARDLLPKYFKHNNFSSFVRQLNTYGFRKIVPDRWEFANDCFRRGERRLLCEIHRRKVTPPAPAATTAAVAAAIXXMALPVTTTRDGSPVLSGEEQVISSSSSPXAPARAAAGAVXGSGSGGVASGDVGDENERLRRENAQLARELSQMRKLCNNILLLMSKYASTQQXRRRQRLLRRREQQQQQLLRRIRRGGHAAPAPRRPRPHAFLPRRRLRRRARIRQRGGNDEREALRRLHRPEANAARRRRRRRPRGDGEGGADGRAAARQGRTIGGDAGLAHLPAQARLPAHPGLQRIRVRPSRQ

SEQ ID NO: 6604 - protein, 264 aa, Oryza sativa
  unsure (1)..(264): unsure at all Xaa locations
XNPALKGISLGRWRRCXHGPQLPPFLSKTYDLVCEPELDGVISWGHAGNSFVVWDPSAFARDVLPHHFKHNNFSSFVRQLNTYGFRKVHADRWEFAHEDFLRHSKHLLKKIVRRRSSPTQQSGLQPGSSGESGLDPELNTLRREKSALLQEVTRLKQEHLQTIEQMSTLNQRLESAEDRQKQMVSFLAKLLQNPTFLRQLKMHRQQKEIDSTRVKRKFLKHVPHGNIDSENIGLDGIEAPDDIGALVQGFDTQEMYCLQDWMLP

SEQ ID NO: 6605 - protein, 348 aa, Oryza sativa; identical to SEQ ID NO: 6577

SEQ ID NO: 6606 - protein, 288 aa, Oryza sativa
  unsure (1)..(288): unsure at all Xaa locations
YSKKGDDDDDDGGGRXGGVAPFVAKTYRMVDDPATDGVIAWGRDSNSFVVADPFAFSQTLLPAHFKHSNFSSFVRQLNTYGFRKVDPDRWEFAHVSFLRGQTHLLRRIVRRSSGGGGAKRKEEAGVVAMEVARLRREQREIEGRGAAVWRRVHDAERPPVPMLAFLVKVVGDPQVLRRLXRQGQHQRRRLQRRRLRRVIRSRGRASSSTHPPPPPPTATATSSPPPQTGSTPAAAARRPPAAAFVPDDAVDFTGLYTGXATGSATPSSTPASTTRRRTRSRWWTAATX

SEQ ID NO: 6607 - protein, 252 aa, Oryza sativa
  unsure (1)..(252): unsure at all Xaa locations
MNPLRVIVKEEELDFAAAAAAAAAVGVMDLPRPMEGLGEAGPPPFLCKTYEVVDDPGTDTVISWGFAGNSFVVWDANAFAAVLLPRYFKHSNFSSFVRQLNTYXWEFANEGFLRGKKELLKTIKRRRSSSSSSQHQQQPAAACLEVGQFGRDGVVNRLQRDKSVLIAEVVKLRQEQQTTRAQMQAMEERISAAEQKQQQMTVFLARAMKNPGFLQMLVDRQAGQHGARNRDVGAKDIFKHTNRKGHQNIIIX

SEQ ID NO: 6608 - protein, 524 aa, Oryza sativa
  unsure (1)..(524): unsure at all Xaa locations
MPEYTAVPTVIHNTDLFGHASHSLVIDSSRKLVQSFGIGFIISLCLILLINISTSDVRETKIIQTEVLAGIHARRVGDGLAWPIWGDSSGVRRSDGASGASARIPVRRVPACKAWRAQRDGCVGLIGPPATRVRTRRSPIGPHRQLARRVMTTTTAEGGGGVAPFVAKTYRMVDDPATDGVIAWGRDSNSFVVADPFAFSQTLLPAHFKHSNFSSFVRQLNTYVRSRFPSIPGFRKVDPDRWEFAHVSFLRGQTHLLRRIVRRSSGGGGAKRKEEAGGCGGGGEAAAGDVDEESAVVALEVARLRREQREIEGRVAAMWRRVQETERRPKQMLAFLVKVVGDPHAAPPRRQGQHQRRRLQRRRLPSSGQEAAPPPPRPPPPPPTATATSSXAAADGXSTPAAAARRPQLPPRSCRTTRSTSPASXTGGDGFGNAVVDAGVDYPPAYAFPVVDSGYXSCNRFEIRALVADPTICVRSSIFRFSLPSPKCLDEVAVNGEGRKLGSSPSSHVGFFPPCWGFLVSVCA

SEQ ID NO: 6609 - protein, 302 aa, Oryza sativa
  unsure (1)..(302): unsure at all Xaa locations
MASSSSSSSLCRLLIPRPTTRRFSGGGGEGGMAAAAPVKREVKPEAXXGGVGRGXSGGGAAAXPRPMEGLGEAGPAPFVAKTYEMVADAATDAVVSWGPGGSGASFVVWDPHALAAGVLPRFFKHANFSSFVRQLNTYGFRKVTPDRWEFANEAFLAGQKHLLKNIKRRRVSKPLVDSQLRNKASVVFGQPEAPGEVVSLKRDRAALRAEVIMLKQQYNACKSQLIAMEEMVRNIERRQQQTIGFFAKVLTNPAFVQQVLLNYVNKNGLXAPLKGRRRLLEQSLNIGNEHSQVMXSQEFVGX

SEQ ID NO: 6610 - protein, 260 aa, Oryza sativa
AAPVKREVKPEAGEGWGGGDLGVAPPPRPMEGLGEAGPAPFVAKTYEMVADAATDAVVSWGPGGSGASFVVWDPHALAAGVLPRFFKHANFSSFVRQLNTYGFRKVTPDRWEFANEAFLAGQKHLLKNIKRRRVSKPLVDSQLRNKASVVFGQPEAPGEVVSLKRDRAALRAEVIMLKQQYNACKSQLIAMEEMVRNIERRQQQTIGFFAKVLTNPAFVQQVLLNYVNKNGLRGLEWSRKKRLGLAPSMSRSSSNTIHAA

SEQ ID NO: 6611 - protein, 148 aa, Oryza sativa
  unsure (1)..(148): unsure at all Xaa locations
XGWGKGNNSFVVADPFVFSQTLLPAHFKHNNFSSFVRQLNTYGFRKVDPDRWEFAHASFLRGQTHLLRNIVRRGSAAAGGGGGGGGGKVATEVVRLKQEQRTIDDRVAAMWRRVQETERRPKQMLAFLLRVVGDRDKLHRLNTFSYXK

SEQ ID NO: 6612 - protein, 95 aa, Oryza sativa
  unsure (1)..(95): unsure at all Xaa locations
XGGRRCCCGCGRRGGAAVAPPPGAAVSNGVATAPPPFLMKTYEMVDDPATDAVVSWGPGNNSFVVWNTPEFARDLLPKYFKHSNFSSFVRQLNTY

SEQ ID NO: 6613 - protein, 175 aa, Triticum aestivum
  unsure (1)..(175): unsure at all Xaa locations
APRSGPGPYGSRDGDGRRGCCCGGCGGGGAVTTAVAPPGAAGAGAGAPPPFLMKTYDMVDDPATDAVVSWGPANNSFIVWNTPEFARDLLPKYFKHNNFSSFVRQLNTYGFRKVDPDKWEFANEGFLRGQKHLLKTINRRKPSHANNQVQVQQHQQQQQQQQPQLQNAPMPSCVX

SEQ ID NO: 6614 - protein, 322 aa, Triticum aestivum
  unsure (1)..(322): unsure at all Xaa locations
MAGAAAQQQQRGGGGGGGAVRVGGGGPAPFLTKTHQMVEERGTDEVISWGEQGRSFVVWKPVELARDLLPLHFKHCNFSSFVRQLNTYGFRKVVPDRWEFANENFRRGEQGLLSGIRRRKATATTTXXPQSSKTSGTGVNVAFPPPLPALRPASASTSGTGNDHSSSSASSPTRPDLSSENEQLRKDNHALAAELALARRHCEELLGFLSRFLDVRQLDLRLLMDGDMQGAAGAGGARXGGPRALLREEGEAVRRDPXKDASARKRGRCDEAAASERPMNMTRIGEPWVGVPIVLPGALRRRELMGASPWPDGCTQHARAPL

SEQ ID NO: 6615 - protein, 265 aa, Triticum aestivum
  unsure (1)..(265): unsure at all Xaa locations
MAGAAAQQQQQKGGGAVRVGGGGPAPFLTKTHQMVEERGTDEVISWGEQGRSFVVWKPVELARDLLPLHFKHCNFSSFVRQLNTYGFRKVVPDRWEFANENFRRGEQGLLSGIRRRKATATTTXXPQSSKTSGTGVNVAFPPPLPALRPASASTSGTGNDHSSSSASSPTRPDLSSENEQLRKDNHALAAELALARRHCEELLGFLSRFLDVRQLDLRLLMDGDMQGAAGAGGARSSTDCILRFCLEIHIDILFSSKKKKKKKKX

SEQ ID NO: 6616 - protein, 128 aa, Triticum aestivum
  unsure (1)..(128): unsure at all Xaa locations
MASPALGAGTPPFLTKTYAMVDDPETDDTISWNESGTAFVVWRRAEFERDLLPKNFKHSNFASFVRQLNTYGFRKIGLDRWEFANECFRKGEKRLLGAIQRRKGSGAGAPPPAMMATPIATAIPISPX

SEQ ID NO: 6617 - protein, 150 aa, Triticum aestivum
  unsure (1)..(150): unsure at all Xaa locations
KEEEEEGAHGRGDSPAVGAAPRPMEGLHDAGPPPFLTKTYDMVDDPNTDSIMSWSAGNNSFVVWDPHAFATVLLPRHFKHSNFSSFVRQLNTYGFRKVDPDRWEFANEGFLRGQRHLLKNIRRRKPPAHTASNQQSLGSYLEVGHFGYDX

SEQ ID NO: 6618 - protein, 152 aa, Triticum aestivum
  unsure (1)..(152): unsure at all Xaa locations
MSHRMMMNPVKVEGDGRAGGGGAPRPMDGLGDAGPTPFLAKTYDMVDDPATDAVVSWSATNNSFVVWDPHLFATVLLPRYFKHGNFSSFVRQLNTYGFRKVDPDRWEFANEGFLRGQRHLLRNIKRRKPNMGSKNNNLXVLLEXGTLDMMWR

SEQ ID NO: 6619 - protein, 176 aa, Triticum aestivum
  unsure (1)..(176): unsure at all Xaa locations
MEGSGGSASLPPFLTKTYEMVDEPATDAVVAWTPSGTSFVVLSQADFCRDLLPKYFKHNNFSSFVRQLNTYGFRKVDPEQWEYANEEFLRDQRHRLKNIHRRKPIFSHSXDNPAARXRARXXXXXXXPXVXXXXTXXKXXXKKLXRTSXKEXXNEXXXXXXXXKXIXXVXHQKXXX

SEQ ID NO: 6620 - protein, 380 aa, Triticum aestivum
MSAEHGAAAADGAGAEPPPPAPMPGLVASADAAGQRSLPTPFLTKTYQLVEDPAVDDVISWGEDGSTFVVWRPAEFARDLLPKYFKHNNFSSFVRQLNTYGFRKIVPDRWEFANDCFRRGEKRLLCDIHRRKVVQSAGLAAAAAAAAAGAVTVATAAIPMALPVTRSAPEPQLSSEEQVLSSNSGSAEELPLAAPSGSGSGLGGAAAGSSSGEENDRLRRDNARLTRELGQMKKLCNNIVSLMSKFASSQQNCSGESALAPPPPLPAGILDLMPSCSALATAAGLAVDGGPDTDARLFGVSIGLKRARDEEEDGDGGELPNSNGDGADVKPEEAADPRAAAARIGSRGRYTGPSPCTGPATGRTGPGAGSGSDQDRSNSR

SEQ ID NO: 6621 - protein, 462 aa, Triticum aestivum
  unsure (1)..(462): unsure at all Xaa locations
QFSISLIFILVLLLPLGISLIIPRGKLPEGLLPYVPRFGGVALXPHLEATTGFPGPDPAGRGRGGPGVMSGRRGGGRGWGGASSPGADAGAGGLGGPGQRSLPTPFLTKTYQLVEDPAVDDVISWGEDGSTFVVWRPAEFARDLLPKYFKHNNFSSFVRQLNTYGFRKIVPDRWEFANDCFRRGEKRLLCDIHRRKVVQSAGLAAAAAAAAAGAVTVATAAIPMALPVTRSAPEPQLSSEEQVLSSNSGSAEELPLAAPSGSGSGLGGAAAGSSSGDMGEENDRLRRDNARLTRELGQMKKLCNNIVSLMSKFASSQQPCDGGPVAVVVVNCRVSRRWRLRRRPRGDTGPDAILLGAATAAGXPSRXPDXDAXLXAXHRLNQRXQEKAXRGEFLXNTRXDLNRXEXTGPRRGXDGXWPLRPAXTADGRXPSVTXNNRRAFXTXLXLSPXIXXXXXXXIXXGC

SEQ ID NO: 6622 - protein, 120 aa, Triticum aestivum
  unsure (1)..(120): unsure at all Xaa locations
XTAHSGHPPPRPLEVLQGPQLPPFLSKTYNLVSEPQLDGVISWGPAGNSFVVWNPSTFARDVLPHNFKHNNFSSFVRQLNTYGFRKVHADRWEFAHEGFLRGSKHLLKTIVRRRSSPTQX

SEQ ID NO: 6623 - protein, 200 aa, Triticum aestivum
  unsure (1)..(200): unsure at all Xaa locations
KPNPDPPAATTTTPLSRPSLPLPPTRVGEQHREPARRHSHPMEGSGAAGARGGGGGGPAPFLLKTYEMVDDPATDAVVSWSDASDTSFVVWNSPEFAARLLPAYFKHSNFSSFIRQLNTYGFRKIDPERWEFGNEYFVKGQKHLLKNIYRRKPIHSHSHQPGALPDNERSXFEDEIDRLAREKANLQAEXWKSKQQEXRN

SEQ ID NO: 6624 - protein, 148 aa, Triticum aestivum
MDGLHTELALGLIGCGHGDLQTAPFVAKTYQMVCDPRTDALVRWGKGNNSFLVTDVAGFSQLLLPCFFKHGNFSSFVRQLNTYGFRKVHPDRWEFAHESFLRGQTHLLPRIVRRKKRGEAGVGASCSSAVGGGEQQQHVVANMGDQGE

SEQ ID NO: 6625 - protein, 135 aa, Triticum aestivum
  unsure (1)..(135): unsure at all Xaa locations
MSGGMDSSSSGSGSSGGAGVAPFVAKTYGMVDDRATDAVVAWGPAGNSFVVADPFAFSQALLPAHFKHANFSSFVRQLNTYGFRKVDPDRWEFAHASFLRGQTHLLPRIVRRQKRQARRQGGRRGGGXGEQQHGV

SEQ ID NO: 6626 - protein, 228 aa, Triticum aestivum
  unsure (1)..(228): unsure at all Xaa locations
TPRVKTPSRASLVEWFRNLRRLFLQLFQCSSPSSVRRVSRSASDGAGGSWSESDAAAQAAAQKAVPAPFLTKTYQLVDDPATDHIVSWGDDRVSTFVVWRPPEFARDILPNYFKHNNFSSFVRQLNTYGFRKVVPERWEFANEFFRKGEKQLLCEIHRRKTSGSTTSSSPPPXXFAPPHFPLSPGRFGRASPPAVRXGEDGAMAAHAGMGVPFMQPHWRDQGAPRLLA

SEQ ID NO: 6627 - protein, 270 aa, Triticum aestivum
  unsure (1)..(270): unsure at all Xaa locations
LETDRWRRRRRASAAGXAPFVWKTYRMVEDPGTDGVIGWGKGNNSFVVADPFVFSQTMLPAHFKHNNFSSFVRQLNTYGFRKVDPDRWEFAHGSFLRGQTHLLRNIVRRGTAVGGGGGGKRKDAVATEVVRLKKEQNTIDDRVAAMWRRVQETERKPKQMLAFLLTVVGDRDTLQRLVXQQRQRGRRRSGAGGGRREKGEAAAXRRLRQRVRXXLGRTPSTSRGSTPTTRSPMRRCRWRRPPGRAVVVPAARXXVWSGQWVLSSDARQKX

SEQ ID NO: 6628 - protein, 284 aa, Triticum aestivum
  unsure (1)..(284): unsure at all Xaa locations
AAPPAAQQAHTEQSRNSERLPYPVVDSSSMGSECKGHQPQXXDGGVAPFVAKTFHMVSDPATDAVVCWGGASNTFLVLDPAAFSDFLLPSYFKHRNFASFVRQLNTYGFGKVDPDVWEFAHESFLRGQAKLLPLIVRKKKRAGAGAAGRELCVEEEEVRGTIQAVQRLRDERRGMEEELQAMDRRLCAAENRPGQMMAFLXAKLADDPGVVLPAMVAKKEELAXAAGAGGKDSKXPDKSRRIGADAGSGGPXXGRPAPCWAXXPCPFRNLGQVFYXIDPWEXES

SEQ ID NO: 6629 - protein, 147 aa, Triticum aestivum
  unsure (1)..(147): unsure at all Xaa locations
IPCFSPRYAIRNLPEGCFATLPSVPSNGXSSGQICAVGGGDGAMGXAGRGRFLLRDACSGGGGDXGVGQRSLPTPFLNKTYQLVDDPAVDDVISWSEDGSAFIVWRPAEFARDLLPKYFKHNNFSSFVRQLNTYGFRKIVPDRWEFA

SEQ ID NO: 6630 - protein, 161 aa, Triticum aestivum
  unsure (1)..(161): unsure at all Xaa locations
KNQSFLTRGTSTAFPSCLLSRVELDEQRRHGVXSGSEGDGGMVAPFVAKDVQXMVDDPATDAVVAWGPASNSFVVADPFAFSRALLPAHFKHANFSSFVRQLNTYGFRKVDPDRWEFAHASFLRGQTHLLPRIVRRRTGGGRRAKDSHDEEEDEDISSKMX

SEQ ID NO: 6631 - protein, 124 aa, Triticum aestivum
  unsure (1)..(124): unsure at all Xaa locations
MEAAVAGGVVKEEELLLHEEQPPAGPQQQDGALPRPMEGLHEAGPPPFLTKTYDLVEDPATDQVVSWGRAGNTFVVWDPHVFAEALLPRLFKHSNFSSFVRQLNTYGFRKVDPDRWEFANEGFX

SEQ ID NO: 6632 - protein, 251 aa, Triticum aestivum
  unsure (1)..(251): unsure at all Xaa locations
KSLRTQTEIPTPIRLPPPVSPPSSIPNEARVSARRTAMGSSKGSPPPSAAGPSSAGNAPAPVGPVPRPPEVAPFLTKVYDMVSDAATDKVMSWTDAGNSFVIWDAHAFERDLRRHFKHRNFSSFIRQLNTYGFRKVDPDRWEWANEGFLRDQKHLLKIIKRKKRXXQEAGRELEKAPVKAAPGTENIEIGRYGGLVKEVETLKRGGGVLMQQLVDLTHYQQSSNLEVQSLIQRLQVMEQNQKQMMALLSIX

SEQ ID NO: 6633 - protein, 615 aa, Zea mays
  unsure (1)..(615): unsure at all Xaa locations
RPVRDTHPSSSPRRESEPLSFHSPFLSIAYTSGGAGTPKTLSPHTTANRNHSAPPSPSRPGPGRAPLHDAGVRQVLSGSRWWEDAGRCHGPCRRRRGGRVDGDHGGGAPSHGARGGGGAPXVTAHAAAAAGNGSATAAPPPPFLMKTYEVVDDPATDDVISWGPGNNSFIVWNTPEFARDLLPKYFKHSNFSSFVRQLNTYGFRKVDPDRWEFANEGFLRGQKHLLKTINRRKPSLQGNSQPQQPQSXXNAPVPSCVEVGKFGLEEEIERLKRDKNVLMQELVRLRQQQQTTDHQLQTLGKRLQGMESRQQQMMSFLAKAMQSPGFLAQFVQQNEKSRRRIVAANKKRRLPRQDGGLDSESAAASLDGQIIKYQPLINEAAKAMLRKILKLDSSHRLESMGNSENGNFLLENYMPGAQAFESSSSTRNSGVTLSEVSANPGLPYXAAAAARALGCQPSALLKSXCPVVMDNMSSNQVPSMSAXXPPVSKATIDMGIPEFSALADLVNEGSVDIPGGAFEMPGPEFPLPEGDDXVSPSRPXETMYNNNDETQSLPGIIDSFWEQFLVGSPLSADNDEVDSGSPQENGWSKVGNIGDLTEQMGLLSSTNHRDSGNGL

SEQ ID NO: 6634 - protein, 529 aa, Zea mays
  unsure (1)..(529): unsure at all Xaa locations
RPGIPFPIPLSSQSHTPAAAPGPRKPSPRTPRPTGTTPLLRALAVPGRVGLPYMTPAAGNGSATAAXXPPPFLMKTYEVVDDPATDDVISWGPGNNSFIVWNTPEFARDLLPKYFKHSNFSSFVRQLNTYGFRKVDPDRWEFANEGFLRGQKHLLKTINRRKPSLQGNSQPQQPQSXXNAPVPSCVEVGKFGLEEEIERLKRDKNVLMQELVRLRQQQQTTDHQLQTLGKRLQGMESRQQQMMSFLAKAMQSPGFLAQFVQRNENSRRRIVAANKKRRLPKQVVDSSPKVLPLDGQIIKYQPSINEAAKAMLRKILNVDSSHMFESMGNSDNSDYMPAGQAFESSSSTRNSGVTLAEVPANSGLAYVGTSSAICSPPAAPEMQCPVVLDNKAYKQVASMSAVPXXVSSDMGIIPEFSDLADLVSVDILGGAFEMMPGPEFPLPEEGDDGTTMYNNNDEEAQSLPGIINSIWEQFLVGSPLSTDNEEVDSAGGLYAQEDGWSKVGNIANLTEQMGLVSSTNHRDSGNGLY

SEQ ID NO: 6635 - protein, 182 aa, Zea mays
MEGGSSLPPFLSKTYEMVDDPATDAVVAWTPLGTSFVVANQAEFCRDLLPKYFKHNNFSSFVRQLNTYGFKKIDPEQWEFANDDFIRGQQHRLKNIHRRKPIFSHSSHTQGSGPLPDTERRDYEEEIERLKCDNAALTSELEKNAQKKLVTEKRMQELEDKLIFLEDRQKNLMAYVRDIGQA

SEQ ID NO: 6636 - protein, 492 aa, Zea mays
  unsure (1)..(492): unsure at all Xaa locations
PRSNLVFWKSPSIRFRTAENFPFPRPPTNQTRATSLSHLPCAAPQPEEEEEDAVVWRGMEGASSLPPFLSKTYEMVDDPATDAVVAWTPLGTSFVVANQAEFWRDLLPKYFKHNNFSSFVRQLNTYGFKKIDPEQWEFANDDFIRGQQHRLKNIHRRKPIFSHSSHTQGSGPLPDTERRDYEEEIERLKCDNAALTSELEKNAQKKLVTEKRMQELEDKLIFLEDRQKNLMAYVRDIVQAPGSFSSFVQQPDHHGKKRRLPVPISLYQDSNAEGNQVVHGGFITNPPACRESFDKTESSLNSLENFLREASEAFNISYGDGLPGPSSAVVITELHSSGESDPHVPSPVSRMHTSSAGAGDSLSSRDLTESTSCAESPRLAQIQPCTDSRTKVSEIDVNREPAVTETGPTRDQPAEEPPHVAAGVNDGFWQQFLTEQPGXXDVHQEAQSERRDGDDDKGDQTRIGDRENFWWGKKNVEQMREKLGRLTSVEKT

SEQ ID NO: 6637 - protein, 308 aa, Zea mays
MEGASSLPPFLSKTYEMVDDPATDAVVAWTPLGTSFVVANQAEFWRDLLPKYFKHNNFSSFVRQLNTYGFKKIDPEQWEFANDDFIRGQQHRLKNIHRRKPIFSHSSHTQGSGPLPDTERRDYEEEIERLKCDNAALTSELEKNAQKKLVTEKRMQDLEDKLIFLEDRQKNLMAYVRDIVQAPGSFSSFVQQPDHHGKKRRLPVPISLYQDSNAKGNQVVHGSFITNPPACRESFDKTESSLNSLENFLREASEAFNISYDDGLPGLHLLSLSQSSIRPEKVIPMCHHLSQECIHLRLVREIRSLPAI

SEQ ID NO: 6638 - protein, 308 aa, Zea mays; identical to SEQ ID NO: 6637

SEQ ID NO: 6639 - protein, 339 aa, Zea mays
  unsure (1)..(339): unsure at all Xaa locations
SKNTFLSAAPLLTALRCLMASPAAGTPPFLTKTYAMVEDSATDDTISWNDTGTAFVVWRPAEFARDLLPKHFKHSNFSSFVRQLNTYGFKKVVGDRWEFANDGFRRGEKHLLAGIQRRKGTGAVAAVPVPGIPAGIPLPLSSPPTSSGGEPAVSSSPXAWXSTAGVSGAVAELEEENARLRRENARLARELARARRLCDGVRQLMARYDDDQGRGGDEDPADGDEXXHGGSGEGPSGPEVKPMLFGVPIGAKRLRGXXVVMETMXMXGEDNDEEPDEDDERQTVRKQGVKAARRNEASDLDVLTLSVRAAAAARTGGGSRDRKSPITAHPDRSLSLGLK

SEQ ID NO: 6640 - protein, 152 aa, Zea mays
  unsure (1)..(152): unsure at all Xaa locations
MVKSTDGGGGSSSSSSVAPFLRKCYDMVDDSTTDSIISWSPSADNSFVILDTTVFSVQLLPKYFKHSNFSSFIRQLNIYGFRKVDADRWEYANDGFVRGQKDLLKNVIRRKNVQSSEQSKHESTSTTYAQEKSGLWKEVDILKGDKQVLAQX

SEQ ID NO: 6641 - protein, 419 aa, Zea mays
  unsure (1)..(419): unsure at all Xaa locations
MGFTKRSPQHPASPAGGEVGAQTAGKVTPVPAAPESAPVAVVPRPPDVAPFLTKVYDMVSDPATDAVISWSAGGGSFVIWDSHAFERDLLPRHFKHNHFTSFIRQLNTYGFHKVDPDRWEWANEGFVKGQKHLLKTIKRKKKSSQDVPSDLQSVPVKTAPGTENIEIGKYGGLEKEVETLKRDKALLMQQLVDLRQYQQSSSXAEVQNLIQRLRVMEQNQQQMMALLAIVVQNPDFLNQLVQQQRRSNWWNDDGNRKRRFQALEHGPVDDQETSGGGAQIIQYRPPVPETSNQPIPANEAFYSTPAQPASSPALEMPMDVEMTSNNVDTFDSTGNDFTDTSALCEWDDMDXXFGDELEHILQQPEQDFQVDPPLTVEDYGYDHPRLEQDCQMEAQQNCKNPQYVACVLKQRESHASDVH

SEQ ID NO: 6642 - protein, 377 aa, Zea mays
  unsure (1)..(377): unsure at all Xaa locations
MDSTLNQVKEESHGEGGDLMAGTVEAADGPSAAVAAAPKPMEGLHDPGPPPFLTKTYDMVDDSDTDLIVSWSATNNSFVVWDPHAFATVLLPRHFKHNNFSSFVRQLNTYGFRKVDPDRWEFANEGFLRGQRHXLLRNIRRRKPPAQNATNQQSIGPGLEVGHFGYDAEIDMWKRDKQLLMAEVVKLRQEQQNTKANLKAMEDRLQGTEQKQQQMMAFLARVMRNPEFLKHLVSQNEMRKELQDAISKKRRRRIDQGPEADDLGASSSLEQGSPVLFNAQDPVEFLVDGIPADLESPAFDGHGLIGPHDIDIDIDIGSTSEQQQDMPQEDLNDNFWEQLLNEGLGEENDSPVIEDXXMNVLSEKMGYLNSDGPTSSN

SEQ ID NO: 6643 - protein, 406 aa, Zea mays
  unsure (1)..(406): unsure at all Xaa locations
MSHGNGMLNSVKVERWPAAVAANGQPRPMDVLHDGSSPPFLTKTYDMVDDPTTNAVVSWSAANNSFXXWDPHIFGTVLLPRYFKHNNFSSFVRQLNTYGFRKVDPDRWEFANEEFLRGQRHLLKNIRRRKPPHSSPNQQSLGSYLEVGHFGYEEEIDQLKRDKQLLMAEVVKLRQEHQNTRSDLQAMEEKLQDTEQKQQQMMAFMARVMQNPDFMRQLISQREMRKELEDAISKKRRRRIDQGHEAGSMGTGSSLEQGPQGVFEPQEPVESVANGVPSDLESSSVEAKGLXXVRQGVSSGGSEHLNGRPSXXELNDDFWEDLLHEGGLGDVSLPQLKQHGPRHXPLLCYDNGCDSVSIFTVMLVISLWCTCFDRSSSTKCHVDCSLQLLIQSVQHADLSIWVKMFI

SEQ ID NO: 6644 - protein, 300 aa, Zea mays
  unsure (1)..(300): unsure at all Xaa locations
MVEEGATAAASRSGPAPFLSKTHQMVEEPGTDEVISWAEQGRSFVVWKPVELARDLLPLHFKHCNFSSFVRQLNTYGFRKVVPDRWEFANENFRRGEQGLLSGIRRRKSTTPQPSKYGGGSVVNTAFPPPLPFPPPASVTTSGGGGGAGAGNERSSSSASSPPRTXXDLTSENEQLKKDNRTLSTELAQARRHCEELLGFLSRFLDVRQLDLGLLMQEDVRAGAGDDAAPRRAMVSQLERGGEEGKSVKLFGVLLKDAARKRARCEEAAASERPIKMIRIGXXPWIGVPSSGPGRCGGGN

SEQ ID NO: 6645 - protein, 354 aa, Zea mays
  unsure (1)..(354): unsure at all Xaa locations
MDKPVAPGIIKEELLEQQPPSGDAPRPMEGLHEVGPPPFLTKTFDLVEDPATDAVLSWSRAGNSFIVWDPHVFADGLLPRLFKHSNFSSFVRQLNTYGFRKVDPDRWEFANEGFLRGQRHLLKMIKRRKPPSAVAPLRQQRAPASCLEVGEFGFEEEIDRLKRDKNILITEVVKLRQEQQSTKDHVRAMEERLRVAEQKQVQMMGFLARAMRNPEFFQQLAQQQDKRKELEDTISKKRRRPIDNTPFYSDGESEQLDSXXLKMFESGVLNGLNEXXELENLAVNIQELGKGSIDDGNLXXQVSDQSELNDDFWAELLVEDFGDKAGQPELEXXRTEDVNDLAQQLGYLSSSSPK

SEQ ID NO: 6646 - protein, 239 aa, Zea mays
  unsure (1)..(239): unsure at all Xaa locations
MDKPVAPGIIKEELLEQQPPSGDAPRPMEGLHEVGPPPFLTKTFDLVEDPATDAVLSWSRAGNSFIVWDPHVFADGLLPRLFKHSNFSSFVRQLNTYGFRKVDPDRWEFANEGFLRGQRHLLKMIKRRKPPSAVAPLRQQRAPASCLEVGEFGFEEEIDRLKRDKNILITEVVKLRQEQQSTKDHVRAMEERLRVAEQKQVQMMGFLARAMRNPEFFQQLAQQQDKRKELEDTKKKKKX

SEQ ID NO: 6647 - protein, 177 aa, Zea mays
  unsure (1)..(177): unsure at all Xaa locations
IPCFSPRYAIRNLPEGCFATLPSVPSNGXSSGQICAVGGGDGAMGXAGRGRFLLRDACSGGGGDXGVGQRSLPTPFLNKTYQLVDDPAVDDVISWSEDGSAFIVWRPAEFARDLLPKYFKHNNFSSFVRQLNTYGFRKIVPDRWEFANDCFRRGEKRLLCDIHRRKVTPTVSPLHPL

SEQ ID NO: 6648 - protein, 298 aa, Zea mays
  unsure (1)..(298): unsure at all Xaa locations
MGEAASAVAASKRGGGGPAPFLTKTHQMVEERGTDEVISWAEQGRSFVVWKPVELARDLLPLHFKHCNFSSFVRQLNTYGFRKVVPDRWEFANDNFRRGEQGLLSGIRRRKSTAPKSGSGGSGGVNATFPPPLPPPPPASATTSGVHERSSSSASSPPRAXXDLASENEQLKKDNHTLSVELAQARRHCEELLGFLSRFLDVRQLDLRLLMQEDVRAGASDDGAQRRAHAVASQLERGGGEEGKSVKLFGVLLKDAARKRGRCEEAAASERPIKMIRVGXXPWVGVPSSGPGRCGGEN

SEQ ID NO: 6649 - protein, 294 aa, Zea mays
  unsure (1)..(294): unsure at all Xaa locations
MDGLHTELALGLLECGVVGSGGETAPFVAKTYQMVCDSRTDALVRWGRGNNSFVVADPAGFSRLLLPCFFKHSNFSSFVRQLNTYGFRKVHPDRWEFAHESFLRGQTHLLPRIVRRKKRGGGGGACSSGGDAPQAGCCISTMGEDHRPEADPDEKQEADAEAALLEEVQRLRQEQTAIGEELAQMSRRLQATERRPDQLMSFLDRLAEDPDGVTRNLVEQAAEKKRRRMQLAFQSQPARPPLPPAPPPPVLHPLLALAGAAANPLDGWQWAEVXXKPSVVLPAFDFDPAARGIX

SEQ ID NO: 6650 - protein, 238 aa, Zea mays
  unsure (1)..(238): unsure at all Xaa locations
LASFSEWFLSQSGFTKWVGFFPRATFLTVSLLVSSRFPSSSRWGGIKFSNPQTKLPEGFFLRTFHFHPTRLALSRIGKSPAQIQPGCGAGRMAEQGGAAGEAAGSDPPXACACDCPGASPSACCGRGXGQRSLPTPFLTKTYQLVDDPAVDDVISWNEDGSTFVVWRPAEFARDLLPKYFKHNNFSSFVRQLNTYGFRKMVPDRWEFANDFFRRGEKRLLCDIHRRKVAPAPAAGLAT

SEQ ID NO: 6651 - protein, 239 aa, Zea mays
  unsure (1)..(239): unsure at all Xaa locations
MLRDRKLPESTSTTFLSLSHSSCATVHPSPIRGAAMVAEQATTTVAVGEPPTATPQPAAAAAAGQRSVPTPFLTKTYQLVDDPAVDDVISWNDDGSAFIVWRPAEFARDLLPKYFKHNNFSSFVRQLNTYGFKKIVPDRWEFANDCFRRGEKRLLCDIHRRKVTPPAAAATVVATIPMALPVDSPVYSGEEQVLSSSSSPXAPVAAAAXQPTPSALVSGDLGEENERLWWENAWFAREX

SEQ ID NO: 6652 - protein, 94 aa, Zea mays
SPPFLTKTYDMVDDPTTNAVVSWSAANNSFVVWDPHIFGTVLLPRYFKHNNFSSFVRQLNTYGFRKVDPDRWEFANEEFLRGQRHLLKNIRRRK

SEQ ID NO: 6653 - protein, 213 aa, Zea mays
  unsure (1)..(213): unsure at all Xaa locations
MEVAGAREPGSGGGGGGGGGGPAPFLLKTYEMVDDPSSDAVVSWSDASDGSFVVWNQPEFAARMLPTYFKHNNFSSFIRQLNTYGFRKIDPERWEFANEYFVKGQKHLLKNIHRRKPIHSHSHQPGALPDNERALFEDEIDRLSREKAALQADLWKFNQQQSGAVNQLEDLERRVLDMEQRQTKMLSFLQQARKNPQFGRKLVKMAEESPIFX

SEQ ID NO: 6654 - protein, 301 aa, Zea mays
  unsure (1)..(301): unsure at all Xaa locations
MHRARPTAHANDPDAPYAAAAAMLLEPKLEDEELPLQQLASPGTFVSLDQLMPPVTAPAEGTLGSPRPLEALLHGPQLPPFLSKTYDLVNEPSLDGVISWGAAGNSFVVWDPSTFARDVLPHNFKHNNFSSFVRQLNTYGFRKVHADRWEFAHEDFLRDSKHLLKRIVRRRSSPTKQCSVQPASSGESSLDPELHTLRREKNALLEEVARLKQEHRQTIEQMSTLNHRLESAEDRQRQMVSFLAKLLQNPSFVRKLKLHREKKEIDSTRVKRKFLKHVPHGSVESGESSMSNGIKKIRSQX

SEQ ID NO: 6655 - protein, 372 aa, Zea mays
  unsure (1)..(372): unsure at all Xaa locations
XRKLTDKIIMVTNPSPAAEETPPSTWELGSTNLHPLAAGSSSGGGGGGGGGGPAPFLLKTYEMVDDPSSDAVVSWSDASDGSFVVWNQPEFAARMLPTYFKHNNFSSFIRQLNTYGFRKIDPERWEFANEYFVKGQKHLLKNIHRRKPIHSHSHQPGALPDNERALFEDEIDRLSREKAALQADLWKFNQQQSGAVNQLEDLERRVLDMEQRQTKMLSFLQQARKNPQFVRKLVKMAEESPIFADAFHKKRRLPGLESDATGTATSFFDDHSSSSRQEMGNLLNQHFSDKLKLGLCPAXGGNNLITLSTQSSHEDNGSPLGKHPDYERTGMECLPLVPQMMELSDTGTSICPSKMYIIPHSKVVRISRNVSX

SEQ ID NO: 6656 - protein, 421 aa, Zea mays
  unsure (1)..(421): unsure at all Xaa locations
SYQPWFLFHPSFLSSLSLSPRAHGARQPDPRVHRRHGRRACHRRGGXAASRHVAAGGGRDGGGGXQRSVPTPFLSKTYQLVDDPAVDDIISWNDDGSAFIVWRPAEFARDLLPKYFKHNNFSSFVRQLNTYGFRKIVPDRWEFANDCFRRGEKRLLCDIHRRKVSPATGAVTVAAAAAAAIPMALPVGSPVYSGEEQVLSSSSPXAPVAAAAPAGAVRVGXSGGVVSGDVGEENERLRRENARLARELGQMKKLCNNILLLMSKYAATQQPDAXPRRRPPGTAPASRRMPPRRLRSLRSSGTDHEDDEKAGARLFGVSIGRKRMRDESDHHAGVCAAEVKAEPVDARPDQQRQRNAXRSRSRGPFTGPGLCTTRSGPATARAALGATTTGPTTRGDGSNRRSALSKLVLHLLMVLGNYITG

SEQ ID NO: 6657 - protein, 354 aa, Zea mays
  unsure (1)..(354): unsure at all Xaa locations
MDKPVAPGIIKEELLEQQPPSGDAPRPMEGLHEVGPPPFLTKTFDLVEDPATDAVLSWSRAGNSFIVWDPHVFADGLLPRLFKHSNFSSFVRQLNTYXLQKVDPDRWEFANEGFLRGQRHLLKMIKRRKPPSAVAPLRQQRAPASCLEVGEFGFEEEIDRLKRDKNILITEVVKLRQEQQSTKDHVRAMEERLRVAEQKQVQMMGFLARAMRNPEFFQQLAQQQDKRKELEDTISKKRRRPIDNTPFYSDGESEQLDSXXLKMFESGVLNGLNEXXELENLAVNIQELGKGSIDDGNLXXQVSDQSELNDDFWAELLVEDFGDKAGQPELEXXRTEDVNDLAQQLGYLSSSSPK

SEQ ID NO: 6658 - protein, 330 aa, Zea mays
RRSSTWTSTSPARLRRRRRRPRGPSPSEMPRPMEGLGEVGPTPFLTKTYDVVDDPNTDTIVSWGFAGTSFVVWDANAFALVILPRYFKHSNFSSFVRQLNTYGFRKVDPDRWEFANEGFQRGQRELLRTIKRRRPPSSPSAQQGQAPSACLEVGQFGLDGEVHRLQRDRGILLAEVVKLRQEQQATRAQMQAMEKRITTAEQKQQQMTVFLARAMKNPSFIRMLVDREGRRRELEDALSRKRRRPIDLVPPARRREKRHCHGVGGERLHFRTSGRRQRRGGGGRRRETVGEKGRRRRRRGHGELLGEVAQPRPGGEAQGGQMRWRGGERS

SEQ ID NO: 6659 - protein, 140 aa, Zea mays
  unsure (1)..(140): unsure at all Xaa locations
MDGLHTELALGLIGCGHGDLQTAPFVAKTYQMVCDPRTDALVRWGKGNNSFLVTDVAGFSQLLLPCFFKHGNFSSFVRQLNTYGFRKVHPDRWEFAHESFLRGQTHLLPRIVRRKKRGEGXGAGASCSSAVGGGEQHQHX

SEQ ID NO: 6660 - protein, 310 aa, Zea mays
  unsure (1)..(310): unsure at all Xaa locations
MAFLVERCGEMVVSMESPHAKPVPAPFLTKTYQLVDDPCTDHIVSWGDDDTTFVVWRPPEFARDLLPNYFKHNNFSSFVRQLNTYGFRKIVADRWEFANEFFRKGAKHLLAEIHRRKSSQPLPTPLPPHQPYHHHHHHLHHHLSPFSPPPPQPVPSYHHHFQEEPIATATAPHGGGAGAGGDFLAALSEDNRQLRRRNSLLLSELAHMKKLYNDIIYFLQNHVAPVTSPSSXXAHASLPSAGGGGAAASSCRLMELDPADXXPSPPRRPEADDGTDTVKLFGVALQGKKKKRAHQEDGDDGNHEQGSSDV

SEQ ID NO: 6661 - protein, 94 aa, Zea mays
LAPFLTKVYDMVSDPATDAVISWSAGGGSFVIWDSHAFSARPLPRHFKHNHFTSFIRQLNTYGFHKVDPDRWEWANEGFIKGQKHLLKTIKRKK

SEQ ID NO: 6662 - protein, 184 aa, Zea mays
  unsure (1)..(184): unsure at all Xaa locations
MDPMPTLVKEEEDGHGTGESPGATAASRPVKGLRDARPSLFLTKTYDMVDDRSTDDVVSWSAGNNSLVVWDLHHFSTVLLPRHFKHSNFSSFVKQLNTYGFRKVDPDRWEFANEGFLRXQRHLLKNIRRRRPPANTASNQQSLGSYLEVGHFGKSSDTDQLKRDKQLLMAEVVKAKAEQQSMKT

SEQ ID NO: 6663 - protein, 200 aa, Zea mays
  unsure (1)..(200): unsure at all Xaa locations
MDGLHTDLALGLLGCGGGGEQLQTAPFVAKTYQMVCDPRTDALVRWGSENNSFVVVDPAGFSRLLLPCFFKHRNFSSFVRQLNTYVSAPVSEARGFRKVHPDRWEFAHESFLRGQTHLLPRIVRRKKRGEGXXCTSSGGDAQAQYAAAAAGCCISMGGEDHRTEGEAEAAVLEEVQRLRQEQTAIGEELAQMSRRLQACX

SEQ ID NO: 6664 - protein, 224 aa, Zea mays
  unsure (1)..(224): unsure at all Xaa locations
SARGPPQQTFVHASTPAGSEGGDGEVRELGLRRGGSAXKAVPAPFLTKTYQLVDDPATDHIVSWGDDRVSTFVVWRPPEFARDILPNYFKHNNFSSFVRQLNTYGFRKVVPERWEFGNEFFRKGEKQLLCEIHRRKTSTSAAPPSPPPFFAAPHFPLFHXGRPAPPPPPPVRGPRGCXPWARLLRRRRPRCRPPMPAEXGRAAVLVEENERLRRSNAALLQACX

SEQ ID NO: 6665 - protein, 369 aa, Zea mays
  unsure (1)..(369): unsure at all Xaa locations
SQSYRPPQQTFVHASTPAGSEGESDGEVRELGLRRGGSAXKAVPAPFLTKTYQLVDDPATDHIVSWGDDRVSTFVVWRPPEFARDILPNYFKHNNFSSFVRQLNTYGFRKVVPERWEFGNEFFRKGEKQLLCEIHRRKTSTSAAPPSPPPFFAAPHFPLFHXGRPAPPPPPPVRGPRGCXPWARLLRRRRPRCRPPMPAEXGRAAVLVEENERLRRSNAALLQELAHMRKLYNDIIYFVQNHVRPAAPSPAAAAFLQGLGLQARKKPAAGPLNHSGGSTTSSSSLTIADSPPPPPQQADKSAGSSGTARSAADRAPPTMLFGVHLSAAREDDQSPTSPAGKPRLALECAGLSLAVAVPSAGASSPASTS

SEQ ID NO: 6666 - protein, 229 aa, Zea mays
  unsure (1)..(229): unsure at all Xaa locations
RLCCCWDQRGSLVTTTTLLSLRXLMDSNRSMATSGVAPFVAKTYRMVDDPATDGVVAWGRDNNSFVVADPFAFSQTLLPAHFKHSNFSSFVRQLNTYGFRKVDPDRWEFAHVSFLRGQTHLLGQIVRRSSXRQAQGRRQRRRRXGSADDEDAVAMEVVRLRREQRAIEEQVAAMWRRVQETERRPKQMLAFLVKVAGDPQVLRRLFLVVERVSNQKSLTDKKKKKKKKK

SEQ ID NO: 6667 - protein, 256 aa, Zea mays
  unsure (1)..(256): unsure at all Xaa locations
CEAVLSVAEGRKDKARQLMAAGGGGGSAAPFVWKTYTMVEDPGTAGVIGWGSGNNSFVVADPFVFSQTLLPAHFKHNNFSSFVRQLNTYGFRKVDPDRWEFAHASFLRGQTHLLRNIVRRGSSAAGAGGGKRKDASPTELWCLKQEQRAIDDRVASMWRRVQETERRPKQMLAFLLKVVGDRDRLHRLXRRRPRARXRVRLRRCRRAARRGGRREAGQAAARRSAWWRSVPRPSTSPGSTAAAVRSAMLPGWMIMM

SEQ ID NO: 6668 - protein, 315 aa, Zea mays
  unsure (1)..(315): unsure at all Xaa locations
MAFLVERCGEMVVSMESPHAKPVPAPFLTKTYQLVDDPCTDHIVSWGDDDXXTFVVWRPPEFARDLLPNYFKHNNFSSFVRQLNTYGFRKIVADRWEFANEFFRKGAKHLLAEIHRRKSSQPLPTPLPPHQPYHHHHHHLHHHLSPFSPPPLAQPVPSYHHHHXXQEEPIATATAPHGGGAGAGGDFLAALSEDNRQLRRRNSLLLSELAHMKKLYNDIIYFLQNHVAPVTSPSSXXAHASLPSAGGGGAAASSCRLMELDPADSPSPPRRPEADDGTDTDTVKLFGVALQGKKKKRAHQEDGDDGNHEQGSSDV

SEQ ID NO: 6669 - protein, 205 aa, Zea mays
  unsure (1)..(205): unsure at all Xaa locations
CEAVLSVAEGRKDKARQLMAAGGGGGSAASFVWKTYTMVEDPGTAGVIGWGSGNNSFVVADPFVFSQTLLPAHFKHNNFSSFVRQLNTYGFRKVDPDRWEFAHASFLRGQTHLLRNIVRRPHGAGLRGRHDHGGHXEVVRLKQEQRAIDDRVASMWRRVQETERRPKQMLAFLLKVVGDRDRLHRLVGDAPLFSQSQKKKKKKKX

SEQ ID NO: 6670 - protein, 216 aa, Zea mays
  unsure (1)..(216): unsure at all Xaa locations
MAFLVERCGEMVVSMESPHAKPVPAPFLTKTYQLVDDPATDHIVSWGDDRVSTFVVWRPPEFARDILPNYFKHNNFSSFVRQLNTYGFRKVVPERWEFGNEFFRKGEKQLLCEIHRRKTPHFPLFHPDAPHHHHHHHSWGEETTGLWRPRTSAASASPSRSRTRIVGGSRRTPPPGSHAAASPGRGSSGAVGRAAVLVEENERLRRSNAALLQACX

SEQ ID NO: 6671 - protein, 276 aa, Zea mays
  unsure (1)..(276): unsure at all Xaa locations
ALHRERNGNWGIGILTLLCVLSSKLRAMGSECKGYGVGVAXQPAAGAGAGWRXAVAPFVAKTFHMVSDPATDAVVRWGGASNTFHVLDPATFSDYLLPSYFKHRNFASFVRQLNTYGFRKVDTDRWEFAHESFLRGQARLLPLVVRKRKKAGAGAGAGGRELCEAGEEVRGTIRAVQRLREQQRGVEDELRAMDRRLRAAESRPAQMMAFLAKLADDPGLVLRAMLAKEEELALIDKGSEEPAKRRRIGAEAVDLAHSRGGGAVPFPFSVLGQVFY

SEQ ID NO: 6672 - protein, 207 aa, Zea mays
  unsure (1)..(207): unsure at all Xaa locations
CEAVLSVAEGRKDKARQLMAAGGGGGSAAPFVWKTYTMVEDPGTAGVIGWGSGNNSFVVADPFVFSQTLLPAHFKHNNFSSFVRQLNTYGFRKVHPDRWEFAHASFLRGQTHLLRNIVRRPHGAGLRGRHDHGGHXEVVRLKQEQRAIDDRVASMWRRVQETERRPKQMLAFLLKVVGDRDRLHRLPFSKKKKKKKKKLEGXXARVX

SEQ ID NO: 6673 - protein, 107 aa, Zea mays
  unsure (1)..(107): unsure at all Xaa locations
KDERRRRHGVXSGSGGTVAPFVAKTFAMVDDPATDAVVRWGPPSNSFVVADPFAFSHALLPAHFKHANFSSFVRQLNTYGFRKVDPDRWEFAHASFLRGQTHLLPRX

SEQ ID NO: 6674 - protein, 147 aa, Zea mays
  unsure (1)..(147): unsure at all Xaa locations
MDKPVAPGIIKEELLEQQPPSGDAPRPMEGLHEVGPPPFLTKTFDLVEDPATDAVLSWSRAGNSFIVWDPHVFADGLLPRLFKHSNFSSFVRQLNTYLDGTRYWMNRRLYXPPSHAIGFRKVDPDRWEFANEGFLRGQRHLAEMIKX

SEQ ID NO: 6675 - protein, 393 aa, Zea mays
  unsure (1)..(393): unsure at all Xaa locations
MELMLPVTVKEEWPPEEEEEEEAPRPMEGLHEVGPPPFLTKTFDLVADPATDEVISWGRAGNSFVVWDPHVFAAVLLPRFFKHNNFSSFVRQLNTYVSAPSTLLAQLLSFIALRLQGFRKIDPDSWEFANEGFLRGQRHLLRLIKRRRPAPPPPYLQASQSQGSCLEVGRFGGLDGEMERLRRDKSILLAEVVKLRQEQQSTRADMRAMEERLRHAEHKQVQMMGFLARAVQSPDLFQLLAQQQGRRRELEGAALLSAASRKRRRPIGAAPANGGLQQQEEEQQQGXTTTTPPPRGRXFAELDERGTTSELENLALNIQGLGKRRQDGSESRARSQQQGGFETAELTDDFWEELLNEGMKGGAALPPERRRPAWYVDALAQKLSSMSNNTTAK

SEQ ID NO: 6676 - protein, 609 aa, Schizosaccharomyces pombe
MIQTASTISSNGGTNQGMESSSANSPEMHGTQNSMSVGMSGSGSSQNRKITQFSNKLYNMVNDSSTDSLIRWSDRGDSFLVIGHEDFAKLVLPRYFKHNNFSSFVRQLNMYGFHKVPHIQQGVLQSDSPNELLEFANPNFQRDQPELLCLVTRKKAGSQPVEESNTSLDMSTISSELQNIRIQQMNLSNELSRIQVDNAALWQENMENRERQRRHQETIDKILRFLASVYLDGKQKPPSKVMPKSRRLLLEAKYPTVSPTNEPSAHSRPSPQGTTANSSSASISSLHNTTPDGEGKYRSVQNGRALNYVSSFNSDSHSPKDYISQSYTNEPGLKKESADSFNNSIDSYISPNQSPNTDVPSLNRDDTTDPKVVNTGDIINMLDDANSIEGSNMNSLSPLLFDYPNSLYPVNNTSSEQHHNSYRGSVSNSQPSGNLSESTNLQPVQPVDYMSNSNPSYGSYNAEDQLTNFHPGYAMDQKRISKLSDGITKQDQNIQALADILGIPLGDGKIDDAGFSANSPTNLNLPVSSDLDSVLNIPPNEDVFPDSNPVFDEFTNISNLTSPIEASNGNTFGSNPVSLPNQQKSVNPSLMTVSSPRQVRKKRKSSIGA

SEQ ID NO: 6677 - protein, 609 aa, Schizosaccharomyces pombe
MIQTASTISSNGGTNQGMESSSANSPEMNGTQNSMSVGMSGSGSSQNRKITQFSNKLYNMVNDSSTDSLIRWSDRGDSFLVIGHEDFAKLVLPRYFKHNNFSSFVRQLNMYGFHKVPHIQQGVLQSDSPNELLEFANPNFQRDQPELLCLVTRKKAGSQPVEESNTSLDMSTISSELQNIRIQQMNLSNELSRIQVDNAALWQENMENRERQRRHQETIDKILRFLASVYLDGKQKPPSKVMPKSRRLLLEAKYPTVSPTNEPSAHSRPSPQGTTANSSSASISSLHNTTPDGEGKYRSVQNGRALNYVSSFNSDSHSPKDYISQSYTNEPGLKKESADSFNNSIDSYISPNQSPNTDVPSLNRDDTTDPKVVNTGDIINMLDDANSIEGSNMNSLSPLLFDYPNSLYPVNNTSSEQHHNSYRGSVSNSQPSGNLSESTNLQPVQPVDYMSNSNPSYGSYNAEDQLTNFHPGYAMDQKRISKLSDGITKQDQNIQALADILGIPLGDGKIDDAGFSANSPTNLNLPVSSDLDSVLNIPPNEDVFPDSNPVFDEFTNISNLTSPIEASNGNTFGSNPVSLPNQQKSVNPSLMTVSSPRQVRKKRKSSIGA

SEQ ID NO: 6678 - protein, 787 aa, Neurospora crassa
MSSPNPRKRPAPGASPVVPLPLQQMPQQFTPGPADQVFRWNNPPDAAAAPLNSFGMISTQAPFPQPIPAPSTALARRPPSRALVTTNQFNGTTDTWASFSDDAAYPLGHNVPPMDEHDNIERLEEMAQRAKREAQAKRKQIPPFVQKLSSFLDESRNTDLIRWSDKGDSFIVLDEDEFAKTLIPELFKHNNYASFVRQLNMYGFHKRVGLSDNSMKASERKNKSPSEYYNPYFRRGHPNLLWLINKPKSGGKGNKPNKTTPKAEGEADSEEDAGGEDPYAGQNYSSAQVGRGSSGAGEVGPLHKKDLVAVKSQLDRLQQQQVAISSLLQKIRAEHTTLFQQALTFQNQHERHENSINAILNFLANVFRKSLEEQGGTQSVQDLLASIIPNAQVHNQNQMPQANVVDLGGFVNHQVHNNTSMGTPKRQQRLLPPIPQQGVAKVHSLASSASPAPVHPQYQAQQMGSVTELFDTTPGDSPSSTFMKNKLQNNPQEGMMKLIQDTNAVSASGGVDLPDMATKTHVNALSNDQRNKMLSIMAGNLPSTNGSSPAPSPTVPAVPTPTATMPPVSTIPTVPVTTAAAPPTPVVPNHAAPNALSPALGSMPPPPPFPSYSHEELDALQRLQEEQASQIDRLTSLLGPLSPSGRIPGIDEHGNPNSAAGYFDSTDIEQYLNDNAFSDPAYEFSGLPGANGTGDGASDFNFNLDDGFDLTNPTHTGATPTPNGGTATTAGTSNTGGLSVPGGGFDSGRIFEHNSPVNTPSPSAATEEISKNDLESPERDPKRRRKG

SEQ ID NO: 6679 - protein, 728 aa, Candida tropicalis
MSKKSNSTNNPGDPRVKKNAFVHKLYTMLNDPNLSHLIWWTTNNVEGNTFALYPGKEFANCLTRYFKHGNVASFVRQLHMYGFHKVSDPHNSSSSSSALSINHINSPYSMNIVHQHQNNAGGAHNNKDVPPIWEFKHSSGKFKKGDEKSLALIKRRSSSNSSSGSRNNSYNETLTLQNHVHPVPQQPMYQEYPIPQQNITYDPYNLNMNFQQQQPPPPPPQPFMYYNNQPQPVPPPLPPPPPLAANQQQLPTPQFVYGQPYFQYPGSIIPPQSQPQPVPQPPPQAAAPPVPSGVTQFTNFSQFPSPSPQQPISQMMNLQPSQNSASNTPQIQQPTPQHVEPPTKRQDCTPDHVKLESLSKSPHQNSAGYNATLQFRKIWDDNNGPVARQRNPSLLYDPLTTIPPTTTPQQQSKSNEGSSSESILPPPSQLNRSSSLNSVPLPLTSSQPSIMAATPPEMFRRSTTPLLHSLSHSSYNNGNTTSRLSNSIPRNSSPLALSSTTAESTPTPNIVSSSSSQPSTSSGLNIPNVTKKPSLFSSSLQERLRPSVFDIHHNHNHQSGIKSPSTIQDTYSKKNSIVSNTSSIFSNKSSISSIASTNQHGINNNRPSLSSITNSHVKEEVEEEVKREEIVIKNGKSILNNDNSKSWTPMNGNASVAQDREQRSLTESPNLKSEICVPENKKVSVNSLLKDDDNEDKTKMGAKNHHLDFNDNNEVHKSRIVTIEKEEN

SEQ ID NO: 6680 - protein, 185 aa, Guillardia theta
MSEKSNLAPFIKKLYQLVNDPMTNDYICWEKNETCFIVNKPTELSVYILPRYFKHNNFSSFVRQLNQYGFHKLEPNEWVFGHPYFKGGDKLKLSSIKRKKQWSSQKNVSVDFYNNEIFKKLIYELDTLKKYKQVLTKDILDVCRRQERFLIKQQSIETKIKKIEEELNNLKYLVFGYFGKILKSN

SEQ ID NO: 6681 - protein, 643 aa, Schistosoma mansoni
MYGFTSGPPVQSIPAFLTKLKLLVDDEETNELIYWDPHGTSFHIRDGNRLAKELLPLYFKHNNLSSFIRQLNMYGFRKINRVDPSLPLKSDTEDMEFSHPYFIRNKDILLSKIQRRTSNMFSPIMGSRNQSFGVKVPYVQANSGLNGSISVSPQRPITATDFLRLAETVRHLRCNQETLSQQISVLKSENQLLYRELSDLREHHDKQSQLIQTLFTFLSAFAKEGRSASVCIGQTKRKALPSITPSGSRLQNKELKLDLRKGFQIERNSVQPLQLVQTSDLLGSHKRPKFDIRNLSAKIGNTSSGANITDQISDIGSVVHILPSNLQLTPVSLECDVNTQSLVDKNPVNVQDGPRYYLSKVDDNFTHPTNDEEFPVGLNVEEDGVTDVNNSILELNWPCSRSDTPYCLTDSPGLSDVIPSKLDGVTDESICDLLLNGDSQTEQEVGNNQPFSESTLSKYKKEPIRKQHKIQNRPRCIAPFAESDPQFVSTTLQDIDSLPWEKYQDSGFDFNLDVEQNQTENSRSSSNGLIVGNEIIPVEPANLNACDDVIQFLRSEIPGKKLKSDEPLKTVATTEAHASTQNGAIDLTSSSSAPTTWKARLSANNRLTISSSPKVKRKQVPVLIRRQSITPLSTPDFCEEELE

SEQ ID NO: 6682 - protein, 520 aa, Schistosoma mansoni
GFTSGPPVQSIPAFLTKLKLLVDDEETNELIYWDPHGTSFHIRDGNRLAKELLPLYFKHNNLSSFIRQLNMYGFRKINRVDPSLPLKSDTEDMEFSHPYFIRNKDILLSKIQRRTSNMFSPIMGSRNQSFGVKVPYVQANSGLNGSISVSPQRPITATDFLRLAETVRHLRCNQETLSQQISVLKSENQLLYRELSDLREHHDKQSQLIQTLFTFLSAFAKEGRSASVCIGQTKRKALPSITPSGSRFQNKELKLDLRKGFQIERNSVQPLQLVQTSDLLGSHKRPKFDIRNLSAKIGNTSSGANITDQISDIGSVVHILPSNLQLTPVSLECDVNTQSLVDKNPVNVQDGPRYYLSKVDDNFTHPTNDEEFPVGLNVEEDGVTDVNNSILELNWPCSRSDTPYCLTDSPGLSDVIPSKLDGVTDESICDLLLNGDSQTEQEVGNNQPFSESTLSKYKKEPIRKQHKIQNRPRCIAPFAESDPQFVSTTLQDIDSLPWEKYQDSGFDFNLDVEQNQTENS

SEQ ID NO: 6683 - protein, 646 aa, Schistosoma mansoni
MYGFTSGPPVQSIPAFLTKLKLLVDDEETNELIYWDPHGTSFHIRDGNRLAKELLPLYFKHNNLSSFIRQLNMYGFRKINRVDPSLPLKSDTEDMEFSHPYFIRNKDILLSKIQRRTSNMFSPIMGSRNQSFGVKVPYVQANSGLNGSISVSPQRPITATDFLRLAETVRHLRCNQETLSQQISVLKSENQLLYRELSDLREHHDKQSQLIQTLFTFLSAFAKEGRSASVCIGQTKRKALPSITPSGSRLQNKELKLDLRKGFQIERNSVQPLQLVQTSDLLGSHKRPKFDIRNLSAKIGNTSSGANITDQISDIGSVVHILPSNLQLTPVSLGNDECDVNTQSLVDKNPVNVQDGPRYYLSKVDDNFTHPTNDEEFPVGLNVEEDGVTDVNNSILELNWPCSRSDTPYCLTDSPGLSDVIPSKLDGVTDESICDLLLNGDSQTEQEVGNNQPFSESTLSKYKKEPIRKQHKIQNRPRCIAPFAESDPQFVSTTLQDIDSLPWEKYQDSGFDFNLDVEQNQTENSRSSSNGLIVGNEIIPVEPANLNACDDVIQFLRSEIPGKKLKSDEPLKTVATTEAHASTQNGAIDLTSSSSAPTTWKARLSANNRLTISSSPKVKRKQVPVLIRRQSITPLSTPDFCEEELE

SEQ ID NO: 6684 - protein, 658 aa, Schistosoma mansoni
MYGFTSGPPVQSIPAFLTKLKLLVDDEETNELIYWDPHGTSFHIRDGNRLAKELLPLYFKHNNLSSFIRQLNMYGFRKINRVDPSLPLKSDTEDMEFSHPYFIRNKDILLSKIQRRTSNMFSPIMGSRNQSFGVKVPYVQANSGLNGSISVSPQRPITATDFLRLAETVRHLRCNQETLSQQISVLKSENQLLYRELSDLREHHDKQSQLIQTLFTFLSAFAKEGRSASVCIGQTKRKALPSITPSGSRLQNKELKLDLRKGFQIERNSVQPLQLVQTSDLLGSHKRPKFDIRNLSAKIGNTSSGANITDQISDIGSVVHILPSNLQLTPVSLGNDGKYIYSLTGSSPECDVNTQSLVDKNPVNVQDGPRYYLSKVDDNFTHPTNDEEFPVGLNVEEDGVTDVNNSILELNWPCSRSDTPYCLTDSPGLSDVIPSKLDGVTDESICDLLLNGDSQTEQEVGNNQPFSESTLSKYKKEPIRKQHKIQNRPRCIAPFAESDPQFVSTTLQDIDSLPWEKYQDSGFDFNLDVEQNQTENSRSSSNGLIVGNEIIPVEPANLNACDDVIQFLRSEIPGKKLKSDEPLKTVATTEAHASTQNGAIDLTSSSSAPTTWKARLSANNRLTISSSPKVKRKQVPVLIRRQSITPLSTPDFCEEELE

SEQ ID NO: 6685 - protein, 631 aa, Schistosoma mansoni
FLTKLKLLVDDEETNELIYWDPHGTSFHIRDGNRLAKELLPLYFKHNNLSSFIRQLNMYGFRKINRVDPSLPLKSDTEDMEFSHPYFIRNKDILLSKIQRRTSNMFSPIMGSRNQSFGVKVPYVQANSGLNGSISVSPQRPITATDFLRLAETVRHLRCNQETLSQQISVLKSENQLLYRELSDLREHHDKQSQLIQTLFTFLSAFAKEGRSASVCIGQTKRKALPSITPSGSRLQNKELKLDLRKGFQIERNSVQPLQLVQTSDLLGSHKRPKFDIRNLSAKIGNTSSGANITDQISDIGSVVHILPSNLQLTPVSLGNDECDVNTQSLVDKNPVNVQDGPRYYLSKVDDNFTHPTNDEEFPVGLNVEEDGVTDVNNSILELNWPCSRSDTPYCLTDSPGLSDVIPSKLDGVTDESICDLLLNGDSQTEQEVGNNQPFSESTLSKYKKEPIRKQHKIQNRPRCIAPFAESDPQFVSTTLQDIDSLPWEKYQDSGFDFNLDVEQNQTENSRSSSNGLIVGNEIIPVEPANLNACDDVIQFLRSEIPGKKLKSDEPLKTVATTEAHASTQNGAIDLTSSSSAPTTWKARLSANNRLTISSSPKVKRKQVPVLIRRQSITPLSTPDFCEEELE

SEQ ID NO: 6686 - protein, 671 aa, Caenorhabditis elegans
MQPTGNQIQQNQQQQQQLIMRVPKQEVSVSGAARRYVQQAPPNRPPRQNHQNGAIGGKKSSVTIQEVPNNAYLETLNKSGNNKVDDDKLPVFLIKLWNIVEDPNLQSIVHWDDSGASFHISDPYLFGRNVLPHFFKHNNMNSMVRQLNMYGFRKMTPLSQGGLTRTESDQDHLEFSHPCFVQGRPELLSQIKRKQSARTVEDKQVNEQTQQNLEVVMAEMRAMREKAKNMEDKMNKLTKENRDMWTQMGSMRQQHARQQQYFKKLLHFLVSVMQPGLSKRVAKRGVLEIDFCAANGTAGPNSKRARMNSEEGPYKDVCDLLESLQRETQEPFSRRFTNNEGPLISEVTDEFGNSPVGRGSAQDLFGDTFGAQSSRYSDGGATSSREQSPHPIISQPQSNSAGAHGANEQKPDDMYMGSGPLTHENIHRGISALKRDYQGASPASGGPSTSSSAPSGAGAGARMAQKRAAPYKNATRQMAQPQQDYSGGFVNNYSGFMPSDPSMIPYQPSHQYLQPHQKLMAIEDQHHPTTSTSSTNADPHQNLYSPTLGLSPSFDRQLSQELQEYFTGTDTSLESFRDLVSNHNWDDFGNNVPLDDDEEGSEDPLRQLALENAPETSNYDGAEDLLFDNEQQYPENGFDVPDPNYLPLADEEIFPHSPALRTPSPSDPNLV

SEQ ID NO: 6687 - protein, 662 aa, Drosophila melanogaster
MSRSRSSAKAVQFKHESEEEEEDEEEQLPSRRMHSYGDAAAIGSGVPAFLAKLWRLVDDADTNRLICWTKDGQSFVIQNQAQFAKELLPLNYKHNNMASFIRQLNMYGFHKITSIDNGGLRFDRDEIEFSHPFFKRNSPFLLDQIKRKISNNKNGDDKGVLKPEAMSKILTDVKVMRGRQDNLDSRFSAMKQENEVLWREIASLRQKHAKQQQIVNKLIQFLITIVQPSRNMSGVKRHVQLMINNTPEIDRARTTSETESESGGGPVIHELREELLDEVMNPSPAGYTAASHYDQESVSPPAVERPRSNMSISSHNVDYSNQSVEDLLLQGNGTAGGNILVGGAASPMAQSVSQSPAQHDVYTVTEAPDSHVQEVPNSPPYYEEQNVLTTPMVREQEQQKRQQLKENNKLRRQAGDVILDAGDILVDSSSPKAQRTSIQHSTQPDVMVQPMIIKSEPENSSGLMDLMTPANDLYSVNFISEDMPTDIFEDALLPDGVEEAAKLDANQASTSKAAAKAQASEEEGMAVAKYSGAENGNNRDTNNSQLLRMASVDELHGHLESMQDELETLKDLLRGDGVAIDQNMLMGLFNDSDLMDNYGLSFPNDSISSEKKAPSGSELISYQPMYDLSDILDTDDGNNDQEASRRQMQTQSSVLNTPRHEL

SEQ ID NO: 6688 - protein, 691 aa, Drosophila melanogaster
MSRSRSSAKAVQFKHESEEEEEDEEEQLPSRRMHSYGDAAAIGSGVPAFLAKLWRLVDDADTNRLICWTKDGQSFVIQNQAQFAKELLPLNYKHNNMASFIRQLNMYGFHKITSIDNGGLRFDRDEIEFSHPFFKRNSPFLLDQIKRKISNNKNGDDKGVLKPEAMSKILTDVKVMRGRQDNLDSRFSAMKQENEVLWREIASLRQKHAKQQQIVNKLIQFLITIVQPSRNMSGVKRHVQLMINNTPEIDRARTTSETESESGGGPVIHELREELLDEVMNPSPAGYTAASHYDQESVSPPAVERPRSNMSISSHNVDYSNQSVEDLLLQGNGTAGGNILVGGAASPMAQSVSQSPAQHDVYTVTEAPDSHVQEVPNSPPYYEEQNVLTTPMVREQEQQKRQQLKENNKLRRQAGDVILDAGDILVDSSSPKAQRTSIQHSTQPDVMVQPMIIKSEPENSSGLMDLMTPANDLYSVNFISEDMPTDIFEDALLPDGVEEAAKLDQQQKFGQSTVSSGKFASNFDVPTNSTLLDANQASTSKAAAKAQASEEEGMAVAKYSGAENGNNRDTNNSQLLRMASVDELHGHLESMQDELETLKDLLRGDGVAIDQNMLMGLFNDSDLMDNYGLSFPNDSISSEKKAPSGSELISYQPMYDLSDILDTDDGNNDQEASRRQMQTQSSVLNTPRHEL

SEQ ID NO: 6689 - protein, 106 aa, Drosophila melanogaster
  unsure (1)..(106): unsure at all Xaa locations
XSGVPAFLAKLWRLVDDADTNRLICWTKDGQSFVIQNQAQFAKELLPLNYKHNNMASFIRQLNMYGFHKITSIDNGGLRFDRDEIEFSHPFFKRNSPFLLDQIKRK

SEQ ID NO: 6690 - protein, 512 aa, Danio rerio
MEYHSVGPGGVVVTGNNVPAFLTKLWTLVEDPDTDPLICWSPNGTSFHVFDQGRFSKEVLPKYFKHNNMASFVRQLNMYGFRKVVHIEQGGLVKPEKDDTEFQHPYFIRGQEQLLENIKRKVTTVSNIKHEDYKFSTDDVSKMISDVQHMKGKQESMDSKISTLKHENEMLWREVATLRQKHSQQQKVVNKLIQFLITLARSNRVLGVKRKMPLMLNDSSSAHSMPKFSRQYSLESPAPSSTAFTGTGVFSSESPVKTGPIISDITELAQSSPVATDEWIEDRTSPLVHIKEEPSSPAHSPEVEEVCPVEVEVGAGSDLPVDTPLSPTTFINSILQESEPVFRPDSAPSEQKCLSVACLDKTELHDHLESIDSGLENLQQILNAQSINFDSSPLFDIFSSAASDVDLDSLASIQDLLSPDPVKETESGVDTDSGKQLVQYTSQPSFSPIPFSTDSSSTDLPMLLELQDDSYFSSEPTEDPTIALLNFQPVPEDPSRTRIGDPCFKLKKESKR

SEQ ID NO: 6691 - protein, 538 aa, Danio rerio
MEYHSVGPGGVVVTGNNVPAFLTKLWTLVEDPDTDPLICWSPNGTSFHVFDQGRFSKEVLPKYFKHNNMASFVRQLNMYGFRKVVHIEQGGLVKPEKDDTEFQHPYFIRGQEQLLENIKRKVTTVSNIKHEDYKFSTDDVSKMISDVQHMKGKQESMDSKISTLKHENEMLWREVATLRQKHSQQQKVVNKLIQFLITLARSNRVLGVKRKMPLMLNDSSSAHSMPKFSRQYSLESPAPSSTAFTGTGVFSSESPVKTGPIISDITELAQSSPVATDEWIEDRTSPLVHIKEEPSSPAHSPEVEEVCPVEVEVGAGSDLPVDTPLSPTTFINSILQESEPVFRPDSAPSEQKCLSVACLDNYPQMSEITRLFSGFSTSSLHLRPHSGTELHDHLESIDSGLENLQQILNAQSINFDSSPLFDIFSSAASDVDLDSLASIQDLLSPDPVKETESGVDTDSGKQLVQYTSQPSFSPIPFSTDSSSTDLPMLLELQDDSYFSSEPTEDPTIALLNFQPVPEDPSRTRIGDPCFKLKKESKR

SEQ ID NO: 6692 - protein, 497 aa, Danio rerio
MEYHSVGPGGVVVTGNNVPAFLTKLWTLVEDPDTDPLICWSPNGTSFHVFDQGRFSKEVLPKYFKHNNMASFVRQLNMYGFRKVVHIEQGGLVKPEKDDTEFQHPYFIRGQEQLLENIKRKVTTVSNIKHEDYKFSTDDVSKMISDVQHMKGKQESMDSKISTLKHENEMLWREVATLRQKHSQQQKVVNKLIQFLITLARSNRVLGVKRKMPLMLNDSSSAHSMPKFSRQYSLESPAPSSTAFTGTGVFSSESPVKTGPIISDITELAQSSPVATDEWIEDRTSPLVHIKEEPSSPAHSPEVEEVCPVEVEVGAGSDLPVDTPLSPTTFINSILQESEPVFRPDSAPSEQKCLSVACLDKTELHDHLESIDSGLENLQQILNAQSINFDSSPLFDIFSSAASDVDLDSLASIQDLLSPDPVKETESGVDTDSGKQLVQYTSQPSFSPIPFSTDSSSTDLPMLLELQDDSYFSSEPTEDPTIALLNFQPVPEDPKLS

SEQ ID NO: 6693 - protein, 497 aa, Danio rerio
MEYHSVGPGGVVVTGNNVPAFLTKLWTLVEDPDTDPLICWSPNGTSFHVFDQGRFSKEVLPKYFKHNNMASFVRQLNMYGFRKVVHIEQGGLVKPEKDDTEFQHPYFIRGQEQLLENIKRKVTTVSNIKHEDYKFSTDDVSKMISDVQHMKGKQESMDSKISTLKHENEMLWREVATLRQKHSQQQKVVNKLIQFLITLARSNRVLGVKRKMPLMLNDSSSAHSMPKFSRQYSLESPAPSSTAFTGTGVFSPEPPVKTGPIISDITELAQSSPVATDEWIEDRTSPLVHIKEEPSSPAHSPEVEEVCPVEVEVGAGSDLPVDTPLSPTTFINSILQESEPVSALTPPPSEQKCLSVACLDKTELHDHLESIDSGLENLQQILNAQSINFDSSPLFDIFSSAASDVGLDSLASIQDLLSPDPVKETESGLDTDSGKQLVQYTSQPIVLPDPLSTDSSSTDLPMLLELQDDSYFSSEPAEDPTIALLNLQPVPEDPKLS

SEQ ID NO: 6694 - protein, 489 aa, Danio rerio
MKHSSNVPAFLTKLWTLVEDSDTNEFICWSQEGNSFLVLDEQRFAKEILPKFFKHNNMASFVRQLNMYGFRKVMHIDSGIVKQERDGPVEFQHPYFKHGQDDLLENIKRKVSNARPEESKIRQDDLSKILTSVQSVHEQQENMDARLATLKRENEALWTELSDLRKVHVQQQQVIKELVQFIFTLVQNNRLLNLKRKRPLALNINGKKSKFIHQLFEEPIDHSKTTVNGLKNNSDISDDVIICDITDEDPEVTDGISVPDEEDAEIVEITYESSPKTVQQDSANGTIVNSTAHQEAEPKTTHDVSTTNSALQLNKPSCLSLEDPMKLMDSILSENGAISQNINLLGKVELMDYLDSIDCSLEDFQAMLYGKQFNIDPDIIEETISETKNNNSKANKENLDSENTDKQLIQYTTCPLMAFLDGCTPLTPSDPQPEDPPDLLDESLEMKTPRSSLIRLEPLTEAEANEATLFYLCELNSDLPNADTPPLDI

SEQ ID NO: 6695 - protein, 511 aa, Oncorhynchus mykiss
MKQNSNVPAFLTKLWTLVEDSDTNEFICWSQEGNSFLVMDEQRFSKDILPKFFKHNNMASFVRQLNMYGFRKVMHIDTGIVKQERDGPVEFQHHYFKHGQDDLLENIKRKVSNARPNDTKIRQEDLSNILASVQNVHGKQESIDSRLNTLKRDNEGLWREISDLRQKHSQQQQIIKKLIQFIVTLVQKNRMSLKRKRPILLNSNGKKPKYIHEIYDDPPLDHNKPSVSGLKSADLTDDVVICDVTDDDTEITEGPSRALDQSDVEIVGVFNNNTVSQTDSADSIGQTNSLVIEPEETTISTYDSLPTSSTLQLNKQSGLSLEDPMKMMDSILNESGAISQNINLLGKVELMDYLDSIDCSLEDFQAMVYGKQFSIDPDILEATEGSGGPKENAGLLSKGDKSSFSADNQLVQYTSCPLLAFLDGCTPLATEADSSTATELGDSLLQHNTEVPTDLLEPDKEPPRSSLIRLEPLTEAEASESTLFYLCELNPEGDTTDSTQLEIYDLFPVQK

SEQ ID NO: 6696 - protein, 451 aa, Xenopus laevis
MDPHGTCGGSNVPAFLAKLWTLVEDPDTDPLICWSPEGNSFHVFDQGQFAKEVLPKYFKHNNMASFVRQLNMYGFRKVVHIEQGGLVKPERDDTEFQHPYFIRGQEQLLENIKRKVNTMSATKSDEVKVRQDSVGKLISDVQSMKGKQESIDGRLLSMKHENEALWREVASLRQKHTQQQKVVNKLIQFLVSLVQSNRILGVKRKIPLMLNDSSTGHSPPKYSRQYSLEHVPSSTSYPVSGFTDSSAGPIISDVTELPESSPSPSPCPSLEASPSPVILIKTEPLTPSQSPEQSPAPPKLDDTPISPSTFIDSILLETETSVCPGGNKNDEMSESHPPEPCLSVACLDNISLSRQMSEVSRLFPTSCSSVPGRAEPPGLDMAVAELNDHVDNIDFNLDTLQNLLNGQSFSVDTSALMDLFSPSLGIPDLSLPDPDSSLASVSSTPIYTCVV

SEQ ID NO: 6697 - protein, 564 aa, Gallus gallus
MKQEPQQQQPAQQPPPAGAGVPAFLSKLWALVGEAPSNQLITWSQNGQSFLVLDEQRFAKEILPKYFKHNNMASFVRQLNMYGFRKVVHVDSGIVKLERDGLVEFQHPYFKQGREDLLEHIKRKVSSSRPEENKISQEDLSKIISSAQKVEIKQETIESRLSALKRENESLWREVAELRAKHLKQQQVIRKIVQFIVTLVQNNQLVSLKRKRPLLLNTNGPTKSNVFQQIVKEPADNNNHVPLNRTEGLKQREQISDDIIIYDVTEDVADEENTMVDEENAPITPETNEDTTSDSSNCSRSPDIVIVEDDNEEEYAPVIQGDKSTESVAVSANDPLSPVSDSTSPLMSSAVQLNNQSTLTAEDPVSMMDSILNENGVISQNINLLGKVELLDYLDSIDCSLEDFQAMLSGRQFSIDPDLLFDLFTSSVQMNPTDHIPNTKMETKGIETTKSNAGPAASQETQVSKPKSDKQLIQYTAFPLLAFLDGNPGSTVESGSSATETPSSVDKPLEVDELLESSLDPEPTQSKLVRLEPLTEAEASEATLFYLCELAPAPMDTDMPFLDN

SEQ ID NO: 6698 - protein, 491 aa, Gallus gallus
MEGPGAAAAAVGAGPGGSNVSAFLTKLWTLVEDPETDPLICWSPSGNSFHVFDQGQFAKEVLPKYFKHNNMASFVRQLNMYGFRKVVHIEQGGLVKPEKDDTEFQHPYFIRGQEHLLENIKRKVTSVSSIKNEDIKVRQDNVTKLLTDIQVMKGKQESMDSKLIAMKHENEALWREVASLRQKHAQQQKVVNKLIQFLISLVQSNRILGVKRKIPLMLNDSSSAHSMPKYSRQYSLEHVHGSSPYAASSPAYSGSNIYSPDSSTNSGPIISDVTELAQSSPSASPSGSLDERSSPVVRIKEEPPSPSRSPKENEPSTTTAAAGNSTEQPQPQEKCLSVACLDKNELNDHLDTIDSNLDNLQTMLSTHGFSVDTTALLDLFSPSMTVTDMNLPDLDSSLASIQDLLSSQEQQKPSEADAAAADTGKQLVHYTAQPLFLVDSSAVDVGSGDLPIFFELGEGSYFTDGDEYNEDPTISLLSGTEQPKPKDPTVS

SEQ ID NO: 6699 - protein, 467 aa, Gallus gallus
MREGSALPGAPGAAPVPGFLAKLWALVEDPQSDDVICWSRNGENFCILDEQRFAKELLPKYFKHNNISSFIRQLNMYGFRKVVALENGMITAEKNSVIEFQHPFFKQGNAHLLENIKRKVSAVRTEDLKVCAEDLHKVLSEVQEMREQQNNMDIRLANMKRENKALWKEVAVLRQKHSQQQKLLSKILQFILSLMRGNYIVGVKRKRSLTDAAGASPSKYSRQYVRIPVESGQAMAFSEHNSDDEDGNRTGLIIRDITDTLENATNGLLAVAHTSGRDRETQTALDPGLPICQVSQPNELSCAEPIPPVHINDVSKPNEMGNVAVELHTAQANAPEDPVSVIDSILNENNSGNQNDPLLDREEIQDFLNCIDASLEELQAMLSGKQYSFGSEAFSDVFNPELPALDMNLMETSPGMENIANMEDSTEDLGASERETAGSKGGQEGTESCDSSVLFQNCVLKWNFSSL

SEQ ID NO: 6700 - protein, 529 aa, Homo sapiens
MDLPVGPGAAGPSNVPAFLTKLWTLVSDPDTDALICWSPSGNSFHVFDQGQFAKEVLPKYFKHNNMASFVRQLNMYGFRKVVHIEQGGLVKPERDDTEFQHPCFLRGQEQLLENIKRKVTSVSTLKSEDIKIRQDSVTKLLTDVQLMKGKQECMDSKLLAMKHENEALWREVASLRQKHAQQQKVVNKLIQFLISLVQSNRILGVKRKIPLMLNDSGSAHSMPKYSRQFSLEHVHGSGPYSAPSPAYSSSSLYAPDAVASSGPIISDITELAPASPMASPGGSIDERPLSSSPLVRVKEEPPSPPQSPRVEEASPGRPSSVDTLLSPTALIDSILRESEPAPASVTALTDARGHTDTEGRPPSPPPTSTPEKCLSVACLDKNELSDHLDAMDSNLDNLQTMLSSHGFSVDTSALLDLFSPSVTVPDMSLPDLDSSLASIQELLSPQEPPRPPEAENSSPDSGKQLVHYTAQPLFLLDPGSVDTGSNDLPVLFELGEGSYFSEGDGFAEDPTISLLTGSEPPKAKDPTVS

SEQ ID NO: 6701 - protein, 529 aa, Homo sapiens [sequence omitted]

SEQ ID NO: 6702 - protein, 536 aa, Homo sapiens
MKQSSNVPAFLSKLWTLVEETHTNEFITWSQNGQSFLVLDEQRFAKEILPKYFKHNNMASFVRQLNMYGFRKVVHIDSGIVKQERDGPVEFQHPYFKQGQDDLLENIKRKVSSSKPEENKIRQEDLTKIISSAQKVQIKQETIESRLSELKSENESLWKEVSELRAKHAQQQQVIRKIVQFIVTLVQNNQLVSLKRKRPLLLNTNGAQKKNLFQHIVKEPTDNHHHKVPHSRTEGLKPRERISDDIIIYDVTDDNADEENIPVIPETNEDVISDPSNCSQYPDIVIVEDDNEDEYAPVIQSGEQNEPARESLSSGSDGSSPLMSSAVQLNGSSSLTSEDPVTMMDSILNDNINLLGKVELLDYLDSIDCSLEDFQAMLSGRQFSIDPDLLVDLFTSSVQMNPTDYINNTKSENKGLETTKNNVVQPVSEEGRKSKSKPDKQLIQYTAFPLLAFLDGNPASSVEQASTTASSEVLSSVDKPIEVDELLDSSLDPEPTQSKLVRLEPLTEAEASEATLFYLCELAPAPLDSDMPLLDS

SEQ ID NO: 6703 - protein, 230 aa, Homo sapiens
MKQSSNVPAFLSKLWTLVEETHTNEFITWSQNGQSFLVLDEQRFAKEILPKYFKHNNMASFVRQLNMYGFRKVVHIDSGIVKQERDGPVEFQHPYFKQGQDDLLENIKRKVSSSKPEENKIRQEDLTKIISSAQKVQIKQETIESRLSELKSENESLWKEVSELRAKHAQQQQVIRKIVQFIVTLVQNNQLVSLKRKRPLLLNTNGAQKKNLFQHIVKEPTDNHHHKVIF

SEQ ID NO: 6704 - protein, 463 aa, Homo sapiens
MVQEAPAALPTEPGPSPVPAFLGKLWALVGDPGTDHLIRWSPSGTSFLVSDQSRFAKEVLPQYFKHSNMASFVRQLNMYGFRKVVSIEQGGLLRPERDHVEFQHPSFVRGREQLLERVRRKVPALRGDDGRWRPEDLGRLLGEVQALRGVQESTEARLRELRQQNEILWREVVTLRQSHGQQHRVIGKLIQCLFGPLQAGPSNAGGKRKLSLMLDEGSSCPTPAKFNTCPLPGALLQDPYFIQSPSTYSLSQRQIWALALTGPGAPSSLTSQKTLHPLRGPGFLPPVMAGAPPPLPVAVVQAILEGKGSFSPEGPRNAQQPEPGDPREIPDRGPLGLESGDRSPESLLPPMLLQPPQESVEPAGPLDVLGPSLQGREWTLMDLDMELSLMQPLVPERGEPELAVKGLNSPSPGKDPTLGAPLLLDVQAALGGPALGLPGALTIYSTPESRTASYLGPEASPSP

SEQ ID NO: 6705 - protein, 493 aa, Homo sapiens [sequence omitted]

SEQ ID NO: 6706 - protein, 366 aa, Homo sapiens
MQEAPAALPTEPGPSPVPAFLGKLWALVGDPGTDHLIRWSPSGTSFLVSDQSRFAKEVLPQYFKHSNMASFVRQLNMYGFRKVVSIEQGGLLRPERDHVEFQHPSFVRGREQLLERVRRKVPALRGDDGRWRPEDLGRLLGEVQALRGVQESTEARLRELRQQNEILWREVVTLRQSHGQQHRVIGKLIQCLFGPLQAGPSNAGGKRKLSLMLDEGSSCPTPAKFNTCPLPGALLQDPYFIQSPSTYSLSQRQIWALALTGPGAPSSLTSQKTLHPLRGPGFLPPVMAGAPPPLPVAVVQAILEGKGSFSPEGPRNAQQPEPGDPREIPDRGPLGLESGDRSPESLLPPMLLQPPQESVEPAGPLD

SEQ ID NO: 6707 - protein, 793 aa, Rhodobacter blasticus
MRPRSNAGSSPPDPEEQEHAQVPSFSSTLEQAIHAALALANARRHELATLEHLLLALIDEPDAARVMKACSVDLEDLKKTLTDFIDDDLSTLVTSVEGSEAVPTAAFQRVIQRAAIHVQSSGRTEVTGANVLVAIFAERESNAAYFLQEQDMTRYDAVNFIAHGVAKDPSYGESRPVQGADEPQETPKAEAGEAKESALSKYCVDLNIKARKGDVDPLIGREAEVERAIQVLCRRRKNNPLLVGDPGVGKTAIAEGLAWKIIKKEVPEVLSGATIFSLDMGALLAGTRYRGDFEERLKAVVKELEDHPDAILFIDEIHTVIGAGATSGGAMDASNLLKPALQGGKLRCMGSTTYKEFRQHFEKDRALSRRFQKIDVNEPSVPDAIKILMGLKPHFEEHHELRYTADAIKSAVELASRYINDRKLPDSAIDVIDEAGAAQHLVSDSKRKKVLGTKEIEAVVAKIARIPPRNVSKDDAETLRDLERTLKRLVFGQDKAIEALSASIKLARAGLREPEKPIGNYLFTGPTGVGKTEVAKQLAATLGVELLRFDMSEYMEKHAVSRLIGAPPGYVGFDQGGMLTDGVDQHPHCVLLLDEIEKAHPDVYNILLQVMDHGKLTDHNGRAVDFRNVILIMTSNVGAADMAKEAIGFGRERRTGEDTAAVERTFTPEFRNRLDAVISFAPLGREIILQVVEKFVLQLEAQLIDRNVHIELTPEAAAWLGEKGYDDKMGARPLGRVIQEHIKKPLAEELLFGKLTKGGLVKVGVKDDAIVLEVQEPQKPRLTGQKPPLLTAE

SEQ ID NO: 6708 - protein, 628 aa, Rhodospirillum rubrum
GAMVAGAKFRGEFEERLKAMLTEVSAAEGEIILFIDEMHTLIGAGAGEGAMDASNLLKPALARGDLHCVGATTLNEYRKHVEKDAALARRFQPVFVSEPGVADTISILRGIKEKYELHHGVRIADNALVAAATLSNRYITDRFLPDKAIDLMDEAASRLRMEVDSKPEALDELDRRIIQLKIEREALRKEKDIASEARLSDLEKELADLESQSATLTEDWKREKEGLAGSTRIKEQLEQARGDLDIAKRQANWARAGELEYGVIPDLERRLGEVESGDGLAHRQGGKLVNEVVTAETIASVVSRWTGIPVDKMLAGEREKLLGMEKVLASRVVGQREAVVAVSNAVRRSRAGLQDPNRPMGSFLFLGPTGVGKTELTKALAAFLFDDEQAMVRIDMSEYMEKHAVSRLIGAPPGYVGYDEGGALTEAVRRRPYQVILFDEVEKAHPDVFNVLLQVLDDGRLTDGQGRTVDFRNTLIVLTSNLGADILANQPEGDDSGAVRGAVMEMVRAAFRPEFLNRLDEILLFHRLFRENMAGIVSIQLGRLADRLRDRKMTLDLDDAARDWLAERGYDPVYGARPLKRVIQRSLENPLATLVLDGRIKDGDVIRITVEGGKLVVNGEALSLDTAA

SEQ ID NO: 6709 - protein, 679 aa, Chloroflexus aurantiacus
MIGRDEEIRRVIQILSRRTKNNPVLIGEPGVGKTAIVEGLAQRIVRGDVPEALKNKRVIALDLGALIAGAKYRGEFEERLKAVLKEIQERDDIILFVDELHTVVGAGAAEGAMDAGNMLKPMLARGELHMVGATTLDEYRKHIEKDAALERRFQPVMVDPPSVEDTISILRGLKERYETHHGVRITDGALIAAAMLSDRYISDRFLPDKAIDLIDEAAARLRMEITSDPQELDDLKRRIMQLEIEREALRKEKDQASKERLEKLEQELANLREQRSALEAQIQRERQELERIQQLKEKIEQTRAAIEQAQRQYDYNKAAELQYGTLVSLERELQAAEAQLGSQSRLLRQEVTETDIAEIISKWTGIPVTKLLEGELEKLVHMEERLHQRVVGQDEAVIAVSNAVRRARAGLQDPNRPLGSFLFLGPTGVGKTELARALAEFLFDDEQAMIRIDMSEYMEKHSVARLIGAPPGYVGYDEGGQLTEAVRRKPYSVVLFDEIEKAHPDVFNVLLQVLDDGRLTDGQGRIVNFKNTVIIMTSNIASTTIQELTRAGAGQSEIRAAVMEELRGVLRPEFLNRIDEVIVFSPLSREHIDRIVEIQLNRLRKLLADRKLNLVLTDAARAQLAAEGYDPVYGARPLKRVIQQRIQNPLALQLLQGAFPEGSTIVVDVENGTFVFRRS

SEQ ID NO: 6710 - protein, 872 aa, Chlamydophila pneumoniae AR39
MLGVNFMEKFSDAVSEALEKAFELAKSSKHTYVTENHLLLALLENTESLFYLVIKDIHGNPGLLNTAVKDALSREPTVVEGEVDPKPSPGLQTLLRDAKQEAKTLGDEYISGDHLLLAFWSSNKEPFNSWKQTTKVSFKDLKNLITKIRRGNRMDSPSAESNFQGLEKYCKNLTALAREGKLDPVIGRDEEIRRTIQVLSRRTKNNPMLIGEPGVGKTAIAEGLALRLIQGDVPESLKGKQLYVLDMGALIAGAKYRGEFEERLKSVLKDVESGDGEHIIFIDEVHTLVGAGATDGAMDAANLLKPALARGTLHCIGATTLNEYQKYIEKDAALERRFQPIFVTEPSLEDAVFILRGLREKYEIFHGVRITEGALNAAVLLSYRYIPDRFLPDKAIDLIDEAASLIRMQIGSLPLPIDEKERELAALIVKQEAIKREQSPSYQEEADAMQKSIDALREELASLRLGWDEEKKLISGLKEKKNSLESMKFSEEEAERVADYNRVAELRYSLIPQLEEEIKQDEASLNQRDNRLLQEEVDERLIAQVVANWTGIPVQKMLEGEAEKLLILEESLEERVVGQPFAVSAVSDSIRAARVGLNDPQRPLGVFLFLGPTGVGKTELAKALADLLFNKEEAMVRFDMSEYMEKHSISKLIGSSPGYVGYEEGGSLSEALRRRPYSVVLFDEIEKADKEVLNILLQVFDDGILTDGKKRKVNCKNALFIMTSNIGSPELADYCSKKGSELTKEAILSVVSPVLKRYLSPEFMNRIDEILPFVPLTKEDIVKIVGIQMRRIAQRLKARRINLSWDDSVILFLSEQGYDSAFGARPLKRLIQQKVVILLSKALLKGDIKPDTSIELTMAKEVLVFKKVETPS

SEQ ID NO: 6711 - protein, 866 aa, Chlamydophila pneumoniae CWL029
MEKFSDAVSEALEKAFELAKSSKHTYVTENHLLLALLENTESLFYLVIKDIHGNPGLLNTAVKDALSREPTVVEGEVDPKPSPGLQTLLRDAKQEAKTLGDEYISGDHLLLAFWSSNKEPFNSWKQTTKVSFKDLKNLITKIRRGNRMDSPSAESNFQGLEKYCKNLTALAREGKLDPVIGRDEEIRRTIQVLSRRTKNNPMLIGEPGVGKTAIAEGLALRLIQGDVPESLKGKQLYVLDMGALIAGAKYRGEFEERLKSVLKDVESGDGEHIIFIDEVHTLVGAGATDGAMDAANLLKPALARGTLHCIGATTLNEYQKYIEKDAALERRFQPIFVTEPSLEDAVFILRGLREKYEIFHGVRITEGALNAAVLLSYRYIPDRFLPDKAIDLIDEAASLIRMQIGSLPLPIDEKERELAALIVKQEAIKREQSPSYQEEADAMQKSIDALREELASLRLGWDEEKKLISGLKEKKNSLESMKFSEEEAERVADYNRVAELRYSLIPQLEEEIKQDEASLNQRDNRLLQEEVDERLIAQVVANWTGIPVQKMLEGEAEKLLILEESLEERVVGQPFAVSAVSDSIRAARVGLNDPQRPLGVFLFLGPTGVGKTELAKALADLLFNKEEAMVRFDMSEYMEKHSISKLIGSSPGYVGYEEGGSLSEALRRRPYSVVLFDEIEKADKEVLNILLQVFDDGILTDGKKRKVNCKNALFIMTSNIGSPELADYCSKKGSELTKEAILSVVSPVLKRYLSPEFMNRIDEILPFVPLTKEDIVKIVGIQMRRIAQRLKARRINLSWDDSVILFLSEQGYDSAFGARPLKRLIQQKVVILLSKALLKGDIKPDTSIELTMAKEVLVFKKVETPS

SEQ ID NO: 6712 - protein, 826 aa, Ralstonia metallidurans
  unsure (1)..(826): unsure at all Xaa locations
MVSSLRNVPPSVSLNRRSFPSRRFKGTNEVHVGRDVNNLLNATEKEAIKRNDQFIASELFLLAVSDDKGETGRIARENGLSRKSLEAAITAVRGGDTVNSADAESQREALKKYTVDLTERARAGKLDPVIGRDDEIRRAIQILQRRTKNNPVLIGEPGVGKTAIVEGLAQRIVNGEVPETLKNKRVLVLDMAGLLAGAKYRGEFEERLKAVLNDVAKDEGQTIVFIDEIHTMVGXRXXXKXXRXXXXXXXXXXXXXPXPXGYKPALARGELHCIGATTLNEYRKYIEKDAALERRFQKVLVDEPSVEATIAILRGLQEKYELHHKVEITDPAIVAAAELSHRYITDRFLPDKAIDLIDEAAARIKMEIDSKPEAMDKLERRTIQLKIEREAVKKETDEASRKRLELIEQEIIRLEKEYADLDEIWRAEKGAAQGAAALKEEIEKIKLDITRLQREGKLDKVAELQYGKLPELEGKLQAATKAEASEQKQQNKLLRTQVGAEEIAEVVSRATGIPVAKMMQGEREKLLKMEDRLHQRVVGQDEAVRLVSDAIRRSRAGLSDENKPYGSFLFLGPTGVGKTELCKALSEFLFDSEEHLIRIDMSEFMEKHSVSRLIGAPPGYVGYDEGGYLTEAVRRKPYAVILLDEVEKAHPDVFNVLLQVLDDGRLTDGQGRTVDFKNTVIVMTSNLGSHIIQSMAGEPQEAVKGAVWQEVRTHFRPEFLNRIDEVVVFHALDQKNIESIAKIQLKRLQVRLARMDMTLDVSERALEKIASAGYDPVFGARPLKRAIQQQIENPVAKAILEGRFAAKDVVPVDYVDGEFTFGRMVH

SEQ ID NO: 6713 - protein, 893 aa, Ralstonia metallidurans
MTTRDYSPFLRRLNDHCARALADAASLCETRAHRDIEVEHWLIKLMEQGDGDLLAILRRYELDVDGIWNGLLAAVDHLPHDLRGRPGLSQRLGQWLEAAWMRASLESTAPGVDRSIRSAHLLAALAETPHLLRAPDAWPLLSVSAAQIERLMPELDEISVEATSPITPSQGPATIATRRPAGQPDNSALSRFTTDVTQKARDGKIDPVFGRDVEIRQMVDILARRRKNNPILVGEPGVGKTALVEGLALKIAEEDVPTAIRDVTVLTLDMGLLQAGAGVKGEFEQRLKNVIEAVQQSPTPILLFIDEAHTLIGAGNTAGGADAANLLKPALARGELRTIAATTWSEYKQYFERDAALERRFQMVKVDEPDDENACLMLRGLKDRYAQHHNVHITDAAVAAAVRLSRRYLTGRQLPDKAVDLIDTAAARVRMSQEARPVAICTLEAERAALGVEYLALQQDQGATGEDKRNRLSAIETRLRELAIELGQLEFELAAQKDAADKLMVLRAQWQAATDASERHDLASSIQAAHQVLAAHGQATLLHAEVAETVVAQVIADWTGVPVDNLLSNELATLLELEARLGRVVVGQDEALAALGKSLRASKAGLKSEEAPLGVFLLVGPSGVGKTETARALADLMFGGERSLITINLSEYQEAHTVSQLKGSPPGYVGYGEGGILTEAVRQRPYSVVLLDEVEKAHRDVLNLFYQVFDRGFMRDGEGRVIDFRNTVILMTSNLGSEQILAATDATTEAGVEIPASALMETIRPLLIDRFQPALLARFQTIVYRPLAAEAMATIVGMKLAKVAERIERRFDVPLRCDDALVAELVRACLLPDSGARNIDSLLDQQILPVLSRELLIRMANRQVPASIRLSFSEEDGIGLDFDDAATTAEEYA

SEQ ID NO: 6714 - protein, 926 aa, Paracoccidioides brasiliensis
MNGTQLTDRANQALVDAHALAEQHAHPQLLPIHLAVSLLDPPVDESKDQQVTTHPSHQASSGSLFKRVVEKAHGDPQQLRRALNKSLVRLASQDPPPETISPSPAFAKVLRAASNLSKTQKDTYVAIDHLIAALAQDPTIQRALADANIPNVKMIDSAIQQIRGMKRVDSKTADTEEESENLKKFTVDMTAMAREGKIDPVIGREEEIRRVIRILSRRTKNNPVLIGEPGVGKTTVVEGLARRIVNADVPANLANCKLLSLDVGSLVAGSKYRGEFEERMKGVLKEIEESKETIVLFVDEIHLLMGAGSSGEGGMDAANLLKPMLARGQLHCIGATTLGEYRKYIEKDQAFERRFQQVLVKEPTVGETISILRGLKERYEVHHGVNILDGAIVSAANLASRYLTARRLPDSAVDLIDEAAAAVRVTRESQPEALDTLERRARQLQIEIHALAREKDAASKARLEAAKQEAANVNEELRPLREKYESEKQRSKDIQDAKIKLDLLKVKRDEATRSGDTQTASDLIYYAIPDVEKRIEQLEAERARQDAELSAQPGAGETLMADAVGPEQINEIVARWTGIPVTRLRTTEKDRLLHMESHLSKIVVGQKEAVQSVSNAIRLQRSGLSNPNSPPSFLFCGPSGTGKTLLTKALAEFLFDDPKAMIRFDMSEYQERHSLSRMIGAPPGYVGHDAGGQLTESLRRRPFSILLFDEVEKAAKEVLTVLLQLMDDGRITDGQGRIVDAKNCIVVMTSNLGAEFLQRPTASNGQIDPTTKELVMGALRNYFLPEFLNRISSIIIFNRLTRREIRKIVDVRLQEIQRRLEQNDRTVTIDCTDEVKDYLGNAGYSPVYGARPLSRLIEKEVLNRLAVLILRGAIKDGETARVVMQEGRITVLPNHVETESEDEEMIDESDTLAEMEEDMGERDLYE

SEQ ID NO: 6715 - protein, 792 aa, Paracoccidioides brasiliensis
MLLKTTSLTHTITIMDKHLLHTLTGVQVNAIDKALAVGPDWVLLGLSEVGATKSLLNSIGVSADSLRQVILKIRGDEKVMSNNHEDQRDSLNKYTVDLTERALAGKLDPVIGRDDEIRRTVQVLSRRTKNNPVLIGEPGVGKTAIVEGLAQRIVNGEVPESLKGKRVLSLDLGSLLAGAKYRGEFEERLKAVLKDLAKHEGEIILFIDELHTLVGAGKGDGAMDAGNMLKPALARGELRCVGATTLDEYRQYIEKDAALERRFQKVLVDEPSVEDTIAILRGLKERYEVHHGVKILDSAIIAAAKMSHRYITDRQLPDKAIDLIDEAASRIKMELDSKPEALDKLERRLIQLKLQLEAVKKDEDAGSRAEVSHLEKQIEDVQKDYNDLEEVWKSEKTLVEGTKQIQAQLDQARIALQKAQRENDLGEMSRLQYGVIPELEKQLAQDELVEEKEEPKLLRNKVTDNEIAEVVSAATGIPVAKMLQGEREKLLQMESFLHQRVVGQDEAVIAVSNAVRRSRAGLSDPNRPSGSFLFLGPTGVGKTELTKALANFLFDSDDAMIRIDMSEFMEKHSVSRLVGAPPGYVGYEEGGVLTEAVRRKPYSVVLFDEVEKAHPDVFNILLQVLDDGRLTDSQGRVVDFKNTVIVMTSNLGSSDVRELGDNPSRDDVRNVVMAAVSEHFRPEFINRIDELVVFHALEKAQIRGIADIQLDRLRARLADRDIKLTVDDSAFDQLIEAGFDPVYGARPLKRAIQQQVENNLAQKILAGDFQPGDTIVITADAGQLDFQKLKLN

SEQ ID NO: 6716 - protein, 859 aa, Neisseria meningitidis MC58
MRYDKLTAKFQQALAEAQSLALAADGSYLEAGFVLKALLDDQNSGAAALLAHAGVNVPQVKQRLQQHLNSLPKVSGQGGDILPSRELQAVLNLMDKAATKRSDAYIASELFLLALVQQNDATGKILKEAGATEQNINAAIDAVRGGQNVNDANAEDQRDALKKYTLDLTQRARDGKLDPVIGRDDEIRRAIQVLQRRTKNNPVLIGEPGVGKTAIVEGLAQRIVNGEVPESLRNKRLLVLDLAALIAGAKYRGEFEERLKGVLNDLAKDDGNTLIFIDEIHTLVGAGKTDGAMDAGNMLKPALARGELHCIGATTLDEYRQYIEKDAALERRFQKVLVGEPSVEDTIAILRGLQERYEIHHGIDITDPAIVAAAELSDRYITDRFLPDKAIDLIDEAASRVKMEKETKPEAMDKIDRRLIQLRMEKAHVEKEKDDASKKRLELIDEEINGLQKEYADLDEIWKAEKAISDGAANIKKQIDEVKIKIEQAKRQGDLALASKLMYEDLEHLEKQRAAAERADTDSTKPANKLLRNNVGAEEIAEVVSRMTGIPVSKMMEGERDKLLKMEEVLHRRVVGQDEAVRAVSDAIRRSRSGLADPNKPYGSFLFLGPTGVGKTELCKALAGFLFDSEDHLIRIDMSEYMEKHAVARLIGAPPGYVGYEEGGYLTEQVRRKPYSVILLDEVEKAHPDVFNILLQVLDDGRLTDGQGRTVDFKNTVIVMTSNIGSQHIQQMGIQDYEAVKEVVMEDVKEHFRPEMINRIDEVVVFHGLDQDNIRNIAKIQLKGLEKRLEKQNLRLAVSDAALDIIAKAGFDPIYGARPLKRAIQSEIENPLAKALLAGNYAPESEIRVEADGDRLKFA

SEQ ID NO: 6717 - protein, 859 aa, Neisseria meningitidis Z2491
MRYDKLTAKFQQALAEAQSLALAADSSYLEAGFVLKALLDDQNSGAAALLAHAGVNVPQVKQRLQQHLNSLPKVSGQGGDILPSRELQAVLNLMDKAATKRGDAYIASELFLLALVQQNDAAGKILKEAGATEQNINAAIDAVRGGQNVNDANAEDQRDALKKYTLDLTQRARDGKLDPVIGRDDEIRRAIQVLQRRTKNNPVLIGEPGVGKTAIVEGLAQRIVNGEVPESLRNKRLLVLDLAALIAGAKYRGEFEERLKGVLNDLAKDDGNTLIFIDEIHTLVGAGKTDGAMDAGNMLKPALARGELHCIGATTLDEYRQYIEKDAALERRFQKVLVGEPSVEDTIAILRGLQERYEIHHGIDITDPAIVAAAELSDRYITDRFLPDKAIDLIDEAASRVKMEKETKPEAMDKIDRRLIQLRMEKAHVEKEKDDASKKRLELIDEEINGLQKEYADLDEIWKAEKAISDGAANIKKQIDEVKIKIEQAKRQGDLALASKLMYEDLEHLEKQRAAAERADTDSTKPANKLLRNNVGAEEIAEVVSRMTGIPVSKMMEGERDKLLKMEEVLHRRVVGQDEAVRAVSDAIRRSRSGLADPNKPYGSFLFLGPTGVGKTELCKALAGFLFDSEDHLIRIDMSEYMEKHAVARLIGAPPGYVGYEEGGYLTEQVRRKPYSVILLDEVEKAHPDVFNILLQVLDDGRLTDGQGRTVDFKNTVIVMTSNIGSQHIQQMGIQDYEAVKEVVMEDVKEHFRPEMINRIDEVVVFHGLDQANIRSIAKIQLKGLEKRLEKQNLRLAVSDAALDIIAKAGFDPIYGARPLKRAIQSEIENPLAKALLAGNYAPESEIRVEADGDRLKFA

SEQ ID NO: 6718 - protein, 857 aa, secondary endosymbiont of Glycaspis brimblecombei
MRLDRLTNKFQQALADAQSLAIGQDNQFIEPVHLLIALLDQEGGTLRPLLTSIGVNISQLSNKLNYILNTLPQVHGTAGDIQPSNDLIRHLNLCDKLAQQRGDTFISSELFLLAIFDAKTSLADTLKTMGANKANIEKAIEQMRGGDNVNDQGAEEQRQALKKYTIDLTERAEQGKLDPVIGRDEEIRRTIQVLQRRTKNNPVLIGEPGVGKTAIVEGLAQRIVNGEVPEGLKNKRVLSLDMGALLAGAKYRGEFEERLKDVLNDLAKQEGSVILFIDELHTMVGAGKAEGAMDAGNMLKPALARGELHCVGATTLDEYRQYIEKDAALERRFQKVYVAEPTVEDTIAILRGLKERYELHHHVQITDPAIVAAASLSNRYISDRMLPDKAIDLIDEAGASLRMQMDSKPEALDRLERRVTQLKLEQQALKKESDDASKKRLKMLEEELTEKEREYSELEEEWKAEKAELTGTQHIKAELENARISMEQARRSGDLAKMSELQYGKIPELEKQLEAATKAESHSMKLLRNKVTDAEIAEILARWTGIPVSKMLESEREKLLHMEQDLHKRVIGQNEAVDAVSNAIRRSRAGLSDPNRPIGSFLFLGPTGVGKTELCKALANFLFDSDDAMVRIDMSEFMEKHTVSRLVGAPPGYVGYEEGGYLTEAIRRRPYSVILLDEIEKAHPDVFNILLQVLDDGRLTDGQGRTVDFRNTVVIMTSNLGSDLIQERFGSLGYDEMKELVMEVVSRSFRPEFINRIDEVVVFHPLDKEQITEIAQIQLSRLYKRMEEQGYKVKITPAALEKLGEAGFDPVFGARPLKRAIQQEIENPLAEQMLSGKLVPGKQVTLDIKKGVIVAKQ

SEQ ID NO: 6719 - protein, 875 aa, Deinococcus radiodurans
MTIGHSSFRMRAVKPCPHSGGFPLNPERFTEASAVAINAAQQLAQENHNQNLTHFHVLRTLLDNDTASRALTLAGGDLNTARAALDAEIAKLPKVQGSDGQLYLDPALNRAFQKADTLAAQLGDSFVAADTLLLALRGEYRGRGLPDEVSLNRAVTEQRKGKTVTNKTSEQQFDALNKYGTDLTQRARDGKFDPVIGRDEEIRRVMQILLRRSKNNPVLIGEPGVGKTAIAEGLAMRIVKGDVPEGLRDKKIVSLEMGSLLAGAKFRGEFEERLKGVIDEVVKSAGEIILFVDEIHTIVGAGKTEGSPDAGNMLKPALARGELHLIGATTLDEYREIEKDAALERRFQPVFVDEPSVEDTISILRGIKERYQVHHNVEITDPALVAAATLSNRYITDRQLPDKAIDLIDESAARLRMALESSPERIDQLSRRKLQLEIEREALKREKDVDSQNRLLDIENQLKTLTDELNEVRSRWEAERGEVAALREKREKLDAVRTQIEKARRDYDLEEAARLEYGELPALEKDVQDLEKKLKSAEFAHMEVTEEDIAAVVSRWTGIPVSKLMEGEREKLLHLEEQLHGRVIGQDRAIVSVSDAIRRARAGLNDPNRPLGSFMFLGPSGVGKTELAKALAEFLFDSSDAMVRIDMSEYMEKHTVARLIGAPPGYVGFEEGGQLTEAVRRRPYAVILFDEIEKAHPDVFNVLLQVLDDGRLTDGQGRTVDFRNTLIIMTSNIGSPLILEMQQRGEDAETIKSAVMDELRGEFRPEFLNRVDDIIVFDALTAKDLQSIVDIQLGGLRRRLAERRITLHLTEDAKDKLAELGYDPAYGARPLRRTISQYIETPLAREILGGQIQDGSVLNVDYGDGGFTFNSGSLN

SEQ ID NO: 6720 - protein, 377 aa, Streptococcus thermophilus
MDKIVLFDGSKKDFNSYIKKHGVEEYTPFMELIRQYNEKIRANDTSAVNEVGEVNKNAIENVVIYSDDFASVTDHVITNFPNIVILGHDIENLYIQNAPKRVKYSLEVEFDDIIKNRKSDYYEANSEDIIKFYNTLKNSNVVGQEEAKKKTCAGLYKSAVLKENQPLVLLYYGPSGVGKTELAKKISSFYDGKLTRIQFSMMQTDEAFKYIFGDTHGKPSLARDLLSRETNVVLIDEFDKVSPSLYNVFYQMFDEGEFEDINYKVDVSNCIFILTSNFNNEKNIAEVLGFPIFSRIDTKIKFKELTKAELSLVIEKIFESIYKKISTEDQKLIDGVELKNKYLESVDIFKNIRLLDKFIENDIFNVLFDSRIDKNHN

SEQ ID NO: 6721 - protein, 159 aa, Streptococcus mutans
NSGWQTSHWLFLFFGADSVGKTELAKALAEVLFDDESALIRFDMSEYMEKFAASRLNGAPPGYVGYEEGGELTEKVRNKPYSVLLFDEVEKAHPDIFNILLQVLDDGVLTDSRGRKVDFSNTIIIMTSNLGATAFVMIKPLVLELKAFPRIIRPWKVVF

SEQ ID NO: 6722 - protein, 130 aa, Streptococcus mutans
SFSQDYKAMESRILEELKKVYRPEFINRIDEKVVFHNLGQEDIRHVVKIMVAPLIAHLADQGITLKFQPSALKHLALAGYDAEMGARPLRRTLQTEVEDKLAELILSGKLASGQTLKIGIQKEKLKFDIV

SEQ ID NO: 6723 - protein, 122 aa, Streptococcus mutans
MESRILEELKKVYRPEFINRIDEKVVFHNLGQEDIRHVVKIMVAPLIAHLADQGITLKFQPSALKHLALAGYDAEMGARPLRRTLQTEVEDKLAELILSGKLASGQTLKIGIQKEKLKFDIV

SEQ ID NO: 6724 - protein, 623 aa, Enterococcus faecium
MIAGAKFRGEFEERLKAVLKEVKKSDGRILLFIDEIHNIVGAGKTEGSMDAGNLLKPMLARGELHLIGATTLDEYRQYMEKDKALERRFQKVLVKEPTVEDTISILRGLKERFEIHHGVNIHDNALVAAATLSDRYITDRFLPDKAIDLIDEASATIRVEMNSMPTELDQVTRRLMQLEIEEAALKKESDDASKKRLKNLQEELAELREEANAMKMQWETEKEEVNSVSAKRAEIDKAKHELEDAENNYDLERAAVLRHGTIPQLEKELKELEAKAKDSEIKMVQESVTENEIAQVVGRLTGIPVTKLVEGEREKLIKLNETLHKRVIGQDEAVDAVSDAVIRSRAGLQDPNRPLGSFLFLGPTGVGKTELAKALAENLFDSEDHMVRIDMSEYMEKHAVSRLVGAPPGYVGYEEGGQLTEAVRRNPYTIVLLDEIEKAHPDVFNILLQVLDDGRLTDSKGRVVDFKNTVLIMTSNIGSQLLLEGVTADGTIPEAVAEQVNTLLRGNFKPEFLNRIDDTILFTPLSLDNVKGIVDKMVAQLAQRLEHQEILLTISDEAKTWIAENAYEPAYGARPLKRFITKEVETPLAKEIVAGHVMPKSKVTITLLDGQLHFKTEELEEIV

SEQ ID NO: 6725 - protein, 816 aa, Lactococcus lactis
MKFENVKYTPTLDRIFEKAAEYAHQYQYGTIESAHLLAAMATTSGSIAYSILAGMNVDSSDLLIDLEDLSSHVKVKRSELRFSPRAEEVVTVASFLAVHNNAEAVGTEHLLYALLQVEDGFGLQLLKLQKINIVSLRKEIEKRTGLIVPENKKAVTPMSKRKMAKGVAENSSTPTLDSVSSDLTEAARSGKLDPMIGREAEVDRLIHILSRRTKNNPVLVGEPGVGKSAIIEGLAQRIVNGQVPIGLMNSRIMALNMATVVAGTKFRGEFEDRLTAIVEEVSADPDVIIFIDELHTIIGAGGGMDSVNDAANILKPALARGDFQMVGATTYHEYQKYIEKDEALERRLARINVDEPSPDEAIAILQGLREKFEDYHQVKFTDQAIKSAVTLSVRYMTSRKLPDKAIDLLDEAAARVKILLKTKKQNVFELEKDFVKAQEELAEAVIKLDVKASRIKEKAVEKISDKIYKFSIKEEKRQEVTDQAVIAVASTLTGVPITQMTKSESDRLINLEKELHKRVVGQEEAISAVSRAIRRARSGVADSRRPMGSFMFLGPTGVGKTELAKALADSVFGSEDNMIRVDMSEFMEKHSTSRLIGAPPGYVGYDEGGQLTERVRNKPYSVVLLDEVEKAHLDVFNIMLQILDDGFVTDTKGRKVDFRNTIIIMTSNLGATALRDDKTVGFGAKNITADYSAMQSRILEELKRHYRPEFLNRIDENIVFHSLESQEIEQIVKIMSKSLIKRLAEQDIHVKLTPSAIKLIAEVGFDPEYGARPLRKALQKEVEDLLSEQLLSGEIKAGNHISIGASNKKIKIAQIV

SEQ ID NO: 6726 - protein, 185 aa, Lactococcus lactis
GEPGVGKTAIVEGLAQRIVRKDVPENLKDKTIFSLDMGALIAGAKYRGEFEERLKAVLNEVKKADGQIILFIDELHTIVGAGKTEGSMDAGNLLKPMLARGELHLIGATTLDEYRKYMETDKALERRFQKVLVTEPTVEDTISILRGLKECFEIHHGVTIHDNALVAAATLSNRYITDRFLPDKA

SEQ ID NO: 6727 - protein, 867 aa, Lactococcus lactis subsp. cremoris
MDIEKMTTTMQEALGSAQQIAQVRHHQVIEVPHLWRIFVQPNSFGANFYKDLGIDLDDFTNLIEKEIDKINSVEGSNITYGQNLSPDLFQVFTEADKIAQKMGDEYLSTEIILLALFELKQNPLTEYLVSHGLTKAKAQAAIEKLRGGDKVTSQNAEETYKALEKYGVDLVAQVKSGNQDPVIGRDEEIRDVIRVLSRKTKNNPVLIGEPGVGKTAIVEGLAQRIVRKDVPENLKDKTIFSLDMGALIAGAKYRGEFEERLKAVLNEVKKADGQIILFIDELHTIVGAGKTEGSMDAGNLLKPMLARGELHLIGATTLDEYRKYMETDKALERRFQKVLVTEPTVEDTISILRGLKERFEIHHGVTIHDNALIAAATLSNRYITDRFLPDKAIDLIDEASATIRVEMNSLPTELDQANRRLMQLEIEEAALKKERDDASKKRLEIIRGEIAELREENNQLKAQWEAEKKEVGNISEKRNELEHARHELEEAQNEGNLEKAAALRYGKIPEIEKELKAIEEKAKSDDLSLVQESVTEEQIAEVVGRMTGIPITKLVEGEREKLLHLPETLHQRVVGQDEAVEAVSDAIIRARAGIQDPNRPLGSFLFLGPTGVGKTELAKALAENLFDSEEHMVRIDMSEYMEKHSVSRLVGAPPGYVGYDEGGQLTEAVRRNPYTIILLDEIEKAHPDVFNILLQVLDDGRLTDSKGVLVDFKNTVLIMTSNVGSQYLLDNVGENGEISEETTENVMSQLRAHFKPEFLNRIDDTILFKPLALEDIKNIILKMTSQLAHRLEEMEVELELSEEVKVWIAENAYEPAYGARPLKRYLTKVIENPLAKLIIGGKIPPKSKVIVRLIDNKVDFDVQSIAE

SEQ ID NO: 6728 - protein, 867 aa, Lactococcus lactis subsp. lactis
MDIEKMTTTMQEALGSAQQIAQVRHHQVIEVPHLWRIFVQPNSFGANFYKDLGIDLDDYTNLIEKEIDKINSVEGSNITYGQNLSPDLFQIFTEADKIAQKMGDEYLSTEIILLALFELKQNPLTSYLVSHGLTKAKAQAAIEKLRGGDKVTSQNAEETYKALEKYGVDLVAQVKSGKQDPVIGRDEEIRDVIRVLSRKTKNNPVLIGEPGVGKTAIVEGLAQRIVRKDVPENLKDKTIFSLDMGALIAGAKYRGEFEERLKAVLNEVKKSDGQIILFIDELHTIVGAGKTEGSMDAGNLLKPMLARGELHLIGATTLDEYRKYMETDKALERRFQKVLVTEPTVEDTISILRGLKERFEIHHGVTIHDNALVAAATLSNRYITDRFLPDKAIDLVDEASATIRVEMNSLPTELDQANRRLMQLEIEEAALKKERDDASKKRLEIIRGEIAELREENNQLKAQWEAEKKEVGNISEKRNELEHARHELEEAQNEGNLEKAAALRYGKIPEIEKELKAIEEKAKSDDLSLVQESVTEEQITEVVGRMTGIPITKLVEGEREKLLHLPETLHQRVVGQDEAVEAVSDAIIRARAGIQDPNRPLGSFLFLGPTGVGKTELAKALAENLFDSEEHMVRIDMSEYMEKHSVSRLVGAPPGYVGYDEGGQLTEAVRRNPYTIILLDEIEKAHPDVFNILLQVLDDGRLTDSKGVLVDFKNTVLIMTSNVGSQYLLDNVGENGEISEETTENVMSQLRAHFKPEFLNRIDDTILFKPLALEDIKNIIVKMTSQLSHRLEEMDVQLELSEEVKVWIAENAYEPAYGARPLKRYLTKVIENPLAKLIIGGKIPPKSKVIVTLVENKIDFDIQTIAE

SEQ ID NO: 6729 - protein, 845 aa, Chlamydophila pneumoniae J138
MFETFTNRAKQVIKLAKKEAQRLNHNYLGTEHILLGLLKLGQGVAVNVLRNLGIDFDTARQEVERLIGYGPEIQVYGDPALTGRVKKSFESANEEASLLEHNYVGTEHLLLGILHQSDSVALQVLENLHIDPREVRKEILKELETFNLQLPPSSSSSSSSSRSNPSSSKSPLGHSLGSDKNEKLSALKAYGYDLTEMVRESKLDPVIGRSSEVERLILILCRRRKNNPVLIGEAGVGKTAIVEGLAQKIILNEVPDALRKKRLITLDLALMIAGTKYRGQFEERIKAVMDEVRKHGNILLFIDELHTIVGAGAAEGAIDASNILKPALARGEIQCIGATTIDEYRKHIEKDAALERRFQKIVVHPPSVDETIEILRGLKKKYEEHHNVFITEEALKAAATLSDQYVHGRFLPDKAIDLLDEAGARVRVNTMGQPTDLMKLEAEIENTKLAKEQAIGTQEYEKAAGLRDEEKKLRERLQSMKQEWENHKEEHQVPVDEEAVAQVVSLQTGIPSARLTEAESEKLLKLEDTLRRKVIGQNDAVTSICRAIRRSRTGIKDPNRPTGSFLFLGPTGVGKSLLAQQIAIEMFGGEDALIQVDMSEYMEKFAATKMMGSPPGYVGHEEGGHLTEQVRRRPYCVVLFDEIEKAHPDIMDLMLQILEQGRLTDSFGRKVDFRHAIIIMTSNLGADLIRKSGEIGFGLKSHMDYKVIQEKIEHAMKKHLKPEFINRLDESVIFRPLEKESLSEIIHLEINKLDSRLKNYQMALNIPDSVISFLVTKGHSPEMGARPLRRVIEQYLEDPLAELLLKESCRQEARKLRATLVENRVAFEREEEEQEAALPSPHLES

SEQ ID NO: 6730 - protein, 409 aa, Bacillus anthracis
GVGKTAIVEGLAQRIVKKDVPEGLKDRTIFALDMSALVAGAKFRGEFEERLQAVLNEIKKSEGRILLFIDELHTIVGAGKTEGAMDAGNMLKPMLARGELHCIGATTLDEYRKYIEKDPALERRFQQVLAEEPTVEDTISILRGLKERFEIYHGVNIHDRAIVAASVLSDRYISDRFLPDKAIDLVDEACATIRTEIDSMPTELDEVTRRIMQLEIEEAALGKEKDFGSQERLKTLQRELSDLKEVASSMRAKWEKEKEDIHKVRDLREHLERLRRELEEAEGNYDLNRAAELRHGKIPAIEKELKEAEEMGANNKQENRLLREEVSEEEIADIVSRWTGIPVAKLVEGEREKLLRLEQILSERVIGQEEAVSLVSDAVLRARAGIKDPNRPIGSFIFLGPTGVGKTEL

SEQ ID NO: 6731 - protein, 344 aa, Bacillus anthracis
GVGKTAIAEGLAQQIVNNEVPETLRDKRVMTLDMGTVVAGTKYRGEFEDRLKKVMDEIRQAGNIILFIDELHTLIGAGGAEGAIDASNILKPSLARGELQCIGATTLDEYRKYIEKDAALERRFQPIHVDEPSLDESTQILKGLRDRYEAHHRVSITDDAIDAAVKLSDRYITDRFLPDKAIDLIDEAASKVRLRSYTTPPNLKELEVKLEEIRKEKDAAVQSQEFEKAASLRDMEQRLREKLEDTKRQWKEQQGKENSEVTVEDIVNVVSTWTRIPVSKLAQTETDKLLNLESILHDRVIGQDEAVVAVAKAVRRARAGLKDPKRPIGSFIFLGPTGVGKTEL

SEQ ID NO: 6732 - protein, 177 aa, Bacillus subtilis
GVGKTAIAEGLAQQIINNEVPEILRDKRVMTLDMGTVVAGTKYRGEFEDRLKKVMDEIRQAGNIILFIDELHTLIGAGGAEGAIDASNILKPSLARGELQCIGATTLDEYRKYIEKDAALERRFQPIQVDQPSVDESIQILQGLRDRYEAHHRVSITDDAIEAAVKLSDRYISDRFL

SEQ ID NO: 6733 - protein, 904 aa, Magnetococcus sp. MC-1
MMKKQSLYHIPQPFLLYWCAPLAFAHRHPYLLSDSPITPEEETMKQEQLTSKSAEALNSAVGLAAERNHQFVEPEHLLLAMLEQKDGVIPALLIKMNTPLPALQQATSVAVENLPRVHGGGAAQTLPSRRLQSLWQDAEREAATLRDDYTSTEHFLLAMTEHKEGALPSLLRPFTITRTRVLEALKTVRSGQRVTSKEPEGTFQALEKYARDLTALAKSGKLDPVIGRDEEIRRTIQVLSRRTKNNPVLIGEPGVGKTAIVEGLALRMERGDVPESLKGVRVVALDMGALVAGAKYRGEFEERLKAVIKEVQEAQGKIILFIDEMHTIVGAGQSEGAMDAGNLLKPALARGDLHCVGATTLDEYRKHVEKDPALERRFQPVQVREPSVEATISILRGIKDKYELHHGVRITDAAIVAAATLAHRYISDRFLPDKAIDLVDEAAARIRMEITSKPQVLDSLDRQILQLQIEQSALSKEKDSASRERLTKLEAELADLKENAHAMTIRWEQERLNIKQVGILKETLESTRLQLEQAERSGNLEKAGELRYGTLPKLEQELQKAQELAAQSRENPLLKELVDEEEIATVVARWTGIPVARMLEGEKDKLLKMEERLGHQVVGQERALQAIARAVRRARAGLQDNNRPIGSFFFLGPTGVGKTELSKALAQFLFNDESAMVRLDMSEYMEKHTVARLIGAPPGYVGYEEGGQLTEQVRRRPYSVVLLDEVEKAHPDLFNTLLQVLDEGRLTDGHGRTVDFRNTVLIMTSNIGSHLMAEGGPTAQVEHRVMELLKQTFRPEFLNRLDEIIPFHALQREHMGAIVDIQLKRLHKLLDKLNIRLELEPAARAALAEEGYDPIYGARPLKRVMQRLVQDPLAEAMLSGHLHEGDRVVIHFDGEQFVINPVHR

SEQ ID NO: 6734 - protein, 869 aa, Staphylococcus aureus subsp. aureus Mu50
MDINKMTYAVQSALQQAVELSQQHKLQNIEIEAILSAALNESESLYKSILERANIEVDQLNKAYEDKLNTYASVEGDNIQYGQYISQQANQLITKAESYMKEYEDEYISMEHILRSAMDIDQTTKHYINNKVEVIKEIIKKVRGGNHVTSQNPEVNYEALAKYGRDLVEEVRQGKMDPVIGRDEEIRNTIRILSRKTKNNPVLIGEPGVGKTAIVEGLAQRIVKKDVPESLLDKTVFELDLSALVAGAKYRGEFEERLKAVLKEVKESDGRIILFIDEIHMLVGAGKTDGAMDAGNMLKPMLARGELHCIGATTLNEYREYIEKDSALERRFQKVAVSEPDVEDTISILRGLKERYEVYHGVRIQDRALVAAAELSDRYITDRFLPDKAIDLVDQACATIRTEMGSNPTELDQVNRRVMQLEIEESALKNESDNASKQRLQELQEELANEKEKQAALQSRVESEKEKIANLQEKRAQLDESRQALEDAQTNNNLEKAAELQYGTIPQLEKELRELEDNFQDEQGEDTDRMIREVVTDEEIGDIVSQWTGIPVSKLVETEREKLLHLSDILHKRVVGQDKAVDLVSDAVVRARAGIKDPNRPIGSFLFLGPTGVGKTELAKSLAASLFDSEKHMIRIDMSEYMEKHAVSRLIGAPPGYIGHDEGGQLTEAVRRNPYSVILLDEVEKAHTDVFNVLLQILDEGRLTDSKGRSVDFKNTIIIMTSNIGSQVLLENVKETGEITESTEKAVMTNLNAYFKPEILNRMDDIVLFKPLSIDDMSMIVDKILTQLNIRLLEQRISIEVSDDAKAWLGQEAYEPQYGARPLKRFVQRQIETPLARMMIKEGFPEGTTIKVNLNSDNNLTFNVEKIHE

SEQ ID NO: 6735 - protein, 828 aa, Brachyspira hyodysenteriae
MFQFHLTSKAKKVIELYAQEEAKRLNHDMVTPEHILLGLLYESEALATRVLMRLKIDLDRLKLELESAMVKSSTTKVFGTLPTAPRVQKLISRSAEEARALSHNYIGTEHLLLGLLREESGTAYNVLTSMGLELTILRQEILKMLGVAGSNISSMEQTSQEDNVKKVKTPTLDQFARDLTKMARDKALDRVIGRENEVMRVVQILSRRKKNNPILLGEPGVGKTAIVEGLAEKIVAADVPDILLKKRVLTLDLSSVVAGTKYRGEFEERIKNIVLEIKKASNIIIFIDELHTLIGAGGAEGALDAANMLKPALSRGEIQCIGATTINEYKKYIEKDGALVRRFQPINVEEPSIEDTIEILNGIKGKYEEHHKVKYTDEAINAAAVLSKRYIFERHLPDKAIDLIDEAGSRARLLNMTRPQEFKDLEKKIEELNQQKKRVVESQNFEDAAKIRDEITSLQEELSKKEEKCREEREKIETFIEEDDIRHVISEITNIPIKRLLNSESKRLIGMEEELHQKVVGQKEAISSISKAIRRSRAGLKTSKRPLGSFIFLGPTGVGKTALAKVLSEFMFGDSDALIRIDMSEFMEKFAVSRLIGAPPGYVGYEEGGGLTEKVRRKPYSLILFDEIEKAHPDVTNILLQVLEEGQLTDNFGRKVDFSNTIIIITSNLGARDIVKGSSLGFNAVGSEKDANDIKNFALEELKQNFNPEFLNRIDDIIVFHTLSKEDLKDIINIMLKELNEAIKERNIVINLSEEAKNYIIDKGFDKKYGARSLRRAIQKEIEDYVSTEILFGNIEDGDTINVDRNDGSLIFSYDKSVKTENKELSKS

SEQ ID NO: 6736 - protein, 763 aa, Lactobacillus gasseri
REEIERYTGYGSSPKATYMEMSPRLSLVLNFAKQKSDELGTPQIETKHILLGLLASDQILASLILKNIGVEPRDLSQDINDSFMDDSGEANNIFDVSSATRTKKGKSLTPNLDKVSVNLNKRAREGAIDPVIGRDKEIKRVIQILSRRTKNNPVLVGEPGVGKTAVAQGIASAIVNREVPDNLAKKRVMALDMGSLIAGTKYRGEFEDRMKKILKEIQRDGSVILFVDEMHTLIGAGGAEGAIDASNILKPSLARGDIQMIGATTFDEYQKYIEKDQALARRFQQVKIGEPSKEETVDILKGLRPKYEKFHNVKIEDEAIKDAVEFSTRYIANRFLPDKAIDLIDEASAAVKIQAVGKADPRLTKLDTQINDVIHQKEEAAENQNFVQAAKLRDEENKLTQDRDKLIARVENKNSKKSIVDSNKIAQIVSEWTGVPVTRMKKSETKRLAHLESILHERVIGQDKAISAVSRAIRRSRSGIKDENRPIGSFLFLGPTGVGKTELAKALAAAVFGSERNIIRVDMSEYMDQVATSKLIGSAPGYVGYEEGGQLSERVRRNPYSVILLDEVEKAHPDVFNLLLQVLDEGFLTDSKGRKVDFRNTIIIMTSNLGSRSLQEDKTVGFAADNEDKNKLQQEKVTAAVKQFFRPEFLNRIDETVVFDSLTKKQLREIVSLMTSHLISRLARKEVTLKISPAALDVLAKDGFDPEMGARPLRRAIQHELEDVIAEDLISEKIKAGQTVKVGAHQGKLKFTIVDKDKPLVKN

SEQ ID NO: 6737 - protein, 722 aa, Lactobacillus gasseri
MLCDNCHERPASIHLYTNVNGQDREISLCQQCYQELKNQQGQINNMNNNNAFFGDFDDLLNALNNSNNEQNNSQDRDPRMRMGGGRRGGNNGGQKSLLDQYGTDLTNLAKKGKIDPVIGRDKEIARVIEILNRRTKNNPVLIGEAGVGKTAVVEGLAQQIVDGSVPAKLQNKRIISLNMVSMVQGTGIRGQFEQRMQQLIKELEQNDNIILFIDEIHELVGTGNAEGGMDAGNIIKPALARGDFQLIGATTIKEYRNIEKDSALARRFQPVEVKEPTTEETVKILQGIRKRYEDYHHVHYTDEAIQAAVALSSRYIQDRFLPDKAIDLLDEAGSRMNLTIPYVDSEKIKERLDAAENLKQEALKNEDYEKAAYYRDQIEKYEKLKDQKVDPDQTPKITEKIMNKIVEEKTNIPVGDLQKQEETQLKNLSTDLKNNVIGQNKAVETVARAIRRNRVGFNKSGRPIGSFLFVGPTGVGKTELAKQLAKQIFGTEDAMIRFDMSEYMEQYSVSKLIGSAPGYVGYEEAGQLTERVRHNPYSLILFDEIEKAHPDVLHLFLQILDDGRLTDSQGRTVSFKDTIIIMTSNAGQGIKEANVGFAAENSHQEQFKNALGQYFKPEFLNRLDDIVEFNSLDKKDLIKIVDLMLANTNNMVKDQGLHIEVTPEAKELLVEKGYDPSMGARPLRRTIQEEIEDKVADYKLDNPAAKDLKADVVDNAIVISEN

SEQ ID NO: 6738 - protein, 709 aa, Lactobacillus sakei
MNNLFTPSAKNVLMLAQEQAKKFNHHALGTEHLLLALVLESEGIAGNALRELGVTPTDVLEEIERLTGYGDSIVAMGVGGYLPYSPKAKQVLDLARVESQQANSVKIGTAHLLLALLRDDDIIAARILLNLGLSLAKTRQLLLQKMGIDAATAKKRAKASAKKVDQEGTPTLNQLARDLTQMARENQIDPVVGRDSEVKRLVQILARRSKNNPVLIGEPGVGKTAIAEGFAQRIINGDVPSDMQQKRLMMLDMGSLVAGTKYRGEFEDRLKKIIEEIHEDGQVILFIDELHTLIGAGGAEGAIDASNILKPALARGELQLIGATTLDEYQKYIEKDAALERRFATVTVDEPTPEDAEQILRGLRPRYEEHHGITISDEALHEAVVLANRYITNRFLPDKAIDLMDEAAAKVRLDAVNQKSPIDRLETELQSLAKEKEVAVGAQDFEKAAAIHEKEIIAKAKMAKRQAAEQENGVRTDIQVQPEDIAQVVAQWTGVPVTQLQRKESERLLQLEKVLHERVVGQEEAISAVARAIRRARSGLKDPKRPIGSFMFLGPTGVGKTELAKALAEAMFGSEDNLIRVDMSEYMERYSTSRLVGAAPGYVGYDEGGQLTEKVRNKPYSVVLFDEVEKAHPDVFNILLQVLDDGYLTDSKGRKVDFRNTIMIMTSNLGATALRDDKSVGFGVKDVTADYKAMQGRILEELKKLFRPE

SEQ ID NO: 6739 - protein, 878 aa, Treponema pallidum
MNTDRYTVKASEALNDAISLAEAENHGQVEEEHLLHALLSQKDGIISPLIEKIGAKPDFLYDELLQCLRRKPRVTGPAAQTRCAPTLSKACARAERLALKNQDEYVSCEHLLLAISETDSNTARLLHSQGITSKTISAALKDIRGSKRVTSQDPESTFQCLEKYCRDLTTLAREEKIDPVIGRDEEIRRVMQVLSRRTKNNPVLIGEPGVGKTAIVEGLARRIVSGDVPESLKGKRLLSLDLGALVAGAKFRGEFEERLKAVIEAVQKSDGGVILFIDELHTLVGAGASEGSMDASNLLKPALARGELRSIGATTLNEYRKYIEKDAALERRFQQVYCVQPTVEDTIAILRGLQEKYEVHHGVRIKDEALVAATVLSDRYITNRFLPDKAIDLVDEAASRLKMEIESQPVELDQVERKILQLNIEKASLLKESDPASKERLEKLEKELAGFLERRAAMQVQWQNEKGRIEESRRYKEELERLRIEETMFSREGDLNKAAELRYGKIPELEKKIMLLTAEVEKKSGLEGQLLREEVCEEDIAKIISMWTGIPVSKMMASEQQKYLQLESVLMQRVVGQDEAVRVISDAIRRNKAGLSDTRRPLGSFLCVGPTGVGKTELARTLADFLFNDERALTRIDMSEYMEKHAISRLIGAPPGYVGYDEGGQLTEAVRRRPYSVLLFDEVEKAHQDVFNIFLQILDDGRLTDGQGRVVDFRNTIIIMTSNIGSEHILSARESRTHTSDLPVPETQSTEEQTLPEQIRGLLHTYFRPEFLNRIDEVLIFKRLTRKHIRLITDIQLQMVVERLESRHIKLRVRDAAKAYLAERGYDDTFGARPLKRAIQTELENALAREILSGRFRGGSTIVVDMCKDALCFTEQTS

SEQ ID NO: 6740 - protein, 854 aa, Pseudomonas putida KT2440
MRIDRLTSKLQLAISDAQSLAVGMDHPAIEPVHLLQALLEQQGGSIKPLLMQVGFDINGLRQGLVKELDQLPKIQNPTGDVNMSQDLARLLNQADRLAQQKGDQFISSELVLLAAMDENSKLGKLLLSQGVSKKALENAINNLRGGAAVNDANAEESRQALDKYTVDLTKRAEEGKLDPVIGRDDEIRRTVQVLQRRTKNNPVLIGEPGVGKTAIAEGLAQRIINGEVPDGLKGKRLLALDMGALIAGAKYRGEFEERLKSLLNELSKQEGQIILFIDELHTMVGAGKGEGAMDAGNMLKPALARGELHCVGATTLNEYRQFIEKDAALERRFQKVLVEEPSEEDTIAILRGLKERYEVHHKVAITDGAIIAAAKLSHRYITDRQLPDKAIDLIDEAASRIRMEIDSKPEVLDRLDRRLIQLKVESQALKKEEDEAAKKRLEKLTEEIERLEREYSDLEEIWASEKAEVQGSAQIQQKIEQSRQELEAARRKGDLNRMAELQYGVIPDLERSLQMVDQHGKTDNQLLRNKVTEEEIAEVVSKWTGIPVAKMLEGEREKLLKMEELLHQRVIGQSEAVTAVANAVRRSRAGLSDPNRPSGSFLFLGPTGVGKTELCKALAEFLFDTEEAMVRIDMSEFMEKHSVARLIGAPPGYVGYEEGGYLTEAVRRKPYSVVLLDEVEKAHPDVFNVLLQVLEDGRLTDSHGRTVDFRNTVIVMTSNLGSAQIQELVGDREAQRAAVMDAVGAHFRPEFINRIDEVVVFEPLGREQIAGITEIQLGRLRSRLLERELSLSLSPEALDKLIAVGYDPVYGARPLKRAIQRWIENPLAQLILAGKFLPGTAITAKVEGDEIVFG

SEQ ID NO: 6741 - protein, 760 aa, Streptococcus pyogenes M1 GAS
MLCQNCNLNESTIHLYTSVNGKQRQVDLCQNCYQIMKSDPANSILNGLTPGYRAQDRSTSPFFDDFFGDLNNFRAFGNLPNTPPTQAGQNGNGGGRYGGNYNGQRPAQPQTPNQQAKGLLEEFGINVTDIARNGNIDPVIGRDEEITRVIEILNRRTKNNPVLIGEPGVGKTAVVEGLAQKIIDGTVPQKLQGKQVIRLDVVSLVQGTGIRGQFEERMQKLMEEIRNRKDVILFIDEIHEIVGAGSAGDGNMDAGNILKPALARGELQLVGATTLNEYRIIEKDAALERRMQPVKVDEPSVEETITILKGIQPKYEDYHHVKYSPAAIEAAAHLSNRYIQDRFLPDKAIDLLDEAGSKMNLTLNFVDPKEIDKRLIEAENLKAQATRDEDYERAAYFRDQITKYKEMQAQKVDEQDIPIITEKTIEAIVEQKTNIPVGDLKEKEQSQLVNLANDLKAHVIGQDDAVDKIAKAIRRNRVGLGTPNRPIGSFLFVGPTGVGKTELSKQLAIELFGSTNNMIRFDMSEYMEKHAVAKLVGAPPGYIGYEEAGQLTEQVRRNPYSLILLDEVEKAHPDVMHMFLQVLDDGRLTDGQGRTVSFKDTIIIMTSNAGTGKSEASVGFGAAREGRTSSVLGELSNFFSPEFMNRFDGIIEFKALSKEHLLHIVDLMLEDVNERLGYNGIHLDVTQKVKEKLVDLGYDPKMGARPLRRTIQDYIEDAITDYYLEHPTEKQLRALMTNSENITIKAVKEGDSFLNEESLD

SEQ ID NO: 6742 - protein, 699 aa, Streptococcus pyogenes M1 GAS
MTHFSGKDPFVNMDDIFNQLMANMGGYRSENPRYLVNGREITPEEFQHYRQTGQLPVATTKATNSQMLTPKADSVLTQLGTNLTQEARQGHLDPVIGRNKEIQDTAEILARRTKNNPVLVGDAGVGKTAVIEGLAQAIVNGDVPAAIKNKEIVSIDISSLEAGTQYRGSFEETIQNLIQEVKEAGNIILFFDEIHQIVGAGATSSDSGSKGLADILKPALSRGELTLIGATTQDEYRNTILKNAALARRFNEVKVNAPSAEDTFHILMGIRNLYEQHHHITLPDNVLKAAVDYSIQYIPQRSLPDKAIDLLDMTAAHLAAQHPVTDLKTLETEIAKQKESQEKAVAKEDFEKALAAKTRIETLQKQIEQHNQSQNVTATVNDIAESVERLTGIPVSNMGTNDLERLKGISSRLKSHVIGQDEAVAAVARAIRRNRAGFDDGKRPIGSFLFVGPTGVGKTELAKQLALDLFGSKDAIIRLDMSEYNDRTAVSKLIGTTAGYVGYDDNNNTLTERVRRNPYAIVLLDEIEKADPQIITLLLQVLDDGRLTDGQGNTINFKNTVIIATSNAGFGQQDTETSESNIMDRIAPYFRPEFLNRFNSIIKFNHLQKESLEEIVDLMLAEVNQTTAKKGISLTITDDAKAHLIDLGYNHAMGARPLRRIIEQEIRDRITDYYLDHPEVKKLQAILKEGQLVIRQNDQ

SEQ ID NO: 6743 - protein, 814 aa, Streptococcus pyogenes M1 GAS
MIMYSTKMQDIFRQAQFQAARFDSHCLETWHVLLAMVAVDNSLANMILSEYDAQVAIEEYEAAAILAMGKTPKEQLSRVDFRPQSKTLTNLLAFAQAISQITRDQEVGSEHVLFAILLNPDIMASRLLEIAGYQIKDNGNGQPRLADLRKAIERHAGYSKEMIKAIHELRKPKKTKTQGTFSDMMKPPSTAGELSDFTRDLTEMARQGLLESVIGRDQEVSRMIQVLSRKTKNNPVLVGDAGVGKTALAYGLAQRIANGAIPYELKEMRVLELDMMSVVAGTRFRGDFEERMNQIIDDIEADGQIILFVDELHTIMGSGSGIDSTLDAANILKPALSRGTLHMVGATTQEEYQKHIEKDAALSRRFAKILIEEPNTEDAYQILMGLKLSYETYHNVSISNEAVKTAVKMAHRYLTSKNLPDSAIDLLDEASAAVQNMVKKSAPETLTPIDQALINGDMKKVSRLLAKEAKGQMRKPTPVTEDDILATLSKLSGIPLEKLTQADSKKYLNLEKELHKRVIGQDAAVTAISRAIRRNQSGIRTGKRPIGSFMFLGPTGVGKTELAKALAEVLFDDEAALIRFDMSEYMEKFAASRLNGAPPGYVGYDEGGELTQKVRNKPYSVLLFDEVEKAHPDIFNVLLQVLDDGILTDSRGRKVDFSNTIIIMTSNLGATALRDDKTVGFGVKDIHQDHQAMEKRILEELRKTYRPEFINRIDEKVVFHSLTQDNMRDVVKIMVQPLITTLAEKGITLKIQPLALKHLSEVGYDEHMGARPLRRTLQTEIEDKLSELILSRELTSGHTLKIGLSHGKLTFHIA

SEQ ID NO: 6744 - protein, 752 aa, Streptococcus pneumoniae TIGR4
MLCQNCKINDSTIHLYTNLNGKQKQIDLCQNCYKIIKTDPNNSLFKGMTDLNNRDFDPFGDFFNDLNNFRPSSNTPPIPPTQSGGGYGGNGGYGSQNRGSAQTPPPSQEKGLLEEFGINVTEIARRGDIDPVIGRDDEIIRVIEILNRRTKNNPVLIGEPGVGKTAVVEGLAQKIVDGDVPHKLQGKQVIRLDVVSLVQGTGIRGQFEERMQKLMEEIRKREDIILFIDEIHEIVGAGSASDGNMDAGNILKPALARGELQLVGATTLNEYRIIEKDAALERRMQPVKVDEPTVDETITILKGIQKKYEDYHHVQYTDAAIEAAATLSNRYIQDRFLPDKAIDLLDEAGSKMNLTLNFVDPKVIDQRLIEAENLKSQATREEDFEKAAYFRDQIAKYKEMQKKKITDQDTPSISEKTIEHIIEQKTNIPVGDLKEKEQSQLIHLAEDLKSHVIGQDDAVDKIAKAIRRNRVGLGTPNRPIGSFLFVGPTGVGKTELSKQLAIELFGSADSMIRFDMSEYMEKHSVAKLVGAPPGYVGYDEAGQLTEKVRHNPYSLILLDEVEKAHPDVMHMFLQVLDDGRLTDGQGRTVSFKDAIIIMTSNAGTGKTEASVGFGAAREGRTNSVLGELGNFFSPEFMNRFDGIIEFKALSKDNLLQIVELMLADVNKRLSSNNIRLDVTDKVKEKLVDLGYDPKMGARPLRRTIQDYIEDTITDYYLENPSEKDLKAVMTSKGNIQIKSAKKAEVKSSEKEK

SEQ ID NO: 6745 - protein, 701 aa, Streptococcus pneumoniae TIGR4
MNNNFNNFNNMDDLFNQLMGGMRGYSSENRRYLINGREVTPEEFAHYRATGQLPGNAETDVQMPQQASGMKQGGVLAKLGRNLTAEAREGKLDPVIGRNKEIQETSEILSRRTKNNPVLVGDAGVGKTAVVEGLAQAIVNGDVPAAIKNKEIISIDISGLEAGTQYRGSFEENVQNLVNEVKEAGNIILFFDEIHQILGAGSTGGDSGSKGLADILKPALSRGELTVIGATTQDEYRNTILKNAALARRFNEVKVNAPSAENTFKILQGIRDLYQQHHNVILPDEVLKAAVDYSVQYIPQRSLPDKAIDLVDVTAAHLAAQHPVTDVHAVEREIETEKDKQEKAVEAEDFEAALNYKTRIAELERKIENHTEDMKVTASVNDVAESVERMTGIPVSQMEASDIERLKDMAHRLQDKVIGQDKAVEVVARAIRRNRAGFDEGNRPIGNFLFVGSTGVGKTELAKQLALDMFGTQDAIIRLDMSEYSDRTAVSKLIGTTAGYVGYDDNSNTLTERVRRNPYSIILLDEIEKADPQVITLLLQVLDDGRLTDGQGNTVNFKNTVIIATSNAGFGYEANLTEDADKPELMDRLKPFFRPEFLNRFNAVIEFSHLTKEDLSKIVDLMLAEVNQTLAKKDIDLVVSQAAKDYITEEGYDEVMGVRPLRRVVEQEIRDKVTDFHLDHLDAKHLEADMEDGVLVIREKV

SEQ ID NO: 6746 - protein, 810 aa, Streptococcus pneumoniae TIGR4
MNYSKALNECIESAYMVAGHFGARYLESWHLLIAMSNHSYSVAGATLNDYPYEMDRLEEVALELTETDYSQDETFTELPFSRRLQVLFDEAEYVASVVHAKVLGTEHVLYAILHDSNALATRILERAGFSYEDKKDQVKIAALRRNLEERAGWTREDLKALRQRHRTVADKQNSMANMMGMPQTPSGGLEDYTHDLTEQARSGKLEPVIGRDKEISRMIQILSRKTKNNPVLVGDAGVGKTALALGLAQRIASGDVPAEMAKMRVLELDLMNVVAGTRFRGDFEERMNNIIKDIEEDGQVILFIDELHTIMGSGSGIDSTLDAANILKPALARGTLRTVGATTQEEYQKHIEKDAALSRRFAKVTIEEPSVADSMTILQGLKATYEKHHRVQITDEAVETAVKMAHRYLTSRHLPDSAIDLLDEAAATVQNKAKHVKADDSDLSPADKALMDGKWKQAAQLIAKEEEVPVYKDLVTESDILTTLSRLSGIPVQKLTQTDAKKYLNLEAELHKRVIGQDQAVSSISRAIRRNQSGIRSHKRPIGSFMFLGPTGVGKTELAKALAEVLFDDESALIRFDMSEYMEKFAASRLNGAPPGYVGYEEGGELTEKVRNKPYSVLLFDEVEKAHPDIFNVLLQVLDDGVLTDSKGRKVDFSNTIIIMTSNLGATALRDDKTVGFGAKDIRFDQENMEKRMFEELKKAYRPEFINRIDEKVVFHSLSSDHMQEVVKIMVKPLVASLTEKGIDLKLQASALKLLANQGYDPEMGARPLRRTLQTEVEDKLAELLLKGDLVAGSTLKIGVKAGQLKFDIA

SEQ ID NO: 6747 - protein, 752 aa, Streptococcus pneumoniae R6
MLCQNCKINDSTIHLYTNLNGKQKQIDLCQNCYKIIKTDPNNSLFKGMTDLNNRDFDPFGDFFNDLNNFRPSSNTPPIPPTQSGGGYGGNGGYGSQNRGSAQTPPPSQEKGLLEEFGINVTEIARRGDIDPVIGRDDEIIRVIEILNRRTKNNPVLIGEPGVGKTAVVEGLAQKIVDGDVPHKLQGKQVIRLDVVSLVQGTGIRGQFEERMQKLMEEIRKREDIILFIDEIHEIVGAGSASDGNMDAGNILKPALARGELQLVGATTLNEYRIIEKDAALERRMQPVKVDEPTVDETITILKGIQKKYEDYHHVQYTDAAIEAAATLSNRYIQDRFLPDKAIDLLDEAGSKMNLTLNFVDPKVIDQRLIEAENLKSQATREEDFEKAAYFRDQIAKYKEMQKKKITDQDTPIISEKTIEHIIEQKTNIPVGDLKEKEQSQLIHLAEDLKSHVIGQDDAVDKIAKAIRRNRVGLGTPNRPIGSFLFVGPTGVGKTELSKQLAIELFGSADSMIRFDMSEYMEKHSVAKLVGAPPGYVGYDEAGQLTEKVRHNPYSLILLDEVEKAHPDVMHMFLQVLDDGRLTDGQGRTVSFKDAIIIMTSNAGTGKTEASVGFGAAREGRTNSVLGELGNFFSPEFMNRFDGIIEFKALSKDNLLQIVELMLADVNKRLSSNNIRLDVTDKVKEKLVDLGYDPKMGARPLRRTIQDYIEDTITDYYLENPSEKDLKAVMTSKGNIQIKSAKKAEVKSSEKEK

SEQ ID NO: 6748 - protein, 701 aa, Streptococcus pneumoniae R6
MNNNFNNFNNMDDLFNQLMGGMRGYSSENRRYLINGREVTPEEFAYYRATGQLPGNAESDVQMQQQASGMKQDGVLAKLGRNLTAEAREGKLDPVIGRNKEIQEASEILSRRTKNNPVLVGDAGVGKTAVVEGLAQAIVNGDVPAAIKNKEIVSIDISGLEAGTQYRGSFEENVQNLVNEVKEAGNIILFFDEIHQILGAGSTGGDSGSKGLADILKPALSRGELTVIGATTQDEYRNTILKNAALARRFNEVKVNAPSAENTFKILQGIRDLYQQHHNVILPDEVLKAAVDYSVQYIPQRSLPDKAIDLVDVTAAHLAAQHPVTDVHAVEREIETEKDKQEKAVEAEDFEAALNYKTRIAELERKIENHTEDMKVTASVNDVAESVERMTGIPVSQMGASDIERLKDMAHRLQDKVIGQDKAVEVVARAICRNRAGFDEGNRPIGNFLFVGSTGVGKTELAKQLALDMFGTQDAIIRLDMSEYSDRTAVSKLIGTTAGYVGYDDNSNTLTERVRRNPYSIILLDEIEKADPQVITLLLQVLDDGRLTDGQGNTVNFKNTVIIATSNAGFGYEANLTEDADKPELMDRLKPFFRPEFLNRFNAVIEFSHLTKEDLSKIVDLMLAEVNQTLAKKDIDLVVSQAAKDYITEEGYDEVMGVRPLRRVVEQEIRDKVTDFHLDHLDAKHLEADMEDGVLVIREKV

SEQ ID NO: 6749 - protein, 762 aa, Streptococcus pneumoniae R6
MNYSKALNECIESAYMVAGHFGARYLESWHLLIAMSNHSYSVAGATLNDYPYEMDRLEEVALELTETDYSQDETFTELPFSRRLQILFDEAEYVASVVHAKVLGTEHVLYAILHDGNALATRILERAGFSYEDKKDQVKIAALRRNLEERAGWTREDLKALRQRHRTVADKQNSMANMMGMPQTPSGGLEDYTHDLTEQARSGKLEPVIGRDKEISRMIQILSRKTKNNPVLVGDAGVGKTALALGLAQRIASGDVPAEMAKMRVLELDLMNVVAGTRFRGDFEERMNNIIKDIEEDGQVILFIDELHTIMGSGSGIDSTLDAANILKPALARGTLRTVGATTQEEYQKHIEKDAALSRRFAKVTIEEPSVADSMTILQGLKATYEKHHRVQITDEAVETAVKMAHRYLTSRHLPDSAIDLLDEAAATVQNKAKHVKADDSDLSPADKALMDGKWKQAAQLIAKEEEVPVYKDLVTESDILTTLSRLSGIPVQKLTQTDAKKYLNLEAELHKRVIGQDQAVSSISRAIRRNQSGIRSHKRPIGSFMFLGPTGVGKTELAKALAEVLFDDESALIRFDMSEYMEKFAASRLNGAPPGYVGYEEGGELTEKVRNKPYSVLLFDEVEKAHPDIFNVLLQVLDDGVLTDSKGRKVDFSNTIIIMTSNLGATALRDDKTVGFGAKDIRFDQENMEKRMFEELKKAYRPEFINRIDEKVVFHSLSSDHMQEVVKIMVKPLVASLAEKGIDLKLQASALKLLANQGYDP

SEQ ID NO: 6750 - protein, 869 aa, Staphylococcus epidermidis ATCC 12228
MDINQMTYAVQGALQKAVAYSKEYELQNIEVEALLKAAMNENDSLFKSILERANIDVDQLIKAYDNQLSHYPTVQGDNVQYGQYISAKTNELLDKAEKYMKSYEDEFISMEHILRAAIDTDETTQKWVGNKVEVIKEIITKVRGGNHVTSQNPEVNYEALEKYGRDLVEEVRQGKMDPVIGRDEEIRNTIRILSRKTKNNPVLIGEPGVGKTAIVEGLAQRIVRKDVPESLLDKTIFELDLSALVAGAKYRGEFEERLKAVLKEVKESEGRIILFIDEIHMLVGAGKTDGAMDAGNMLKPMLARGELHCIGATTLNEYREYIEKDSALERRFQKVGVSEPDVEDTISILRGLKERYEVYHGVRIQDRALVAAAELSDRYITDRFLPDKAIDLVDQACATIRTEMGSNPTELDQVNRRVMQLEIEESALKNESDNASKHRLEELQEELSNEKEKQSSLKSRVEQEKEKIAKVQEKRAELDSSRQALEDAQTEGNLEKAAELQYGTIPQLEKELQEFEEAFQDETGEDSERMIREVVSDEEIGDIVSQWTGIPVSKLVETEREKLLSLSDILHKRVVGQDKAVDLVSDAVVRARAGIKDPNRPIGSFLFLGPTGVGKTELAKSLASSLFDSEKHMIRIDMSEYMEKHAVSRLIGAPPGYVGHDEGGQLTEAVRRNPYSVILLDEVEKAHSDVFNVLLQILDEGRLTDSKGRSVDFKNTIIIMTSNIGSQVLLENVKDAGEISDDTEKAVMDSLHAYFKPEILNRMDDIVLFKPLSVNDMSMIVDKILTQLNMRLLDQHISIEVTEEAKKWLGEEAYEPQFGARPLKRFVQRQIETPIARMMIKESLPEGTIIKVDLNDNKELDFKVVKPTS

SEQ ID NO: 6751 - protein, 877 aa, Mycobacterium bovis
MGKIERNRLNIDGVEQPDKHFERTPNGGVVDSFNPTTKTQAALTAALQAASTAGNPEIRPAHLLMALLTQNDGIAAPLLEAVGVEPATVRAETQRLLDRLPQATGASTQPQLSRESLAAITTAQQLATELDDEYVSTEHVMVGLATGDSDVAKLLTGHGASPQALREAFVKVRGSARVTSPEPEATYQALQKYSTDLTARAREGKLDPVIGRDNEIRRVVQVLSRRTKNNPVLIGEPGVGKTAIVEGLAQRIVAGDVPESLRDKTIVALDLGSMVAGSKYRGEFEERLKAVLDDIKNSAGQIITFIDELHTIVGAGATGEGAMDAGNMIKPMLARGELRLVGATTLDEYRKHIEKDAALERRFQQVYVGEPSVEDTIGILRGLKDRYEVHHGVRITDSALVAAATLSDRYITARFLPDKAIDLVDEAASRLRMEIDSRPVEIDEVERLVRRLEIEEMALSKEEDEASAERLAKLRSELADQKEKLAELTTRWQNEKNAIEIVRDLKEQLEALRGESERAERDGDLAKAAELRYGRIPEVEKKLDAALPQAQAREQVMLKEEVGPDDIADVVSAWTGIPAGRLLEGETAKLLRMEDELGKRVIGQKAAVTAVSDAVRRSRAGVSDPNRPTGAFMFLGPTGVGKTELAKALADFLFDDERAMVRIDMSEYGEKHTVARLIGAPPGYVGYEAGGQLTEAVRRRPYTVVLFDEIEKAHPDVFDVLLQVLDEGRLTDGHGRTVDFRNTILILTSNLGSGGSAEQVLAAVRATFKPEFINRLDDVLIFEGLNPEELVRIVDIQLAQLGKRLAQRRLQLQVSLPAKRWLAQRGFDPVYGARPLRRLVQQAIGDQLAKMLLAGQVHDGDTVPVNVSPDADSLILG

SEQ ID NO: 6752 - protein, 848 aa, Mycobacterium leprae
MDSFNPTTKMQVALTSALQAASSAGNPEIRPVHLLLAMLMQNDGIAAPLLETVGVEPDIVRNEAQRLLERLPQASGCSSQPQLSRESLAAITTAQQLATEMDDEYVSTEHLMLGLAMGDSDVAKLLTGHGASPQVLREAFVKIRGSARVTSSDPEFTYQALEKYSTDLTAQSGEGKLDPVIGRDNEIRRVVQVLSRRTKNNPVLIGEPGVGKTAIVEGLAQRIVAGDVPESLRDKTLVALDLGSMVAGAKYRGEFEQRLKVVLDDIKFSAGQIITFIDELHTIVGAGATGESAMDAGNMIKPMLARGELRLVGATTLDEYRRYIEKDAALERRFQQIFVGEPSVEDTVGILRGLKDRYEVHHGVRITDSALVAAAALSDRYITARFLPDKAIDLVDEAASRLRMEIDSRPVEIDEVERLVRRFEIEEMALVNEEDEASKERLETLRAELADQKERLAELTARWQNEKNAIDVVRELKEQLETLRGESERAERDGDLAKAAELRYGRIPEVEKKLEAAVPTAQAREDVMLKEEVGPDDIANVVSAWTGIPAGRLLEGETAKLLRMEDELGKRVVGQKKAVHAVSDAVRRSRAGVADPNRPTGSFLFLGPTGVGKTELAKALADFLFDDQRAMVRVDMSEYGEKHSVARLVGAPPGYIGHDQGGQLTEAVRRRPYTVVLFDEVEKAHSDVFDVLLQVLDEGRLTDGQGRTVDFRNTIPILTSNLGSGGSEEQVMAAVRSVFKPEFINRLDDVLIFDGLNPEELVRIVDIQLEQLGKRLAQRRLQLEVSLPAKRWLAQHGFDPVYGARPLRRLVQQAIGDQLAKMLLAGEVHDGDTLPVNVRPDGEALILG

SEQ ID NO: 6753 - protein, 561 aa, Anopheles gambiae str. PEST
MKAIMSELEKNRDVILFIDELHTIVGAGSSTGSLDASNMFKPALARGEIQCIGATTLDEYRQYIEKDGALERRFQKVMVEPTTIEESIQILNQIKDKYEEYHNVTYTDDAIKACVNLTARYITDRFLPDKAIDALDEAGSRVYIKNMKVPTEIIEYEKAIEEVKEQKQKAVKAQDYLEARKLKDEEERLQIELNLAQENWDKEVKEKKEVVTEENVAEVVSMMSGVPVTKVGKNELDKLSQMDAMLNGKVIGQEDAVRKVVKAIQRNRAGLKDPNRPIGTFIFLGTTGVGKTELAKVMARELFDSDEALIRIDMSEYMEKFAVSRLVGAPPGYVGYEEGGQLTEAVRRKPYAVVLLDEIEKAHPDVFNILLQILDEGHVTDSLGRKVDFRNTIIILTSNIGTRDLKDFGDGVGFGTSAKKSTSDTRARSTIENALKKAFAPEFLNRIDDIIIFNSLEKDDIKKIINLELGKLYSRLEKLDYHVELSDDATEFIAEKGWDKDFGARPLKRAIQKYIEDLLAEMLVNKQMKEGDKITLKVNEAKDALEAEKTPKKKEKEPKTS

SEQ ID NO: 6754 - protein, 351 aa, Rhodococcus erythropolis
MPYITDMLRDRNSAATPPAEERSEPVPVGAFDARRLSKALSSKIVGQQAAVDAVVRAISIAHVGATDPTRPLANILLVGPTGVGKTELVRRVAAELRSGPDDLCRIDMNALAQEHYAASFSGAPPGYAGSKESFTLFDKNTVEGDPYTPGIVLFDEVEKADPTVLRALLQVLDNGELRLANGQQKISFRNSYVFLTSNLGSAAVAERRRSHLRQLADRVRIDRPRHGHHLVQRALEKFFDPEFFNRIDETVILDEFDDQTAEQVTRLEIELITTRLARRGIDVEVDDSAVALLQRRGFDPVYGARGLRRTIRNVLADPVAGAVLDLRPVGTQPLALQARAVGDQIQVKKAP

SEQ ID NO: 6755 - protein, 882 aa, Giardia lamblia ATCC 50803
MPADKKYTNDLQKVMTESIRVSQRHGHSLVNQYHIAAALFADDDSISSKAVQKCSGDVSAIRRAIETGLKKTPSVTPVPDTPSPAGGYLGIINKMSAYAEEGRDEYLSTFHLAKAAAQDTDLARCLREGRVTSNRFVEEIEKMKKGRSMNSEFAEDTCEALEKYCVEMVAKAEEGKYDPLIARDNELRRIVEILSRRTKNNPVLTGPAGVGKTAILEGLAQRIVRADVPQNIRNARIYALDLGALIAGAQYRGQFEERLKAILDELKKSEGNSILFIDEIHTLIGAGGSKGTSDAANLLKPALARGEIRCIGATTTEEYRNHIASDRAFERRFAEVFVAEPNVEDTISILRGLSGRYQSHHQIRITDGALVAAAQLANRYVRAMGRHNPDAAIDLLDEAGASVRVTLDSQPAQLDALNRKKLRLQIEEEALRRESEARNADSSISKRLADIIKEISNIDMQIKPLEEQYNRERSSIDKISNIKARITALEDKLEVYTTRGEVSKAADLQYGAIPELRDELRRLEKEQEAASYAHHDEKAMLSAVVTEMEVANVVSKWTGIPVNKLTRTDREKLLSLEQTISSKVIGQEPAVKAVCSSILRARAGLSRPTQPLGSFLFLGSSGVGKTYLAKTIAEELYDSVDSMIHIDMSEYTEQHSVSRLIGAPPGYVGYEQAGQLTEAVSRKRYAVVLFDEIEKAHPKILTILLQILDEGRLTDGKGNCVDFTNTVIMLTSNLGSRELLQCYHSNVSASQAKQAKEHVIGVVRSTLPPELINRLDDLIVFNPLTKDALVKIFRSLCGQLEERLQHESGLRLRVDDAVADIALRDSDMVYGARPLRRFIEREITTAVARKLIEVPSDARSNREKRRCVHVSAKDDGIFVTIV

SEQ ID NO: 6756 - protein, 760 aa, Streptococcus pyogenes MGAS8232
MLCQNCNLNESTIHLYTSVNGKQRQVDLCQNCYQIMKSDPANSILNGLTPGYRAQDRSTSPFFDDFFGDLNNFRAFGNLPNTPPTQAGQNGNGGGRYGGNYNGQRPAQPQTPNQQAKGLLEEFGINVTDIARNGNIDPVIGRDEEITRVIEILNRRTKNNPVLIGEPGVGKTAVVEGLAQKIIDGTVPQKLQGKQVIRLDVVSLVQGTGIRGQFEERMQKLMEEIRNRKDVILFIDEIHEIVGAGSAGDGNMDAGNILKPALARGELQLVGATTLNEYRIIEKDAALERRMQPVKVDEPSVEETITILKGIQPKYEDYHHVKYSPAAIEAAAHLSNRYIQDRFLPDKAIDLLDEAGSKMNLTLNFVDPKEIDKRLIEAENLKAQATRDEDYERAAYFRDQITKYKEMQAQKVDEQDIPIITEKTIEAIVEQKTNIPVGDLKEKEQSQLVNLANDLKAHVIGQDEAVDKIAKAIRRNRVGLGTPNRPIGSFLFVGPTGVGKTELSKQLAIELFGSTNNMIRFDMSEYMEKHAVAKLVGAPPGYVGYEEAGQLTEQVRRNPYSLILLDEVEKAHPDVMHMFLQVLDDGRLTDGQGRTVSFKDTIIIMTSNAGTGKSEASVGFGAAREGRTSSVLGELSNFFSPEFMNRFDGIIEFKALSKEHLLHIVDLMLEDVNERLGYNGIHLDVTQKVKEKLVDLGYDPKMGARPLRRTIQDYIEDAITDYYLEHPTEKQLRALMTNSENITIKAVKEGDSFLNEESLD

SEQ ID NO: 6757 - protein, 699 aa, Streptococcus pyogenes MGAS8232
MTHFSGKDPFVNMDDIFNQLMANMGGYRSENPRYLVNGREITPEEFQHYRQTGQLPVATTKATNSQMLTPKADSVLTQLGTNLTQEAHQGHLDPVIGRNKEIQDTAEILARRTKNNPVLVGDAGVGKTAVIEGLAQAIVNGDVPAAIKNKEIVSIDISSLEAGTQYRGSFEETIQNLIQEVKEAGNIILFFDEIHQIVGAGATSSDSGSKGLADILKPALSRGELTLIGATTQDEYRNTILKNAALARRFNEVKVNAPSAEDTFHILMGIRNLYEQHHHITLPDNVLKAAVDYSIQYIPQRSLPDKAIDLLDMTAAHLAAQHPVTDLKTLETEIAKQKESQEKAVAKEDFEKALAAKTRIETLQKQIEQHNQSQNVTATVNDIAESVERLTGIPVSNMGTNDLERLKGISSRLKSHVIGQDEAVAAVARAIRRNRAGFDDGNRPIGSFLFVGPTGVGKTELAKQLALDLFGSKDAIIRLDMSEYNDRTAVSKLIGTTAGYVGYDDNNNTLTERVRRNPYAIVLLDEIEKADPQIITLLLQVLDDGRLTDGQGNTINFKNTVIIATSNAGFGQQDTETSESNIMDRIAPYFRPEFLNRFNSIIKFNHLQKENLEEIVDLMLAEVNQTTAKKGISLTIADDAKAHLIDLGYNHAMGARPLRRIIEQEIRDRITDYYLDHPEVKKLQAILKEGQLVIRQNDQ

SEQ ID NO: 6758 - protein, 814 aa, Streptococcus pyogenes MGAS8232
MIMYSTKMQDIFRQAQFQAARFDSHCLETWHVLLAMVAVDNSLANMILSEYDAQVAIEEYEAAAILAMGKTPKEQLSRVDFRPQSKTLTNLLAFAQAISQITRDQEVGSEHVLFAILLNPDIMASRLLEIAGYQIKDNGNGQPRLADLRKAIERHAGYSKEMIKAIHELRKPKKTKTQGTFSDMMKPPSTAGELSDFTRDLTEMARQGLLESVIGRDQEVSRMIQVLSRKTKNNPVLVGDAGVGKTALAYGLAQRIANGAIPYELKEMRVLELDMMSVVAGTRFRGDFEERMNQIIDDIEADGQIILFVDELHTIMGSGSGIDSTLDAANILKPALSRGTLHMVGATTQEEYQKHIEKDAALSRRFAKILIEEPNTEDAYQILMGLKLSYETYHNVSISNEAVKTAVKMAHRYLTSKNLPDSAIDLLDEASAAVQNMVKKSAPETLTPIDQALINGDMKKVSRLLAKEAKGQMRKPTPVTEDDILATLSKLSGIPLEKLTQADSKKYLNLEKELHKRVIGQDAAVTAISRAIRRNQSGIRTGKRPIGSFMFLGPTGVGKTELAKALAEVLFDDEAALIRFDMSEYMEKFAASRLNGAPPGYVGYDEGGELTQKVRNKPYSVLLFDEVEKAHPDIFNVLLQVLDDGILTDSRGRKVDFSNTIIIMTSNLGATALRDDKTVGFGVKGIHQDHQAMEKRILEELRKTYRPEFINRIDEKVVFHSLTQDNMRDVVKIMVQPLITTLAEKGITLKIQPLALKHLSEVGYDEHMGARPLRRTLQTEIEDKLSELILSRELTSGHTLKIGLSYGKLTFHIA

SEQ ID NO: 6759 - protein, 616 aa, Methanothermobacter thermautotrophicus str. Delta H
MAVWQDNLKRLLNQKEVLIIHGNIRDTAYLTEEGNLVRGLTDLINRTGRELGYDKTVSWGSFFDHEGRGHSPMWSLERITPLNGDQPEIRETESQDRVSDVLHRWLEDEITSIDEKKIFIINYIDKITGYAPDGMYSEPTAELVTLIQKIIENISENNRLIMIALRDTMIPVEYYTNSPRVAVMEIPLPDRAERHLYYSTTLASASIPSDQIDLLSNITEGLYMKDLENILSDVLEEIDENQEVSSSMLRKIVNRYRIGTEEDPWSRIPLTGPPKGLLDSAENWFLERVVGQDHAVREIVNAIKKARSGVVGLSSGGQSKPKATFFFAGPTGVGKTFLAKKLAEYLFDTEEAFLRFDMSEFKEEHTVSKLIGSPPGYVGYEQGGQLTNAIKNRPFSVILFDEIEKAHPKIMDIFLQILDDGRLTDSRGQTVFFTESVIIFTSNIGTRTVDSRGNTTSEQRKLDEIINDSDLSDSERERRVREHFTRSVREFFMHEISRRELLNRIGSHIIAFNYLKKSDYQVNIIENKLKDISENFRDKFAGRGHRLHLSGELTGYFLEKYGDSISEFGGRGLVNALEDEIGNIVADQLLLAEERGMSDINFEVYVDGDVIRCRRS

SEQ ID NO: 6760 - protein, 719 aa, Magnetospirillum magnetotacticum
MDRRGRCLLRDDRAAAQRMRAKMDFEKFTERCKGFIQNAQTLALRSGHQRLTPEHLAQVLLADKEGLAANLIRAAGGDPIRALKAVETLLDKLPKVEGPGAGGVHLSPELARLLDQAVQLADKAGDSFVTAERLLLALTLATGTPSAKALAEAGVTPQGLNAAIEDVRKGRKANSASAEDSYDALKKYARDLTQAARDGKLDPVIGRDEEIRRTIQVLSRRTKNNPVLIGEPGVGKTAIVEGLASRIINGDVPETLKNKRLMVLDLGALVAGAKFRGEFEERLKAVLTEVTAANGEVVLFIDEMHTLIGAGAAEGSMDASNLLKPALARGELHCIGATTLNEYRKHVEKDAALARRFQPVFVTEPGVEDTVSILRGLKEKYELHHGVRIADGALVSAATLSNRYITDRFLPDKAIDLVDEAASRLRMQIDSKPEALDELDRRIVQLKIEREALKKESDAGSRDRLGKIEVELTQLERESFDMSERWRAEKSQLADSTKVKEQLEEARIELANAERAANWGRAGELKFGVIPELEKRIEGGDGTGQRMLTESVTEEHIASVVSRWTGIPVEKMLQGERDKLLGMESRLKTRVVGQSEALVAVSNAVRRARAGLQDPNRPIGSFLFLGPTGVGKTELTKALAEFMFDDETAMVRMDMSEYMEKHSVARLIGAPPGYVGYEEGGALTEAVRRRPYQVILFDEVEKAHPDVFNVLLQVLDDGR

SEQ ID NO: 6761 - protein, 860 aa, Leptospira interrogans serovar lai str. 56601
MKLDKLTSKLNEAIYNAQASAEKLGNPEISEEHILKEVLSQPDGLVPLLISKLNLSPKSFLESTENALGKQPKVGGNTSADVGFSRSAVSLLKAADEVRKELKDEYLSTDHILLGLMKNGTGSLKTEFLKLGLEYHKLLKITLENRKGKTIMDDSPEGKTDALAKYAKNLNELAKQGKLDPVIGRDEEIRRTIQVLSRRTKNNPVLIGEPGVGKTAIVEGLANKIVQGEVPEGIKNKTLYTLDLGSMIAGAKYRGEFEDRLKALLDEVKSSDGEVILFIDEIHTLVGAGATEGALDASNMLKPMLARGELRCIGATTLKEYQKYIEKDAALERRFQPVYVKEPSVEETVTILRGLKGRYELHHGIRILDSALIAAATLSNRYISDRFLPDKAVDLIDEASSKMRIEIDSMPEELDRANKRIQSLKIEREALKKEQDTASKERLKTLERDLSEQEQNFQTLKARWDLEKSKIGRLKQIKEEIEKYKNLEAEAERRGEINRVAEIRYGKLVDLQKELESANEELKKQESASRLLKEEVSEEDIANIVSRWTGIPVSKMLQGERAKLLLMEDVLKTKVIGQDHALRLVSEAVQRSRAGIADPNRPIGTFLFLGPTGVGKTETAKALAEFLFDDVNAMTRIDMSEYMEAHSVARLIGAPPGYVGYDEGGQLTEAVRRRPYSLILFDEIEKANPEVFNIFLQILDEGRLTDGKGRNVDFKNTVIILTSNIGSEVLGSSEYTSEEKERLVEQRLKKHFKPEFLNRIDEVILFHSITDSVIHKIADIQLEGLRQKAKENGLDVSFTNELKDYVSKAGFDAEYGARPLKRLIQREVGNALSRYILDGKFTNGQNVTVDYRQGKVVVVV

SEQ ID NO: 6762 - protein, 853 aa, Streptomyces coelicolor
INAASNRAVTEGNADLTPAHLLLALLQGQDNENITDLLAAVEADLAAVRTGAERIVAGLPSVTGSTVAPPQPSREMLAVVADAQARAKELGDEYLSTEHLLLGIAAKGGAAGEVLEGQGASAKKLQEAFRKARGGRRVTTADPEGQYKALEKFGTDLTAAARDGKLDPVIGRDQEIRRVVQVLSRRTKNNPVLIGEPGVGKTAVVEGLAQRIVKGDVPESLKDKRLVALDLGAMVAGAKYRGEFEERLKTVLAEIKDSDGQVVTFIDELHTVVGAGAGGDSAMDAGNMLKPMLARGELRMVGATTLDEYRERIEKDPALERRFQQVLVAEPTVEDSIAILRGLKGRYEAHHKVQIADSALVAAASLSDRYITSRFLPDKAIDLVDEAASRLRMEIDSSPVEIDELQRSVDRLKMEELAIGKETDAASLERLERLRRDLADKEEELRGLTARWEKEKQSLNRVGELKEKLDELRGQAERAQRDGDFDTASKLLYGEIPDLERDLEAASEAEEEVARDTMVKEEVGADDIADVVASWTGIPAGRLLEGETQKLLRMEDELGKRLIGQTQAVRAVSDAVRRSRAGIADPDRPTGSFLFLGPTGVGKTELAKALADFLFDDERAMVRIDMSEYSEKHSVARLVGAPPGYVGYEEGGQLTEAVRRRPYTVVLLDEVEKAHPEVFDILLQVLDDGRLTDGQGRTVDFRNTILVLTSNLGSQYLVDPTTGEAEKKQQVLEVVRSSFKPEFLNRLDDLVVFSALSQEELSRIARLQINGLARRLAERRLTLEVTDEALAWLAEEGNDPAYGARPLRRLVQTAIGDRLAREILSGEIKDGDTVRVDRFGDELIVGPASGKTL

SEQ ID NO: 6763 - protein, 864 aa, Fusobacterium nucleatum subsp. nucleatum ATCC 25586
MLGGFIMMNPNQFTENTISAINLAVDISKGNMQQSIKPEALALGLLMQNNGLIPRVIEKMGLNLQYIISELEKEMNNYPKVEVKVSNENISLDQKTNSILNRAEKIMNEMEDSFLSVEHIFKAMIEEMPIFKRFGISLEKYMEVLMNIRGNRKVDNQNPEATYEVLEKYAKDLVELAREGKIDPIIGRDSEIRRAIQIISRRTKNDPILIGEPGVGKTAIVEGLAQRILNGDVPESLKNKKIFSLDMGALVAGAKYKGEFEERMKGVLKEVEESNGNIILFIDEIHTIVGAGKGEGSLDAGNMLKPMLARGELRVIGATTIDEYRKYIEKDPALERRFQTILVNEPNVDDTISILRGLKDKFETYHGVRITDTAIVEAATLSQRYISDRKLPDKAIDLIDEAAAMIRTEIDSMPEELDQLTRKALQLEIEIKALEKETDDASKERLKVIEKELAELNEEKKVLTSKWELEKEDISKIKNIKREIENVKLEMEKAEREYDLTKLSELKYGKLATLEKELQEQQNKVDKDGKENSLLKQEVTADEIADIVSRWTGIPVSKLTETKKEKMLHLEDHIKERVKGQDEAIKSVADTMLRSVAGLKDPNRPMGSFIFLGPTGVGKTYLAKTLAYNLFDSEDNVVRIDMSEYMDKFSVTRLIGAPPGYVGYEEGGQLTEAIRTKPYSVILFDEIEKAHPDVFNVLLQVLDDGRLTDGQGRIVDFKNTLIIMTSNIGSHFILEDPNLSEDTREKVADELKARFKPEFLNRIDEIITFKALDLPAIKEIVKLSLKDLENKLKPKHITLEFSDKMVDYLANNAYDPHYGARPLRRYIQREIETSLAKKILANEVHEKSNVLIDLDNNHIVFKEV

SEQ ID NO: 6764 - protein, 721 aa, Bacillus anthracis str. A2012
  unsure (1)..(721): unsure at all Xaa locations
MDLNQMTTKTQEAIMSAQSLAVSHHHQEVDTVHLLFTLLEEQDGLAVRIFQKMNVDIEALKQGVENLIKKKPSVTGSGAEAGKLYITGALQQLLVRAGKEAEKLQDDYISVEHVLLAFTEEKGDISQLFTRFHITKDNLLQSLMTVRGNQRVTSQNPEATYEALEKYGRDLVAEVKAGKIDPVIGRDSEIRRVIRILSRKTKNNPVLIGEPGVGKTAIVEGLAQRIVKKDVPEGLKDRTIFALDMSALVAGAKFRGEFEERLQAVLNEIKKSEGRILLFIDELHTIVGAGKTEGAMDAGNMLKPMLARGELHCIGATTLDEYRKYIEKDPALERRFQQVLAEEPTVEDTISILRGLKERFEIYHGVNIHDRAIVAASVLSDRYISDRFLPDKAIDLVDEACATIRTEIDSMPTELDEVTRRIMQLEIEEAALGKEKDFGSQERLKTLQRELSDLKEVASSMRAKWEKEKEDIHKVRDLREHLERLRRELEEAEGNYDLNRAAELRHGKIPAIEKELKEAEEMGANNKQENRLLREEVSEEEIADIVSRWTGIPVAKLVEGEREKLLRLEQILSERVIGQEEAVSLVSDAVLRARAGIKDPNRPIGSFIFLGPTGVGKTELAKTLAQSLFDSEEQMIRIDMSEYMEKHAVSRLIGAPPGXVGYEEGGQLTEAVRRKPYSVILLDEIEKAHPEVFNILLQMLDDGRITDSQGRTVDFKIQLLL

SEQ ID NO: 6765 - protein, 857 aa, Campylobacter jejuni subsp. jejuni NCTC 11168
MANIQDFLTDNMLSNLESAASLAIHSKNNEVVPLHLLWALSVDSTSILNQILNKLNISKEALELEIKSRISKLATSSNVNRENIRFSNELINSLENAKGLMSANGDSYLSVDTWLISESQKSPIKEILAQFLDLREFQKELESLRAGRKMDSKTSDETLDSLNKFGIDLTLKASEGKLDPVIGREEEIERLMQILIRKTKNNPILLGEPGVGKTAIVEALAQRIIKKDVPKSLQNKKVIALDMSALIAGAKYRGEFEDRLKAVVNEVIKSENIILFIDEIHTIVGAGASEGSMDAANILKPALARGELHTIGATTLKEYRKYFEKDAALQRRFQPVNVGEPSVNEALAMLRGIKEKLEIHHNVTINDSALVAAAKLSKRYIADRFLPDKAIDLIDEAAAELKMQIESEPSSLRKVRKDIETLEVENEALKMENDEKNQKRLDEIAKELANLKEKQNALNSQFENEKSVFDGISAKKKEIDLLKNEASLAKARGEFQKAAELEYGKIPSLEKEVEILEDKWKKMSENGVLLKNQVDEDLVAGILSKWTGISVQKMLTSEKQKFLEVEKHLKESVIGQDKALSALARAIKRNKAGLNADNKPIGSFLFLGPTGVGKTQSAKALAKFLFDDEKAMIRFDMSEFMEKHSVSRLLGAPPGYIGHEEGGELTEAVRRKPYSVLLFDEVEKAHKDVFNVLLGILDDGRATDSKGVTVDFKNTIIILTSNIASNAIMNLSGKEQEDAVKNELKNFFKPEFLNRLDDIITFNPLGKDEAYEIVKLLFKDLQMSLENKGIKASLSENAALLIAKDGFDPDFGARPLRRAIYDLIEDKLSDMILADELHENDSIIIDAKDDEIIIKKA

SEQ ID NO: 6766 - protein, 854 aa, Chlorobium tepidum TLS
MEGNFSNRVQDVIRLSREEALRLGHDYIGTEHLLLGLIREGEGIGAKILKNLKVDLFQLKQKIEENTHPKVPATQMGNVPLTKQAEKVLKITYLEAKICKSTIIGTEHLLLSILKGDDNIAAQILEQFGVTYDQVRDELMTITTGRSEAYEPPMEGSYSSGSGSPARPSKKSETKRGERTKTPVLDNFGRDITRLAMEDKLDPIIGREKEIERVAQVLSRRKKNNPVLIGEPGVGKTAIAEGLALKIVQRKVSRVLYDKRVVALDLAALVAGTKYRGQFEERMKALMNELERSRDVILFIDELHTIIGAGGASGSLDASNIFKPALARGELQCIGATTLDEYRQYIEKDGALDRRFQKIMVEPTSVEETIQILNNIKNKYEAHHHVHYSEDAIEKAVKLSERYITDRFLPDKAIDVMDEAGARVHLSNIHVPQEILELEKSIEEIKSEKNKVVKMQNFEEAARLRDKEKNMLEALDHAKQEWEEQSMESVYDVTEADITSVIAMMTGIPVAKVAQSESKKLLTMEAELKKEVIGQDEAIKKITKAIQRTRAGLKDPSRPIGSFIFLGPTGVGKTELAKALTRYLFDSEDALIRADMSEYMEKFSVSRLVGAPPGYVGYEEGGQLTEKVRRKPYSVVLIDEIEKAHPDVFNILLQVLDEGVLTDGLGRKVDFRNTIIIMTSNIGAKEIKSFSTGGGMGFAPPSDATGDYKAMKSTIEDALKRVFNPEFLNRIDDTIVFHQLEKSDIFKIIDITAGKLFKRLKEMGIEVEIDEKAKEFLVEKGYDQKYGARPLKRALQKYVEDPLAEEMLKGRFTEGSVIQITFDEKEKELRFLDGASSAEPTPKKSKKEETLDKE

SEQ ID NO: 6767 - protein, 442 aa, Chlorobium tepidum TLS
MHFDPNKFTVKAQEALQAASMLASSKQNQQIEPEHLLSVMLGDHDNIACQIARKLETPVDTLLSVVDREIDRIPKVTGASATGQYISSDLGKVFDTALKEAEQLKDEYISSEHLFIAMSEAGVKVSKLLKDAGIDRNAILKVLTSFRGSQRVTSQNAEESYQSLKKYSRNLNDLVIKGKLDPVIGRDDEIRRVLQILSRRTKNNPVLIGEPGVGKTAIVEGIAQRIVGGDVPENLKSKQIAALDIAALVAGTKFRGEFEERLKALVKEVQASDGEVILFIDELHLLVGAGSAEGSMDAANILKPALARGELRCIGATTLDEYRKHIEKDAALERRFQTVIVDQPSVEDTVSILRGLKEKYEIHHGVRIKDAALVAAAELSNRYIADRFLPDKAIDLIDEACSRLRLEIDSEPEELDRINRELRRLEIEREALKRELEATGSV

SEQ ID NO: 6768 - protein, 857 aa, Streptomyces albus G
MDAELTNRSRDALNAATTRAVSAGNPDLTPAHLLLALLEGQDNENLVDLLAAVERRPGGGSARAPSASLGSLPGVTGSTVAPPQPNRDLLAVIADAGRRAKDLGDEFLSTEHLLIGIRPTARPPRCSPGRAPTPEKLLEAFQNTRGGRRVTTPRPEGQYKALEKFGTDFTAAARERKLDPVIGRDQEIRRVVQVLSRRTKNNPVLIGEPGVGKTAVVEGLAQRIVKGDVPESLKDKRLVSLDLGAMVAGAKYRGEFEERLKTVLSEIKESDGQIVTFIDELHTVVGAGAADSAMDAGNMLKPMLARGELRMVGATTLDEYRERIEKDPALERRFQQVLVAEPSVEDSIAILRGLKGRYEAHHKVQIADSALVAAATLSDRYITSRFLPDKAIDLVDEAASRLRMEIDSSPLEIDELQRSVDRLKMEELALDRETDPASRQRLEKLRRDLADRERSCAAHRPWEKEKQSLNRVGELKERLDELRGQAERAQQHGDFDTASKLLYGEIPTLERDLRWRPAEEEAAKDTMVKEEVGPDDIADVVGSWTGIPAGRLLEGETQKLLRMEAELGRRLIGQSEAVQAVSDAVRTRAGIADPDRPTGSFLFLGPTGVGKTELAKALADFLFDDERAMIRIDMSEYGEKHSVARLVGAPPGYVGYEEGGQLTEAVRRRPYSVVLLDEVEKAHPGVFDILLQVLDDGRLTDGQGRTVDFRNTILVLTSNLGSQYLVGSAPEEEKRRQVMEVVRSSFKPEFLNRLDDLVIFSALDEDELARIAGLQIAGLARRLADRRLSLDVTPEALAWLAKEGFDPAYGARPLRRLIQTAIGDRLAKEILAGEVRDGDTVRVDRVEDGLLVGRAEG

SEQ ID NO: 6769 - protein, 869 aa, Staphylococcus aureus subsp. aureus MW2
MDINKMTYAVQSALQQAVELSQQHKLQNIEIEAILSAALNESESLYKSILERANIEVDQLNKAYEDKLNTYASVEGDNIQYGQYISQQANQLITKAESYMKEYEDEYISMEHILRSAMDIDQTTKHYINNKVEVIKEIIKKVRGGNHVTSQNPEVNYKALAKYGRDLVEEVRQGKMDPVIGRDEEIRNTIRILSRKTKNNPVLIGEPGVGKTAIVEGLAQRIVKKDVPESLLDKTVFELDLSALVAGAKYRGEFEERLKAVLKEVKESDGRIILFIDEIHMLVGAGKTDGAMDAGNMLKPMLARGELHCIGATTLNEYREYIEKDSALERRFQKVAVSEPDVEDTISILRGLKERYEVYHGVRIQDRALVAAAELSDRYITDRFLPDKAIDLVDQACATIRTEMGSNPTELDQVNRRVMQLEIEESALKNESDNASKQRLQELQEELANEKEKQAALQSRVESEKEKIANLQEKRAQLDESRQALEDAQTNNNLEKAAELQYGTIPQLEKELRELEDNFQDEQGEDTDRMIREVVTDEEIGDIVSQWTGIPVSKLVETEREKLLHLSDILHKRVVGQDKAVDLVSDAVVRARAGIKDPNRPIGSFLFLGPTGVGKTELAKSLAASLFDSEKHMIRIDMSEYMEKHAVSRLIGAPPGYIGHDEGGQLTEAVRRNPYSVILLDEVEKAHTDVFNVLLQILDEGRLTDSKGRSVDFKNTIIIMTSNIGSQVLLENVKETGEITESTEKAVMTSLNAYFKPEILNRMDDIVLFKPLSIDDMSMIVDKILTQLNIRLLEQRISIEVSDDAKAWLGQEAYEPQYGARPLKRFVQRQIETPLARMMIKEGFPEGTTIKVNLNSDNNLTFNVEKIHE

SEQ ID NO: 6770 - protein, 852 aa, Corynebacterium glutamicum ATCC 13032
MSSFNPTTKTNEAMQAALQQASSAGNPDIRPAHLLAAILEQTDGVAAPVLMATGVDPKEILAEAKKLVASYPKASGANMANPNFNRDALNAFTAAQELAGELGDEYVSTEVLLAGIARGKSDAADLLTNKGATYDAIKEAFPSVRGSQRVTTQDPEGQFQALEKYSTDLTKLAREGKIDPVIGRDQEIRRVVQVLSRRTKNNPVLIGEPGVGKTAIVEGLARRIVAGDVPESLKGKTLISLDLGSMVAGAKYRGEFEERLKAVLDEIKGANGEVVTFIDELHTIVGAGASGESAMDAGNMIKPLLARGELRLVGATTLNEYRKYIEKDAALERRFQQVYVGEPTVEDAIGILRGLKERYEVHHGVRIQDSALVAAAELSNRYITSRFLPDKAIDLVDEAASRLRMEIDSSPQEIDELERIVRRLEIEEMALSKESDAASKERLEKLRSELADEREKLSELKARWQNEKTAIDDVREMKEELEALRSESDIAERDGNYGRVAELRYGRIPELEKQIEDAESKVEVNENAMLTEEVTPDTIADVVSAWTGIPAGKMMQGETEKLLNMERVLGNRVVGQLEAVTAVSDAVRRSRAGVADPNRPTGSFLFLGPTGVGKTELAKAVAEFLFDDDRAMIRIDMSEYGEKHSVARLVGAPPGYVGYDQGGQLTEAVRRRPYTVVLFDEVEKAHPDVFDILLQVLDEGRLTDGQGRTVDFRNTILILTSNLGAGGTREQMMDAVKMAFKPEFVNRLDDVVIFDRLSPEQLTSIVDIQIKQLTDRLAGRRLNLRVSDSAKAWLAERGYDPAYGARPLRRLIQQAIGDTLAKELLAGNVRDGDGVLVDVADGGQKLDVSRAV

SEQ ID NO: 6771 - protein, 857 aa, Campylobacter jejuni
MANIQDFLTDNMLSNLESAASLAIHSKNNEVVPLHLLWALSVDNASILNQILNKLNISKEALELEIKSRISKLATSSNVNRENIRFSNELINSLENAKGLMSANGDSYLSVDTWLISESQKSPIKEILAQFLDLREFQKELESLRAGRKIDSKTSDETLDSLNKFGIDLTLKASEGKLDPVIGREEEIERLMQILIRKTKNNPILLGEPGVGKTAIVEALAQRIIKKDVPKSLQNKKVIALDMSALIAGAKYRGEFEDRLKAVVNEVIKSENIILFIDEIHTIVGAGASEGSMDAANILKPALARGELHTIGATTLKEYRKYFEKDAALQRRFQPVNVGEPSVNEALAMLRGIKEKLEIHHNVTINDSALVAAAKLSKRYITDRFLPDKAIDLIDEAAAELKMQIESEPSSLRKVRKDIETLEVENEALKMENDEKNQKRLDEIAKELANLKEKQNALNSQFENEKSVFDGISAKKKEIDLLKNEASLAKARGEFQKAAELEYGKIPSLEKEVEILEDKWKKMSENGVLLKNQVDEDLVAGILSKWTGISVQKMLASEKQKFLEVEKHLKESVIGQDKALSALARAIKRNKAGLNADNKPIGKLLFLGPTGVGKTQSAKALAKFLFDDEKAMIRFDMSEFMEKHSVSRLLGAPPGYIGHEEGGELTEAVRRKPYSVLLFDEVEKAHKDVFNVLLGILDDGRATDSKGVTVDFKNTIIILTSNIASSAIMNLSGKEQEDAVKNELKNFSKPEFLNRLDDIITFNPLGKDEAYEIVKLLFKDLQMSLENKGIKASLSENAALLIAKDGFDPDFGARPLRRAIYDLIEDKLSDMILADELHENDSIIIDAKDDEIIIKKA

SEQ ID NO: 6772 - protein, 760 aa, Streptococcus pyogenes MGAS315
MLCQNCNLNESTIHLYTSVNGKQRQVDLCQNCYQIMKSDPANSILNGLTPGYRAQNRSTSPFFDDFFGDLNNFRAFGNLPNTPPTQAGQNGNGGGRYGGNYNGQRPAQPQTPNQQAKGLLEEFGINVTDIARNGNIDPVIGRDEEITRVIEILNRRTKNNPVLIGEPGVGKTAVVEGLAQKIIDGTVPQKLQGKQVIRLDVVSLVQGTGIRGQFEERMQKLMEEIRNRKDVILFIDEIHEIVGAGSAGDGNMDAGNILKPALARGELQLVGATTLNEYRIIEKDAALERRMQPVKVDEPSVEETITILKGIQPKYEDYHHVKYSPAAIEAAAHLSNRYIQDRFLPDKAIDLLDEAGSKMNLTLNFVDPKEIDKRLIEAENLKAQATRDEDYERAAYFRDQITKYKEMQAQKVDEQDIPIITEKTIEAIVEQKTNIPVGDLKEKEQSQLVNLANDLKAHVIGQDDAVDKIAKAIRRNRVGLGTPNRPIGSFLFVGPTGVGKTELSKQLAIELFGSTNNMIRFDMSEYMEKHAVAKLVGAPPGYVGYEEAGQLTEQVRRNPYSLILLDEVEKAHPDVMHMFLQVLDDGRLTDGQGRTVSFKDTIIIMTSNAGTGKSEASVGFGAAREGRTSSVLGELSNFFSPEFMNRFDGIIEFKALSKEHLLHIVDLMLEDVNERLGYNGIHLDVTQKVKEKLVDLGYDPKMGARPLRRTIQDYIEDAITDYYLEHPTEKQLRALMTNSENITIKAVKEGDSFLNEESLD

SEQ ID NO: 6773 - protein, 814 aa, Streptococcus pyogenes MGAS315
MIMYSTKMQDIFRQAQFQAARFDSHCLETWHVLLAMVAVDNSLANMILSEYDAQVAIEEYEAAAILAMGKTPKEQLSRVDFRPQSKTLTNLLAFAQAISQITRDQEVGSEHVLFAILLNPDIMASRLLEIAGYQIKDSGNGQPRLADLRKAIERHAGYSKEMIKAIHELRKPKKTKTQGTFSDMMKPPSTAGELSDFTRDLTEMARQGLLESVIGRDQEVSRMIQVLSRKTKNNPVLVGDAGVGKTALAYGLAQRIANGAIPYELKEMRVLELDMMSVVAGTRFRGDFEERMNQIIDDIEADGQIILFVDELHTIMGSGSGIDSTLDAASILKPALSRGTLHMVGATTQEEYQKHIEKDAALSRRFAKILIEEPNTEDAYQILMGLKLSYETYHNVSISNEAVKTAVKMAHRYLTSKNLPDSAIDLLDEASAAVQNMVKKSAPETLTPIDQALINGDMKKVSRLLAKEAKGQMRKPTPVTEDDILATLSKLSGIPLEKLTQADSKKYLNLEKELHKRVIGQDAAVTAISRAIRRNQSGIRTGKRPIGSFMFLGPTGVGKTELAKALAEVLFDDEAALIRFDMSEYMEKFAASRLNGAPPGYVGYDEGGELTQKVRNKPYSVLLFDEVEKAHPDIFNVLLQVLDDGILTDSRGRKVDFSNTIIIMTSNLGATALRDDKTVGFGVKGIHQDHQAMEKRILEELRKTYRPEFINRIDEKVVFHSLTQDNMRDVVKIMVQPLITTLAEKGITLKIQPLALKHLSEVGYDEHMGARPLRRTLQTEIEDKLSELILSRELTSGHTLKIGLSHGKLTFHIA

SEQ ID NO: 6774 - protein, 878 aa, Escherichia coli CFT073
MTGNHPAALLRRLNPYCARALDAAASLCQTRAHAEITIEHWLLKLLEQGEGDITVIARRYEWDIDTLWQSLLAHLDTLPRPVRERPQLSEPLAALIRQAWLIASLEGDDPQIRSQHLLMALTEKPMLPACNDLWVLLSLSRVQLERLRPLLDAQSDECPARQPQVTEPLTSALPETATADAPAKTLTEKQDDALLAVLNRFTEDVTEKARSGRIDPVFGRDTEIRQMVDILSRRRKNNPILVGEPGVGKTALVEGLALRITEGNVPDSLKTVHIRTLDLGLLQAGAGVKGEFEQRLKNVIDAVQKSPEPVLLFIDEAHTIIGAGNQAGGADAANLLKPALARGELRTIAATTWSEYKQYFERDAALERRFQMVKVDEPDDDTACLMLRGLKARYAQHHGVHMLDSAIQTAVRLSRRYLTGRQLPDKAVDLLDTAGARVRMSLDTLPEPLTQLHVRLAALDIEREAIEQDSVFYPEASPERLAELTDLRDELQAEAGHLEAQYQQEKALAQQIMTLRQEGTDSTELQQQLRTHQGFAPLLALDVDARAVATVVADWTGIPLSSLLKDEQSDLLSMEQSLENRVVGQSPALCAIAQRLRAAKTGLTPENGPQGVFLLTGPSGTGKTETALTLADTLFGGEKSLITINLSEYQEPHTVSQLKGSPPGYVGYGQGGVLTEAVRKRPYSVVLLDEVEKAHRDVMNLFYQVFDRGFMRDGEGREIDFRNTVILMTANLGSDHIMQLLEEKPDATDADLHELLYPLLREHFQPALMARFQTVIYRPLGQEAMRAIVEMKLAQVARRLHQHYGLETEISNSLYDALTAACLLPDTGARNIDSLLNQQILPVLSQQLLAQQAVHHKPARLRLDWDDEDGIVLEFDEK

SEQ ID NO: 6775 - protein, 763 aa, Escherichia coli CFT073
MGEVPMLNQELELSLNMAFARAREHRHEFMTVEHLLLALLSNPSAREALEACSVDLVALRQELEAFIEQTTPVLPASEEERDTQPTLSFQRVLQRAVFHVQSSGRNEVTGANVLVAIFSEQESQAAYLLRKHEVSRLDVVNFISHGTRKDEPTQSSDPGSQPNSEEQAGGEERMENFTTNLNQLARVGGIDPLIGREKELERAIQVLCRRRKNNPLLVGESGVGKTAIAEGLAWRIVQGDVPEVMADCTIYSLDIGSLLAGTKYRGDFEKRFKALLKQLEQDTNSILFIDEIHTIIGAGAASGGQVDAANLIKPLLSSGKIRVIGSTTYQEFSNIFEKDRALARRFQKIDITEPSIEETVQIINGLKPKYEAHHDVRYTAKAVRAAVELAVKYINDRHLPDKAIDVIDEAGARARLMPVSKRKKTVNVADIESVVARIARIPEKSVSQSDRDTLKNLGDRLKMLVFGQDKAIEALTEAIKMARAGLGHEHKPVGSFLFAGPTGVGKTEVTVQLSKALGIELLRFDMSEYMERHTVSRLIGAPPGYVGFDQGGLLTDAVIKHPHAVLLLDEIEKAHPDVFNILLQVMDNGTLTDNNGRKADFRNVVLVMTTNAGVRETERKSIGLIHQDNSTDAMEEIKKIFTPEFRNRLDNIIWFDHLSTDVIHQVVDKFIVELQVQLDQKGVSLEVSQEARNWLAEKGYDRAMGARPMARVIQDNLKKPLANELLFGSLVDGGQVTVALDKEKNELTYGFQSAQKHKAEAAH

SEQ ID NO: 6776 - protein, 867 aa, Thermobifida fusca
MDYKLTRKSQEALSAAIRRATADGNPQVEPVHLLSALIGQAEGVVRPLLKEVGADPGRLSTKVEEEIARLPRASGSTVNAPASSRQLIISLNTAAQRAKQMEDEYVSTEHLLVGLAADGGTAATLLREAGATPEALLDAFSRVRGSARVTSETPEDTYQALEKYGVDLTQRAREGKLDPVIGRDAEIRRVIQVLSRRTKNNPVLIGEPGVGKTAVVEGLAQRIVAGDVPESLRDKRLISLDLPAMVAGAKYRGEFEERLKAVLNEIKQSEGQIITFIDELHTVVGAGAAEGAMDAGNMLKPMLARGELRMVGATTLDEYRERIEKDPALERRFQQVMVNEPSAADTIAILRGLKGRYEAHHKVQIADSALVAAATLSDRYITARFLPDKAIDLIDEAASRLRMEIDSQPVEIDELQRVVDRLKMEEMALSKESDAASKQRLERLRADLADKEEQLNALIARWEQEKAGLNRVGELKEKLDELRGQAERAQRDGDFEEASRLMYGEIPQLERQLEEALSEEDSAEHATMVKEEVGADDVADVVSSWTGIPVGRLMEGESAKLLRMEEEIGKRLIGQRRAVAAVSDAVRRARAGISDPDRPTGSFLFLGPTGVGKTELAKALAEFLFDDERAIVRLDMSEYSEKHSVARLVGAPPGYVGYEEGGQLTEAVRRRPYTVVLLDEVEKAHIEVFDTLLQVLDDGRLTDGQGRQVDFRNTLLILTSNLGSQFLIDPTLDDAQRHEKVMQVVRNTFKPEFLNRLDDVIVFDALSTDDLTKIVDLQVDRLARRLADRRLKLEVTPAAREWLALAGYDPVYGARPLRRLVQTAIGDPLARELLAGNLVEGDTVRVDVDESKDSLTVGPVKEPASAA

SEQ ID NO: 6777 - protein, 826 aa, Leuconostoc mesenteroides subsp. mesenteroides ATCC 8293
MDNNYTPSAQNVLVLAQEQAKYFKHQAVGTEHLLLALAIEKEGIASKILGQFNVMDDDIREEIEHFTGYGITSRYDKNIYLPYSPKAADILHQANEELRALAQSKVGTEHILLALLQDESILSSRILLALDVNLQDMRRAILRKLGITDVRKQMKQQEKQQASAGTPTLDGLARDLTQMARDNKIDPVIGRPKEVRRVIQILSRRTKNNPVLIGEPGVGKTAIAEGLAQKIVDGEVPENLAKKRLMALDMGSLVAGTKYRGEFEDRLKKIIEEIYNDGEVILFIDELHTLIGAGGAEGAIDASNILKPALARGELQTLGATTFDEYQKYVESDAALERRFASVTVDEPTQDDAIAILKGIRSHFEKHHQVQIDDAAIEAAVKLSARYISDRFLPDKAIDLMDEAGAKVRIDATGKATPISKAKVRFAEVQAEKEAAITSLDFEKAAQLRTEEMKLKQKLAKSEAKDTQNNQKENAERYSLHVTEEDIAEVISQQTGVPVMQMEKNEQQRLVNLESVLGRRVIGQKTAISAVARAIRRARSGLKDPSRPIGTFMFLGPTGVGKTELAKALAEAIFGSEDNLIRIDMSEYQERWSSSRLIGSAPGYVGYDEGGQLTEQVRNHPYSVVLLDEAEKAHQDIFNLMLQVFDDGYLTDSKGRKVDFKNTIIIMTSNLGATRLRDEKSVGFGAVDLKDDHEAVAAKIRETLKETFRPEFINRLDEAIVFESLTKPELHEIVKLMSRSVLQRVAEQGISVKITPAAIDVVASAGFDPEYGARPIRRALQTKVEDALSEELLRGNITTDDAVTIGAKNGEIRISTKPLKKDTTKA

SEQ ID NO: 6778 - protein, 684 aa, Leuconostoc mesenteroides subsp. mesenteroides ATCC 8293
MAQQDSFGFGNLDEMFRAMNEQMAQAQGQQNTQAQKNNNGNKKRRLLDEFGINLTKQARDGKLDPVIGRDNEVARTIEILNRRTKNNPVLIGEPGVGKTAIVEGLAQAIVAGKVPEKLQHKEVIRLEMSALVQGTSMRGQFEARMRELMKEVTNSDDVILFIDEIHEIMGAGNAEGGMDAGNILKPALARGEFQLIGATTLNEYRKIEKDGAIARRFQPVQVEEPSKEETITILEGISERYEKYHYVTFSDSALQAAVELSDRYIPERFLPDKAIDLLDEAGSRKNLTMKVADPKTIQVNIEAADKLKQEAIDKEDFEKASYWRDQVNQLESQKAQVEAHPEMSKPQTVTEQDILKIVEDKTDIPVGALKENEANQLKDLDKNLSKHVIGQDEAVEKLAKAIRRNRIGLTKSGRPIGSFLFVGPTGVGKTETAKQLAKEMFGSKDAMIRFDMSEYMEKHTVSKMIGAPAGYVGYEEAGQLTEQVRRRPYSLVLFDEVEKAHPDVMNMFLQILDDGRLTDAQGHIVSFKDTVIIMTSNAGSTDTGNTPVGFAQVDQQNRLMQRLENYFRPEFLNRLDDIIDFQPLSQDHLLKIVDLLLTDMNENLSDNDLHIDLSTAAKQKLVELGYDPAMGARPLRRVMQDKIADGIADFYLEHPDVHHLQADIVHNEFVISEVKPEPVTVNKI

SEQ ID NO: 6779 - protein, 716 aa, Leuconostoc mesenteroides subsp. mesenteroides ATCC 8293
MANNDFFNDPFGSDMNDIFNNMMGNMNGMNSENRRYLINGREVTPEEFVQYRQTGKLPQGLQAANATNGQPVAQQAGQPGQVKQEGMLAKLGRNLTKEARDGLLDPVIGRNKEIQETAEILGRRTKNNPVLVGDAGVGKTAVVEGLAQAIVNGDVPAAIKDKEIYSIDISSLEAGTQFRGAFEENIQNLLKEVKQAGNVILFFDEIHQILGAGSTGGEDGGKGLADIIKPALSRGEISLIGATTQDEYRNTIMKNAALARRFNEVTVNAPSPKDTLEILKGIAKLYEKHHHVSLPENVLKAAVDYAVQYIPQRSLPDKAIDLLDMTAAHLSAKNPVTDKVSLEKQMSDAKAKQEKAVADEDYEAALKYKNQIADLEKKVGSADEAKKVEATPNDVAESVERLTGIPVAQMGASDIERLKTIGDRLAGKVIGQDEAVSMVAKAIRRNRAGFDEGNRPIGSFLFVGPTGVGKTELAKQLALDMFGSKDNIVRLDMSEYSDLTAVSKLIGTTAGYVGYDDNSNTLTEKVRRNPYSIILLDEIEKANPQVLTLLLQVMDDGRLTDGQGNVVNFKNTVIIATSNAGFGHNSSDADQDLMAKLAPYFRPEFLNRFNGVIEFSTLTKDDLKQIVDLMLDDVNKTLAKKDLTLHVSDEVKDHLIEDGYDEALGARPLRRVIEQQIRDQVTDFYLDNPGEKSLSADLVDGKVVISAVVEKTAVTN

SEQ ID NO: 6780 - protein, 632 aa, Leuconostoc mesenteroides subsp. mesenteroides ATCC 8293
MIELKQNNTTPYLDRYTTDISAKVMSAPEKYHAYERESITRRIMVSLMKQIQNAPLLVGLPGVGKTAIVEDLARQLLSTSVSSLKGKHLVQISLANLMKSSDGESFAHKFQAIIDELIANKDTVIAFIDEIHQIVGTGAETSGSSLDAGNIIKPALSRDDLQIIGATTTKEFHEYVARDGALMRRFDLIEVPELSFEQTKNVLSKVALQLNNGIEVPETVQDRIMALSQRYITDRYFPEKAIMLLDGALSVARLDNRPTLSNQDVATIIHDDYHVPEYVINQTTDERLLNLLPRLKSQVIGQDTALEKVAMKLTNREAGLADTSKPESFLFMGPTGVGKTETAKQLALNLFGNKQNFIRFDMSEFKFAGTSLERFKDQLTTRVRHTPYAVLLLDEIEKADPEVMDLLLQVLDDGRLSDEYGRVINFKDLIIVMTTNSGATAVMNRDAKSDAVKEDKKRQANFEEQLEIALQSDGYRPEFIARIGAIIVFDVLKMADMVRIVELKLSRLNQKAQESGFNIVFDTQEVARYIPSFDLGFEYLNGTQEVSSPIANYIADVGYKPSRGVRPIDDTIATYVSDPVSAAIIQKRQGLGQDFDTFIFRAIGNPPSLTSPYGEWQVVVSTAKEAADNEAI

SEQ ID NO: 6781 - protein, 517 aa, Leuconostoc mesenteroides subsp. mesenteroides ATCC 8293
MNYFTLYTYKNLTELRKIQQQNNVTTFIFEETLELLKEEQDVCIDITSLVHMLRQNQGNIYSAGINLREINEDSKIIIEESLAEIAIDFFPHIFSSHISLLNKDEVVTESQIPKTFVHYRRSLYTYYANEDLSAIIDYANENNISITTFSYANENLSTEIKKFNLNSKLAIVDLTSAIYAIEDNKNLIYMIESFLNQFSNVNVIGLASQSDQILKYFSLYIEGVESLKKILPDLKIKYSNEIVSKEVKKITSFSEHELDSLFTSFNHKLIGHDYFKRKLKYLLNNFIKLNKAKEQKVFSVFLFGSSGIGKTEVARLLANELQENSYLAKINFQNYSSQDALNTLIGSPAGYVGYGEGELRKKVNKSKVGLVLLDEFEKTTKPVFSFFLDLLEEGTFTDSMTREHDLDGYVLIFTSNIQNETEYKKIIPPELQTRFDLVCEFQIPSINEKRRFLELLFEQAQRKFVDQFSKIKCTEEDKEELFAFDYSEVNAFRDLKRHFNNRLMDFFTSKNVDIDMK

SEQ ID NO: 6782 - protein, 876 aa, Microbulbifer degradans 2-40
MRIDRLTNQLQVALSDAQSLAVGRDHSQIESIHLMQAMLDQQGGAVRPLLARAGFDVPGLRNELTKQLEALATVTNPTGDVNMSQELGRLLNLADKYAQKVGDKFISSEAVLFAGISDKASNLGKLLNTYGQPDRLKQAIAAVRGGETVDDPEAEGNRQALEKFTVDLTARAEAGKLDPVIGRDDEIRRTIQVLQRRTKNNPVLIGEPGVGKTAIVEGLAQRIINGEVPEGLKNKRLLSLDLGSLLAGAKFRGEFEERLKAVLNELSKQEGRIILFVDELHTMVGAGKADGAMDAGNMLKPALARGELHCVGATTLDEYRQYIEKDAALERRFQKVQVDEPNEEDTIAILRGLKERYEVHHGVNITDSAIIAAAKLSQRYITDRQLPDKAIDLIDESASRIRMEIDSKPEEMDKLERRLIQLKIEREAVKKDEDIASKERLKKIDSQINEIEKSFADLDEIWRAEKAALQGSQEIKSHLEKARLDLEAARRAGDLGRMSELQYGIIPDLEKQLDMAAQADMHEMKLLRNKVTEEEIAEVVSKWTGIPVSKMLEGERDKLLRMEDDLHKRVIGQHESVVAVSNAVRRSRAGLSDPNRPNGSFLFLGPTGVGKTELCKALAEFLFDSQDAMVRIDMSEFMEKHSVARLIGAPPGYVGYEEGGYLTEAVRRKPYSLVLLDEIEKAHPDVFNILLQVLEDGRLTDGQGRTVDFRNTVVVMTSNLGSSAIQDIAQNKSFDTISFDNESGAEEQNQYRYQAMKDAVMEVVTGHFRPEFINRIDEAVVFHPLAQQQIAGIADIQLETLRKRLAERDLRLNVTPEVMAKLAEAGFDPVYGARPLKRAIQQLVENPLAQHILKGEFIAGDTISATLEEGEITFRK

SEQ ID NO: 6783 - protein, 897 aa, Microbulbifer degradans 2-40
MTLLDNLKEMTMEFEKLVKNLSNESKELFEKSIALASSRSHFYIDVEHWLTEALAEEQREIIAILKHFNVDVDRVHADLDLALENTKTGNDGFPKISPDIVRLLFEAWMIASSQYASVQVLPVHILLALVDSAGLKTKIGKISKQFEAISGEEIRTQCETLLRGEALQDQGEATNKKLTKTPSLDQFTTNLTQQAKDGKIDSILGRDDEIRQIIDVLCRRKQNNPILTGEAGVGKTAVVEGLAVKIAQGDVPTAIENVEIRSLDLGLLQAGAGVKGEFENRLKNVIKEVQQSVQSIILFIDEAHTLIGAGNQAGSGDAANLLKPALARGELRTIAATTWAEYKKYFESDAALTRRFQVVKVEEPSVDKAIIMLRNAAPTLEQHHKVVILDAAVSASVNLSHRYIPGRQLPDKCVSLLDTACARVNLSQNTTPARIVQYSQEIKNIEFEIERLNQEAEKGYEHSASIVELEVKKVGITERYQSLCARWEQEKQIINQINSAREKAEEKVQDSDNEESATDLTNTLIAELRVKLKSISGSQPLIYECVDEQVVAEVVADWTGIPVGRMQSDEIQNVLSLEQTMEKRVIGQSHGLKLISKAVQTARAKLSDPKRPLGVFMLVGPSGVGKTETALTLAEQLYGSEQNMTVINMSEFKEEHKVSMLMGSPPGYVGYGEGGVLTEAVRRKPYSVVLLDEMEKAHPGVQDIFYQVFDKGILRDGEGRDIDFKNTVIIMTSNTASAQIEQLCIDPETKPEPKALLEAIEGTLRETYKPAFLGRINLIPYYPLDEQCLSEIAVMQLHAIQQRVETNYKVELNYSDKLVEHVVSLCAQSDTGARKISALLNNTLLPVLAEKILTEIALDKALESVEVDVSEEGEFVVKINSKKENTDDMKIKKTVTG

SEQ ID NO: 6784 - protein, 823 aa, Oenococcus oeni MCW
MDNQYTASAKNVLLLAQEQAKYFKHEIVGSEHLLSALTLEKDGLASKVLQDYNVTDDDIRNEIEQFTGYGTHTNIKAGFLAYSPKAQEILKNAALQAQSLGARQIGTEHLLLALLTDESILSSRILASLDVRLQDLTRAIFKRIGVDPNQQKPKSKQQGQANQQGTPTLDSMSRDLTALASAGQIDPVVGRDQEVHRVIQILSRRTKNNPVLIGEPGVGKTAIAEGLAHKIATGQVPFDLANKRLMALDMGALIAGTKYRGEFEDRLKKIINEIHQDGQVILFIDELHTLIGAGGAEGALDASNLLKPALARGELQTIGATTFDEYQKYIESDQALERRFASVTIDEPSQEDSVEILKGLRPRYEEHHRVNISDEAINAAVKLSSRYIADRFLPDKAIDLMDEAAAKVRIDTVQPEDKKVDLERQLNGLRDQLDDAVSSGDFDQATKIRQQEIKIRKELAVVETDNLINGTKDHKYQLTVREKDITDVVGQQTGIPVTQLQKSESERLLHLEEILHRRVIGQNEAISAVSRAIRRARSGIKDPSRPIGTFLFLGPTGVGKTELAKALAEAMFDSEDNMIRVDMSEYQESYSASRLIGSAPGYVGYDEGGQLTERVRNHPYSVVLLDEAEKAHPDIFNLLLQVFDDGYMTDSKGRKVDFRNTIIIMTSNLGATRIRDNKHVGFGAIEPQDSYKAMSSEIQTALKERFRPEFINRIDETIIFHSLSKPELHKIVELMSHGILQRVAEQGVSIKMNKAAIDLVAQVGFDPEYGARPIRRAFQNQVEDKVSDALLSKDIRPGDSVTVGSRKGKIDLMIHHQIEKSTK

SEQ ID NO: 6785 - protein, 726 aa, Oenococcus oeni MCW
MTPMFEIFLYLTEEKMADYNDDPFVFGNFNVDDIFRQLNGQMANMQQANNGSAQARPGNTGGNNNKKKNGLLEQFGINITEQARKGKLDPVIGRGKEVERVIEILNRRTKNNPVLIGEPGVGKTAVVEGLAQAIVAKKVPDKLMNKEVIRLDMVSLVQGTSMRGQFEARMQQLMKEVESRDEVILFIDEIHEIMGAGNAEGGMDAGNILKPALARGEFQLIGATTLKEYRNIEKDGAVSRRFQEVMVEEPSRIEAVEILKGLRPKYEDFHHVKYPDDVLETAVDLSDRYIPERFLPDKAIDLIDEAGSRKNLHLEFVSSEEIQQKINNAEAMKQQAIEKEDYEKASYWRDQVDNLQKQKKIAEENPENVANAATVTVSDIAKIIEEKTKIPVGDLKKNEASQLKDLDTHLRAHVIGQNEAVERVSRAVRRNRIGLTKSGRPIGSFLFVGPTGVGKTETAKQLSKEMFGSEESMIRFDMSEYMEPQSISKLIGAPAGYVGYEEAGQLTEQVRRHPYSLILLDEIEKAHRDVMNMFLQILDDGRLTDSQGHVVSFKDTIVIATSNAGSGDVGNNPVGFAAETAEDSAEHRLVEKLKNYFKPEFLNRFDAIVEFKELGKSELSKITDLMLNQMNSMLADNNLHVDVDKATKDKLVELGFNPEMGARPLRRVVQEQIEDKVADFYLDNPNAHQLRATLNKDGKIVLVPKKINAPAKTVPSDVPATNQKDN

SEQ ID NO: 6786 - protein, 720 aa, Oenococcus oeni MCW
MANNDYFNNSNNDPFNSMDDIFNNLMGRMNGINSESRYLINGQEVSPEEFAAYRQSGKMPINGQFQEVGSQAQPGQLGTAVSQKNGQSKKTGILEKLGRNLTEEARQGKLDPVIGRNKEIQETAEILSRRTKNNPVLVGDAGVGKTAVVEGLAQAIINGNVPAAIKGKEIYSIDISALEAGTQYRGSFEENIQKLISEVKSAGNVILFFDEIHQILGAGNTGEESGSNGMADILKPALSRGEVSVIGATTQDEYRNTIMKNAALARRFNEVTVNAPSPEDTLAILKGVRSLYEKHHHVKFPDDALKAAVDYSVQYIPQRSLPDKAIDLVDMTAAHLSAQHPVTDKVSLENDLKNAKTEQDQSAAKEDFEKAAAAKKRVEELEDKLKNVSSENKKEEVVVKPNDIAQSVERLTGIPVAKMGANDIERLKGIAGRLKGKVIGQNEAVEAVARAVRRNRAGFDEGNRPIGSFLFVGPTGVGKTELAKQLALDMFGSKDAIIRLDMSEYSDLTASSKLIGTSAGYVGYNDNQNTLTEKVRRNPYSIVLLDEIEKANPQIITLLLQVLDDGRLTDGQGNVVNFKNTVVIATSNAGFGNESDNKKDQDKSIIERLEPYFRPEFLNRFNAIVEFSHLSKENLKQIVELMLTEVNQTLAKKGIKLEVTQAAKDYLMNQGYDEAMGARPLRRVIEQQIRDKVTDFYLDNLNAKNLKADIDNGTIKITGK

SEQ ID NO: 6787 - protein, 705 aa, Tropheryma whipplei str. Twist
MCGGSFMSESQSELDKYGTNLTKTAATNKLDPVIGRDAEIRRVCQILSRRTKNNPVLIGSAGVGKTAIVEGLAQRIVAGDVPESLRNKEIVSLDLSALLAGASYRGEFEKRVKNLLEEIQKSKVIIFIDEVHTLMSAGAAEGAIAAGNMLKPLLARGELRLIGATTLDEYREHLEKDPALERRFQQVFVGEPNLEDCIAIMRGLKERYEAHHKVSISDTALVTAVELSSRYITGRQLPDKAIDLLDEAASSLRMEIDSSPVELDQLRREVDRLRLEELALKSENDPTSEQRLRSITNQLSGKQEMLNTLQASWNSERARLNQIGALKEQIDIAKQSADIAQREGRLEDASRLLYATIPQLQKNLAEKLEEQDSAPLVSDQVMPEDIASVVEGWTGIPVKKLMQKDAKQLLHLEEDLSKSVIAQKVAIGVIADAVRRSRAGLSDPNRPSGTFLFLGPTGVGKTQLVKALASLLYDGEIVRIDMSEYSEKFSISRLIGAPPGYIGHESAGQLTESVRRRPYSVVLFDEAEKAHPEVFDILLQVLDEGRLTDSHGRTVDFRNTIIVLTSNIGSRYLSDISLEATTAHEYVNDEVRRTFRPEFLNRLDEIVIFEPLSQSDICQIVDLNIESLNKRIKDRRIVVTVSEDLRRWLSKSGYDVIYGARPLRRLIQREIEDRLAKLIIEGLIHDGQTASFDLSGGAVNAQVCS

SEQ ID NO: 6788 - protein, 790 aa, Pseudomonas syringae pv. syringae B728a
MRIDRLTSKLQLALSDSQSLAVGLDHPAIEPAHLMQALLEQQGGSIKPLLLQVGFDINSLRKELSAELDRLPKIQNPTGDVNMSQDLARLLNQADRLAQQKGDQFISSELVLLAAMDENSKLGKLLLGQGVSKKALENAINNLRGEGAVNDPNVEESRQALDKYTVDLTKRAEEGKLDPVIGRDDEIRRTIQVLQRRTKNNPVLIGEPGVGKTAIAEGLAQRIINGEVPDGLRGKRLLSLDMGALIAGAKYRGEFEERLKSLLNELSKQEGQIILFIDELHTMVGAGKGEGSMDAGNMLKPALARGELHCVGATTLNEYRQYIEKDAALERRFQKVLVDEPSEEDTIAILRGLKERYEVHHKVAITDGAIIAAAKLSHRYITDRQLPDKAIDLIDEAASRIRMEIDSKPEVLDRLERRLIQLKVEAQALKKEKDEAAIKRLEKLQGEIERLELEYADLEEIWTSEKAEVTGSAQIQQKIEQSRQELEAARRRGDLNRMAELQYGIIPDLERSLQMVDQHGKPENQLLRSKVTEEEIAEVVSKWTGIPVSKMLEGERDKLLRMETLLHNRVIGQEEAVVAVSNAVRRSRAGLSDPNRPSGSFMFLGPTGVGKTELCKALAEFLFDTEEAMVRIDMSEFMEKHSVARLIGAPPGYVGYEEGGYLTEAVRRKPYSLILLDEVEKAHSDVFNILLQVLEDGRLTDSHGRTVDFRNTVIVMTSNLGSAQIQELVGDREAQRAAVMDAVGTHFRPEFVNRIDEVVIFEPLARDQIAGITDIQLAACASVWPSASCR

SEQ ID NO: 6789 - protein, 867 aa, Pseudomonas syringae pv. syringae B728a
MNLKSLFAKLNETSRTATESAAALCLSENHYDVEVEHLLLQLLDNNDNDLPVILRHYDVVPDRLQAQLVTALGTFKKGNTRTPALSPHITRMIEQAWVLASIEFGQSQIRTGHLVQALLDDDALRRVVIGSAPELEKINADDLRLNMSALVEGSPETKLSKPLANADASTGATTKGNGKTPALDQYTVNLTQSARDGRIDPVLGREFEVRQMVDILTRRRQNNPILTGEAGVGKTAVVEGLALRIVQGDVPSVLKGVAIHTLDLGLLQAGAGVKGEFENRLKSVIEETKRSLHPIILFIDEAHTLIGSGGQAGQNDAANLLKPALARGELRTIAATTWAEYKKYFEKDAALARRFQVVKVEEPDEDKAIHMLRGLLAKMQEHHKVTVMDEALVQAVRLSNRYITGRQLPDKAVSVLDTACARVALGQSAQPGALEDCKRHIDNLNAEITVLEQETAKGSDHARRLTALHEELQAEQETRESLEQQWKRELELVEKLGALSVPQSGEPDAGQIAAVRAELASVQGEQPLVHALVDGGTIGEVISGWTGIPLGKMLRDEIDTVQSLPALLGERVLGQDHALEEIGKRIKISRARMEDPNKPIGVFLLLGPSGVGKTETALALADTLYGGERNVITINMSEYQEAHTVSSLKGSPPGYVGYGEGGVLTEAVRRKPYSVVLLDEVEKAHPDVLELFFQVFDKGVLDDGEGREINFRNTVIILTSNTGTDRIMQWCLNTEQKPTPDDIVEGLRDELNQVFKPAFLGRLTIVPYYPVQDAILERIVGLKLERIRKRFERNHQAVLRYDEALIKAIASRCTEVDSGARNIDNILSKTLMPELAQRVLERMAQDKPIQSLTIDLGSDGDFAYTLT

SEQ ID NO: 6790 - protein, 854 aa, Pseudomonas fluorescens PfO-1
MRIDRLTSKLQLALSDAQSLAVGHDHPAIEPAHLMQAMLEQQGGSIKPLLMQVGFDVNSLRKELTKELDQLPKIQNPTGDVNMSQDLARLLNQADRLAQQKGDQFISSELVLLAAMDENSKLGKLLLGQGVSKKALENAINNLRGGEAVNDANHEESRQALDKYTVDLTKRAEEGKLDPVIGRDDEIRRTIQVLQRRTKNNPVLIGEPGVGKTAIAEGLAQRIINGEVPDGLRGKRLLSLDMGALIAGAKYRGEFEERLKALLNELSKQEGQIILFIDELHTMVGAGKGEGSMDAGNMLKPALARGELHCVGATTLNEYRQYIEKDAALERRFQKVLVDEPSEEDTIAILRGLKERYEVHHKVAITDGAIIAAAKLSHRYITDRQLPDKAIDLIDEAASRIRMEIDSKPEVLDRLERRLIQLKVESQALKKESDDAAKKRLEKLQEEIDRHEREYSDLEEIWNSEKAEVQGSAQIQQKIEQSRQELEAARRKGDLNRMAELQYGVIPDLERSLQMVDQHGKSENQLLRSKVTEEEIAEVVSKWTGIPVSKMLEGERDKLMKMESLLHQRVIGQDEAVVAVANAVRRSRAGLSDPNRPSGSFMFLGPTGVGKTELCKALAEFLFDTEEAMVRIDMSEFMEKHSVARLIGAPPGYVGYEEGGYLTEAVRRKPYSVILLDEVEKAHPDVFNILLQVLEDGRLTDSHGRTVDFRNTVIVMTSNLGSMQIQELVGDREAQRAAVMDAISTHFRPEFINRVDEVVIFEPLARDQIAGITEIQLGRLRNRLAERELKLELSPEAMDKLIAVGYDPVYGARPLKRAIQRWIENPLAQLILSGRFMPGETATGVVENDEITFN

SEQ ID NO: 6791 - protein, 885 aa, Pseudomonas fluorescens PfO-1
MINVDLQQLIQALDAETRRDLERSAERCVARGGSKILVEDLLLGLLERPNGLLSRALQDADVDAGELSAALQSRVEHSASRNPVFAPELVQWLQDALLVANLELGQTSVEDAALILALLRNPMRYAGSRYQPLLAKLNIDRLKEFALSQQPQAAANGKPAAQGESLLERFTHNLTQQARDGKLDPVLCRDGAIRQMVDILARRRKNNPIVVGEAGVGKTAIVEGLASRIAAGEVPQVLKGVELLSLDMGLLQAGASVKGEFERRLKGVIDEVKASPKPIILFIDEAHTLIGAGGNAGGSDAANLLKPALARGELRTIAATTWAEYKKYFEKDPALARRFQPVQLHEPTVSEAVTILRGLAQVYEKSHGIYLRDDAVVSAAELSARYLAGRQLPDKAVDVLDTACARVRISLAAAPESLERLRGELAEGGRQRQALRRDAEAGLLIDHEALEALEARLDEAEAEMVALETQWTEQKQLAERLLELRQQLAKAREAAAVEPVVTVEEDAEGTVIETHAAEVDEALSVEALEAQLNETHSALTAAQVKERLVSFEVCPRLVAEVISAWTGVPLAQLAREHNAKVASFATDLRTRIRGQEQAVHALDRSMRATAAGLNKPDAPVGVFLLVGPSGVGKTETALALADLLYGGDRFITTINMSEFQEKHTVSRLIGAPPGYVGYGEGGMLTEAVRQKPYSVVLLDEVEKADPDVLNLFYQIFDKGVANDGEGREIDFRNTLILMTSNLGSDKISDLCEDGARPTAEVLEETIRPVLSKHFKPALLARMKVVPYYPVGGPVLRELIEIKLGRLGERLNRRQLDFTWCQNLVDHLSERCTQSESGARLIDHLLDQHVLPLVADRLLDAMATGESLKRVHATLDGEASVTCEFA

SEQ ID NO: 6792 - protein, 871 aa, Pseudomonas fluorescens PfO-1
MACNGRPAWPCNGSKPACVSWRSPEMELASLIGRLNPDNRRALERAAQRCLQRGHHFVEIEHLLLELLDIEGGDFAFLLPRFGLERDALTAEINKALDLFKTGSTRTPALSSHTLGLLEDAVVQASVLGIDSIRSGLLLLALIDRDERRSLLLNSASSLLRIPKEALRANLLEWTENSREHVGPRSVSSGSPTPRQDSVLDQYTQDLTADAHAGRIDPIVGRDGEIRQCIDILLRRRQNNPILVGAPGVGKTAVVEGLALRIAAGDVPPSLQEVSLRVLDLGLLQAGAGVKGEFEQRLKGVIDTVRSADKPIILFIDEAHTLIGAGGTEGGSDAANLLKPALARGELRTLAATTWMEYKKYFEKDPALARRFQLVQVEEPDEITAVEMLRGVAAKLEQHHGVQVLDAAIHEAVKLSHRYISGRQLPDKAISVLDTACARVALGQHDVPPPLESLRHRQQSLKEEVERLRREQATGLDHRERITLLESESKTNVQAIRELETRWSEERVAVRELLDTRRELLALSESADSDKPDEAIDSRIDHLAAELLRLEAGLDAIRQDDPLVPEQVDGKTVAAVIAGWTGIPVGKMLADEAHAVRTLGTRMGQRVMGQSTALNTIAQRLQAYRAGLTDPQKPVGVFLLVGPTGVGKTETAYALADALYGGERNLISINLSEYQEAHTVSQLKGAPPGYVGYGSGGVLTEAVRRKPYSVVLLDEIEKAHPDVLEAFYNVFDKGLMEDGTGLVVDFKNTVMLATSNVGAELLLDTPTAQLGSEAFNEALHKVLLQAFRPAFLARMTVVAYRPLDEQTLEGIVLAKLEKLRGRYKAATGKQFEFDSGIVKAVLAKCSAAGARDVENVLMTQVTGKLAEWVLE

SEQ ID NO: 6793 - protein, 753 aa, Streptococcus agalactiae 2603V/R
MLCQNCKLNESTIHLYTNVNGKQKQVDLCQNCYQIIKTDPNNPLFSGLNHVSHAPGGINPFFDDFFGDLNNFRAFNGQDLPNTPPTQSGGNRGGGNGNGRNNNRNQTATPSQAKGILEEFGINVTEIARHGDIDPVIGRDSEIIRVIEILNRRTKNNPVLIGEPGVGKTAVVEGLAQKIVDGNVPHKLQGKQVIRLDVVSLVQGTGIRGQFEERMQKLMEEIRQRQDVILFIDEIHEIVGAGTAGEGSMDAGNILKPALARGELQLVGATTLNEYRIIEKDAALERRMQPVKVDEPSVEETITILKGIQKKYEDYHHVKYNNDAIEAAAVLSNRYIQDRFLPDKAIDLLDEAGSKMNLTLNFVDPKEIDQRLIEAENLKAQATREEDYERAAYFRDQIAKYKEMQQQKVDDQDTPIITEKTIEHIIEEKTNIPVGDLKEKEQSQLINLADDLKQHVIGQDDAVVKIAKAIRRNRVGLGSPNRPIGSFLFVGPTGVGKTELSKQLAIELFGSADSMIRFDMSEYMEKHAVAKLVGAPPGYVGYEEAGQLTEKVRRNPYSLILLDEIEKAHPDVMHMFLQVLDDGRLTDGQGRTVSFKDTIIIMTSNAGSGKTEASVGFGASREGRTNSVLGQLGNFFSPEFMNRFDGIIEFKALDKENLLNIVDIMLSDVNARLAINGIHLDVTDKVKEKLVDLGYDPKMGARPLRRTIQEHIEDAITDYYLENPSEKELRAIMTSNGNIIIKSSKKTEESTKG

SEQ ID NO: 6794 - protein, 702 aa, Streptococcus agalactiae 2603V/R
MANNNFYNRDPFGNMDDIFNSLMGNMGGYNSENKRYLINGREVTPEEFSQYRQTGKLPGQELNNQNTPTNQVSADSVLTKLGTNLTDQARQHLLDPVIGRNKEIQETAEILARRTKNNPVLVGDAGVGKTAVIEGLAQAIINGDVPAAIKNKEIISIDISSLEAGTQYRGSFEENIQNIIKEVKETGNIILFFDEIHQILGAGSTGGDSGSKGLADILKPALSRGELTVIGATTQDEYRNTILKNAALARRFNEVKVNAPSAQDTFNILMGIRNLYEQHHNVVLPDSVLKAAVDLSIQYIPQRSLPDKAIDLIDMTAAHLAAQHPVTDLKSLEKEIAEQRDKQEKAVNTEDFEEALKVKTRIEELQNQIDNHTEGQKVTATINDIAMSIERLTGVPVSNMGASDIERLKELGNRLKGKVIGQNDAVEAVARAIRRNRAGFDDGNRPIGSFLFVGPTGVGKTELAKQLAFDMFGSKDAIVRLDMSEYNDRTAVSKLIGATAGYVGYDDNSNTLTERIRRNPYSIVLLDEIEKADPQVITLLLQVLDDGRLTDGQGNTINFKNTVIIATSNAGFGNEAFTGDSDKDLKIMERISPYFRPEFLNRFNGVIEFSHLSKDDLSEIVDLMLDEVNQTIGKKGIDLVVDENVKSHLIELGYDEAMGVRPLRRVIEQEIRDRITDYYLDHTDVKHLKANLQDGQIVISER

SEQ ID NO: 6795 - protein, 815 aa, Streptococcus agalactiae 2603V/R
MSHYSIKLQEVFRLAQFQAARYESHYLESWHLLLAMVLVHDSVAGLTFAEYESEVAIEEYEAATILALGRAPKEEITNYQFLEQSPALKKILKLAENISIVVGAEDVGTEHVLLAMLVNKDLLATRILELVGFRGQDDGESVRMVDLRKALERHAGFTKDDIKAIYELRNPKKAKSGASFSDMMKPPSTAGDLADFTRDLSQMAVDGEIEPVIGRDKEISRMVQVLSRKTKNNPVLVGDAGVGKTALAYGLAQRIANGNIPYELRDMRVLELDMMSVVAGTRFRGDFEERMNQIIADIEEDGHIILFIDELHTIMGSGSGIDSTLDAANILKPALARGTLRTVGATTQEEYQKHIEKDAALSRRFAKVLVEEPNLEDAYEILLGLKPAYEAFHNVTISDEAVMTAVKVAHRYLTSKNLPDSAIDLLDEASATVQMMIKKNAPSLLTEVDQAILDDDMKSASKALKASYKGKKRKPIAVTEDHIMATLSRLSGIPVEKLTQADSKKYLNLEKELHKRVIGQDDAVTAISRAIRRNQSGIRTGKRPIGSFMFLGPTGVGKTELAKALAEVLFDDESALIRFDMSEYMEKFAASHLNGAPPGYVGYDEGGELTEKVRNKPYSVLLFDEVEKAHPDIFNVLLQVLDDGVLTDSRGRKVDFSNTIIIMTSNLGATALRDDKTVGFGAKDISHDYTAMQKRIMEELKKAYRPEFINRIDEKVVFHSLSQDNMREVVKIMVKPLILALKDKGMDLKFQPSALKHLAEDGYDIEMGARPLRRTIQTQVEDHLSELLLANQVKEGQVIKIGVSKGKLKFDIAKS

SEQ ID NO: 6796 - protein, 854 aa, Pseudomonas aeruginosa PAO1
MRIDRLTSKLQLALSDAQSLAVGHDHPAIEPVHLLSALLEQQGGSIKPLLMQVGFDIAALRSGLNKELDALPKIQSPTGDVNLSQDLARLLNQADRLAQQKGDQFISSELVLLAAMDENTRLGKLLLGQGVSRKALENAVANLRGGEAVNDPNVEESRQALDKYTVDMTKRAEEGKLDPVIGRDDEIRRTIQVLQRRTKNNPVLIGEPGVGKTAIVEGLAQRIINGEVPDGLKDKRLLALDMGALIAGAKFRGEFEERLKAVLNELGKQEGRVILFIDELHTMVGAGKAEGAMDAGNMLKPALARGELHCVGATTLDEYRQYIEKDAALERRFQKVLVDEPSEEDTIAILRGLKERYEVHHGVSITDGAIIAAAKLSHRYITDRQLPDKAIDLIDEAASRIRMEIDSKPEELDRLDRRLIQLKIEREALKKEDDEATRKRLAKLEEDIVKLEREYADLEEIWKSEKAEVQGSAQIQQKIEQAKQEMEAARRKGDLESMARIQYQTIPDLERSLQMVDQHGKTENQLLRNKVTDEEIAEVVSKWTGIPVSKMLEGEREKLLRMEQELHRRVIGQDEAVVAVSNAVRRSRAGLADPNRPSGSFLFLGPTGVGKTELCKALAEFLFDTEEALVRIDMSEFMEKHSVARLIGAPPGYVGFEEGGYLTEAIRRKPYSVVLLDEVEKAHPDVFNILLQVLEDGRLTDSHGRTVDFRNTVVVMTSNLGSAQIQELAGDREAQRAAVMDAVNAHFRPEFINRIDEVVVFEPLAREQIAGIAEIQLGRLRKRLAERELSLELSQEALDKLIAVGFDPVYGARPLKRAIQRWIENPLAQLILAGKFAPGASISAKVEGDEIVFA

SEQ ID NO: 6797 - protein, 495 aa, Mycoplasma capricolum
IHHNALVSAAKLSSRYITDRYLPDKAIDLVDEACASIKTELASIPIELDQVNRKVMQLEIETSALEKEKDDKSKERWQEAKKELDSLKIEQATLNKKWEKEKEELSKINLVKSSIENLKQELETAQNDGNYKRAGEIKYSLLPSLEKSLALFETQTGAKMISEEVTEQEIAKVVSKSTGILVDKLISSEKERLLNLEDLLKKYVKGQDQAIKAVTSAIMRSRSGIKNPDKPIGSFLFFGPTGVGKTEVARSLADILFNSPKKMIRLDMSEYMEKHSVAKLIGAPPGYVGYEEGGRLTEAVRRNPYSIILFDEIEKAHSDVFNILLQILDDGRLTDSLGKTIDFKNTIIVMTSNIASQYLLTSDDFVQIDDQKIQAELNQTFRPEFLNRIDNIVYFNALSVQTIGEIVDKLLDELITRLQDEQNYFINFSEEARNKIINEGYDRLFGARLLKDILKKIIETLIAHYIISGLISESTRYLIDVKNNQFILEEFKQFN

SEQ ID NO: 6798 - protein, 714 aa, Mycoplasma genitalium
MNINFTPAGENRNFLQEIGRNINDEVLKNKVDPIIGRDNEIRRLIEILSRKSKNNPVLIGEPGVGKTAIVEGFVRRVVSNDVPLNLRDVEIYELSLSGLIAGTKFQGEFEKRINTILKQVKESNGRIILFIDEIHQIVGLGRNSSSGAMDIANILKPMLARGEIKVIGATTLKEYREYIEKDGALERRFQKILINEPSSQEALTIMRGLKTRWELFHNITIFDSALVAAVEMSTRYINERNLPDKAIDLIDEAAAKIKTEMSSEPVAIDSLKREIINLETEYAALKQDKENDNKQSKKEYLEKLKKQLDALKQKRDSLINEWKKEKADFENINKLKKEIEEFQTKLETYQSEGNYESASKILYSDIPRLKKELESAQQKYATSKHDLFKTEVSENEIAEVISQTTGIPLKKLLESEKDKLLHLGDEIKKRVKGQDEAIDAVVNTVIRGRVNINDPNKPIGSFIFLGSTGVGKTELAKSLAEVLFDNEKALIRFDMSEYMEKHSVAKLIGAPPGYIGYEQSGLLTEAVRRKPYSVLLFDEIEKAHPDVTNVLLQVLDDGTLKDSQGRVVNFKNTLIIMTSNLGSNFLLEGKKDLAIQSLKKHFRPEFINRIDEIVFFNVLEKDTVLSIINSLLAQLSKRLNKQNLFFNFDSNLTEFIYKSSFDQQFGARPIKRFIDHSVATLIAKYILQGKIKKGVGYNIAVVKDNITITQNNKS

SEQ ID NO: 6799 - protein, 214 aa, Mycoplasma hominis
MNYLPEPLEKINYQIARLEIEKAALTNDSETKQTAIKNKERILEIDKELNTLKLQKVDLEKRWKQEKEDIQKFSSIKENIEELNRKLPLLQSEGKYVEASKIMYVLVPELIKTRDELEQKIQSRKNRLIKEVVDAEEVADIVSKWTNIPVNRLLENQKQKILNLSETLKKRVKGQDQAIELISDAIKRSKANINDPNRPIGSFLFLGPTGAGKS

SEQ ID NO: 6800 - protein, 858 aa, Fusobacterium nucleatum subsp. vincentii ATCC 49256
MMNPNQFTENTISAINLAVDISKGNMQQSIRPEALALGLLMQNNGLIPRVIEKMGLNLQYIISELEKEMNNYPKVEVKVSNENISLDQKTNSILNRAEKIMNEMGDSFLSVEHIFKAMIEEMPIFKKLGINLEKYMEVLMNIRGNRKVDNQNPEATYEVLEKYAKDLVELAREGKIDPIIGRDSEIRRAIQIISRRTKNDPILIGEPGVGKTAIVEGLAQRILNGDVPESLKNKKIFSLDMGALVAGAKYKGEFEERMKGVLKEVEESNGNIILFIDEIHTIVGAGKGEGSLDAGNMLKPMLARGELRVIGATTIDEYRKYIEKDPALERRFQTILVNEPNIDDTISILRGLKDKFETYHGVRIADAAIVEAATLSQRYITDRKLPDKAIDLIDEAAAMIRTEIDSMPEELDQLTRKALQLEIEIKALQKETDDASKERLKVIEKELAELNEEKKVLTSKWELEKEDISKIKNIKREIENVKLEMDKAEREYDLTKLSELKYGKLATLEKELQEQQNKIDRDGKDDSLLKQEVTADEIADIVSRWTGIPVSKLTETKKEKMLHLEDHIKERVKGQDEAVKAVADTMLRSVAGLKDPNRPMGSFIFLGPTGVGKTYLAKTLAYNLFDSEDNVVRIDMSEYMDKFSVTRLIGAPPGYVGYEEGGQLTEAIRTKPYSVILFDEIEKAHPDVFNVLLQVLDDGRLTDGQGRIVDFKNTLIIMTSNIGSHLILEDPALSESTREKVTDELKARFKPEFLNRIDEIITFKALDLPAIKEIVKLSLKDLENKLKPKHITLEFSDKMVDYLANNAYDPHYGARPLRRYIQKEIETSLAKKILANEIHEKSDVLIDLDNNHIVFKEK

SEQ ID NO: 6801 - protein, 856 aa, Helicobacter pylori
MNLFEKMTDQLHEALDSALALALHHKNAEVTPLHMLFAMLNNSQGILIQALQKMPVDIEALKLSVQSELNKFAKVSQINKQNIQLNQALIQSLENAQGLMAKTGDSFIATDVYLLANMSLFESVLKPYLDTKELQKTLESLRKGATIQGKNDDSNLESLEKFGIDLTQKALENKLDPVIGRDEEIIRMMQILIRKTKNNPILLGEPGVGKTAVVEGLAQRIVNKEVPKTLLNKRVIALDLSLLVAGAKYRGEFEERLKKVIEEVKKSANVILFIDEIHTIVGAGASEGGMDAANILKPALARGELHTIGATTLKEYRKYFEKDMALQRRFQPILLNEPSINEALQILRGLKETLETHHNITINDSALIASAKLSSRYITDRFLPDKAIDLIDEGAAQLKMQMESEPAKLSSVKRSIQRLEMEKQALEMEKKESNHKRMQEILKELSDLKEEKIQLEAQFENEKEAFKEISRLKMEMESLKKEAERFKRNGDYQQAGEIEYSKIPENKKKEEELQRKWEAMQQNGALLQNALTENNIAEIVSQWTHIPVQKMLQSEKNRVLNIESELQKRVVGQEKAIKAIAKAIKRNKAGLSDSNKPIGSFLFLGPTGVGKTESAKALAQFLFDSDKNLIRIDMSEYLEKHAITRLIGPAPGYVGYEEGGQLTEAVRRKPYSVVLLDEVEKAHPDVFNLLLQVLDEGHLTDSKGVRVDFKNTILILTSNVASGALLEENLSEADKQKAIKESLRQFFKPEFLNRLDEIISFNALGSHAVINIVGILFENIQKKALERGINITLDEEAKELIAEAGFDRFYGARPLKRALYEMVEDKLAELILEDKIKENGSVAFVVENNEIVPKIK

SEQ ID NO: 6802 - protein, 860 aa, Streptococcus mutans UA159
MIDKMTQLVEDSLEEAKELAIAHRNYQLDIPHLWAVLVKPDQFAFQFYQSLEINTNQLIEIINKEIDKIPVLSSTEKSSYARLYSQRLKNLLDDAHQEMIDLKDQVLTVEHLILALFNQQRNPITVFLLEQGLNKEKLYQKMHRIRKGKPAISSSQETIYDALEKYAVNLNQRALDEPVNKIIGRQDEMNDIIRILSRKNKNNAVLVGHSGVGKTAIIEGFVQRLVKNQVPKNLQGKVIYSLDIGALLAGTKYRGEFEERFKALLNDIIDSNGQIILFIDEIHSIVSAGRTEGSVDAASILKPLLARGKIRIIGSTTHAEYRESIEYDRALERRFQRILVHEPDLDYTMEILKGLKPIYENFHGVRLEEDGLEAAASLSKRYISDRFLPDKALDLIDEACAAKRLASHAYPVQMTNLSQQLISEKIRLLRLTDSDTDDKFKLNNHLEQLEEQKSQLLANWQRERELLDQVQELRSHLTALEEQANLALENNQVADYVRLEDEEIRKCHQKMTALEKERLDSQKIINVTVTREDIAAVVERLTGIKVQGVMENERDRLLHLEELLHQKIVGQDQAVQKVSQAIIRSRAGIQNPKRPIGSFLFLGPTGVGKTALAKRLAEVLFGSELEMVRLDMSEYMEKHAVSRLVGPPPGYVGYEEGGQLTEAVRQRLYSIVLLDEIEKAHPDVFNTLLQVLDEGRLTDSKGRTIDFKNTILIMTSNIGSTNILQSLQDSGCITSEVRYKVLDELNHSFRPEFLNRIDETVLFNALSEKDMTGVVKVMVSDLQARLLEQDIHLTLTESVYILLAKEGFDAAFGARPMQRTIMQKLENPLALYLIQNQKNKEKETFVTVSVKDKKLKFTFS

SEQ ID NO: 6803 - protein, 753 aa, Streptococcus mutans UA159
MLCQNCKLNEATIHLYANVNGQQKQIDLCQNCYQIMKTDPENGPLNHLSQQNSSSINPFFDDFFGDLNNFRAFNNQDLPNTPPTQAGGGNGNGGNNRRPGGPQQQASQKPNGLLEEFGINLTDIARKGEIDPVIGRDEEITRVIEILNRRTKNNPVLIGEPGVGKTAVVEGLAQKIVDGDVPQKLHGKNVIRLDVVSLVQGTGIRGQFEERMQKLMEEIRQRQDVILFIDEIHEIVGAGSAGDGNMDAGNILKPALARGELQLVGATTLNEYRIIEKDAALERRMQPVKVDEPSVAETITILKGIQPKYEDYHHVKYTDEAIEAAANLSNRYIQDRFLPDKAIDLLDEAGSKMNLTLNFVDPKEIDHRLIEAENLKAQATRDEDYEKAAYFRDQIAKYKEMQSAKLDKENTPVITEKNIEVIVEQKTNIPVGELKEKEQSQLIHLADDLKTRVIGQDAAVDKIAKAIRRNRVGLGTPNRPIGSFLFVGPTGVGKTELSKQLAIELFGSEDSMIRFDMSEYMEKHAVAKLVGAPPGYVGYEEAGQLTEKVRRNPYSLILLDEVEKAHPDVMHMFLQVLDDGRLTDGQGRTVSFKDTIIIMTSNAGTGKSEANVGFGASREGRTNSVLGELGNFFSPEFMNRFDGIIEFQALSKDNLLQIVSLMLDDVNQRLAVNAIHLDVTDKVKEKLVDLGYDPKMGARPLRRTIQEHIEDAITDFYLEHPEQKELKAIMTSNGKIVIKASNKVETVTKATSD

SEQ ID NO: 6804 - protein, 701 aa, Streptococcus mutans UA159
MANFNGRDPFGNMDDIFNQLMGNMGGYNSENRRYLINGREVSPEEFAQYRQTGKLPGNPEIQQAQAAARTPKEDSILTKLGNNLTEEARQGNLDPVIGRNKEIQETAEILARRTKNNPVLVGDAGVGKTAVVEGLAQAIVNGDVPASIKNKEVISIDISGLEAGTQYRGAFEENIQNLVKEVKEAGNIILFFDEIHQILGAGSTGGDSGSKGLADIIKPALSRGELTVIGATTQDEYRNTIMKNAALARRFNEVKVNAPSAEDTYEILKGISALYEQHHNVILPKEVLKAAVDLSVQYIPQRSLPDKAIDLVDMTAAHLAAQHPATDVKTLEKEIQTEKDKQQAAAEKEDYEEALKSKTKIDKLQAQIDNHTEGQKVTATINDVAEAVERLTGIPVSQMGSSDIERLKEMNSRLKGKVIGQDEAVEAVSRAIRRNRAGFDEGNRPIGSFLFVGPTGVGKTELAKQLALDMFGSKDSIIRLDMSEYSDRTAVSKLIGTTAGYVGYDDNSNTLTERVRRNPYSIVLLDEIEKADSQVITLLLQVLDDGRLTDGQGNTINFKNTVIIATSNAGFGNEALTGQEDKDMKIMDRIAPYFRPEFLNRFNAVIEFSHLSKEDLDEIVNLMLSEVNTTLAKKGIDLVVSDSAKAHLIEEGYDEAMGVRPLRRVIEQEIRDKVTDFYLDHTDVKHLKAEMQDDKLIIEEA

SEQ ID NO: 6805 - protein, 813 aa, Streptococcus mutans UA159
MTDYSLKMQEVFRLAQFEAARFESSYLESWHVLLAMVEIDSSVAGLSFAEFEADVRFEDYQAAAILAIGKKPKSSSNDIMLLEQSHALKRTLAEAAAISQVTHAKEVGTEHVLFAMLLNPNLLATRILELVGFHAKDDGESIRLLDLRKVIERYAGFSKEDIKAIFEMRKPKKVKNSSSFSDLMKPPSVTGELADFTRDLTELARQGRLEPVIGREQEISRMVQILSRKTKNNPVLVGDAGVGKTALAYGLAQRIVDSAVPFELADMKVLELDMMSVVAGTRFRGDFEERMNQIIADIEADGHIVLFIDELHTIMGSGSGIDSTLDAANILKPALARGSLRTIGATTQEEYQKHIEKDAALSRRFAKVTIEEPSEEEAYQILLGLKKSYETYHHVIISDAAVMAAVKGAHRYLSGKNLPDSAIDLLDEASATVQGLVKKKAPAYLTDLDHALITNDYQLAKRLLKKEKKPLLKKRAEVKEEDILATLSKLSGIPVKKLTQADSKKYLNLERELHKRVIGQDDAVSSISRAIRRNQSGIRVGKRPIGSFMFLGPTGVGKTELAKALAEVLFDDESALIRFDMSEYMEKFAASRLNGAPPGYVGYEEGGELTEKVRNKPYSVLLFDEVEKAHPDIFNILLQVLDDGVLTDSRGRKVDFSNTIIIMTSNLGATALRDDKTVGFGAKSFSQDYKAMESRILEELKKVYRPEFINRIDEKVVFHNLGQEDIRHIVKIMVAPLIAHLADQGITLKFQPSALKHLALAGYDAEMGARPLRRTLQTEVEDKLAELILSGKLASGQTLKIGIQKEKLKFDIV

SEQ ID NO: 6806 - protein, 715 aa, Mycoplasma pneumoniae
MDFSFTPTPDKRDFLKEMGRSINDEVLKNKVDPIIGRDNEIRRLIEILSRKNKNNPVLIGEPGVGKTAIVEGFVRRVVNNDVPLNLRDVEIYELSLSGLIAGTQYQGEFEKRVNGILKQVKESNGKIILFIDEIHQIVGLGRNSSSGAMDIANILKPMLARGEIKVIGATTLKEYREYVEKDGALERRFQKILVSEPSQQEALTIMRGLKTRWELFHNLTIFDSALVAAVEMSARYIPDRNLPDKAIDLIDEASAKIKTEMASEPVVIDTLKREIINLETEYAALKQDKENADNKKKQGHLDNLKQQLDELKKKRDSLTAEWKKEKTNFESINKLKKEIEDLQTRLELYQTEGNYEAASKILYYDIPKLKNQLEQAQKKYVDSKHDLFKTEVSENEVAEVVSQATGIPLKKLLETEKEKLLHLGDEIKKRVKGQDAAVETVVNTVMRGRVNLNDPNRPIGSFIFLGSTGVGKTELAKSLAEVLFDNEKAMIRFDMSEYMEKHSVAKLIGAPPGYVGYEQSGLLTEAVRRKPYCVLLFDEIEKAHPDVTNILLQVLDDGTLKDSQGRLVNFKNTMIIMTSNLGSNYIMENKRDLAMEALKKHFRAEFINRIDEIVFFSVLQKTTVLEIITNLLDQLNQRLAKQNLKFTFDPKLNEFIYKSSFDEQFGARPIKRFIDRQIATLIAKQILEGIITKDVSYNVIVEKDKVAIVANKVKS

SEQ ID NO: 6807 - protein, 753 aa, Streptococcus agalactiae NEM316
MLCQNCKLNESTIHLYTNVNGKQKQVDLCQNCYQIIKTDPNNPLFSGLNHVSHAPGGINPFFDDFFGDLNNFRAFNGQDLPNTPPTQSGGNRGGGNGNGRNNNRNQTATPPQAKGILEEFGINVTEIARHGDIDPVIGRDSEIIRVIEILNRRTKNNPVLIGEPGVGKTAVVEGLAQKIVDGNVPHKLQGKQVIRLDVVSLVQGTGIRGQFEERMQKLMEEIRQRQDVILFIDEIHEIVGAGTAGEGSMDAGNILKPALARGELQLVGATTLNEYRIIEKDAALERRMQPVKVDEPSVEETITILKGIQKKYEDYHHVKYNNDAIEAAAVLSNRYIQDRFLPDKAIDLLDEAGSKMNLTLNFVDPKEIDQRLIEAENLKAQATREEDYERAAYFRDQIAKYKEMQQQKVDDQDTPIITEKTIEHIIEEKTNIPVGDLKEKEQSQLINLADDLKQHVIGQDDAVVKIAKAIRRNRVGLGIPNRPIGSFLFVGPTGVGKTELSKQLAIELFGSADSMIRFDMSEYMEKHAVAKLVGAPPGYVGYEEAGQLTEKVRRNPYSLILLDEIEKAHPDVMHMFLQVLDDGRLTDGQGRTVSFKDTIIIMTSNAGSGKTEASVGFGASREGRTNSVLGQLGNFFSPEFMNRFDGIIEFKALDKENLLNIVDIMLSDVNARLAINGIHLDVTDKVKEKLVDLGYDPKMGARPLRRTIQEHIEDAITDYYLENPSEKELRAIMTSNGNIIIKSSKKTEESTKG

SEQ ID NO: 6808 - protein, 702 aa, Streptococcus agalactiae NEM316
MANNNFYNRDPFGNMDDIFNSLMGNMGGYNSENKRYLINGREVTPEEFSQYRQTGKLPGQELNNQNTPTNQVSADSVLTKLGTNLTDQARQHLLDPVIGRNKEIQETAEILARRTKNNPVLVGDAGVGKTAVIEGLAQAIINGDVPAAIKNKEIISIDISSLEAGTQYRGSFEENIQNIIKEVKETGNIILFFDEIHQILGAGSTGGDSGSKGLADILKPALSRGELTVIGATTQDEYRNTILKNAALARRFNEVKVNAPSAQDTFNILMGIRNLYEQHHNVVLPDSVLKAAVDLSIQYIPQRSLPDKAIDLIDMTAAHLAAQHPVTDLKSLEKEIAAQRDKQEKAVNTEDFEEALKVKTRIEELQNQIDNHTEGQKVTATINDIAMSIERLTGVPVSNMGASDIERLKELGNRLKGKVIGQNDAVEAVARAIRRNRAGFDDGNRPIGSFLFVGPTGVGKTELAKQLAFDMFGSKDAIVRLDMSEYNDRTAVSKLIGATAGYVGYDDNSNTLTERIRRNPYSIVLLDEIEKADPQVITLLLQVLDDGRLTDGQGNTINFKNTVIIATSNAGFGNEAFTGDSDKDLKIMERISPYFRPEFLNRFNGVIEFSHLSKDDLNEIVDLMLDEVNQTIGKKGIDLVVDENVKSHLIDLGYDEAMGVRPLRRVIEQEIRDRITDYYLDHTDVKHLKANLQDGQIVISER

SEQ ID NO: 6809 - protein, 857 aa, Shewanella oneidensis MR-1
MRLDRMTNKFQLAISDAQSLALGRDHQFIEPLHLMMALLNQDSGSIHPLLTQAGIRVSALRSLLSQELERLPQVEGTGGDVQLSQGLIRLLNLCDKLAQKRKDKYISSELFVLAALEGCDALAQCLKKSGATKELMEQTIEQVRGGQKVDDPNAEDQRQALKKFTVDLTERAEQGKLDPVIGRDDEIRRTIQVLQRRTKNNPVLIGEPGVGKTAIVEGLAQRIVNGEVPEGIKNKRVLSLDMGALIAGAKYRGEFEERLKAVLNELAQEEGQVILFIDELHTMVGAGKGDGAMDAGNMLKPALARGDLHCVGATTLDEYRQYIEKDAALERRFQKVLVDEPSVEDTIAILRGLKERYELHHHVEITDPAIVAAATMSHRYVSDRKLPDKAIDLIDEAASSIRMQMDSKPESLDRLERRAIQLKLEEQALAKENDEASRRRLDHLQEELRDVEAKASELSEIWRTEKAALAGTQHIKADLEQARLDLEVARRAGDLTRMSELQYGRIPELEKQLDLASQAEMQDMTLLRNKVTDLEIAEVLSKATGIPVSKMLEGEREKLLQMEVALHERVIGQNEAVDAVANAIRRSRAGLADPNRPIGSFLFLGPTGVGKTELCKSLARFLFDSESALVRIDMSEFMEKHAVSRLVGAPPGYVGYEEGGYLTEAVRRKPYSVILLDEVEKAHPDVFNILLQVLDDGRLTDGQGRTVDFRNTVIIMTSNLGSDIIQEGFGHLSYSEMKSAVMNVVTHSFRPEFLNRIDESVVFHPLDAENIKHIASIQIASLRKRLAEKDYTLEITDEALSLIAEIGFDPVYGARPLKRALQQEMENPLAQKLLRGDLLPGKPIKVSCVDGELVFEQ

SEQ ID NO: 6810 - protein, 704 aa, Ureaplasma urealyticum
MEFKQKNSNNPLEEFGRNLNKEILDNKIDPIIGRDEEIRRTIEILSRKTKNNPVLIGEPGVGKTAIVEGLAYRIVHKDVPSNLLDKTIIELSLSSLIAGASYQGQFEERINSILKEVKKADGNIILFIDEIHQIVGMGRNQGSNMDVANILKPMMARGEIKLIGATTLDEYRLYIEKDQALERRFTKVLVNKPTIQETLTIMRGLKPRWEAFHGIKIHDNALIAAVNLSERYINDRNLPDKAIDLIDEAAAKIKTQINSQPIYLDEIKRDLQHLQTEKAALEPEKDEKSIKRLNEILEKIKLKQDEFNNLNDLYLKEKKQIDDLKNLRQKIERIQHDIEFYQSEGKYEKASRLLYSDLPLFEKQREELENKINENNNQKMIIDSLTENEIADVIARATGIPLSHLLADEKTKLLSLNKRIASHVIGQDEAVKLISDAVIRGRAGINNPNQPIGSFLFLGPTGVGKTELAKTLAKELFNSEKALIRFDMSEYMEKHSVSKLVGAPPGYIGYENAGVLTESVKRKPYSILLFDEIEKAHPDILNILLQILDEGSIKDAKNNEINFKNTIIIMTSNIGAEALLENNKTKALLDLQKTFKPEILNRISEIIFFNKLSKEIIFKISENLLKELENLLAKQDYLIKFDDNIAQIMVEDAYSSNYGARPLKRWITKHLENEIAKLIIENRITKNINYKINYDRELDQVLIK

SEQ ID NO: 6811 - protein, 857 aa, Vibrio vulnificus CMCP6
MRLDRFTSKFQIAISDAQSLALGRDHQYIEPVHLMVALLDQNGSPIRPLLTILNVDVTHLRSKLSEMLDRLPKVSGIGGDVQLSSAMGAMFNLCDKIAQKRQDAYISSEIFLLAAIEDRGPLGQLFKELGLTEQKVSQAIEQIRGGQKVNDQNAEELRQALEKFTIDLTERAEQGKLDPVIGRDDEIRRTIQVLQRRTKNNPVIIGEPGVGKTAIVEGLAQRIINNEVPEGLRGRRVLSLDMGALVAGAKYRGEFEERLKSVLNELSKEEGNIILFIDELHTMVGAGKGEGSMDAGNMLKPALARGELHCVGATTLDEYRQYIEKDPALERRFQKVLVDEPTVEDTIAILRGLKERYELHHHVEITDPAIVAAASLSHRYVSDRQLPDKAIDLIDEAASSIRMQIDSKPEALDKLERKIIQLKIEQQALSNEHDEASEKRLRSLNEELNEKEREFAELEEIWNAEKAALSGTQHIKAALEQARMDMEFARRAGDLSRMSELQYGRIPELEKQLDLATQAEMQEMTLLKNKVTDNEIAEVLSKQTGIPVSKMLEAEKEKLLRMEEVLHKRVIGQKEAVEVVANAIRRSRAGLSDPNKPIGSFLFLGPTGVGKTELCKTLANFMFDSEDAMVRIDMSEFMEKHSVARLVGAPPGYVGYEEGGYLTEAVRRKPYSVILLDEVEKAHPDVFNILLQVLDDGRLTDGQGRTVDFRNTVVIMTSNLGSSRIQENFAMLDYQGIKEQVMEVVTKHFRPEFLNRVDETVVFHPLGQDHIKSIAAIQLNRLANRMEEHGYPLEVSDKALELIAQVGFDPVYGARPLKRAIQQSIENPLAKSILAGSVLPDKKIQLIVNNDQIVAHQ

SEQ ID NO: 6812 - protein, 854 aa, Vibrio vulnificus CMCP6
MASLSLSALVDKLTPEAKRALEQAAALASSRTHHSIEMTHWLLTLVQSAGPEEIELYRSFKVDLNQLQTDLTLQLEKYKTGCQTVPGLSSHTVTILQNAWMTATIAFEAEKIAAVHLLHAFLSDDTLFALSSTVSKELSKIQPSALIEYAQTHVEMANQIPNHRASTQALDQFTIDLTEQAELGQIDPVIGRDDEIRLMTDILLRRRQNNPILTGEAGVGKTAVVEGLALKIAEGDVPPALKAVRIKSLDLALLQAGAGMKGEFENRLKNVVKEVKESAVPIVLFIDEAHGLIGGGAQAGQGDAANILKPALARGELRTIAATTWAEYKKYVEKDAALTRRFQVVKIEEPSPELAIEMLRGLVPVMEKHHGVHITTEALKAAVFLSSRYISGRQLPDKAVSVLDTACSRVALSQNSIPGLLDQKYKKRQMIEAQQLQLTNELAFGHSHQTALDELESKLSLLQNEIHQLETTWRDEEGAVKQAKALRDSILAEPSAEKANQLQSIEQQLSSNPMPLVFSHVNEALIAEIIAGWTGIPLGKLKSDEIKAILDLQQHLQERVVGQDHALSKMAEVIKTARAQLNEESKPNGIFFLVGPSGVGKTESALAIAEQVYGSEENITVINMSEFKEEHKVSLLLGSPPGYVGYGEGGVLTEAVRRKPYSVILLDEMEKAHPGVQDIFYQVFDKGMIKDGEGRDIDFKNTIIIMTSNSGTETTMELFQDPELAPDPEALKEALRDDLLQDFKPAFLGRVNVIPYIPLHRDVLEKITALKLSKIQKRIKTNYKAEAVINDRLINSIVDSCNETGSGARALQNVIENKVLPKISESVLNAILNDIRINKIEIEGEVDDLSISIV

SEQ ID NO: 6813 - protein, 699 aa, Tropheryma whipplei TW08/27
MSESQSELDKYGTNLTKTAATNKLDPVIGRDAEIRRVCQILSRRTKNNPVLIGSAGVGKTAIVEGLAQRIVAGDVPESLRNKEIVSLDLSALLAGASYRGEFEKRVKNLLEEIQKSKVIIFIDEVHTLMSAGAAEGAIAAGNMLKPLLARGELRLIGATTLDEYREHLEKDPALERRFQQVFVGEPNLEDCIAIMRGLKERYEAHHKVSISDTALVTAVELSSRYITGRQLPDKAIDLLDEAASSLRMEIDSSPVELDQLRREVDRLRLEELALKSENDPTSEQRLRSITNQLSGKQEMLNTLQASWNSERARLNQIGALKEQIDIAKQSADIAQREGRLEDASRLLYATIPQLQKNLAEKLEEQDSAPLVSDQVMPEDIASVVEGWTGIPVKKLMQKDAKQLLHLEEDLSKSVIAQKVAIGVIADAVRRSRAGLSDPNRPSGTFLFLGPTGVGKTQLVKALASLLYDGEIVRIDMSEYSEKFSISRLIGAPPGYIGHESAGQLTESVRRRPYSVVLFDEAEKAHPEVFDILLQVLDEGRLTDSHGRTVDFRNTIIVLTSNIGSRYLSDISLEATTAHEYVNDEVRRTFRPEFLNRLDEIVIFEPLSQSDICQIVDLNIESLNKRIKDRRIVVTVSEDLRRWLSKSGYDVIYGARPLRRLIQREIEDRLAKLIIEGLIHDGQTASFDLSGGAVNAQVCS

SEQ ID NO: 6814 - protein, 76 aa, Methanosarcina barkeri
RLIGAPPGYVGYEEGGQLTEQVRRRPYSVVLLDEVEKAHPDLFNTLLQVLDEGRLTDGHGRTVDFRNTVLIMTSNI

SEQ ID NO: 6815 - protein, 854 aa, Pseudomonas syringae pv. tomato str. DC3000
MRIDRLTSKLQLALSDSQSLAVGLDHPAIEPAHLMQALLEQQGGSIKPLLLQVGFDINSLRKELSAELDRLPKIQNPTGDVNMSQDLARLLNQADRLAQQKGDQFISSELVLLAAMDENSKLGKLLLGQGVSKKALENAINNLRGEGAVNDPNIEESRQALDKYTVDLTKRAEEGKLDPVIGRDDEIRRTIQVLQRRTKNNPVLIGEPGVGKTAIAEGLAQRIINGEVPDGLRGKRLLSLDMGALIAGAKYRGEFEERLKSLLNELSKQEGQIILFIDELHTMVGAGKGEGSMDAGNMLKPALARGELHCVGATTLNEYRQYIEKDAALERRFQKVLVDEPSEEDTIAILRGLKERYEVHHKVAITDGAIIAAAKLSHRYITDRQLPDKAIDLIDEAASRIRMEIDSKPEVLDRLERRLIQLKVEAQALKKEKDEAAIKRLEKLQEEIVRLEKEYADLEEIWTSEKAEVTGSAQIQQKIEQSRQELEAARRRGDLNRMAELQYGIIPDLERSLQMVDQHGKPENQLLRSKVTEEEIAEVVSKWTGIPVSKMLEGEREKLLRMETLLHNRVIGQEEAVVAVSNAVRRSRAGLSDPNRPSGSFMFLGPTGVGKTELCKALAEFLFDTEEAMVRIDMSEFMEKHSVARLIGAPPGYVGYEEGGYLTEAVRRKPYSVILLDEVEKAHSDVFNILLQVLEDGRLTDSHGRTVDFRNTVIVMTSNLGSAQIQELVGDREAQRAAVMDAVSTHFRPEFVNRIDEVVIFEPLARDQIAGITDIQLGRLRKRLAERELTMVLSPEALDKLIAVGYDPVYGARPLKRAIQRWIENPLAQLILSGGFEPGSSITGKVVDDEIVFG

SEQ ID NO: 6816 - protein, 867 aa, Pseudomonas syringae pv. tomato str. DC3000
MIDVDLQQLVKALDAPTRNELEGAAGRCVSRGSSQILVEDMLPGLLERPDGMLMRALSDADVSTAEFAGLILVPVEHSVDRTPVFAAELVQWFQDALLIATLDLGQSHIDQAALILALLRNPLRYADRPYQPLLAKINIERFRDYVLSRQASGTARQAIHQSDSLLERFTHNLTQQAREGSLDPVLCRDDCLRQMVDILARRRKNNPIVVGEAGVGKTAIVEGLALRIVRGEVPDLLKDVELLSLDMGLLQAGASIKGEFERRLKGVIDEVKSSPGSFILFIDEAHTLIGAGANAGGSDAANILKPALARGELRTIAATTWAEYRQYFEKDPALARRFQPVRVLEPTVEQAVTILRGLAPLYEQSHGVYLRDDAVVAAARLSARYISGRQLPDKAIDLLDTACARVQISLVAVPERLEHLRSEMVQQQRHLEAVQRDADAGLSVDDKVLSTLASSVSRIRKEAIVLEDAWLDQRKTARRVLDLRQQLAHRKIQQNALTTLDSDCQATQALESELAQAQQTILSTQLKDRLVSFEVCPRLVAQVVNAWTGIPLSQLVQEHSLSIADFSSDLRLRIRGQEQAVQVLERAVKASAAGLNAPNAPTGVFLLVGPSGVGKTETAIALADLLYGGERFLTTINMSEFQEKHTVSRLIGAPAGYVGYGEGGMLTDAVRQKPYSVILLDEVEKADPEVMNLFYQIFDKGVANDGEGREINFRNTLILMTSNLGGDLIHASCREGERPDADELAMRIKPLLTAHFKPALLARMRVVPYYPVTGVVLHELIELKLSRLGERLECRGLTFSYSPDLTRYLLECCTQSDSGARLIDHVLESRVTPLIADRLLSAASSGDSVSRAHATLDASGGIVCEFE

SEQ ID NO: 6817 - protein, 882 aa, Pseudomonas syringae pv. tomato str. DC3000
MSNVDLQQLIQALDAETRRDLESSAERCVARGGSKILVEDLLLELLERPQGLLARALQDAEVDAGELSASLQSRVEHSASRNPVFAPELVQWLQDALLVANLELGQTQVEQAALILALLRNPMRYAGSRYQPLLAKLNIDRLKEFALSKQEQPANGKSAAQGESLLERFTHNLTQQARDGKLDPVLCRDGAIRQMVDILARRRKNNPIVVGEAGVGKTAIVEGLASRIAAGEVPQALKGVELLSLDMGLLQAGASVKGEFERRLKGVIDEVKASPKPIILFIDEAHTLIGAGGNAGGSDAANLLKPALARGELRTIAATTWAEYKKYFEKDPALARRFQPVQLHEPTVSEAVTILRGLAQVYEKSHGIYLRDDAVVAAAELSARYLAGRQLPDKAVDVLDTACARVRISLAAAPESLERLRGELAEGGRQRQALRRDAEAGLLIDHESLEALETRLHAAEEERVALEAMWLEQKTLAERLLELRQQLAKAREAVAAVPVVEIGEDDEGTVIEAVALDETQSVEALTAALNDTHVALAALQVKERLVSFEVCPRLVAEVISAWTGVPLAQLAREHNAKVASFAKDLRIRIRGQEQAVHALDRSMRATAAGLNKPDAPVGVFLLVGPSGVGKTETALALADLLYGGDRFITTINMSEFQEKHTVSRLIGAPPGYVGYGEGGMLTEAVRQKPYSVVLLDEVEKADPDVLNLFYQIFDKGVANDGEGREIDFRNTLILMTSNLGSDQISALCEDGARPTAEVLEETIRPVLSKHFKPALLARMRVVPYYPVSGPVLRELIEIKLGRLGERLNRRQLEFTYCQDLVDHLAQRCTQSDSGARLIDHLLDLHVLPLVADRLLDAMATGESLKRVHATLDTSGTVTCEFA

SEQ ID NO: 6818 - protein, 857 aa, Vibrio parahaemolyticus RIMD 2210633
MRLDRFTSKFQIAISDAQSLALGRDHQYIEPVHLMVALLDQNGSPIRPLLTMLDVDVTHLRSKLGEMLDRLPKVSGIGGDVQLSSSMGTLFNLCDKVAQKRQDSYISSEVFLLAALEDRGPLGQLLKEVGLTEQKVSQAIEKIRGGQKVNDPNAEELRQALEKFTIDLTERAEQGKLDPVIGRDDEIRRTIQVLQRRTKNNPVIIGEPGVGKTAIVEGLAQRIVNNEVPEGLRGRRVLSLDMGALVAGAKYRGEFEERLKSVLNELAKEEGNVILFIDELHTMVGAGKGEGSMDAGNMLKPALARGELHCVGATTLDEYRQYIEKDAALERRFQKVLVDEPTVEDTVAILRGLKERYELHHHVEITDPAIVAAASLSHRYISDRQLPDKAIDLIDEAASSIRLQIDSKPESLDKLERKIIQLKIEQQALSNEHDEASEKRLQALNDELNEKEREYAELEEVWNTEKAALSGTQHIKSELEQARMDMEFARRAGDLNRMSELQYGRIPELEKQLDLATQAEMQEMTLLRNKVTDNEIAEVLSKQTGIPVSKMLEAEKEKLLRMEDVLHNRVVGQSEAVAVVSNAIRRSRAGLSDPNRPIGSFLFLGPTGVGKTELCKTLASFMFDSEDAMVRIDMSEFMEKHSVARLVGAPPGYVGYEEGGYLTEAVRRKPYSVILLDEVEKAHPDVFNILLQVLDDGRLTDGQGRTVDFRNTVVIMTSNLGSSRIQENFATLDYQGIKSEVMDVVSKHFRPEFLNRVDEIVVFHPLGQEHIKSIASIQLERLAKRLEEKGYQLEVSDKALDLIAQVGFDPVYGARPLKRAIQQNVENPLAKSILAGEIVPDKKVQLIVTNDQILAHQ

SEQ ID NO: 6819 - protein, 890 aa, Vibrio parahaemolyticus RIMD 2210633
MININLSSLIQRLHPIAKVALEDAAALAVSEKANEVQIEHYLLSLLERPNSDFDVLLSHFDCSENLLRQSVRSTLDTNAKGNGSKPVFSALLIEWLQESWLVSSLDLSETQIRSGALLLTLVSNPLRYGQHGYASILEAVNPDSLKRNFAELTSHSIEAQVATSEKTQAREDGSALSKFTTDFTGKARKGEIDPVFCRDQEIRQIVDILARRRKNNPIAVGEPGVGKTAVVEGLALKIVQGDVPDNLKGVELYGLDMGLLQAGASVKGEFEKRLNAVLDEVKNSPTPIILFIDEAHTLVGGGNQAGGSDAANLLKPALARGEVKTIAATTWSEYKKYFEKDPALARRFQLVKLDEPSPEQAALIIRGLRPAYEKSHNVYVRDDAITAAAALSARYISGRQLPDKAIDVLDTACARVNISLNAIPASVETLQQELAAQQRELEALERDALQQTGDKHSLANIPDLKLAMETTKEELAEQEVQWHKEKEQIQEMIALRSRLHELVFGKVNEEELVVDEDSEQDVSPYTEMDEEAVRIAISACQEQLDAIRNGNPLVHFEVGPDEVSHVISDWTGIPMGKMLQDEAETTLKLKESLTQSIKGQEYAIDALSEGIQTAKAGLGNPDAPTGVFLLVGPSGVGKTETARAIADQMFGGERFMTTINMSEFQEKHTVSRLIGSPPGYVGYGEGGMLTEAVRQRPYSVVLLDEVEKADPEVLNLFYQVFDKGTLNDGEGRTIDFKNTLIIMTSNLATHEIESLVHQSKEIDANIIAEAIRPTLNQHFKPALLARMSVLPFVPLSDEAMTEIIHHKLNKVSQRLHSHHKLSLSYEESLVEFVLGNCRLAETGARNIDAVINRQLLPQLSTQLLVHDKDDSHTQITVSVDEQGTLTYAFS

SEQ ID NO: 6820 - protein, 855 aa, Vibrio parahaemolyticus RIMD 2210633
MASLSLSALVERLSPQAKETLEQAAAMASSRTHHSIELTHWLLTIVQHPSGIYSEVFEAFDIDERKVEEQLQAQLEKYKTGCQTVPGLSAHTVTIMQNALMCATIEFHEEQVNCIHLLFAYLSDDTLVNMMNAISAELDKVEPSRLVVMKEHVGDGGNNTSKATSSSNSALNQFTTDLTEQAKAGKIDPVIGRDNEIRLMIDILLRRRQNNPILTGEAGVGKTAVIEGLAQKIVDGDVPPALHDVAIKSLDLALLQAGAGMKGEFENRLKNLIREVNESSQPIILFIDEAHGLIGGGGQAGQGDAANILKPALARGELRTIAATTWAEYKKYFEKDAALTRRFQVVKVDEPTPELAVDMLRGLVNIMGQHHDVYITSQALNAAVQLSARYINGRQLPDKAVSVLDTACSRVALSQSATPGALDSKKKKLNIKEAEFQQLTKEAQLGVSHDELLNNIRYEIDELSNQVIELEAIWEQEKQWVQEAKSLRARVIEENADCDKERLQEIESNLALNAQPLVFSHVNESLIAEVISDWTGIPLGKLQDDEIEAVLNLKDSLCERVVGQDHALEIMSEVIKTASAQLTDETKPNGVFLLTGPSGVGKTESALAIAEKVYGSEDNVTTINMSEFKEEHKVSLLLGSPPGYVGYGEGGVLTEAVRRKPYSVILLDEMEKAHPGVQDIFYQVFDKGSIKDGEGRDIDFKNTIIIMTANTGTETTMSLYADPDLAPEPEALKEALRDDLLTDFKPAFLGRVNVLPYLPLGKEVLTEITKLKLNKVSNRIRKHYSAGLYFDEQLINDIVDNSNESGSGARVVQTTIENNLLPKISHEILNAILNGKTFDEINVRGSIKELEVSLI

SEQ ID NO: 6821 - protein, 1006 aa, Aquifex aeolicus VF5
MISENLFSAKSLEYLEKAKEIARENKDTKVDTDHLLIALLLDEKSPLSKYIEKRGIDRKEFLKRVSEYLENLNKQLEKAIEAEAQNLINLRTQIMEVKSNIGNVQTELSKIRKAKERILRELEYARRYGDWWTAETLELELRQLEATEQSIRRQLEQVEKSLSTVFAPEDVKAFLENKLSIDGLIRKALEKSPLIEQVKELGISPDRIIDKVAEKVFGKKPTFDYSQYLTQVLEKAQDKAVSEGEAQVQPSHISAALIEAKDTIGGKLINQVLGGEKEMKKDVTQELKEEEKSPLERFGVNLNELARQGKLDPVIGREREINQVIEILLRRTKNNPVLVGDPGVGKTAIVEGLAQRIVNKEVPPELQDKEIWSIDMASLLAGSKYRGEFEERLKALLDEVKEKGNVILFIDEIHTVVGAGAAEGAVDAANIMKPALARGEIRVIGATTVDEYRKYIEKDPALERRFQPVFVDEPTEEQTIEILKGLRPRLEQFHKVKISDEAIEAAVKLTKRYVTFRRLPDKAIDALDQAAARKKLKVIGTPPEIQEIERKIKALEEQIIEANLKGDYEKEAQLKIEKAKLEKEKQELLGKVGGVEAKIAELKKKIEELDEKIKEAAEKGDYEKEAELKIEKAKLEKELKKLEQEKSKELVVTWDDVAEVVSEWTGIPVSRLKEEEMQKLLKLEDELHKRVVDQEHAVKAVAEAIRRARAGLKDPKRPIASFLFLGPTGVGKTELSKALAELLFGDEDALIRLDMSEFKEEHSVAKLIGAPPGYVGYEEGGKLTEAVRRKPYSVILLDEIEKAHPRVLDLFLQVLDDGRLTDSHGRTVDFRNTVIIMTSNIGSQYLLNIPVDADEETLNREFEKAKEKVLEELKLYMRPEFINRIDEIIVFKPLTMRELSKIIDLLIANVNKRLAERNIKIELTEEAKKELVRRGYDPAFGARPLKRTIQKYVETPLADKIIRGEIKDGMTVVVDYKDGEFVFIPKEEYEKQKAEVSASSEEKKES

SEQ ID NO: 6822 - protein, 739 aa, Borrelia burgdorferi B31
MVEIDSKEIARKNKNKEVSIWHLLMSIITTPKKSEIKFIDSKTLKNIKQEVISEIDKLEKILIEKNEIIIPKINKEIFALIKEAKKEFKSKPLIGAKEIFYQILKNKKLLKKHKLSKSSFNFKDQNILEYMEKNKIRLIETYKEFDEEIRLENEHFEIGKYVKNLTALAKAKKLDPLVGREAEIKTLTNILLRRNKNSAMLIGEPGVGKTAIVEGLASSIVQKKISSKLQDKTILMLKVSNLVSGTKYRGEFEDRLNNIIKYIEKNKNTIIFIDEIHTLIGAGNSEGALDASNILKPSLSRAEIQIIGATTYNEYRKYISKDKAFARRFQTITVKEPDEKDTLKIIENIAKNFEDYHGVIYEKSALLNIVKLSSKYLINKRFPDKAIDIIDIAGAIKKEELTKDNIITSDDIQKAINEILSIKTANNTKEEILELKEIESEINKKVIGQKHAVSELIKEIIKVKLGLNDDSKPLTSILLIGSSGCGKTALTDEISKKIIKDQNSVLKLDMSDYKEENSISKLIGTNPGYVGYSDGGILTNKLRHSFETLILFENIENAHSSVLNLISRMLENGELIDSKEDKILFKNTIIIMTTNIGSRMLLGEKNIGFNKNQQKSLETKSFKEEINQDLEKRFKLSFLDRIQKKIILNILTKENVEEICKNYLNTLKTKFHSKGIEIEIKKDVDKFITTKYYKKNSGARSVIAAIKGKIEENIITKIAENQNINKITIYLEKEKIIIE

SEQ ID NO: 6823 - protein, 763 aa, Borrelia burgdorferi B31
MYDRRALNCLFFNTFLFFMESRHLVFTEEHIFYGLIKSDKVKELLNLCAIDFYKLNKQLEEFFSKLPLRGNYIPDYVSSMDYLYDDIISVLFFYKKPYKIQEKDLLWVLVKKRKNSILDALLSSGFNLTIFDKLIEAHDYLAVNTKSASGDSELIAEYIHNNAPKRKGGFHIFDDKRDELDQNNIFLESKDSIGNFLTNVIDTLDLKYNPLIGRSQELSRLIQVILRKHKSNPILFGEPGVGKTVLIQGLAYKIKIENVPKDLIGYEIYSLDIGRLVSGTKYRGDLESRVNRVLDFLSSRKKVMLFIDEIHMIVGAGATSFGSMDISNLLKPILTLGKIKFIGATTEYEYRKFFLKDKALMRRFQSIELKEPNFEDAYNILQEIKKDYERYHNVEYTDEAIQACILMSQKYIKDRFLPDKAFDILDELGSKFKLENIKRIITKDDVCDLIKSIVGSNIFNFEEYDGELLINLENRIKKELIIHDNLVLDLILNIKLLKFNLLANRSTIGIFAFIGASGSGKCKLMDILSEEFKIPKFSLNMGEYNDFNSLDRLIGPVLSNEGYYESTRFFKFLNKSSNSIIFLSDFDKCNKRVLDFFLEGFKTGKLFDGLGKKVSLSESLIVISINAESKELNSIGFRNKMAGENDFNFILKKRLPNEFLELIDHVFVFKSIDELDFEKIIFNELNYFARILRDRKFDVFFEKSVVDYIREKIYGKGYSLKSVRKFIFKELGKLLIDEILFKKIENSGKIKIYLDETIKYEFL

SEQ ID NO: 6824 - protein, 868 aa, Enterococcus faecalis V583
MNIEKMTTTLQEAIAEAQKVAVTRQHQEIDIAHLWKIFLQPNHFGRNFYTDAGLDVDAFEREVDNALDEYPSVAGGNVQYGQNLSQNLFHLLQEADSLREEFQDEFLSTEIVLLALMKLKNYRLTKYLMQQGITEKELRKNIEEMRGGDRVTSQNQEEQYKALEKYGVDLVQQVKAGKQDPIIGRDEEIRDVIRILSRKTKNNPVLIGEPGVGKTAIVEGLAQRIVRKDVPENLKDKTIFSLDMGALIAGAKFRGEFEERLKAVLKEVKKSDGKIILFIDEIHNIVGAGKTEGSMDAGNLLKPMLARGELHLIGATTLDEYRQYMEKDKALERRFQKVLVKEPTVEDTISILRGLKERFEIHHGVNIHDNALVAAATLSDRYITDRFLPDKAIDLVDEASATIRVEMNSMPTELDQVTRRLMQLEIEEAALKKESDDASKKRLANLQEELADLREEANSMKMQWETEKEEVNAVSNKRAEIDKAKHELEDAENNYDLERAAVLRHGTIPQLEHELKELEEKNAKDNVKMVQESVTENEIAQVVGRLTGIPVTKLVEGEREKLMKLNETLHKRVIGQDEAVDAVSDAVIRSRAGLQDPNRPLGSFLFLGPTGVGKTELAKALAEDLFDSEDHMVRIDMSEYMEKHAVSRLVGAPPGYVGYEEGGQLTEAVRRNPYTIVLLDEIEKAHPDVFNILLQVLDDGRLTDSKGRVVDFKNTVLIMTSNIGSQLLLEGVTPEGTIPEEVENQVMNILKGHFKPEFLNRIDDTILFTPLSLDNVKGIIGKMTAQLAHRLEQQEIVLEITDEAKTWIAENGYEPAYGARPLKRFITREVETPLAKEIVSGRVMPKTKVTISLLDNQLVFENEPIEEV

SEQ ID NO: 6825 - protein, 859 aa, Coxiella burnetii RSA 493
MRIDKFTTAFQTALADAQSLAVGRDHQFIEPAHVMKVLLEQTQGTVAPLLEQSKVNLSRLIDGVNKAIDSYPQVEGTGGEVHVSRELSKILTLMDKFAQQNKDQYISSEWFIPAALEAKGQLRDVLIEAGADKKAIEKNIMNLRKGERVTEQSAEDQRQALAKYTIDLTEKAETGKLDPVIGRDEEIRRTVQVLQRRTKNNPVLIGEPGVGKTAIVEGLAQRIVNGEVPEGLKQKRLLALDMGALIAGAKFRGEFEERLKAVLKDIAKEEGRVILFIDELHTMVGAGKAEGAMDAGNMLKPALARGELHCVGATTLDEYRKYIEKDAALERRFQKVLVEEPSTEDAIAILRGLKERYEVHHGVEITDPAIIAAATLSQRYITDRNLPDKAIDLIDEAASQIRMEMDSKPVELDRLERRLIQLKIEREALKKETDEASKKRLSDLETEIKNVEKEYSDLEEVWKSEKASLHGTQQIKEELEQARIELEAAGRAGDLARMSELQYGIIPELDKKLKAASQKEEQFHDHKLLRSRVTEEEVAEVVSKWTHIPVSKMLEGEREKLLHMETELHKRVIGQDEAVNAVANAIRRSRAGLSDPNRPVGSFLFLGPTGVGKTELCKALAVFLFDTEDAMVRIDMSEFMEKHSVARLIGAPPGYVGYEEGGYLTEAIRRRPYSVILLDEIEKAHNDVFNVLLQVLDDGRLTDGQGRTVDFRNTVIVMTSNLGSDLIREFSGENYDKMKDAVMEVVAQHFRPEFINRIDEAVVFHSLKKEQIRNIAIIQIDRIKKRLKEKDYQLTISDDALDYLSELGYDPVYGARPLKRVLQQQLENPLSQKILEGKFVPGSLINIEKKGEQLEFKEA

SEQ ID NO: 6826 - protein, 864 aa, Chlamydophila caviae GPIC
MDKISDAVSEALEKAFELAQSAKNPYVSENHFLKCLLENTESLFYLIIKDIHNNPKLLTSAVDEALSLEPSVIEGSAMPKPSPGLQSLLLDAKQEAKDLGDEYLSGDHVLLAFWKSNKEPFASWKKTVKISLDDLKKLIINIRRGNRMDSPSAENNLRGLEKYCKNLTLLAKEGKLDPVIGRDEEIRRTVQVLSRRTKNNPMLIGEPGVGKTAIAEGLALRIVQGDIPESLKGKQLYVLDMGALIAGAKYRGEFEERLKSVLKDVESVDGESILFIDEVHTLVGAGATDGAMDAANLLKPALARGTLHCIGATTLNEYQKYIEKDAALERRFQPIFVTEPSLEDAVFILRGLREKYEIFHGVRITEGALNAAVLLSYRYIPDRFLPDKAIDLIDEAASLIRMQIGSLPLPIDEKERELAALIVKQEAIKREKAPSYQEEAAAMQQSIEQLKEELAALRLRWDEEKKLITGLKEKKNSLENMKFSEEEAERVADYNRVAELRYSLIPALEEEIREDEEALNQRDNRLLQEEVDERLIAQVVANWTGIPIQKMLEGEAEKLLVLEESLEERVVGQPFAISAVSDSIRAARVGLSDPQRPLGVFLFLGPTGVGKTELAKALADLLFNKEEAMVRFDMTEYMEKHSVSKLIGSPPGYVGYEEGGSLSEALRRRPYSVVLFDEIEKADKEVFNILLQIFDEGILTDSKKRKVNCKNALFIMTSNIGSQELADYCAKKGSRVSKETVLSVVAPTLKKYFSPEFINRIDDILPFVPLNTEDIVKIVGIQMRRVAQRLLERRVTLTWDDSVILYLSEQGYDSSFGARPLKRLIQQKVVTLLSKALLKGDIKSDTSIELTMSKDVLLFKKIEG

SEQ ID NO: 6827 - protein, 631 aa, Aquifex pyrophilus
MGQVTRGSHSGEVLFAPDAKRVIEFAVEEARILHHQFVGPEHLLIGVVREKTGLGGRILRSFGLDEYSVRREVLQLLGELPPQESQRYVSTPNLDRFSRDLTQMAREGKLDPVIRKEREIERVIQILVRRRKNNPVLLGDPGVGKTAIVEGLAQRIANREVPEPLLNKRVVALDLAALVAGTKYRGQFEERLKNILKELEKANNVILFIDELHTLVGAGSAEGSIDASNMLKPALARGEIQVIGATTVDEYRKYIEKDGALERRFQPVYVEQPSPEDTIQILYGLKPKFEEFHKVEYTPESIEKAVELSVKYITDRNLPDKAIDVMDEAGALVKLKASQLPPELKELEEKIKEYEKEKEKAVKEQDYEKAAKIRDEELRLRAKFETMKAKWKEEMEKNRPKVTEEDVAEVVARWTGIPVKRVHESDAEKLLHIEEELKKRVIGQDEAIKAVAKAIRRSRVGLKGKHRPIGVFMFLGPTGVGKTETAKALAEYLFGTEDALIRFDMSEYMEKHTVSRLIGAPPGYVGYEEGGQLTEAVRRRPYSVLLFDEIEKAHPDVFNVFLQIFDDGRLTDGLGRTVDFSNTIIIMTSNLGARLITGGTMGFEKKQGLLDFEEMKKNVLDQVKKTFSPEF

SEQ ID NO: 6828 - protein, 821 aa, Porphyra purpurea
MFERFTEKAIKVIMLAQEEARRLGHNFVGTEQILLGLVGEGTGIAAQVLKSMNVNLKDARVEVEKIIGRGSGFVAVEIPFTPRAKRVLELSLEEARQLGHNYIGTEHLLMGLVREGEGVAARVLENLAVDVSSIRAEVIQMLGENAEANVSGSNATQARSKTPTLEEFGSNLTQMAIEGGLDPVVGRQKEIERVIQILGRRTKNNPVLIGEPGVGKTAIAEGLAQRIANRDVPSILEDKLVITLDVGLLVAGTKYRGEFEERLKRIMDEIKSADNVILVIDEVHTLIGAGAAEGAIDAANLLKPALARGELQCIGATTLEEYRKHIEKDPALERRFHPVVVGEPSVEETIEILFGLRDRYEKHHQLTMSDGALAAAAKYANQYISDRFLPDKAIDLIDEAGSRVRLLNSQLPPAARELDKELRAVLKTKDEAIRAQKYETAEQYRAREMEIKAQIAAIAQSKKNEPDLNLEDPVVTEDDIAEIVAAWTGIPVTKLTKSESEKLMQMEETLHGRIIGQDEAVIAVSRAIRRARVGLKNPNRPIASFIFSGPTGVGKTELTKALASYFFGSEASMIRLDMSEYMERHTVSKLIGSPPGYVGYSEGGYLTEAVRKKPYTVILFDEIEKAHPDIFNLLLQILEDGRLTDAKGRTIDFKNTLLIMTSNIGSKVIEKGGGSLGFELSEDQTESQYTRVRSLVNEELKQYFRPEFLNRLDEIIVFRQLTKDEVREIAELMLNEVFARIKQQDIQLNVTERFKERLVEEGYNPSYGARPLRRAVMRLLEDSLAEEVLSGKIKAGDSPVVDVTNEGEVKVLLGEKLELLT

SEQ ID NO: 6829 - protein, 705 aa, Mycoplasma penetrans
MEFNFEPSNEKDILKKYSRNLNEEVSANKLNKIIGREQEIRRVIEILSRKEKNNPVLIGEPGVGKTAIVEGFVQKIISKEVPENLVHCVVYEVNLSSLIAGTFLQGEFEKRLNALIKEAKQNNGAVILFIDEIHQLMGMGKAGNNSGMDAANILKPIMARGEIKIIGATTSNEYRQYIEKDGALERRFQKILVEEPTPEEALTIMRGLKEKWEIYHKVRIQDNALVASVKLSERYISDKYLPDKAIDLIDEAAAKIKTEAHTSPSEPINKKIFYLETEKIALSKEEGTNQKERINEIEIELEKLKQERDLVEKEWKEQKEQQVALNKIKKEIEKNNWDVERYQNQGEYTEASKILYSVLPELKKKLEAIEKSISENKKVLIKDYISEIDVAEIISRITKIPLNKIFEKEQDKLLNLFNNLKKRVKGQDEALKLVSDTVLKNRVGINNPNRPIGSFLFVGPTGVGKTEVAKSLAENLFNTEKAIVRINMSEYMEKHSISRLIGAPPGYIGYEQAGELSEQIRRKPYSVVLLDEIEKAHPDILNVLLQVLDEGTLKDNQGRNINFKNTIIIMTSNVGALYLMENKEDMFERELKTSFKPEFLNRIDEIIKFNSITMEFAKEIAQKMLDDLEKRLKDNNYQITFDKSVVEYVAKNGYSKEYGARPINRFIQKTIENFITESILKNELIKDRSTIINFANNKLAILKSN

SEQ ID NO: 6830 - protein, 885 aa, Odontella sinensis
MFEKFTEGAIKVIMLSQEEARRMGHNFVGTEQLLLGIIGQRHGIGARALKKQKVTLKKARREIELYIGRGTGFVASEIPFTPRAKRVLEMAVHEGKDLGQNFVGTEHILLALISESDGVAMRTLDKLGVNIPKLRNLILMYIEENQEEILRPLTQAEKFLLEREKKGSSTPTLDEYSENISKEAVDGKLDPVIGRDKEIHEVIKVLARRRKNNPVLIGEPGVGKTAVAEGLAQLIIAEKAPDFLDGNLLMALDLGSILAGTKYRGEFEERIKRIVEEVQNDSAIILVIDEIHTLVGAGAAEGAVDAANILKPALARGKFRCIGATTIDEYRKYIERDPALERRFQPVHVKEPTVGVTIEILLGLRSKFEEHHTLSYHDKAVEQAAILADKFIADRFLPDKAIDVLDEAGSRVRLENRRLPRGMKRLLKELQDTLRDKEESIKEHDFDIAKQLVDHEMEVRTHIRIMKQSILTNETLGLARKEIDTVLEGDVAEVIAGWTGIPVNKISDSESKRLLTMEETLHERLIGQHHAIVSVSKAIRRARVGLRNPDRPIASFIFAGPTGVGKTELTKALSEYMFGNEDSMIRLDMSEYMEKHTVAKLIGSPPGYVGYNEGGQLTEAVQTKPYSVVLLDEVEKAHPDVFNLLLQILDDGRLTDSKGRTIDFRNTMIIMTTNLGAKIIEKESGIKPKTKQDKPAFRIDESGCLGWEPTPEPIKDSALFEKVTELVNEELKEFFRPEFLNRIDEIIVFNHLTKYDIWEICGLMVKQLQKRLEEKELTLEVDVSVRNLLTEEGYDPVYGARPLRRAVMRLLEDTLAQQCLSKPLYPGTILRVSRVKEEGTLASYTNDVKVEIDYRRVDPRLLEQAEEKKEQNQEETKQNILKTDA

SEQ ID NO: 6831 - protein, 460 aa, Gluconacetobacter xylinus
MNTLHKPARLSKIVLLTGVVSVSCSPVAAWADPVVERITTTKDVGDVSPAFRTSTPRHSTTRVAIVTGADLLKTGQTNVIAALQQSSPEINAPPGGGGGGYSTTPTQTVILRNLNADETLVLVNGVRRHASAIGNWNYGPAQGTEPADLSLIPLSAIDHVEIVTEGATALYGQDAIGGAINIVLKAGNRNGGTANIQNSGYYRGDGQGITAYGDLERQLGSKGGGMDLAWQVQNQLPTHRDGIHPTLGDVNRIEGISRSLSELFSFNAHMPISRSVEAYGTATLAHRSTDRIGFIRGPTNINNVPSLHPNGFEPIETFDEMDFQVNGGLRGTMPAGVAWNTYASFGREQVNEGVYDDNNPTFGALSQTSFNQGKIEALTAAIKLSRAGLRDPEKPIGNYLFSGPTGVGKTEVAKQLAATLGIELIRFDMSEYMERHSIRMITGSLTTSRACARSFSTTPM

SEQ ID NO: 6832 - protein, 371 aa, Pseudomonas aeruginosa
MPFLSDMLDQSRRQQDEEQALARENLAEASLLQAHLSHRSALHSRFRFDPAAVMDCLRAEVLGQEPALQAVEDMLKVVRADIADPRRPLFSALFLGPTGVGKTEIVRALARALHGDAEGFCRVDMNTLSQEHYAAALTGAPPGYVGAKEGTTLLEQDKLDGSPGRPGIVLFDELEKASPEVVHALLNVLDNGLLRVASGERTYHFRNTLVFMTSNLCAHEIQRYDERRQRLPWRLLPVGGERRRRDIDGMVRARLLKTFSPEFVNRLDSVVTFNWIERDVVARLVELEVQRLNRRLEKHRCRLEATPEVLAKIARAGFDRQFGARALRRSVRHHLEVPLAEHLLDHHQPGDGNCTIYLASLEHERVRFVRR

SEQ ID NO: 6833 - protein, 862 aa, Ralstonia solanacearum
MRLDKLTTRFQEALADAQSLALGNDNPYIEPLHLLLAMLRQPDGATKNLLARAGVNAKGLEIALDNAIKRLPQVQGGEQVQVGRDLGSLLQATEKEGIKRGDQFIASELFLLAVADDKGEAGRVAREHGLARRALEAAIDAVRGGQTVGSAEAESQREALKKYTIDLTEQARIGKLDPVIGRDDEIRRAIQILQRRTKNNPVLIGEPGVGKTAIVEGLAQRIINGEVPESLKNKRVLVLDMAGLLAGAKYRGEFEERLKAVLNDIAKEEGQTILFIDEIHTMVGAGKAEGAIDAGNMLKPALARGELHCIGATTLDEYRKYIEKDAALERRFQKVLVDEPSVEATIAILRGLQEKYELHHGVEITDPAIVAAAELSHRYITDRFLPDKAIDLIDEAAARIKMEIDSKPEAMDKLDRRLIQLKIEREAVKKETDEASQKRLELIEQEIERLQKEYADLEEIWKAEKGAAQGAAAVKEEIDRVKLEIARLQREGKLDKVAELQYGRLPELEGKLKAATAAEASGQRPPNKLLRTQVGAEEIAEVVSRATGIPVSKMMQGERDKLLRMEDRLHERVVGQDEAVRLVSDAIRRSRAGIADENKPYGSFLFLGPTGVGKTELCKALAGFLFDSEEHLIRIDMSEFMEKHSVSRLIGAPPGYVGYEEGGYLTEAVRRKPYSVVLLDEVEKAHPDVFNILLQVLDDGRLTDGQGRTVDFKNTVIVMTSNLGSQLIQQMASESPDVIKGAVWQEVKTHFRPEFLNRIDEVVVFHALDQGHIESIARIQLQRLAARLAHMDLTLEISDPAVAKLASAGYDPVFGARPLKRAIQQQIENPVARMILEGRFTPKDVVPVDYHDGHFTFDRVVR

SEQ ID NO: 6834 - protein, 905 aa, Ralstonia solanacearum
MATPLKTLIAKLNATSRQAAERAASLCMARGNYEVDLEHLFLALLENRRSDFAVAARASGIDPAALQRDLEAEVGRFQTGNTRTPAFSPYLPKLFEHAWLIASLDSQITRIRSGHLLLALLTEPSLAALAERGSRLFGRFEVERLKHDFERMTTGSDEQEQAVDFADGTAVQTDDGRTAPAAALGATPALDQFTVDLTQAAREGRIDPVIGRDAEIRQVVDILMRRRQNNPILTGEAGVGKTAVVEGLALRVAANDVPPPLRGVTLRTLDMGLLQAGASVKGEFENRLKNVIDEVKKSPKPIILFIDEAHTIIGAGGQAGQNDAANLLKPALARGELRTIAATTWSEYKKYFEKDAALARRFQVVKVDEPSEPLAAAMLRGMAPLMERHFGVRVLDEAITEAVRLSHRYISGRQLPDKAVSVLDTACAKVALGQSATPGAIEDDQKLLERLLGEIAALQREQSAGAAHDARLEALQAKRAELEQRIAQNTERLARERALVARIQALREARESDAAQAGAQDAEPVAANSDVVALSPKRARAADAPDELATLLAELRALQGEAPMVPLQVDGHVVSEIVSAWTGIPLGRMVKDELRTVLNLKPLLAARVIGQDHALDAIAQRVRTASANLEDPNKPRGVFLFAGPSGVGKTETALALADILYGGERKLITINMSEYQEAHSVSGLKGSPPGYVGYGEGGVLTEAVRRNPYSVVLLDEVEKAHPDVLEMFFQVFDKGEMDDAEGRPIDFRNTIIILTSNVGSSAIMQACLNQPAEALPDADTLAETLRPVLYKAFKPAFLGRTKVVPYYPIADDVLAEIITLKLGRIRDRVAANHKATFQWDNALVESVLARCTEVDAGARAVDHILNGTLLPEIAEAVLTRMAEGGSVEKIKVSVGKTGEFKYRIN

SEQ ID NO: 6835 - protein, 891 aa, Spinacia oleracea
MAGALIQSTNIPSLAYKVNGQFQRSDKGNKAVKMMASLQDPGYRMRTFSGVRGGNALDTLGTTSECFYSKMRAVLSVRKGTASRGVVRAMFERFTEKAIKVIMLAQEEARRLGHNFVGTEQILLGLIGEGTGIAAKVLKSMGINLKDARVEVEKIIGRGSGFVAVEIPFTPRAKRVLELSLEEARQLGHNYIGSEHLLLGLLREGEGVAARVLENLGADPSNIRTQVIRMVGENTEAVGAGVGGGTTGNKMPTLEEYGTNLTKLAEEGKLDPVVGRQAQIERVTQILGRRTKNNPCLIGEPGVGKTAIAEGLAQRIATGDVPETIEGKKVITLHMGLLVAGTKYRGEFEERLKKLMEEIKQSDEIILFIDEVHTLIGAGAAEGAIDRANILKPRFRRGELQCIGATTLDEYRKHIEKDPALERRFQPVKVPEPTVDETIQILKGLRERYEIHHKLRYTDEALVAAAQLSYQYISDRFLPDKAIDLIDEAGSRVLPSSLKKLESWLQHEKELRQLTKEKNEAVRGQDFEKAGELRDREMDLKAQISALVEKKKEMSKAETEAGDVGPMVTESDIQHIVSSWTGIPVEKVSTDESDRLLKMEDTLHTRVIGQDEAVKAISRAIRRARVGLKNPNRPIASFIFSGPTGVGKSELAKALAAYYFGSEEAMIRLDMSEFMERHTVSKLIGSPPGYVGYTEGGQLTEAVRRRPYTVVLFDEIEKAHPDVFNMMLQILEDGRLTDSKGRTADFKNTLLIMTSNVGSSVIEKGGRRIGFDLDYDEKDSSYNRIKSLVTEELKQYFRPEFLNRLDEMIVFRQLTKLEVKEIADIMLKEVFGRLKNKEIELQVTERFRDRVVDEGYNPSYGARPLRRAIMRLLEDSMAEKMLARKSKRVIQ

SEQ ID NO: 6836 - protein, 857 aa, Rickettsia sibirica
MNIDKFTAHAKSVIASSQSLAAKNDHQQILPLHLLSSLLSEETGIIQTLINNTGGNINLLKDQVQLELNKIPKVQVEGGGQVYSSAEALKVLEKASSIAKDSGDSFVTIERIFEALTYDNTIAGKILTNNGINNKKIATAILQFRKGKKADTESAENSYDALKKYGRDVTELAESGKLDPIIGRDEEIRRTVQVLSRRMKNNPVLIGEPGVGKTAIIEGLAQRIFSKDVPESLINCRIIELDMGALIAGAKYRGEFEERLKAVLSEIKESSGEIILFIDELHLLVGTGKTDGAMDASNLLKPMLARGELHCIGATTLDEYRKYIEKDAALARRFQPVYVSEPTVEDTISILRGIKEKYELHHAVRISDSAIVAAATLSNRYITDRYLPDKAIDLIDEACSRMKIELSSKPEELDELDRRIIQIKVELAALKKENDEHSKKKIEHLTTALEKLESQSYDMGAKWQAEKAKLQQTQKLKEELDRSRNELERAERDANLAKASELKYGIIPEIMKKIQEAESMDNKGLLKEIVSESDIASIISRITGIPIDTMLSSERERLLVMEQKLRESVIGQDKAIKGVSDAVRRSRAGIQDINRPLGSFLFLGPTGVGKTELTKALAGFLFDDRNAILRIDMSEYMEKHAISRLIGAPPGYIGYDQGGVLTEAVRRRPYQVILFDEVEKAHPDIFNIMLQILDEGRLTDSQGITVDFKNTIIVLTSNLGAEILVNQKEDEDTYKVKDEVMEYVKAVFKPEFLNRLDEIILFHRLNRNNIHDIVKIQLESLKKILLAQNIILEFDESALNYLAEKGYDPSFGARPLKRLIQREIQNNLAKMILAGEISSGKTVKINSKDKELKVTIS

SEQ ID NO: 6837 - protein, 906 aa, Plasmodium falciparum 3D7
MTRRYLKYYIFVTLLFFVQVINNVLCAPDNKQEQGKYLNRTINILNAGKNIAKSYGHNKLKPIHILSALAKSDYGSTLFKENNVNAANLKEYIDIALEQTRAGAPLDNKSKIVNSAEVKETLALAEAAANKYKSPKVDVEHLLSGLSNDELVNEIFNEVYLTDEAIKAILKRKFEKTKKDKDGKTGTLYIEQFGSNMNEKVRNGKLQGIYGRDEEIRAIIESLLRYNKNSPVLVGNPGTGKTTIVEGLVYRIEKGDVPKELQGYTVISLNFRKFTSGTSYRGEFETRMKNIIKELKNKKNKIILFVDEIHLLLGAGKAEGGTDAANLLKPVLSKGEIKLIGATTIAEYRKFIESCSAFERRFEKILVEPPSVDMTVKILRSLKSKYENFYGINITDKALVAAAKISDRFIKDRYLPDKAIDLLNKACSFLQVQLSGKPRIIDVTERDIERLSYEISTLEKDVDKVSKKKYNKLIKEFEEKKEQLKKYYEEYVITGERLKRKKEIEKKLNDLKELTQNYVYSNKEPPIELQNSLKEAQQKYLELYKETVAYVEAKTHNAMNVDAVYQEHVSYIYLRDSGMPLGSLSFESSKGALKLYNSLSKSIIGNEDIIKSLSDAVVKAATGMKDPEKPIGTFLFLGPTGVGKTELAKTLAIELFNSKDNLIRVNMSEFTEAHSVSKITGSPPGYVGFSDSGQLTEAVREKPHSVVLFDELEKAHADVFKVLLQILGDGYINDNHRRNIDFSNTIIIMTSNLGAELFKKKLFFDADNSGTPEYKRVMEDVRLSLIKKCKKVFKPEFVNRIDKIGVFEPLNKKNLHKIVALRFKKLEKRLEEKNIQVSVSEKAIDYIIDQSYDPELGARPTLIFIESVIMTKFAIMYLKKELVDDMDVFVDYNSKAKNLVINLSKT

SEQ ID NO: 6838 - protein, 1341 aa, Plasmodium falciparum 3D7
MNVLYIFIAVLILNGILNIHVSKKKTSFLNNTYPINKYKTINIKRHYRKVQNRNNKLYVSLFDEYDEKCIKALIMAREVAKNDNENEILLKHLLIAIIRIDSNLVQNILKNFNISLTNFLDKFHVAINKISKSYTNSNNGHNNIYEQSGSAQNNLNEQEKKNISLTNEEIDMKNILNEEDENQVENRKQNENGNVNGNGNVNENVNENINENEKLLNDFINKHLKDMEEKINILKNLNNEEDNASLDDINNKDYIINDISSSNNITKENNNNNNNNNNNNDKGNFNNLDTNNDSGNLSNNVPKNESHNVLHNHTYKINNNNKMMNQEILGNPNFDIKFSENCKLVLHNAVLEAKRKRKIFVNIIDILLSIINIAQEKKHYDFLKYIEELNININDLKSLLLSYDEKNYDGNNIYDTNANNTNYNTHNRNIPLNNNNNNNNVSNKGYNNQRLNNMNNNEQANHIINSLNNEYLNNGRDYKYNEDHPFSSNNKFLNPSTSSASSISFMKDCLIDMVHEAQEKGDDHFFGRKKEIKRIIEILGRKKKSNPLLIGESGVGKTAIIEYLSYLILKDNVPYHLKNCRIFQLNLGNIVAGTKYRGEFEEKMKHLLSNMNKKKKNILFIDEIHVIVGAGSGEGSLDASNLLKPFLSSDNLQCIGTTTFQEYSKFIENDKALRRRFNCVTINPFTSKETYKLLKKIKYNYEKYHNIYYTDDSLKSIVSLTEDYLPTANFPDKAIDILDEAGVYQKIKYEKFMKQKLRAERLRKIRIHMNTQENNNNNNNNNNNISNNNNDYIISDEDQHIHNNNYGYNNYDVINQQKEFSNDEDINKLNDDDTNLRKTYKQEIDNKIKNDENGNNNIKTDTNGNILINNVESLQNDTYDETRNLIENVHMKYVTSDVIENIVSKKSSITYIKKNKKEEEKILKLKEKLNKIIIGQEKVIDILSKYLFKAITNIKDPNKPIGTLLLCGSSGVGKTLCAQVISKYLFNEDNLIVINMSEYIDKHSVSKLFGSYPGYVGYKEGGELTESVKKKPFSIILFDEIEKAHSEVLHVLLQILDNGLLTDSKGNKVSFKNTFIFMTTNVGSDIITDYFKLYNNNYSNLGFKYYIKKKKNENDINQSKQEEQYLVHTSNGNIENEQNKKYMDPTKQSNENNYESTINHTHTADTKYNNITTDNNNNNNNNNNNNNDHFEIFEEKLRTNKWYDELKPDIEEELKKKFLPEFLNRIDEKIIFRQFLKRDIINILQNMIDDLKKRIKKRKNINLIIDKNVINYICSDENNIYDMNFGARSIRRALYKYIEDPIAAFLISNIHEPNDSIYVQLTNDKKIKVQLIKAPVQQFSS

SEQ ID NO: 6839 - protein, 111 aa, Plasmodium falciparum 3D7
TDAANLLKPVLSKGEIKLIGATTIAEYRKFIESCSAFERRFEKILVEPPSVDMTVKILRSLKSKYENFYGINITDKALVAAAKISDRFIKDRYLPDKAIDLLNKACSFFTS

SEQ ID NO: 6840 - protein, 601 aa, Wigglesworthia glossinidia endosymbiont of Glossina brevipalpis
MNNFYKKKQINIISKFAIDLTNLSQKKKLEAIFEIEKEIFHVIRILQKKTKNNIILTGDKGVGKTSIIKGLSQKIIKKEVPKKLKKYRIFILDIFSIINILEYKGIKYLNYILLEIYKINYPIIFFIDNFNKLIELNLFNKFISINNYLFQKKIKKNFRFILETTTDKYQKYTDQYSNLEKNFQKIFIPEISVKNCIKILNHLKNSYESYYNVKITNKAIITSSILSNNYINNKRLPDKAINIIEEASSLINIDLHYKKNNIDKFKNTNKFSNYVTEKEVIKILSEKTGISAENIVENNYEKFIRIEKDLKKRMIGQDKAVFKILNVVKRNFLGLSNKNKPIGSFLFLGPNGVGKTKICKILSDIIFNKNTDLIYIDMSEFNDKVYSFDVLQYNKNNLEYRFNTCLIKLVEKNPNSLILINEIEKSHIDFFKILLRLLKYGELIDSFGRKINFKNTIIVMNSNIGLDIFQKNYNSSRNISYAKKTVIDMVYHYFNFNLINEIDDIVFFKPLDNISLEKIIYKNINLFKNKLEKKGYLFEITSSVISYIRKLGFNPSYGANNFKKIIEKKIINPISDEIMCKNFNIGHNIFVDIKFNKIEIK

SEQ ID NO: 6841 - protein, 911 aa, Arabidopsis thaliana
MNPEKFTHKTNETIATAHELAVNAGHAQFTPLHLAGALISDPTGIFPQAISSAGGENAAQSAERVINQALKKLPSQSPPPDDIPASSSLIKVIRRAQAAQKSRGDTHLAVDQLIMGLLEDSQIRDLLNEVGVATARVKSEVEKLRGKEGKKVESASGDTNFQALKTYGRDLVEQAGKLDPVIGRDEEIRRVVRILSRRTKNNPVLIGEPGVGKTAVVEGLAQRIVKGDVPNSLTDVRLISLDMGALVAGAKYRGEFEERLKSVLKEVEDAEGKVILFIDEIHLVLGAGKTEGSMDAANLFKPMLARGQLRCIGATTLEEYRKYVEKDAAFERRFQQVYVAEPSVPDTISILRGLKEKYEGHHGVRIQDRALINAAQLSARYITGRHLPDKAIDLVDEACANVRVQLDSQPEEIDNLERKRMQLEIELHALEREKDKASKARLIEVRKELDDLRDKLQPLTMKYRKEKERIDEIRRLKQKREELMFSLQEAERRYDLARAADLRYGAIQEVESAIAQLEGTSSEENVMLTENVGPEHIAEVVSRWTGIPVTRLGQNEKERLIGLADRLHKRVVGQNQAVNAVSEAILRSRAGLGRPQQPTGSFLFLGPTGVGKTELAKALAEQLFDDENLLVRIDMSEYMEQHSVSRLIGAPPGYVGHEEGGQLTEAVRRRPYCVILFDEVEKAHVAVFNTLLQVLDDGRLTDGQGRTVDFRNSVIIMTSNLGAEHLLAGLTGKVTMEVARDCVMREVRKHFRPELLNRLDEIVVFDPLSHDQLRKVARLQMKDVAVRLAERGVALAVTDAALDYILAESYDPVYGARPIRRWMEKKVVTELSKMVVREEIDENSTVYIDAGAGDLVYRVESGGLVDASTGKKSDVLIHIANGPKRSDAAQAVKKMRIEEIEDDDNEEMIED

SEQ ID NO: 6842 - protein, 911 aa, Arabidopsis thaliana
MNPEKFTHKTNETIATAHELAVNAGHAQFTPLHLAGALISDPTGIFPQAISSAGGENAAQSAERVINQALKKLPSQSPPPDDIPASSSLIKVIRRAQAAQKSRGDTHLAVDQLIMGLLEDSQIRDLLNEVGVATARVKSEVEKLRGKEGKKVESASGDTNFQALKTYGRDLVEQAGKLDPVIGRDEEIRRVVRILSRRTKNNPVLIGEPGVGKTAVVEGLAQRIVKGDVPNSLTDVRLISLDMGALVAGAKYRGEFEERLKSVLKEVEDAEGKVILFIDEIHLVLGAGKTEGSMDAANLFKPMLARGQLRCIGATTLEEYRKYVEKDAAFERRFQQVYVAEPSVPDTISILRGLKEKYEGHHGVRIQDRALINAAQLSARYITGRHLPDKAIDLVDEACANVRVQLDSQPEEIDNLERKRMQLEIELHALEREKDKASKARLIEVRKELDDLRDKLQPLTMKYRKEKERIDEIRRLKQKREELMFSLQEAERRYDLARAADLRYGAIQEVESAIAQLEGTSSEENVMLTENVGPEHIAEVVSRWTGIPVTRLGQNEKERLIGLADRLHKRVVGQNQAVNAVSEAILRSRAGLGRAQQPTGSFLFLGPTGVGKTELAKALAEQLFDDENLLVRIDMSEYMEQHSVSRLIGAPPGYVGHEEGGQLTEAVRRRPYCVILFDEVEKAHVAVFNTLLQVLDDGRLTDGQGRTVDFRNSVIIMTSNLGAEHLLAGLTGKVTMEVARDCVMREVRKHFRPELLNRLDEIVVFDPLSHDQLRKVARLQMKDVAVRLAERGVALAVTDAALDYILAESYDPVYGARPIRRWMEKKVVTELSKMVVREEIDENSTVYIDAGAGDLVYRVESGGLVDASTGKKSDVLIHIANGPKRSDAAQAVKKMRIEEIEDDDNEEMIED

SEQ ID NO: 6843 - protein, 831 aa, Arabidopsis thaliana
MNDLKFDPNVKLILASARSHAMSLSHGQVTPLHLGVTLISDLTSVFYRAITSAGDGDISAQSVVNVINQSLYKLTKRNLGDTKVGVAVLVISLLEDSQISDVLKEAGVVPEKVKSEVEKLRGEVILRALKTYGTDLVEQAGKLDPVIGRHREIRRVIEVLSRRTKNNPVLIGEPGVGKTAVVEGLAQRILKGDVPINLTGVKLISLEFGAMVAGTTLRGQFEERLKSVLKAVEEAQGKVVLFIDEIHMALGACKASGSTDAAKLLKPMLARGQLRFIGATTLEEYRTHVEKDAAFERRFQQVFVAEPSVPDTISILRGLKEKYEGHHGVRIQDRALVLSAQLSERYITGRRLPDKAIDLVDESCAHVKAQLDIQPEEIDSLERKVMQLEIEIHALEKEKDDKASEARLSEVRKELDDLRDKLEPLTIKYKKEKKIINETRRLKQNRDDLMIALQEAERQHDVPKAAVLKYGAIQEVESAIAKLEKSAKDNVMLTETVGPENIAEVVSRWTGIPVTRLDQNEKKRLISLADKLHERVVGQDEAVKAVAAAILRSRVGLGRPQQPSGSFLFLGPTGVGKTELAKALAEQLFDSENLLVRLDMSEYNDKFSVNKLIGAPPGYYIGHEEGGQLTEPVRRRPYCVVLFDEVEKTHVTVFNTLLQHGRTVDFKNTVIIMTSNLGADHLVSGLTGEMTMQVARDNAMKDAKKHFRPELLNRLDEIVMFHPLSHEHLAKIVQLQVKNVVPIRRWLERKVVTDISMMIVREEIGDDSIVCIDVNEAKTDLVYRIDKNVFVKIEQTLDVVIHSGNKRGRSNDEDHIVTLTKKIKNEVVVID

SEQ ID NO: 6844 - protein, 668 aa, Arabidopsis thaliana
MNDLKFDPNVKLILASARSHAMSLSHGQVTPLHLGVTLISDLTSVFYRAITSAGDGDISAQSVVNVINQSLYKLTKRNLGDTKVGVAVLVISLLEDSQISDVLKEAGVVPEKVKSEVEKLRGEVILRALKTYGTDLVEQAGKLDPVIGRHREIRRVIEVLSRRTKNNPVLIGEPGVGKTAVVEGLAQRILKGDVPINLTGVKLISLEFGAMVAGTTLRGQFEERLKSVLKAVEEAQGKVVLFIDEIHMALGACKASGSTDAAKLLKPMLARGQLRFIGATTLEEYRTHVEKDAAFERRFQQVFVAEPSVPDTISILRGLKEKYEGHHGVRIQDRALVLSAQLSERYITGRRLPDKAIDLVDESCAHVKAQLDIQPEEIDSLERKVMQLEIEIHALEKEKDDKASEARLSEVRKELDDLRDKLEPLTIKYKKEKKIINETRRLKQNRDDLMIALQEAERQHDVPKAAVLKYGAIQEVESAIAKLEKSAKDNVMLTETVGPENIAEVVSRWTGIPVTRLDQNEKKRLISLADKLHERVVGQDEAVKAVAAAILRSRVGLGRPQQPSGSFLFLGPTGVGKTELAKALAEQLFDSENLLVRLDMSEYNDKFSVNKLIGAPPGYYIGHEEGGQLTEPVRRRPYCVVLFDEVEKTHVTVFNTLLQVLEDGRLTD

SEQ ID NO: 6845 - protein, 874 aa, Brassica napus
VAVGNNVLDTLGRSRQSFGGKVRQAMNVPKGKGSRGVVKAMFERFTEKAIKVIMLAQEEARRLGHNFVGTEQILLGLIGEGTGIAAKVLKSMGINLKDARVEVEKIIGRGSGFVAVEIPFTPRAKRVLELSLEEARQLGHNYIGSEHLLLGLLREGEGVAARVLENLGADPSNIRTQVIRMVGENNEVTANVGGGSGTNKMPTLEEYGTNLTKLAEEGKLDPVVGRHPQIERVVQILGRRTKNNPCLIGEPGVGKTAIAEGLAQRIASGVVRETSEGKKVITLDMGLLAAGTKYRGEFEERVKKLMEEIKQSDEIILFIDEVHTLIGAGAAEGAIDAANILKPALARGELQCIGATTLDEYRKHIEKDPALERRFQPVKVPEPTVDETIQILKGLRERYEIHHKLRYTDESLVAAAQLSYQYISDRFLPDRAIDLMDEAGSRVRLRHAQVPEEARELEKELRQITKENEAVRGQDFEKAGTLRDREIELRAEVSAIQAKGKEMSKAESETGDEGPMVTESDIQHIVSSWTGILVEKVSTDESDLLLKMEETLHKRVIGQDEAVKAISRAIRRARVGLKNPNRPIASFIFFGPTGVGKSELAKALAAYYFGCEEAMIRLDMSEFMERHTVSKLIGSPPGYVGYTEPPQLTEAVRRRPYTVVLFDEIEKAHPDVFNMMLQILEDGRLTNSKGRTVDFKNTLLIMTSNVGSSVIEKGGRRIGFDLDYEKDSSYNRIKSLVTQELKQYFRPEFLNRLDEMILFRQLTKLEVKEIADILLQELFERLKKKEVELQVTERFKERVVDEGYNPSYGARPLRRAIMRLLEDSMEEKMLAREIKEGDSVIVDVDSEGKVTVLNGGSGTPTTSLEEQEDSLPVA

SEQ ID NO: 6846 - protein, 911 aa, Glycine max
MNPEKFTHKTNEALASAHELAMSSGHAQLTPIHLAHALISDPNGIFVLAINSAGGGEESARAVERVLNQALKKLPCQSPPPDEVPASTNLVRAIRRAQAAQKSRGDTRLAVDQLILGILEDSQIGDLLKEAGVAVAKVESEVDKLRGKEGKKVESASGDTNFQALKTYGRDLVEQAGKLDPVIGRDEEIRRVVRILSRRTKNNPVLVGEPGVGKTAVVEGLAQRIVRGDVPSNLADVRLIALDMGALVAGAKYRGEFEERLKAVLKEVEEAEGKVILFIDEIHLVLGAGRTEGSMDAANLFKPMLARGQLRCIGATTLEEYRKYVEKDAAFERRFQQVFVAEPSVVDTISILRGLKERYEGHHGVRIQDRALVMAAQLSNRYITGRHLPDKAIDLVDEACANVRVQLDSQPEEIDNLERKRMQLEVELHALEKEKDKASKARLVEVRKELDDLRDKLQPLMMKYRKEKERVDEIRRLKKKREELLFALQEAERRYDLARAADLRYGAIQEVETAIQQLEGSTEENLMLTETVGPEQIAEVVSRWTGIPVTRLGQNEKERLIGLGDRLHSRVVGQDQAVNAVAEAVLRSRAGLGRPQQPTGSFLFLGPTGVGKTELAKALAEQLFDNENQLVRIDMSEYMEQHSVSRLIGAPPGYVGHEEGGQLTEAVRRRPYSVVLFDEVEKAHTSVFNTLLQVLDDGRLTDGQGRTVDFRNTVIIMTSNLGAEHLLSGLSGKCTMQVARDRVMQEVRRQFRPELLNRLDEIVVFDPLSHDQLRKVARLQMKDVASRLAEKGIALAVTDAALDYILSESYDPVYGARPIRRWLEKKVVTELSRMLVREEIDENSTVYIDAGPNGGELVYRVEKNGGVVNPTTGQKSDILIQIPNGHAPKTDAVQAVKKMKIEEIDDDEMEE

SEQ ID NO: 6847 - protein, 911 aa, Glycine max; identical to SEQ ID NO: 6846

SEQ ID NO: 6848 - protein, 465 aa, Glycine max
  unsure (1)..(465): unsure at all Xaa locations
MNPDKFTHKTNEALVSAHEIATSNGHAQFTPLHLASSLISDKDGIFSQALSNAAGEESARAAERVINNALKKLPSQSPLPDEVPASNALVKAIRRAQTLQKKRGDTHLAVDQLILGLLEDSQIAELLNEAGVAASKVKSEVERLRGKEGKKVESATGDSTFQALKTYGRDLVEQAGKLDPVIGRDEEIRRVVRILSRRTKNNPVLIGEPGVGKTAVVEGLAQRIVKGDVPSNLCDVKLIALDMGALVAGAKYRGEFEERLKAVLKEVEDAEGKVILFIDEIHLVLGAGKGEGSMDAANLFKPMLARGQLRCIGATTLEEYRKYVEKDAAFERRFQQVYVAEPSVVDTISILRGLKERYEGHHGVRILDRALVVAAQLSSRYITGRHLPDKAIDLVDEACANVRVQLDSHPEEIDNLERKRMQLEVELHALEKEKDKASKARLVEVRKELDDLRDKLQPLMMKYKX

SEQ ID NO: 6849 - protein, 977 aa, Phaseolus lunatus
MATRRTPTLAKSLFATVTASRTSRSRSARRLFSAITRASETSPNVLSRSQVVDALAANNVASAKFLSLSFTRSFHATNPSLRSAASSQVAQTEFTDMAWEGILGAVDAARISKQQIVESEHLMKALLEQKDGLARRVFTKTGLDNTSVLQATDDFIPKQPKVTGDTTGPVIGSHLSSLLDNARKYKKEMGDEYVSVEHLLLAFHSDKTFGQQLFKNLQLSGITLKDAVQAVRGSQRVTDQNPEGKYEALDKYGNDLTELAKRGKLDPVIGRDDEIRRCIQILSRRTKNNPVIIGEPGVGKTAIAEGLAQRIVRGDVPEPLMNRKLISLDMGSLLAGAKYRGDFEERLKAVLKEVTASNGQIILFIDEIHTVVGAGATSGAMDAGNLLKPMLGRGELRCIGATTLNEYRKYIEKDPALERRFQQVFCSQPSVEDTISILRGLRERYELHHGVKISDSALVSAAVLADRYITERFLPDKAIDLVDEAAAKLKMEITSKPTELDEIDRAILKLEMEKLSLKNDTDKASKERLSKLENDLSLLKQKQKELAEQWDNEKVFMTRIRSIKEEIDRVNLEMEAAERDYDLNRAAELKYGTLMSLQRQLEEAEKNLTDFRKSGKSLLRRRGHYLDITEIVSKWTGIPLSNLQQTEREKLVLLEQVLHNRVVGQDIAVKSVADAIRRSRAGLSDPNRPIASFMFMGPTGVGKTELAKALAGYLFNTENALVRIDMSEYMEKHAVSRLVGAPPGYIGYEEGGQLTEVVRRRPYSVVLFDEIEKAHHDVFNILLQLLDDGRITDSQGRTVSFTNCVVIMTSNIGSHFILETLRSTQDDKTGVYDQMKRQVVELARQTFRPEFMNRIDEYIVFQPLDSEQISKIVELQMERVKNRLKQKKIDLHFTEEAVKHLGVLGFDPNFGARPVKRVIQQLVENEIAMGVLRGDFKEEDSIIVDADVAPSGKERSLNRLLIKKLDSPVADAMVVNH

SEQ ID NO: 6850 - protein, 938 aa, Oryza sativa (indica cultivar-group)
MEVCCCSTSSAVPGRRFAAAGAAAAAVAARWGAVGVGRAVVLAHPLRPAPRGGHAHAQQAGARRARRAVVRAVFERFTERAVKAVVLSQREAKGLGEGAVAPRHLLLGLIAEDRSAGGFLSSGINIERAREECRGIGARDLTPGAPSPSGSGLEMDIPFSGSCKRVFEVAVEFSRNMGCSFISPEHLALALFTLDDPTTNSLLRSLGADPSQLASVALTRLQAELAKDGREPAGASSFKVPKKSPAGAGRSAFSKSLNSKKEKGALDQFCLDLTTQASGGFIDPIIGREEEIERVVQIICRRTKNNPILLGEAGVGKTAIAEGLALRIANGDVPIYLVAKRIMSLDVGLLIAGAKERGELESRVTSLIREVREAGDVILFIDEVHNLIGSGTVGKGKGAGLDIGNLLKPPLARGELQCIAATTLDEHRMHFEKDKALARRFQPVLVEEPSQDDAVKILLGLREKYETYHKCKFTLEAINAAVYLSARYIPDRQLPDKAIDLIDEAGSRARMESFNRKKEGQSSILLKSPDEYWQEIRAAQNMHEVVSSNQMKYSPCQENGSAAIKAPSEDMNELTSELQVEEPIVVGTEEIARVASLWSGIPVQQLTADDRKLLVGLDGELRKRVIGQDDAVMAISRAVKRSRVGLNDPDRPIATLLFCGPTGVGKTELTKALAASYFGSESAMLRLDMSEYMERHTVSKLIGSPPGYIGYGETGTLTEAVRRKPFTVVLLDEIEKAHPDIFNILLQIFEDGHLSDSQGRRVSFKNTLIVMTSNVGSTSISKGRRSMGFMTEDTESSSYVAMKSLVMEELKAFFRPELLNRIDEMVVFRPLEKTQMLAILDIILQEVKGRLLALGIGLEVSDAMKDLICEEGYDKSYGARPLRRAVTHLIEDVISEAILFGEYKPGDTILMDIDAAGKPCMSHLNEKVVQLSDPTRTF

SEQ ID NO: 6851 - protein, 912 aa, Oryza sativa (japonica cultivar-group)
MNPDNFTHKTNEALVAAHEIASEAGHAQLTPLHLVAALAADKGGILRQAISQASGGDAGAPDSFERVVSGALKKLPSQSPPPDSVPASTALIKVIRRAQSAQKKRGDSHLAVDQLLLGLLEDSLISDCLKEAGVSAARVRAELEKLRGGEGRKVESASGDTNFQALKTYGRDLVEQAGKLDPVIGRDEEIRRVVRILSRRTKNNPVLIGEPGVGKTAVVEGLAQRIVRGDVPSNLLDVRLIALDMGALVAGAKYRGEFEERLKAVLKEVEEAEGKVILFIDEIHLVLGAGRTEGSMDAANLFKPMLARGQLRCIGATTLEEYRKYVEKDAAFERRFQQVFVAEPSVPDTISILRGLKEKYEGHHGVRIQDRALVVAAQLSARYIMGRHLPDKAIDLVDEACANVRVQLDSQPEEIDNLERKRIQLEVEHHALEKEKDKASKARLVEVKKELDDLRDKLQPLTMKYRKEKERIDEIRKLKQRREELQFTLQEAERRMDLARVADLKYGALQEIDVAIAKLESETGENLMLTETVGPEQIAEVVSRWTGIPVTRLGQNDKERLVGLADRLHQRVVGQAEAVSAVAEAVLRSRAGLGRPQQPTGSFLFLGPTGVGKTELAKALAEQLFDDENLLVRIDMSEYMEQHSVARLIGAPPGYVGHEEGGQLTEQVRRRPYSVILFDEVEKAHVAVFNTLLQVLDDGRLTDGQGRTVDFRNTVIIMTSNLGAEHLLAGMVGKNSMKVARDLVMQEVRRHFRPELLNRLDEIVIFDPLSHEQLRKVARLQMKDVAVRLAERGVALAVTDAALDVILSLSYDPVYGARPIRRWIEKRVVTQLSKMLIQEEIDENCTVYIDAAPHKDELAYRVDNRGGLVNAETGQKSDILIQVPNGAATGSDAAQAVKKMRIMEDEDGMDEE

SEQ ID NO: 6852 - protein, 912 aa, Oryza sativa (japonica cultivar-group)
MNPDNFTHKTNEALVAAHEIASEAGHAQLTPLHLVAALAADKGGILRQAISQASGGDAGAPDSFERVVSGALKKLPSQSPPPDSVPASTALIKVIRRAQSAQKKRGDSHLAVDQLLLGLLEDSLISDCLKEAGVSAARVRAELEKLRGGEGRKVESASGDTNFQALKTYGRDLVEQAGKLDPVIGRDEEIRRVVRILSRRTKNNPVLIGEPGVGKTAVVEGLAQRIVRGDVPSNLLDVRLIALDMGALVAGAKYRGEFEERLKAVLKEVEEAEGKVILFIDEIHLVLGAGRTEGSMDAANLFKPMLARGQLRCIGATTLEEYRKYVEKDAAFERRFQQVFVAEPSVPDTISILRGLKEKYEGHHGVRIQDRALVVAAQLSARYIMGRHLPDKAIDLVGEARANVRVQLDSQPEEIDNLERKRIQLEVEHHALEKEKDKASKARLVEVKKELDDLRDKLQPLTMKYRKEKERIDEIRKLKQRREELQFTLQEAERRMDLARVADLKYGALQEIDVAIAKLESETGENLMLTETVGPEQIAEVVSRWTGIPVTRLGQNDEERLVGLADRLHQRVVGQAEAVSAVAEAVLRSRAGLGRPQQPTGSFLFLGPTGVGKTELAKALAEQLFDDENLLVRIDMSEYMEQHSVARLIGAPPGYVGHEEGGQLTEQVRRRPYSVILYDEVEKAHVAVFNTLLQVLDDGRLTDGQGRTVDFRNTVIIMTSNLGAEHLLAGMVGKNSMKVARDLVMQEVRRHFRPELLNRLDEIVIFDPLSHEQLRKVARLQMKDVAVRLAGRGVALAVTDAALDVILSLSYDPVYGARPIRRWIEKRVVTQLSKMLIQEEIDENCTVYIDAAPHKDELAYRVDNRGGLVNAETGQKSDILIQVPNGAATGSDAAQAVKKMRIMEDEDGMDEE

SEQ ID NO: 6853 - protein, 909 aa, Nicotiana tabacum
MNPEKFTHKTNEALAGALELALSAGHAQFTPLHMAVALISDHNGIFRQAIVNAGGNEEVANSVERVLNQAMKKLPSQTPAPDEIPPSTSLIKVLRRAQSSQKSRGDSHLAVDQLILGLLEDSQIGDLLKEAGVSASRVKSEVEKLRGKEGRKVESASGDTTFQALNTYGRDLVEQAGKLDPVIGRDEEIRRVVRILSRRTKNNPVLIGEPGVGKTAVVEGLAQRIVRGDVPSNLADVRLIALDMGALVAGAKYRGEFEERLKAVLKEVEEAEGKVILFIDEIHLVLGAGRTEGSMDAANLFKPMLARGQLRCIGATTLEEYRKYVEKDAAFERRFQQVYVAEPSVADTISILRGLKERYEGHHGVKIQDRALVVAAQLSSRYITGRHLPDKAIDLVDEACANVRVQLDSQPEEIDNLERKRIQLEVELHALEKEKDKASKARLIEVRKELDDLRDKLQPLMMRYKKEKERIDELRRLKQKRDELIYALQEAERRYDLARAADLRYGAIQEVETAIANLESTSAESTMLTETVGPDQIAEVVSRWTGIPVSRLGQNEKEKLIGLGDRLHQRVVGQDHAVRAVAEAVLRSRAGLGRPQQPTGSFLFLGPTGVGKTELAKALAEQLFDDDKLMIRIDMSEYMEQHSVSRLIGAPPGYVGHDEGGQLTEAVRRRPYSVVLFDEVEKAHPAVFNTLLQVLDDGRLTDGQGRTVDFTNSVIIMTSNLGAEYLLSGLMGKCTMETAREMVMQEVRKQFKPELLNRLDEIVVFDPLSHKQLRQVCRYQMKDVALRLAERGIALGVTEAAPDVILTESYDPVYGARPIRRWLERKVVTELSKMLVKEEIDENSTVYIDAGVSGKDLTYRVEKNGGLVNAATGQKSDILIQLPNGPRSDAVQAVKKMRIEEIEDDEMED

SEQ ID NO: 6854 - protein, 914 aa, Oryza sativa
  unsure (1)..(914): unsure at all Xaa locations
MNPDNFTHKTNEALVAAHEIASEAGHAQXTPLHLVAALAADKGGILRQAISQASGGDAGAPDSFERVVSGALKKLPSQSPPPDSVPASTALIKVIRRAQSAQKKRGDSHLAVDQLLLGLLEDSLISDCLKEAGVSAARVRAELEKLRGGEGRKVESASGDTNFQALKTYGRDLVEQAGKLDPVIGRDEEIRRVVRILSRRTKNNPVLIGEPGVGKTAVVEGLAQRIVRGDVPSNLLDVRLIALDMGALVAGAKYRGEFEERLKAVLKEVEEAEGKVILFIDEIHLVLGAGRTEGSMDAANLFKPMLARGQLRCIGATTLEEYRKYVEKDAAFERRFQQVFVAEPSVPDTISILRGLKEKYEGHHGVRIQDRALVVAAQLSARYIMGRHLPDKAIDLVDEACANVRVQLDSQPEEIDNLERKRIQLEVEHHALEKEKDKASKARLVEVKKELDDLRDKLQPLTMKYRKEKERIDEIRKLKQRREELQFTLQEAERRMDLARVADLKYGALQEIDVAIAKLESETGENLMLTETVGPEQIAEVVSRWTGIPVTRLGQNDKERLVGLADRLHQRVVGQAEAVSAVAEAVLRSRAGLGRPQQPTGSFLFLGPTGVGKTELAKALAEQLFDDENLLVRIDMSEYMEQHSVARLIGAPPGYVGHEEGGQLTEQVRRRPYSVILFDEVEKAHVAVFNTLLQVLDDGRLTDGQGRTVDFRNTVIIMTSNLGAEHLLAGMVGKNSMKVARDLVMQEVRRHFRPELLNRLDQXIVIFDPLSHEQLRKFARLQMKDVAVRLAERVVALAXVTDAALDVILSLSYDPVYGARPIRRWIEKRVVTQLSKMLIQEEIDENCTVYIDAAPHKDELAYRVDNRGGLVNAETGQKSDILIQVPNGAATGSDAAQAVKKMRIMEDEDGMDEE

SEQ ID NO: 6855 - protein, 918 aa, Triticum aestivum
MNPDNFTHKTNEALVAAHEAASEAGHAQITPLHLAAALAADKSGILRQAVAGASGGNASAGDSFERVLSGALKKLPSQSPPPDSVPASTALIKAIRRAQSAQKKRGDSHLAVDQLLMGLLEDAQIADCLKEAGVSASRVRAELEKLRGGDNSRKVESASGDTNFQALKTYGRDLVEVAGKLDPVIGRDEEIRRVVRILSRRTKNNPVLIGEPGVGKTAVVEGLAQRVVRGDVPSNLLDVRLVALDMGALVAGAKYRGEFEERLKAVLKEVEEAEGKVILFIDEIHLVLGAGRTEGSMDAANLFKPMLARGQLRCIGATTLEEYRKYVEKDAAFERRFQQVYVAEPSVADTISILRGLKEKYEGHHGVRIQDRAIVVAAQLSARYIMGRHLPDKAIDLVDEACANVRVQLDSQPEEIDNLERKRIQLEVELHALEKEKDKASKARLVEVRKELDDLRDKLQPLTMKYRKEKERIDEIRKLKQRREELQFTLQEAERRMDLARVADLKYGALQEIDAAIAKLEGETGENLMLTETVGPEQIAEVVSRWTGIPVTRLGQNDKERLVGMADRLHTRVVGQTEAVNAVAEAVLRSRAGLGRPQQPTGSFLFLGPTGVGKTELAKALAEQLFDDENLLVRIDMSEYMEQHSVARLIGAPPGYVGHEEGGQLTEQVRRRPYSVILFDEVEKAHVAVFNTLLQVLDDGRLTDGQGRTVDFRNTVIIMTSNLGAEHLLAGMVGKNSMKVARDLVMQEVRRHFRPELLNRLDEIVVFDPLSHEQLRKVARLQMKDVAVRLAERGVALAVTDAALDVILSLAYDPVYGARPIRRWIEKRVVTQLSKMLIQEEIDENCTVYIDAANKDELAYRVDRSGGLVNAETGQRSDILIQVPNGALGGGKGGEAAKAVKKMRVMEDGDEDGMDEDV

SEQ ID NO: 6856 - protein, 918 aa, Triticum aestivum; identical to SEQ ID NO: 6855

SEQ ID NO: 6857 - protein, 918 aa, Triticum aestivum
MNPDNFTHKTNEALVAAHEAASEAGHAQITPLHLAAALAADKSGILRQAVAGASGGNASAGDSFERVLAGALRKLPSQSPPPDSVPASTALIKAIRRAQSAQKKRGDSHLAVDQLLMGLLEDAQIADCLKEAGVSASRVRAELDKLRGGDNSRKVESAFGDTTFQALKTYGRDLVEVAGKLDPVIGRDEEIRRVVRILSRRTKNNPVLIGEPGVGKTAVVEGLAQRVVRGDVPSNLLDVRLVALDMGALVAGAKYRGEFEERLKAVLKEVEEADGKVILFIDEIHLVLGAGRTEGSMDAANLFKPMLARGQLRCIGATTLEEYRKYVEKDAAFERRFQQVYVAEPSVADTISILRGLKEKYEGHHGVRIQDRAIVVAAQLSARYIMGRHLPDKAIDLVDEACANVRVQLDSQPEEIDNLERKRIQLEVELHALEKEKDKASKARLVEVRKELDDLRDKLQPLTMKYRKEKERIDEIRKLKQRREELQFTLQEAERRMDLARVADLKYGALQEIDAAIAKLEGETGENLMLTETVGPEQIAEVVSRWTGIPVTRLGQNDKERLVGMADRLHTRVVGQTEAVNAVAEAVLRSRAGLGRPQQPTGSFLFLGPTGVGKTELAKALAEQLFDDENLLVRIDMSEYMEQHSVARLIGAPPGYVGHEEGGQLTEQVRRRPYSVILFDEVEKAHVAVFNTLLQVLDDGRLTDGQGRTVDFRNTVIIMTSNLGAEHLLAGMVGKNSMKVARDLVMQEVRRHFRPELLNRLDEMVIFDPLSHEQLRKVARLQMKDVAVRLAERGVALAVTDAALDVILSLAYDPVYGARPIRRWIEKRVVTQLSKMLIQEEIDENCTVYIDAADKDELAYRVDRSGGLVNAETGQRSDILIQVPNGALGGGGGGEAAKAVKKMRVMEDGDEDGMDEDV

SEQ ID NO: 6858 - protein, 918 aa, Triticum aestivum; identical to SEQ ID NO: 6857

SEQ ID NO: 6859 - protein, 913 aa, Triticum aestivum
MNPDKFTHKTNEALAAAHEMASEAGHAQLTPLHLAAALAADRSGILRQAIAHASGGNDAAAESFERVASAALKRLPSQSPPPDTVPASTSLVKAVRRAQSAQKSRGDSHLAVDQLLMGLLEDPQISDALKEAGISAARVKAEVEKLRGGDNRRVESASGDTNFQALKTYGRDLVEVAGKLDPVIGRDEEIRRVVRILSRRTKNNPVLIGEPGVGKTAVVEGLAQRVVRGDVPSNLLDVRLVALDMGALVAGAKYRGEFEERLKAVLKEVEEAEGKVILFIDEIHLVLGAGRTEGSMDAANLFKPMLARGQLRCIGATTLEEYRKYVEKDAAFERRFQQVFVAEPSVPDTVSILRGLKEKYEGHHGVRIQDRALVIAAQLSSRYIMGRHLPDKAIDLVDEACANVRVQLDSQPEEIDNLERKRIQLEVELHALEKEKDKASKARLVDVRKELDDLRDKLQPLQMKYRKEKERIDEIRSLKQRREELQFTLQEAERRMDLARVADLRYGALQEVDAAIAKLEGETGENLMLTETVGPDQIAEVVSRWTGIPVTRLGQNEKARLIGLADRLHQRVVGQYEAVNAVGEAVLRSRAGLGRPQQPTGSFLFLGPTGVGKTELAKALAEQLFDDENLLVRIDMSEYMEQHSVARLIGAPPGYVGHEEGGQLTEQVRRRPYSVILFDEVEKAHVAVFNTLLQVLDDGRLTDGQGRTVDFRNTVIIMTSNLGAEHLLAGMVGNSMKVARDLVMQEVRRHFRPELLNRLDEIVIFDPLSHEQLRKVARLQMKDVAVRLAERGVALAVTDAALDVILSLSYDPVYGARPIRRWIEKRIVTELSKMLIREEIDENSTVYIDAAPSKDELTYGVDKHGGLVNARTGHKSDILIQVPSGAVGGDAAHAVKKMKIMQDSGEVDDMEEE

SEQ ID NO: 6860 - protein, 913 aa, Triticum aestivum; identical to SEQ ID NO: 6859

SEQ ID NO: 6861 - protein, 410 aa, Triticum aestivum
  unsure (1)..(410): unsure at all Xaa locations
XKDAAFERRFQQVFVAEPSVPDTVSILRGLKEKYEGHHGVRIQDRALVIAAQLSSRYIMGRHLPDKAIDLVDEACANVRVQLDSQPEEIDNLERKRIQLEVELHALEKEKDKASKARLVDVRKELDDLRDKLQPLQMKYRKEKERIDEIRSLKQRREELQFTLQEAERRMDLARVADLRYGALQEVDAAIAKLEGETGENLMLTETVGPDQIAEVVSRWTGIPVTRLGQNEEARLIGLADRLHQRVVGQYEAVNAVGEAVLRSRAGLGRPQQPTGSFLFLGPTGVGKTELAKALAEQLFDDENLLVRIDMSEYMEQHSVARLIGAPPGYVGHEEGGQLTEQVRRRPYSVILFDEVEKAHVAVFNTLLQVLDTGXLTDGXGRTVDFRNTVIIMTSNLGAEHLLAGXMVGNS

SEQ ID NO: 6862 - protein, 770 aa, Lactobacillus rhamnosus
MCWSGFDQCIQGPYTQVSGPANAFRKAARILFILTCSPPPPLFPRIFPTRRNSTMANFNDPFFNHDMDDVFNQMLQGMGKGESARYVVNGHEMTPDEFAQYRATGQLPKQGDEIPVETTGEQAVKKGGILEKLGRNLTQEAKDGLLDPVIGRDHEIQETAEILSRRTKNNPILVGDAGVGKTAVVEGLAQAIVKGNVPESIKDKQIWSIDLSNLEAGTQYRGSFEEKIQNLIKEVKAAGNVILFFDEIHQILGAGATGGEESDGKGLADIIKPALSRGEITVIGATTQDEYRNTIMKDSALARRFNDVTINEPSAADTVKILEGVKKLYEQHHHVQLPENVLKAAVDYSIQYIPQRSLPDKAIDLIDMTAAHLASKHPIVDKVELEKQIKDLNAQKDAAAKAEDFEKAANLKKEIADKQHQLEGTNNEKPVVATPNDVAAAVERLTGIPVSKLGASDIERLKGIGKRLKGKVIGQDEAVDMVARAIRRNRAGFDEGNRPIGSFLFVGPTGVGKTELAKQLALDLFGSKDAIIRLDMSEYSDRTAVSKLIGTSAGYVGYNDNKNTLTEQVRRNPYSIVLLDEIEKADPQVLTLLLQVLDDGRLTDGQGNVVDFKNTVIIATSNAGFGNEALTGEKEKDEDLMKRLAPYFRPEFLNRFNGIVEFSHLTKNDLGKIVDLMLEDVNKTLAKKGITLTVTDAAKDWLIAQGYDEAMGARPLRRVIERNIRDKVTDFYLDHLKAKKLQADLIDGAIIVSEVQPASDKPKKEASGAK

SEQ ID NO: 6863 - protein, 220 aa, Phycomyces blakesleeanus
IREELKPLKLRYDMDKGRLDEIRDLKQKLDELKRKAVEARNRYDLDSAADIEYYAIPDVEQRINALSAEKQRKMAEQMANDTAGQASTTGQLVSEIVRPEQIMEVISRWTGIPVQNLAKSEREKLLHMEAEIGKKVVGQKRAIESVCDAIRLSKAGLQNPTKPLASFMFLGPTGVGKTLLCKTLAEFLFNDERAMIRIDMSELMEQHSVAKLIGAPPGSV

SEQ ID NO: 6864 - protein, 905 aa, Schizosaccharomyces pombe
MADYPFTDKAAKTLSDAYSIAQSYGHSQLTPIHIAAALLSDSDSNGTTLLRTIVDKAGGDGQKFERSVTSRLVRLPAQDPPPEQVTLSPESAKLLRNAHELQKTQKDSYIAQDHFIAVFTKDDTLKSLLAEAGVTPKAFEFAVNNVRGNKRIDSKNAEEGFDALNKFTVDLTELARNGQLDPVIGREDEIRRTIRVLSRRTKNNPVLIGEPGVGKTSIAEGLARRIIDDDVPANLSNCKLLSLDVGSLVAGSKFRGEFEERIKSVLKEVEESETPIILFVDEMHLLMGAGSGGEGGMDAANLLKPMLARGKLHCIGATTLAEYKKYIEKDAAFERRFQIILVKEPSIEDTISILRGLKEKYEVHHGVTISDRALVTAAHLASRYLTSRRLPDSAIDLVDEAAAAVRVTRESQPEVLDNLERKLRQLRVEIRALEREKDEASKERLKAARKEAEQVEEETRPIREKYELEKSRGSELQDAKRRLDELKAKAEDAERRNDFTLAADLKYYGIPDLQKRIEYLEQQKRKADAEAIANAQPGSEPLLIDVVGPDQINEIVARWTGIPVTRLKTTEKERLLNMEKVLSKQVIGQNEAVTAVANAIRLSRAGLSDPNQPIASFLFCGPSGTGKTLLTKALASFMFDDENAMIRIDMSEYMEKHSVSRLIGAPPGYVGHEAGGQLTEQLRRRPYSVILFDEIEKAAPEVLTVLLQVLDDGRITSGQGQVVDAKNAVIIMTSNLGAEYLTTDNESDDGKIDSTTREMVMNSIRGFFRPEFLNRISSIVIFNRLRRVDIRNIVENRILEVQKRLQSNHRSIKIEVSDEAKDLLGSAGYSPAYGARPLNRVIQNQVLNPMAVLILNGQLRDKETAHVVVQNGKIFVKPNHEANANGSADIDMDGIDDDVNDEELE

SEQ ID NO: 6865 - protein, 908 aa, Saccharomyces cerevisiae
MNDQTQFTERALTILTLAQKLASDHQHPQLQPIHILAAFIETPEDGSVPYLQNLIEKGRYDYDLFKKVVNRNLVRIPQQQPAPAEITPSYALGKVLQDAAKIQKQQKDSFIAQDHILFALFNDSSIQQIFKEAQVDIEAIKQQALELRGNTRIDSRGADTNTPLEYLSKYAIDMTEQARQGKLDPVIGREEEIRSTIRVLARRIKSNPCLIGEPGIGKTAIIEGVAQRIIDDDVPTILQGAKLFSLDLAALTAGAKYKGDFEERFKGVLKEIEESKTLIVLFIDEIHMLMGNGKDDAANILKPALSRGQLKVIGATTNNEYRSIVEKDGAFERRFQKIEVAEPSVRQTVAILRGLQPKYEIHHGVRILDSALVTAAQLAKRYLPYRRLPDSALDLVDISCAGVAVARDSKPEELDSKERQLQLIQVEIKALERDEDADSTTKDRLKLARQKEASLQEELEPLRQRYNEEKHGHEELTQAKKKLDELENKALDAERRYDTATAADLRYFAIPDIKKQIEKLEDQVAEEERRAGANSMIQNVVDSDTISETAARLTGIPVKKLSESENEKLIHMERDLSSEVVGQMDAIKAVSNAVRLSRSGLANPRQPASFLFLGLSGSGKTELAKKVAGFLFNDEDMMIRVDCSELSEKYAVSKLLGTTAGYVGYDEGGFLTNQLQYKPYSVLLFDEVEKAHPDVLTVMLQMLDDGRITSGQGKTIDCSNCIVIMTSNLGAEFINSQQGSKIQESTKNLVMGAVRQHFRPEFLNRISSIVIFNKLSRKAIHKIVDIRLKEIEERFEQNDKHYKLNLTQEAKDFLAKYGYSDDMGARPLNRLIQNEILNKLALRILKNEIKDKETVNVVLKKGKSRDENVPEEAEECLEVLPNHEATIGADTLGDDDNEDSMEIDDDLD

SEQ ID NO: 6866 - protein, 908 aa, Saccharomyces cerevisiae
MNDQTQFTERALTILTLAQKLASDHQHPQLQPIHILAAFIETPEDGSVPYLQNLIEKGRYDYDLFKKVVNRNLVRIPQQQPAPAEITPSYALGKVLQDAAKIQKQQKDSFIAQDHILFALFNDSSIQQIFKEAQVDIEAIKQQALELRGNTRIDSRGADTNTPLEYLSKYAIDMTEQARQGKLDPVIGREEEIRSTIRVLARRIKSNPCLIGEPGIGKTAIIEGVAQRIIDDDVPIILQGAKLFSLDLAALTAGAKYKGDFEERFKGVLKEIEESKTLIVLFIDEIHMLMGNGKDDAANILKPALSRGQLKVIGATTNNEYRSIVEKDGAFERRFQKIEVAEPSVRQTVAILRGLQPKYEIHHGVRILDSALVTAAQLAKRYLPYRRLPDSALDLVDISCAGVAVARDSKPEELDSKEQSIAIDSSRDKSSRERVECRLHTKRKLKLARQKEASLQEELEPLRQRYNEEKHGHEELTQAKKKLDELENKALVAERRYDTRTAADLRYFAIPDIKKQIEKLEDQVAEEERRAGANSMIQNVVDSDTISETAARLTGIPVKKLSESENEKLIHMERDLSSEVVGQMDAIKAVSNAVRLSRSGLANPRQPASFLFLGLSGSGKTELAKKVAGFLFNDEDMMIRVDCSELSEKYAVSKLLGTTAGYVGYDEGGFLTNQLQYKPYSVLLFDEVEKAHPDVLTVMLQMLDDGRITSGQGKTIDCSNCIVIMTSNLGAEFINSQQGSKIQESTKNLVMGAVRQHFRPEFLNRISSIVIFNKLSRKAIHKIVDIRLKEIEERFEQNDKHYKLNLTQEAKDFLAKYGYSDDMGARPLNRLIQNEILNKLALRILKNEIKDKETVNVVLKKGKSRDENVPEEAEECLEVLPNHEATIGADTLGDDDNEDSMEIDDDLD

SEQ ID NO: 6867 - protein, 811 aa, Saccharomyces cerevisiae
MLRQATKAPIQKYLQRTQLLRRSTPRIYTIVQCKRSICSFNARPRVANKLLSDIKTNALNEVAISTCALKSSYGLPNFKRTYVQMRMDPNQQPEKPALEQFGTNLTKLARDGKLDPVIGRDEEIARAIQILSRRTKNNPCLIGRAGVGKTALIDGLAQRIVAGEVPDSLKDKDLVALDLGSLIAGAKYRGEFEERLKKVLEEIDKANGKVIVFIDEVHMLLGLGKTDGSMDASNILKPKLARGLRCISATTLDEFKIIEKDPALSRRFQPILLNEPSVSDTISILRGLKERYEVHHGVRITDTALVSAAVLSNRYITDRFLPDKAIDLVDEACAVLRLQHESKPDEIQKLDRAIMKIQIELESLKKETDPVSVERREALEKDLEMKNDELNRLTKIWDAERAEIESIKNAKANLEQARIELEKCQREGDYTKASELRYSRIPDLEKKVALSEKSKDGDKVNLLHDSVTSDDISKVVAKMTGIPTETVMKGDKDRLLYMENSLKERVVGQDEAIAAISDAVRLQRAGLTSEKRPIASFMFLGPTGTGKTELTKALAEFLFDDESNVIRFDMSEFQEKHTVSRLIGAPPGYVLSESGGQLTEAVRRKPYAVVLFDEFEKAHPDVSKLLLQVLDEGKLTDSLGHHVDFRNTIIVMTSNIGQDILLNDTKLGDDGKIDTATKNKVIEAMKRSYPPEFINRIDDILVFNRLSKKVLRSIVDIRIAEIQDRLAEKRMKIDLTDEAKDWLTDKGYDQLYGARPLNRLIHRQILNSMATFLLKGQIRNGETVRVVVKDTKLVVLPNHEEGEVVEEEAEK

SEQ ID NO: 6868 - protein, 811 aa, Saccharomyces cerevisiae
MLRQATKAPIQKYLQRTQLLRRSTPRIYTIVQCKRSICSFNARPRVANKLLSDIKTNALNEVAISTCALKSSYGLPNFKRTYVQMRMDPNQQPEKPALEQFGTNLKKLARDGKLDPVIGRDEEIARAIQILSRRTKNNPCLIGRAGVGKTALIDGLAQRIVAGEVPDSLKDKDLVALDLGSLIAGAKYRGEFEERLKKVLEEIDKANGKVIVFIDEVHMLLGLGKTDGSMDASNILKPKLARGLACISATTLDEFKIIEKDPALSRRFQPILLNEPSVSDTISILRGLKERYEVHHGVRITDTALVSAAVLSNRYITDRFLPDKAIDLVDEACAVLRLQHESKPDEIQKLDRAIMKIQIELESLKKETDPVSVERREALEKDLEMKNDELNRLTKIWDAERAEIESIKNAKANLEQARIELEKCQREGVYTKASELRYSRIPDLEKKVALSEKSKDGDKVNLLHDSVTSDDISKVVAKMTGIPTETVMKGDKDRLLYMENSLKERVVGQDEAIAAISDAVRLQRAGLTSEKRPIASFMFLGPTGTGKTKLTKALAEFLFDDESNVIRFDMSEFQEKHTVSRLIGAPPGYVLSESGGQLTEAVRRKPYPVVLFDEFEKAHPDVSKLLLQVLDEGKLTDSLGHHVDFRNTIIVMTSNIGQDILLNDTKLGDDGKIDTATKNKVIEAMKRSYPPEFINRIDDILVFNRLSKKVLRSIVDIRIAEIQDRLAEKRMKIDLTDEAKDWLTDKGYDQLYGARPLNRLIHRQILNSMATFLLKGQIRNGETVRVVVKDTKLVVLPNHEEGEVVEEEAEK

SEQ ID NO: 6869 - protein, 120 aa, Debaryomyces hansenii
LMGDGKSDAANLLKPMLARGTLHCIGATTFTEYRKFISKDGAFERRFQKIDVPASTVPETVAILRGLQPRYEIHHGVRILDSALVTAAQLASRYLTYRSLPDSAVDLIDETAATVAVARD

SEQ ID NO: 6870 - protein, 870 aa, Pleurotus sajor-caju
MIQEKRSNRSGGGLGDASSRSQSLFHSAISKAGGDPAVVKRGYRRAVVRLPTQDPPPEEVYFSGPALKVLREGQSLQKTMHDSYIAQDHLLLAALKDATIQAVIKEAGLTEATLKTAIEQARGNRRIESKTAEQGFDALQKYAVDLTALAEEGPIDPVIGRDNEIRPVIRILCRRTKNNPVLIGEPGVGKTSIAEGLAQRIVKRDVPASLISRLYSLDMGALMAGAKYKGEYEERIKAVLNEVEKASEDGGPGVILFVDELHLIMAGRGAEGGGMDAANLFKPLLARGKLRCIGHDLRISKYIETDAALERRFAQVLVNEPSVLETISILRGIREKYEVHHGVRILDGALIQAATLAHRYLTSRGLPDAAIDLVDEACASVRVNRETEPEAIDKLQRKRLELEIEIHALEAPRAREGCCKRSVSKLPKKAISDVDEELQPRQAAFQAEKMRGDELNVLRRKMDELKAKIEEAERRRTLPPASDLKFYAVPEVQARIEQLEAKKAARASTGSAADVVTPEAIADIVGRWTNIPVSRLMSSEKEKLLRMERILTENVVGQPEAVKRVANPIRLSRSGPANAQRPIASFLFAGPSGSFLFAGPSGTGKTLLSKTLATLLFDSPDAMIRIDGSEYSEKHSIARLIGAPPGYIGHDAGGQLTEYVRRKPYSIILIDEIEKACREFVTLFLQVLDDGRLTDGQGRVVDFRNSVIIMTSNLGAAYLNDMGDGPVRPETRTLVMGAIQGHFPPEFVNRIDEIVIFRALSQKNVLKIVDIRLKEVLERLAERKITIDIDDVAKSYLSSAGYSPAYGARPLNRAIQSELLNPLSIMILSEQVRFDGPHNRLNIIPNHEATETQGMDVDYDDDDIEIEEMD

SEQ ID NO: 6871 - protein, 807 aa, Leptosphaeria maculans
MLTTKARLSARHLITHGTVQLPSRPLLPCAAITLRAHQDPVPRQQLLGPTRSYMNTTRPQQPCLIQPRITSRGYANGRPHPPGGTHRMNMGGEPEKPALEQYGIDLTERARDGKLDPVIGRDGEIQRTIQILSRRTKNNPVLIGKAGTGKTAILEGLAQRIVKGDVPESIKDKRVISLDLGSLIAGAKFRGDFEERLKSVLKEVEEAKKGVILFVDELHTLLGLGKAEGSIDASNLLKPALSRGELQLCGATTLSEYRQIEKDAALARRFQPIQVGEPTVQDTISILRGIKERYEVHHGVRITDNALVAAASYSNRYITDRFLPDKAIDLVDEAASALRLQQESKPDAIQELDRQIMTIQIELESLRKETDIASKERRQRLEESLKQKQEEAKGLTEKWEKERAELEEIKNAQENLEKARLELEQARREGNFAKAGELQYSRIPELIEKLPKDEELVAGASRPDSLLHDSVTADDIASVVSRTTGIPLSKLNSGESEKLIHMEETLRQFVKGQDEALTAVANAIRLQRAGLSGENRPIASFMMLGPTGVGKTEVCKRLAEYLFSTPQAVIRFDMSEFSEKHTVSRLIGSPAGYVGYEDAGQLTEAVRRKPYAVLLFDEWEKAHKDISTLLLQVLDEGFLTDAQGHKVDFRNTIIVMTSNLGADIIVGDDALRSGNQDSGEISSDVRNAVMDIVSATYPPEFLNRLDEFIIFRRLSREALRDIVDIRLKELQQRLDDRRITLDCPDEAKQWLCDRGYDPKYGARPLNRLIAREIGNGLADKIIRGEIRSGDTAKIGVKSDGSGLEVTA

SEQ ID NO: 6872 - protein, 927 aa, Neurospora crassa
MTSKMEFTDRAKKALEDAMALAEQYAHSQLLPVHLAVALLDPLPDPSKDQQNAPAGATSSLFRQVIERAHGDPQLFDRALKKALVRLPSQDPPPDHVSMAPSFHTVLRKANELQKTQKDTYIAVDHLITALAEEPSIMNALKEANIPKPKLVTDAIQAIRGTKRVDSRNADTEEEHENLAKFTIDMTAMAREGKIDPVIGREEEIRRVIRILSRRTKNNPVLIGEPGVGKTTVVEGLAQRIVNADVPDNLANCKLLSLDVGALVAGSKYRGEFEERMKGVLKEISESKEMIILFIDEIHLLMGAGASGEGGMDAANLLKPMLARGQLHCIGATTLAEYRKYIEKDAAFERRFQQVIVKEPSVSETISILRGLKEKYEVHHGVTISDAAIVAAANLAARYLTSRRLPDSAIDLIDEAAAAVRVARESQPEIIDSLERKLRQLKIEIHALSREKDEASKARLEQAKKDAENVEEELRPLREKYEQEKQRAKALQEARMKLESLRQKAEEASRMGDHSRAADLQYYAIPEQEAVIKRLEKEKAAADAALNAAAAETGGAMITDVVGPDQINEIVARWTGIPVTRLKTSEKEKLLHMEKHLSKIVVGQKEAVQSVSNAIRLQRSGLSNPNQPPSFLFCGPSGTGKTLLTKALAEFLFDDPKAMIRFDMSEYQERHSLSRMIGAPPGYVGHDSGGQLTEALRRKPFSILLFDEVEKAAKEVLTVLLQLMDDGRITDGQGRVVDARNCIVVMTSNLGAEYLSRPNAKDGKIDPTTRELVMNALRNYFLPEFLNRISSIVIFNRLTRREIRKIVELRIAEIQKRLQDNDRNVKIEVSEEAKDKLGALGYSPAYGARPLQRVLEKEVLNRLAVLILRGSIRDGEVARVVVQDGKITVLPNHPEVNDEDDEMMLDEEDAVDEVAPESEMDEDLYDD

SEQ ID NO: 6873 - protein, 899 aa, Candida albicans
MEDFTDNAIKIINNATELAKQQANSQLVPLHFLAAFIPSDDTEGSTQYLKTLVKRARYEWGDFERIVNRHLVKIPSQNPPPDEIRPSYQAGQVLTRANKIKQQQKDSYVAQDHILLALLEDQSIKDIFKEAGMSVDTIKTQAIELRGSQRIDSRQADSSSSYEFLNKYCEDFTEKAREGKIDPVIGREEEIRRVIRVLARRSKSNSVLIGDAGVGKTSIVEGVAQRIVDGDVPNVLAGSRLFALDLGALTAGAKYKGEFEERLKGVLNEIEKSKEFIILFIDEIHMLMGDGKSDAANLLKPMLARGALHCIGATTFAEYRKFISKDGAFERRFQKIDVPAATVQETVAILRGIQPKYEIHHGVRILDSALVTAAQLASRYLTYRALPDSAVDLVDESAAAVAVARDSKPEELDTLERQLHLVDVEISALERDKDADSASKERLNLAKKKKAELEEKIGPLNERYRQERASHEQLTAAKRKLDELEIKAQDAERRYDTATAADLRYFAIPDIQKQIEELEVKVAEEEASNLDSLLKNAVGPEQICETAARLTGIPVTKLSQAENNKLINMEAELSKEVVGQSEAVKAVSNAIRLRRSGLANPNQPPSFLFLGLSGSGKTELAKKLAGFLFADEKAIIRIDCSELGDKWSASKLLGAAPGYVGYEEGGILTEPLIRRPYSVVLLDEVEKAAPEVLTVLLQILDDGRVTSSQGKLVNCSNAIFIMTSNLGANYINAAKGSKIDANTKEHVMDAVRAHFRPEFINRISSIVVFNRLSRKAISKIVKIRLSEIENRFTANGKAIQLKLDDDAMEYLCKNGWSPDLGARPLNRLIQNEILNRLAVMLLKGQIQDKETARVVLGEKGLEILPNHEPEDVEMNDVDNWQDSEDEDDDEARFTSPGLD

SEQ ID NO: 6874 - protein, 899 aa, Candida albicans
MEDFTDNAIKIINNATELAKQQANSQLVPLHFLAAFIPSDDTEGSTQYLKTLVKRARYEWGDFERIVNRHLVKIPSQNPPPDEIRPSYQAGQVLTKANKIKQQQKDSYVAQDHILLALLEDQSIKDIFKEAGMSVDTIKTQAIELRGSQRIDSRQADSSSSYEFLNKYCEDFTEKAREGKIDPVIGREEEIRRVIRVLARRSKSNSVLIGDAGVGKTSIVEGVAQRIVDGDVPNVLAGSRLFALDLGALTAGAKYKGEFEERLKGVLNEIEKSKEFIILFIDEIHMLMGDGKSDAANLLKPMLARGALHCIGATTFAEYRKFISKDGAFERRFQKIDVPAATVQETVAILRGIQPKYEIHHGVRILDSALVTAAQLASRYLTYRALPDSAVDLVDESAAAVAVARDSKPEELDTLERQLHLVDVEINALERDKDADSASKERLNLAKKKKAELEEKIGPLNERYRQERASHEQLTAAKRKLDELEIKAQDAERRYDTATAADLRYFAIPDIQKQIEELEVKVAEEEASNLDSLLKNAVGPEQICETAARLTGIPVTKLSQAENNKLINMEAELSKEVVGQSEAVKAVSNAIRLRRSGLANPNQPPSFLFLGLSGSGKTELAKKLAGFLFADEKAIIRIDCSELGDKWSASKLLGAAPGYVGYEEGGILTEPLIRRPYSVVLLDEVEKAAPEVLTVLLQILDDGRVTSSQGKLVNCSNAIFIMTSNLGANYINAAKGSKIDANTKEHVMDAVRAHFRPEFINRISSIVVFNRLSRKAISKIVKIRLSEIENRFTANGKAIQLKLDDDAMEYLCKNGWSPDLGARPLNRLIQNEILNRLAVMLLKGQIQDKETARVVLGEKGLEILPNHEPEDVEMNDVDNWQDSEDEDDDEARFTSPGLD

SEQ ID NO: 6875 - protein, 812 aa, Candida albicans
MLSSRIPKGKLLKQTSATSYLNLAKSIPITTARYRPNQYYANELAKPNVFTIHNIPSPCFSQVRNFHSSFPRKLQMQQTEQGDNRPALEKFGSDLTQLAKEGKLDPVIGRDHEIRRTIQILSRRTKNNPVLIGNAGTGKTAVMEGLAQRIIRGEVPDSMKDKQIITLDLAGIISGAKYRGDFESKLKSILKEVEEKNGKVILFIDEFHLLMGLGKAEGSIDASNLLKPALARGKLSMCGATTIEEYRKYVEKDAALARRFSPVTVNEPTGEDTISILRGLKERYEVHHGVRIMDSALVTAALYSNRYITDRFLPDKAIDLVDEASSTLRLQHESRPDAIATLDRQIMTIEIELESLRKEEDQLSIDRKHKLEKELEVKKSELKELTDQWESEKRAIDAVKNAKSELEKAKYELEQATREGDYARASRIQYASIPELQDKIQELSKNELAAKSSNLLHDSVTSEDIAGVISKMTGIPVNNLLKGEKDKLLDMNILLRQSVVGQDEAIDAVSDAVRLQRAGLTSENRPIASFMFLGPTGTGKTELTKSLAQFLFNDKNAVVRFDMSEFQEKHTISRLIGSPPGYVGYEESGELTEAVRRKPYSVVLFDEFEKAHPDLSKLLLQVLDEGSLTDSHGKKIDFKNTIIVMTSNIGQEILLADKNTYEDGHINSEVKSQVLENLRHHYAPEFLNRIDDIVVFNRLSKTALKEILDIRLREIGDRLVDKRIILQLTDEAKTLLCDMGYDPTYGARPLNRVLRKKLLDPLAMRLIKGQVQENETVKVEVKDHKIYVVPNHSEGTVIEKEEDYFKEDKDDN

SEQ ID NO: 6876 - protein, 867 aa, Leishmania donovani
MTTQQPEWTQAASDLMARTAALARKKANGYLDPVHLAYVMFEDENSLASRVVRKLGAASVKDGLEARVDAIPTQMPAPTQPRPNSDMMRVMNTAEQERVALGDTLMAADHFLLALHESKEVGRILDAAGAGKKAIRATLLEMRKGKKINSDFQDDNYESLNKYAVDLCKQAEDGKLDPVIGRADEILRTIRVLSRRTKNNPVLIGEPGVGKTAIVEGIAQQVVRGDVPDTLSGIRIFSLDMGALIAGAKYRGEFEERLKAVLNEVKESDNKIILFIDEIHLVLGAGKSDGAMDAANLLKPLLARGELRTIGATTLEEYRQYVEKDAAFERRFMPVQVNEPSVEECTSILRGLKDRYEQHHGVQITDKAVVVAAQLAGRYITNRFLPDKAIDLIDEACANVRVTLSSRPAEIDALERKKRQLEIEEKALQRDKDASAKERLKAVKAEIQKVEEKLGPLLAKYEQERGRIDELQATQAKLDEKKVKLERAERMRDMETAADLKYNVIPILQDRIRSLKEEIEKQKATMLHGTVTETDIATVVSRWTNIPVTKLSQTERERLLHLADQLHLRVKGQDEAVSRVAEAILRSRAGLARSDRPTGSFLFLGPTGVGKTELSKAVASKLFDDAKYMVRLDMSEYMEQHSVARLIGAPPGYVGHEEGGQLTEPVRRRPYTVVLLDEVEKAHPNVFNVLLQVLDDGRLTDSHGRTVNFCYTIIIMTSNLGAQYLQNMDTSPKAYEVAQTQVMGEVRKFFRPEFINRLDDIILFRSLGLKEMTGIIDLITEELYGRLKDQSIRVSLTEEAKNYVLESAFDADMGARPLRRWVEKNITTELSRMIISQELSPNSTVKVTLSSNHKKLSFSVKRTAAQT

SEQ ID NO: 6877 - protein, 867 aa, Leishmania major
MTTQQPEWKQAASDLMARMAALARKKANGYLDPVHLAYVMFEDENSLASRAVRKLGAASVKDGLEARVDAIPNQMPAPTQPRPNSDMMRVMNTAEQERAALGDTLMAADHFLLALHESKEVGRILDAAGAGKKAIRATLLEMRKGKKITSDFQDDNYESLNKYAVDLCKQAEDGKLDPVIGRADEILRTIRVLSRRTKNNPVLIGEPGVGKTAIVEGIAQQVVRGDVPDTLSGIRIFSLDMGALIAGAKYRGEFEERLKAVLNEVKESDNKIILFIVEIHLVLGAGKSDGAMDAANLLKPLLARGDVRTIGATTLEEYRQYVEKDAAFERRFMPVQVHEPSVEECTSILRGLKDRYEQHHGVQITDKAVVVAAQLAGRYITNRFLPDKAIDLIDEACANVRVTLSSRPAEIDALERKKRQLEIEERALQRDKDASAKERLKAVKAEIQKVEEKLGPLLAKYEQERGRIDELQATQAKLDEKKVKLERAERMRDMETAADLKYRVIPILQDRIRSLKEAIEKQKATMLQGTVTGTDIATVVSRWTNIPVTKLSQTERERLLHLADQLHLRVKGQDEAVSRVAEAILRSRAGLARSDRPTGSFLFLGPTGVGKTELSKAVASELFDDAKYMVRLDMSEYMEQHSVARLIGTPPGYVGHEEGGQLTEPVRRRPYTVVLLDEVEKAHPNVFNVLLQVLDDGRLTDSHGRTVDFCNTIIIMTSNLGAQYLQNMDTSPKPYEVAQAQVMGEVRKFFRPEFINRLDDIILFRSLGLKEMTGIIDLITEELNGRLKDQSIRVSLTEEAKQYVLESAFDADMGARPLRRWVEKNITTELSRMIISQELSPNSTVKVTLSSNHKKLSFSVKRTAAQT

SEQ ID NO: 6878 - protein, 862 aa, Trypanosoma brucei
MAHSDRQCTNAAQTALSDAVESARKHNNGFVDPAHLALVLFKNEDGLASRVLRKLNVLEPLAARVGALPEQRPRPRSITFSSDGGCAQHRRAEANRVGDSLIAVDHLLIGLFEVEAIMKAAHASKKAVEGALLELRKGKKVTSEFQEENYQALEKYATDLCKLAEEGKLDPVIGRTDEVLRTIRVLSRRTKNNPILIGEPGVGKTAIAEGIAQRIVRGDVPDTLLNTRLFSLDLGALIAGSSLRGEFEERLKSVLNEVKESSNGVILFIDEIHLVLGAGKSGGSMDAANLLKPMLARGELRTIGATTLEEYRTYVEKDAAFERRFMPVYVTEPSVEECISILRGLKDRYEAHHGVQITDNAVVVAAQLANRYITNRFMPDKAIDLIDEACANVRVQLSSRPEAIDILERKKRQLEIEAKALERDKEAASRERLKLVKADIQRVEEELQPLVSKYNDERQRIDELQEMQSRLDEKKKLERAVRDGKMDLAADLQYNVIPLIQDRIRSLKEDIERQKATLVQEKVTEGDVAAVVARWTGIPVVKLSQTDRERLLNLSMHLHRRVKGQDEAVERVADAIIRARAGLSRPNSPTASFLFLGPTGVGKTELVKAVAAELFDDEKHMVRIDMSEYMEQHSVSRLIGAPPGYIGHDEGGQLTEPVRRRPHAVVLFDEVEKAHPNVYNVLLQVLDDGRLTDSRGRTVDFSNTIIVMTSNLGSEHLLNPEETNESYEVLRENVLAAVRSYFRPELINRLDDIVVFRRLRTEDLRGVVDNLIAGVNERLKSSGFSVLLDDGVKDFILEHGHDANMGARPLRRWIEKNIVTEIGRMLIAKELPPNSTLRVSLPEGGNKLTFGVKRGLTSDEWE

SEQ ID NO: 6879 - protein, 138 aa, Trypanosoma cruzi
NSPKGLEATREKVWQVVRSYFRPEFLNRLDDIVLFRRLGFGELHEIIDLIVAEVNGRLRSQDILLEVTDEAKNFVLENAFDAEMGARPLRRWVEKYITTEVSRMILAQQLPPNSTVRVLVNGSQGKLAFSVKRSFVSE

SEQ ID NO: 6880 - protein, 868 aa, Trypanosoma brucei brucei
MAHSDRQCTNAAQTALSDAVESARKHNNGFVDPAHLALVLFKNEDGLASRVLRKLNAGTVLEPLAARVGALPEQRPRPRSITFSSDGGCAQHRRAEANRVGDSLIAVDHLLIGLFECKEVEAIMKAAHASKKAVEGALLELRKGKKVTSEFQEENYQALEKYATDLCKLAEEGKLDPVIGRTDEVLRTIRVLSRRTKNNPILIGEPGVGKTAIAEGIAQRIVRGDVPDTLLNTRLFSLDLGALIAGSSLRGEFEERLKSVLNEVKESSNGVILFIDEIHLVLGAGKSGGSMDAANLLKPMLARGELRTIGATTLEEYRTYVEKDAAFERRFMPVYVTEPSVEECISILRGLKDRYEAHHGVQITDNAVVVAAQLANRYITNRFMPDKAIDLIDEACANVRVQLSSRPEAIDILERKKRQLEIEAKALERDKEAASRERLKLVKADIQRVEEELQPLVSKYNDERQRIDELQEMQSRLDEKKKLERAVRDGKMDLAADLQYNVIPLIQDRIRSLKEDIERQKATLVQEKVTEGDVAAVVARWTGIPVVKLSQTDRERLLNLSMHLHRRVKGQDEAVERVADAIIRARAGLSRPNSPTASFLFLGPTGVGKTELVKAVAAELFDDEKHMVRIDMSEYMEQHSVSRLIGAPPGYIGHDEGGQLTEPVRRRPHAVVLFDEVEKAHPNVYNVLLQVLDDGRLTDSRGRTVDFSNTIIVMTSNLGSEHLLNPEETNESYEVLRENVLAAVRSYFRPELINRLDDIVVFRRLRTEDLRGVVDNLIAGVNERLKSSGFSVLLDDGVKDFILEHGHDANMGARPLRRWIEKNIVTEIGRMLIAKELPPNSTLRVSLPEGGNKLTFGVKRGLTSDEWE

SEQ ID NO: 6881 - protein, 765 aa, Toxoplasma gondii
MNLNLFTSISSLKSTKEVLIILIYSKILASLFKNNSITFFHIICSLILQSNLFKLIIGKKNLLKFLQLYIKNNFKQTQLNYNILFSYTLFKFFNNLNKSFINTWKLTINLLQYNSILFKYILIYLFKVKSNTYNLINSIIFKFNDKPINNLYFNNLIKPFNYKSNFYNIINRKSDCVYLYEILNRKIIRNPILLGDFGIGKNSIIKKFSFFIEKFKLKFNNITKNLWILNIVTLLKYIKTNNLYIKKFFKFLQENKNIILICPKIEILFNTYYTDSNIYQNLESYSFLFKFFNYIKQNKLQLIGLSNNITDIEKKFNINQELNFLFEKIYVKELSNKEIFKILLKKSSLFEKYYNCSISFKIIKHILYYSQTYIKQHKTLLKSIWLLDNTCSKIYVNQKFHLLKNNNKLALSDIQKTLTKLINLSTNLLFNKANKTNFDIIALRKNLQKSLFGQPTAISKILISLKRVFTGLKQINKPIGSWLLCGPSGTGKTELAKLLAKFLFGSEADLIRFDMSEFMEKHSLSKLIGAPPGYVGYGKSGLLTEAIAKKPFTVLLFDEIEKAHKDINNLMLQLLDDGKLTDSLGKCVDFSNTLIFFTSNLGFPTNSYELQFLKSGTKLSKKNYKILSNKVESAIQSYFKPEFLNRLDDIIIFKPLNINFFKYIINKFLKNIYLKLYNNQIPIFLDIDSNIKTLLAKLAYHPLYGARPLKRLLELIIEKPISDLLINFSFNRIIIFSIFLNKKTFNINYSFKILIINVHFLFLQI

SEQ ID NO: 6882 - protein, 908 aa, Plasmodium berghei
MSDEEYTINSDDYTEKAWDAISSLNPIGEKYESAYVEAEMLLLALLNDSPDGLAQRILKETGIDTDLLSHDIDVYLKKQPKMPSGFGEQKILDEHYKTVLSTSKRLKREFNDEYISIEHLLLSIISEDSKFTRPWLLKYNVNYEKVKKAVEKIRGKKKVTSKTPEMTYQALEKYSRDLTALARAGKLDPVIGRDEEIRRAIQILSRRTKNNPILLGDPGVGKTSIAEGLAIKIVQGDVPDSLKGRKLVSLDMSSLIAGAKYRGHFEERLKSILKEIQDQKGQVVMFIDEIHTVVGAGAVAEGALDAGNILKPLLARGELRCIGATTVSEYRQFIEKDKALERRFQQILVVNPSVDETISILRGLKERYEVHHGVRILDSALVQAAILSDRYISYRFLPDKAIDLIDEAASNLKIQLSSKPIQLDNIEKQLIQLEMEKISILGDKQSASLINKSNSGNDNNNVSTDYTQSQNFIKKRISEKEINRLKTIDHIMNELRKEQKNILESWTSEKMYVDNIRAIKERIDVVKIEIEKAERYFDLNRAAELRFERLPDLEKQLKTAAEENYVNDIPERNRMLKDEVTSEDIMNIVSVSTGIRLNKLLKSEKEKILNLENELHKQIIGQDDAVKIVARAVQRSRVGMNNPKRPIASLMFLGPTGVGKTELSKVLADVLFDTPDAVIHFDMSEYMEKHSISKLIGAAPGYVGYEQGGLLTDAVRKKPYSIILFDEIEKAHPDVYNLLLRVIDEGKLSDTKGNVANFRNTIIIFTSNLGSQSILELANDPNKKEKIKEQVMKSVRETFRPEFYNRIDDHVFFDSLTKKELKEIANIEITKVANRLFDKNFKISIDDAVFSYIVDKAYDPSFGAGPLKRVIQSEIETEIAIRILNETFVENDTIRVSLKDQKLHFSKG

SEQ ID NO: 6883 - protein, 214 aa, Plasmodium berghei
KTELAKILAKQLFGSENELIRFDMSEYMEKHSISRLIGSPPGYIGYSEGGQLTEQVYNKPNCVILFDEIEKAHPDIYNIMLQILDEGRLTDTTGKLIDFTNTIILLTSNLGCPTNYDKYLNNKNYLNELDLKDIKNNIKSKITNYFKPELLNRLTNILIFNPLNIEALNLIFNKFITELKTKLYLNKLNIIISINNNLKYFIIKLTYNPLYGAR

SEQ ID NO: 6884 - protein, 214 aa, Plasmodium cynomolgi
KTELAKILAKYLFGSEKELIRFDMSEYMEKHSISRLIGSPPGYIGYSEGGQLTEQVYNNPNSIILFDEIEKAHPDIYNIMLQILDEGRLTDTTGKLIDFTNTIILLTSNLGCPKNYDLYLKNKYYLSDIDLKDIKKNIKLSINNYFKPELLNRLTNILIFNPLNINSLLLIFNKFINELKIKLYLNKLNITIYIKNELKYFLIKLTYNPLYGAR

SEQ ID NO: 6885 - protein, 1070 aa, Plasmodium falciparum
MVNSFFFCFVIIGLIYVWDITYSKKAKIFFNKNDIFSIKNTHWDIYDKKKYFFIGNNHLKNEESFLPEVRKDYKSQIKEYKNSTNGIIYHNNKNRLSYTINDQVNYDNNMTSGINKKRKVKDSSIHMNNSYEKNRNKNKFALFMSDEEYTINSDDYTEKAWEAISSLNKIGEKYDSAYVEAEMLLLALLNDSPDGLAERILKESGIDTQLLVQEIDDYLKKQPKMPSGFGEQKILGRTLQTVLSTSKRLKKEFNDEYISIEHLLLSIISEDSKFTRPWLLKYNVNYEKVKKAVEKIRGKKKVTSKTPEMTYQALEKYSRDLTALARAGKLDPVIGRDNEIRRAIQILSRRTKNNPILLGDPGVGKTAIVEGLAIKIVQGDVPDSLKGRKLVSLDMSSLIAGAKYRGDFEERLKSILKEVQDAEGQVVMFIDEIHTVVGAGAVAEGALDAGNILKPMLARGELRCIGATTVSEYRQFIEKDKALERRFQQILVEQPSVDETISILRGLKERYEVHHGVRILDSALVQAAVLSDRYISYRFLPDKAIDLIDEAASNLKIQLSSKPIQLENIEKQLIQLEMEKISILGDKQKNLFNYSSVANTHNNNNNSSISSNNSSSYGNAEETEATVDYTKSPNFLKKRINEKEIDRLKMIDRIMSELRKEQRKILDSWSTEKSYVDNIRAIKERIDVVKIEIEKAERYFDLNRAAELRFETLPDLEKQLKKAEENYLNDIPEKSRILKDEVTSEDIVNIVSMSTGIRLNKLLKSEKEKILNLENELHKQIIGQDDAVKVVTKAVQRSRVGMNNPKRPIASLMFLGPTGVGKTELSKVLADVLFDTPEAVIHFDMSEYMEKHSISKLIGAAPGYVGYEQGGLLTDAVRKKPYSIILFDEIEKAHPDVYNLLLRVIDEGKLSDTKGNVANFRNTIIIFTSNLGSQSILDLANDPNKKEKIKEQVMKSVRETFRPEFYNRIDDHVIFDSLSKKELKEIANIEIRKVANRLFDKNFKITIDDAVFSYIVDKAYDPSFGARPLKRVIQSEIETEIAVRILDETFVENDTINISLKDQKLHFSKS

SEQ ID NO: 6886 - protein, 752 aa, Plasmodium falciparum
MSDEEYTINSDDYTEKAWEAISSLNKIGEKYDSAYVEAEMLLLALLNDSPDGLAERILKESGIDTQLLVQEIDDYLKKQPKMPSGFGEQKILGRTLQTVLSTSKRLKKEFNDEYISIEHLLLSIISEDSKFTRPWLLKYNVNYEKLKSCRKNSRKKKSYFKTPEMTYQALEKYSRDLTALARAGKLDPVIGRDNEIRRAIQILSRRTKIILSYLGDPGVGKTAIVEGLAIKIVQGDVPDSLKGRKLVSLDMSSLIAGAKYRGDFEERLKSILKEVQDAEGQVVMFIDEIHTVVGAGAVAEGALDAGNILKPMLARGELRCIGATTVSEYRQFIEKDKALERRFQQILVEQPSVDETISILRGLKERYEVHHGVRILDSALVQAAVLSDRYISYRFLPDKAIDLIDEAASNLKIQLSSKPIQLENIEKQLIQLEMEKISILGDKQKNLFNYSSVANTHNNNNNSSISSNNSSSYGNAEETEATVDYTKSPNFLKKRINEKEIDRLKMIDRIMSELRKEQRKILDSWSTEKSYVDNIRAIKERIDVVKIEIEKAERYFDLNRAAELRFETLPDLEKQLKKAEENYLNDIPEKSRILKDEVTSEDIVNIVSMSTGIRLNKLLKSEKEKILNLENELHKQIIGQDDAVKVVTKAVQRSRVGMNNPKRPIASLMFLGPTGVGKTELSKVLADVLFDTPEAVIHFDMSEYMEKHSISKLIGAAPGYVGYEQGGLLTDAVRKKPYSIILFDEIEKAHPN

SEQ ID NO: 6887 - protein, 214 aa, Plasmodium gallinaceum
KTELAKLLAKQLFGSEKELIRFDMSEYMEKHSISRLIGSPPGYIGYSEGGQLTEQVFKKPNSIILFDEIEKAHPDIYNIMLQILDEGRLTDTTGKLIDFTNTIILLTSNLGCPKNYDIYFKNKNYLSELDLKEIEKNIKLSINKFFKPELLNRLTNILIFNPLNINNLLLIFDKFIKELQIKLYLNKLNILVHINNNIKYIIPKLSYNPLYGAR

SEQ ID NO: 6888 - protein, 214 aa, Plasmodium knowlesi
KTELAKLLAKYLFGSEKELIRFDMSEYMEKHSISRLIGSPPGYIGYSEGGQLTEQVYNNPNSIILFDEIEKAHPDIYNIMLQILDEGRLTDTTGKLIDFTNTIILLTSNLGCPKNYDSYLKNKYYLSDTDLKEIHKNIKLSINNYFKPELLNRLTNILIFNPLNINSLLLIFNKFMSELKIKLYSNKLNITIYIKNELKYFLIKLTYNPLYGAR

SEQ ID NO: 6889 - protein, 214 aa, Plasmodium vivax
KTELAKLLAKYLFGSEKELIRFDMSEYMEKHSISRLIGSPPGYIGYSEGGQLTEQVYNNPNSIILFDEIEKAHPDIYNIMLQILDEGRLTDTTGKLIDFTNTIILLTSNLGCPKNYDLYLKNKYYLSDIDLKDIKKNIKLSINNYFKPELLNRLTNILIFNPLNINSLLLIFNKFINELKIKLYLNKLNITIYIKNELKYFLIKLTYNPLYGAR

SEQ ID NO: 6890 - protein, 214 aa, Plasmodium malariae
KTELAKLLAKQLFGSETELIRFDMSEYMEKHSISRLIGSPPGYIGYSEGGQLTEQIYKKPNSIILFDEIEKAHPDIYNIMLQILDEGRLTDTTGKLIDFTNTIILLTSNLGCPKDYNLYLTNKYFLSNLDLKKIEKNIKLYINNYFKPELLNRLTNILIFNPLNYNTLLLIFDKFINELKIKLYLNKLNINIYINNKLKYFLTKLTYNPLYGAR

SEQ ID NO: 6891 - protein, 860 aa, Prochlorococcus marinus subsp. pastoris str. CCMP1378
MKFVPSEFSNSAWDIFILSKEIAQNNFQQNIDSENILLALIKQDLLTSKILKKNCVNIRKIETKLTSLLDAKAKMKNKQKTLFIGETTEKVFLKANDLRVSFNDVVISTEHILYGLSYDEICSELVLNTKKIPEFLELLNKMKSESTINDNFESSNETLDKFGIDLTKSARDGILDPVIGRDEEIRRTIQILSRRTKNNPVLIGEPGVGKTAIVEGLAQRIVNGDVPSSLNNRQLISIDMGSLIAGAKYRGEFEERIKNVLKKVKSSEGKIILFIDEIHTVVGAGATGGSLDASNLLKPMLARGELRCIGATTINEHKQNIEKDPALERRFQKIKINAPSVDDTISILRGLREKYEVHHSVRISDNALVAAASLSERYINDRFLPDKAIDLIDEAASRLNMIITSKPEEIDEIDRKVLQLEMENLSLQRESDNFSLERLKRINNELHDLKIRQSELNHQWQKEKEEIDEISNLKEEIESTQLKIEQAKRSFDLNKAAELEFGTLISLQKKLKIKSENLVDSFKSGEKNLLRQEVNFDDIAEVVSKWTSIPVNNLNQSEKEKLLKLELTLKEKIIGQNNAICAVSDSIKRSRTGLNDPNRPIASFLFLGPTGVGKTELSKVIAKTIFDSNSSITRLDMSEYMEKHSVSKIIGAPPGYLGFESGGQLTEAVRKNPYSLILLDEIEKAHKDVLDVLLQVLDDGIITDGQGRTISFKNSIIVLTSNLGSQSINDLSIRNEDKNEIKNIVNVELKKFFKPEFLNRLDEIIIFQNLELNELKDIAKLQLKKLENRLIKKDLNFQITDEAIDHLVKNSFDNSYGARPLKRIIQKEIETKIANNILNNNYLNKKEVYISIKDGCIFVN

SEQ ID NO: 6892 - protein, 341 aa, Salmonella typhimurium
AQRIINGEVPEGLKGRRVLALDMGALVAGAKYRGEFEERLKGVLNDLAKQEGNVILFIDELHTMVGAGKADGAMDAGNMLKPALARGELHCVGATTLDEYRQYIEKDAALERRFQKVFVAEPSVEDTIAILRGLKERYELHHHVQITDPAIVAAATLSHRYIADRQLPDKAIDLIDEAASSIRMQIDSKPEELDRLDRRIIQLKLEQQALMKESDEASKKRLDMLNEELDDKERQYSELEEEWKAEKASLSGTQTIKAELEQAKIAIEQARRVGDLARMSELQYGKIPELEKQLEAATQSEGKTMRLLRNKVTDAEIAEVLARWTGIPVSRMLEGEREKLL

SEQ ID NO: 6893 - protein, 851 aa, Encephalitozoon cuniculi
MTTRKYTERAQNALKMCVDEALANNNNTIEPEHLLKAILSDQTSVLHNVLSPTERNNVKNALIKRIGGFAKQYNCTEPRVGETLAKVLMAAESKGEGEYVSVNALVLSLLEVESIRELIANSEDIRKKVEEQTKNKRFDSRNADDGTDVMSRFAVDMVEQARQNVFDPVIGRDEEIRRVLEILSKKTKSNAILVGKPGVGKTAIVNGIAQLIANGEAPTLRGARIYNVDVGSMVAGTSHRGDFEERLKTLVKEAETTPGVILFIDEIHIVLGAGKTDGAMDAANMLKPGLAAGTIKCIGATTHDEYRKYIENDPAFERRFVQVVVNEPSIEDSITMLRGLKGRLEAYHGVKIADSAIVYAVNSSKKYISNRRLPDVAIDLLDTACASVMIALESEPQEILNQKSKAWGLDIAKTSLEFDLSQKKDEQTLKKLKEVVEELEKVKASLQPMEEAYLRDKKHIIEAKKLKKKLEDTKLRLAQAERDRNTYVAYDLKTNVIPVIESELKRLELESVVVILPSHVAEIISRWTGIDVKRLTIKENERLMEMSSRIKKRIFGQDHAVDAIVDSILQSRVGLDDDDRPVGSFLLLGPTGVGKTELAKAVAMELFDNEKDMLVIDMSEYGNEMGITKLIGANAGYVGYNQGGTLTEPIKGRPYNVILLDEVDLAHQTVLNTLYQLLDEGRVTDGKGAVVDFRNCVVIMTSNLGQEIIMRSRGELNDDERKKIEEIVLNRFGAPFVNRIDEVLYFNNLDRENMHRILEYQMGYLEKKLRGRGITFKVSDAVKEDMVTKVLSSIYGARQLRRFIRSSFKRALTKVLLMRVNEDPIEVSCTHPSEGAGGIRISDYVYSMVQQ

SEQ ID NO: 6894 - protein, 890 aa, Yersinia enterocolitica
MAITRKNLFGKLDATLFKGIESATTICKLRGNPYVELIHWLNQLWHQEDNDLKHIVRYFAVDVDAFERGLAQALARLPVGATSISDFSYHIELAIERAWVYASLECLDTRIRSGHLLLAMLTNMELRRALLAIAPEMEKIPLEHLSSDFNFITQASPETNEAATDGSPMYDGTLPGEASNAINGKSTATLAQYTTDLTALAREGKIDPVLGRNHEISTMVDILLRRRQNNPLLTGEAGVGKTAVVEGLALAIVAGEMPPALSQVSLLTLDVVALSAGASMKGEFEARLKNVLDEAMASPTPVILFIDEVHTLVGAGGNAGTGDAANLLKPALARGQLRTIGATTWSEFKRHIEKDPALTRRFQVLQVDEPDEDTAISMLRGLTPALEKHHGVWIMDEALQAAVRLSHRYIPARQLPDKAISLLDTACARVAVAQFSQPAELQQLTFQSETAQTELSSLEKAQHFGKGQDERTALLEATIAQHSAAANKLEQRWQAERELVTAITATRTVLYELVSQPTPDEEKRQQYQQQLAQLEEQLLLIRSAQPLVQAEVNATVIANIVADWTGIQVGQMLKDDIRAVMELPQRLEERVIGQPHALVQLSENIMTARAGMADPRKPLGVFMLVGPSGVGKTETALAIAESMYGGEQNLITINMSEYQESHTVSSLKGSPPGYVGYGEGGVLTEAVRRKPYSVVLLDEIEKAHSDVHELFFQVFDKGQMEDGEGRFIDFKNTILLLTSNVGSELLSNLFADPDTAPDQDGILSALQPELLKVFPAAFLGRVTVIPYLPLQQSALQHIVRLHLDRIGQRLQSQHQLTLQYSDVVVDDVVSRCSVAETGARMLIRYIEQNITPEIGKFILRDHDAIPNQIVFVDKVENKFTVSVLNEKINN

SEQ ID NO: 6895 - protein, 857 aa, Vibrio cholerae
MRLDRFTSKFQIAISDAQSLALGRDHQYIEPVHLMVALLDQNGSPIRPLLTMLNVDVMQLRSKLGEMLDRLPKVSGIGGDVQLSSALGSLFNLCDKVAQKRQDAYISSEIYLLAAIEDKGPLGHLLKEFGLTEKKVSEAIEKIRGGQKVNDPNAEELRQALEKFTIDLTERAEQGKLDPVIGRDDEIRRTIQVLQRRTKNNPVIIGEPGVGKTAIVEGLAQRIINNEVPEGLRGRRVLSLDMGALVAGAKYRGEFEERLKSVLNELAKEEGNIILFIDELHTMVGAGKGEGSMDAGNMLKPALARGELHCVGATTLDEYRQYIEKDPALERRFQKVLVDEPTVEDTIAILRGLKERYELHHHVEITDPAIVAAASLSHRYISDRQLPDKAIDLIDEAASSIRMQIDSKPEALDKLERKIIQLKIEQQALSNEHDEASEKRLAILNEELQEKERDYAELEEVWKAEKAALSGTQHIKAALEQARMDLEVARRAGDLNRMSELQYGRIPELEKQLDLAAQAEMQEMTLLRNKVTDAEIAEVLSKQTGIPVSKMLEAEKEKLLRMEDVLHKRVIGQKEAVEVVANAIRRSRAGLSDPNRPIGSFLFLGPTGVGKTELCKTLANFLFDSEDAMVRVDMSEFMEKHSVARLVGAPPGYVGYEEGGYLTEAVRRKPYSVILLDEVEKAHPDVFNILLQVLDDGRLTDGQGRTVDFRNTVVIMTSNLGSSRIQENFARLDYQGIKEQVMDVVSKHFRPEFLNRVDESVVFHPLGQEHIKSIASIQLARLRQRLAERDYQLEVDDEALDLIAHVGFDPVYGARPLKRAIQQNVENPLAKSILAGKFLPGSPILLSVKDGNIFASQ

SEQ ID NO: 6896 - protein, 869 aa, Vibrio cholerae
MIRIELPTLIAKLNAQSKLALEQAASLCIERQHPEVTLEYYLDVLLDNPLSDVRLVLKQAGLEVDQVKQAIASTYSREQVLDTYPAFSPLLVELLQEAWLLSSTELEQAELRSGAIFLAALTRADRYLSFKLISLFEGINRENLKKHFAMILSDSAETAVAKTDKNAANPLQAAAETPLGRFCTNVTEQARNGELDPVLSRENELNLMVDILCRRRKNNPIVVGEAGVGKSAMIEGLALRVVAGKVPTQLQNVELYSLDLGRLQAGASVKGEFEKRLKGVIDAIKQSPKPIILFIDEAHTLIGSGNQEGGSDAANLLKPALARGELSTVAATTWKEYKKYFEKDPALTRRFQLVKLDEPTIDQAVDILRGLNSVYEKAHNVLITDDALKAAAELSARYISGRQLPDKAIDVLDTACARIAINMTTPPKRLALLETLCHQRQLEIDMLERAQFLGQEVDSERLDVLRNQELADEAEKAALTQSWQQQKSLVESIIALRAELMELSQAQEQDPDHLLVVRTALQEQYQALDAIDHAERLMHPQVDADQIAEVIADWTGVPVDQMNTDELHKITHLTSILGQAIKGQETAIERIHRHLLTARADLRRPGRPKGAFLLVGPSGVGKTETVVQLAEQLYGGKQFLTTINMSEYQEKHTVSRLIGSPPGYVGYGEGGVLTEAIRKMPYSVVLLDEVEKAHPEVLNIFYQGFDKGEIADGEGRVIDCQNIVFFLTSNLGYQTIVDYADEPAKLDEALYPELAAFFKPALLARMEVIPYLPLGKEVLAQIVRGKLARLEKLFKTRYNAEVVIEESLIDEILSRATRSENGARMLEAIIEGQLLPPVSLALLNKLAERAPVERIRLAAEAGEFIGEVA

SEQ ID NO: 6897 - protein, 1048 aa, Plasmodium yoelii yoelii
MQKNFIAFFVIISVSFLCKQGDGKRRFESRLNASNIDNIINNNNILNPFGIARKRIRKNEAFINSNLKGDDILKRDKKKGFKSKINENKDEYNIKSKKYDQSGIKNRLNYSTNDQDNVNNYFFNKNENNFINKRNKMNQLFMSDEEYTINSDDYTEKAWDAISSLNKIGEKYESAYVEAEMLLLALLNDSPDGLAQRILKEAGIDTDLLSHDIDVYLKKQPKMPSGFGEQKILGRTLQTVLTTSKRLKREFNDEYISIEHLLLSIISEDSKFTRPWLLKYNVNYEKVKKAVEKIRGKKKVTSKTPEMTYQALEKYSRDLTALARAGKLDPVIGRDEEIRRAIQILSRRTKNNPILLGDPGVGKTAIVEGLAIKIVQGDVPDSLKGRKLVSLDMSSLIAGAKYRGDFEERLKSILKEIQDSEGQVVMFIDEIHTVVGAGAVAEGALDAGNILKPLLARGELRCIGATTVSEYRQFIEKDKALERRFQQILVDQPSVDETISILRGLKERYEVHHGVRILDSALVQAAILSDRYISYRFLPDKAIDLIDEAASNLKIQLSSKPIQLDNIEKQLIQLEMEKISILGDKQTASLINKSSSGNDDNNVSTDYTQSQNFIKKRISEKEINRLKTIDHIMNELRKEQKNILESWTSEKMYVDNIRAIKERIDVVKIEIEKAERYFDLNRAAELRFETLPDLEKQLKNAEENYVNDIPERNRMLKDEVTSEDIMNIVSISTGIRLNKLLKSEKEKILNLENELHKQIIGQDDAVKIVARAVQRSRVGMNNPKRPIASLMFLGPTGVGKTELSKVLADVLFDTPDAVIHFDMSEYMEKHSISKLIGAAPGYVGYEQGGLLTDAVRKKPYSIILFDEIEKAHPDVYNLLLRVIDEGKLSDTKGNVANFRNTIIIFTSNLGSQSILELANDPNKKEKIKEQVMKSVRETFRPEFYNRIDDHVIFDSLTKKELKEIANIEITKVANRLFDKNFKISIDDAVFSYIVDKAYDPSFGARPLKRVIQSEIETEIAIRILNETFVENDTIRVSLKDQKLHFSKG

SEQ ID NO: 6898 - protein, 909 aa, Plasmodium yoelii yoelii
MVQNIVKNYLFVIVLLLSVLKVDITVFASNNNNNNIQENFLNRTINTLNSGRNIAKRYGHNQLKPVHILKSIIKSEYGLNLFKSNNIDLGNLKEYTDAALEQTRAGAPLDNKTIVINSEATNEVLAEAKAIAKKYKSPKVDIEHILYGLMSDELVSEIFGEIYLTEDSIKEILKNKFEKATKTKEKKTTGLNIEQFGSNLNEKVRSGKLQGIYGRDEEIRAIIESLLRYNKNSPVLVGQPGTGKTTIVEGLAYRIEKGDVPKELLGYTIISLNFRKFTAGTSYRGEFENRMKNIIKELKNKKNKIILFVDEIHLLLGAGKAEGGVDAANLLKPVLSKGEIKLIGATTVTEYRKYIESCSAFERRFEKVIVEPPSVETAIKILRSLKSKYEKFYGINITDKALVAAVKVSDKFIKDRFLPDKAIDLLNKACSFLQVQLSGKPRVIDLTERYIERLAYEISTLERDVDKVSKKKYSSLVEEFELKKEELKKYYEEYVTTGERLKRKKEVEKKLNELKDIAQNYINAGQEPPTELQESLNEAQKQFVEIYKNTVAYVEEKTHNAMNVDSLYQEHVSYIYLRDSGMPLGSLSFESSKGALKLYNSLSQSIIGNEDIIKSLSDAVVKAATGMKDPEKPIGTFLFLGPTGVGKTELAKTLAIELFNSKNNLIRVNMSEFTEAHSVSKITGSPPGYVGFSDSGQLTEAVRERPHSVVLFDELEKAHPDVFKVLLQILGDGYINDNHRRNIDFSNTIIIMTSNLGADLFKKQFFFDADNSNTQEYKRLFEDLRIQLIKKCKKVFKPEFVNRIDKIGIFEPLSKKNLHKIVKLRFKKLEKRLEEKNISIDVSDRAIDYIIDQSYDPELGARPTLIFIESVIMTKFAVMYLEKELIDDMDVYVDYNKTINNIVINLSLS

SEQ ID NO: 6899 - protein, 214 aa, Plasmodium elongatum
KTELAKLLAKQLFGSDKELIRFDMSEYMEKHSISRLIGSPPGYIGYSEGGQLTEKVYLNPNSVILFDEIEKAHPDIYNIMLQILDEGRLTDTTGKLIDFTNTIILFTSNLGCPTNYYKYLKNKNYLSELDLQDITKNIQLSINNYFKPELLNRLTNILIFNPLTIKTLLLICNKFIEDLKIKLYLNKLNIIININYKIKYILVKLSYNPLYGAR

SEQ ID NO: 6900 - protein, 857 aa, Rickettsia conorii
MNIDKFTAHAKSVIASSQLLAAKNDHQQILPLHLLSSLLSEETGIIQTLINNTGGNINLLKDQVQLELNKIPKVQVEGGGQVYSSAEALKVLEKASSIAKDNGDSFVTIERIFEALTYDNTIAGKILTNNGINNKKIATAILQFRKGKKADTESAENSYDALKKYGRDVTELAESGKLDPIIGRDEEIRRTVQVLSRRMKNNPVLIGEPGVGKTAIIEGLAQRIFSKDVPESLINCRIIELDMGALIAGAKYRGEFEERLKAVLSEIKESSGEIILFIDELHLLVGTGKTDGAMDASNLLKPMLARGELHCIGATTLDEYRKYIEKDAALARRFQPVYVSEPTVEDTISILRGIKEKYELHHAVRISDSAIVAAATLSNRYITDRYLPDKAIDLIDEACSRMKIELSSKPEELDELDRRIIQIKIELAALKKENDEHSKKKIEHLTTALEKLESQSYDMGAKWQAEKSKLQQTQKLKEELDRSRNELERAERDANLAKASELKYGIIPEIMKKLQEAESMDNKGLLKEIVSESDIASIISRITGIPIDTMLSSERERLLVMEQKLRESVIGQDKAIKGVSDAVRRSRAGIQDINRPLGSFLFLGPTGVGKTELTKALAGFLFDDRNAILRIDMSEYMEKHAISRLIGAPPGYIGYDQGGVLTEAVRRRPYQVILFDEVEKAHPDIFNIMLQILDEGRLTDSQGITVDFKNTIIVLTSNLGAEILVNQKEDEDTYKVKDEVMEYVKAVFKPEFLNRLDEIILFHRLNRNNIHDIVKIQLESLKKILLAQNIILEFDESALNYLAEKGYDPSFGARPLKRLIQREIQNNLAKMILAGEISSGKTVKINSKDKELKVTMS

SEQ ID NO: 6901 - protein, 858 aa, Rickettsia prowazekii
MNIDKFTAHAKSVIANHQSLAIKNDHQQILPLHLLSSLLSEETGIIQALINNIGGNINLLKDQVQLELNKIPKIQVDGGGQIYYSAEDLKVLEKSSSIAKDSGDSFVTIERIFEALTYDNTIAGKILTNNGINSKKLATAILHLRKGKKADTESAENNYDALKRYGRDVTELAENGKLDPIIGRDEEIRRAVQVLSRRMKNNPVLIGAPGVGKTAIIEGLAQRIFSKDVPETLINCRIIELDIGALIAGAQYRGEFEKRLKAVLSEIKESSGEIILFIDELHLLVGTGKVDGAMDASNLLKPMLARGELHCIGATTLDEYRKYIEKDAALARRFQPVYVGEPSVEDTISILRGIKEKYELHHAVRISDSAIVAAATLSNRYITDRYLPDKAIDLIDEACSRMKIELSSKPEELDELDRRIIQIKIELAALKKENDEHSKKKITSLTEELKKLESKSYDMNTKWQAEKSKLQQAQKLKEELEQARIDLERAERDANLAKASELKYGIIPEIMNKLQEAENMDNKGLLKEIVSESDIASIISRITGIPIDTMLSSERERLLVIEQKLCESVIGQDEAIKGVSDAVRRSRSGIQDINRPLGSFLFLGPTGVGKTELTKALAGFLFDDRNALLRIDMSEYMEKHSISRLIGAPPGYIGYDQGGVLTESVRRRPYQVILFDEVEKAHLDIFNIMLQILDEGRLTDSQGITVDFKNTIIVLTSNLGAEILVNQKEGEDTYKVRDEVMQYVRAVFKPEFLNRLDEIILFHRLNRNNIHDIVKIQLGSLKKILLQQNIILEFDESALNYLAEKGYDPSFGARPLKRLIQREIQNNLAKMILAGEISSGNTVKIRREKEELSINIID

SEQ ID NO: 6902 - protein, 867 aa, Chlamydia trachomatis
MEKFSDAVSEALEKAFELAKNSKHSYVTENHLLKSLLQNPGSLFCLVIKDVHGNLGLLTSAVDDALRREPTVVEGTAVASPSPSLQQLLLNAHQEARSMGDEYLSGDHLLLAFWRSTKEPFASWRKTVKTTSEALKELITKLRQGSRMDSPSAEENLKGLEKYCKNLTVLAREGKLDPVIGRDEEIRRTIQVLSRRTKNNPMLIGEPGVGKTAIAEGLALRIVQGDVPESLKEKHLYVLDMGALIAGAKYRGEFEERLKSVLKGVEASEGECILFIDEVHTLVGAGATDGAMDAANLLKPALARGTLHCIGATTLNEYQKYIEKDAALERRFQPIFVTEPSLEDAVFILRGLREKYEIFHGVRITEGALNAAVVLSYRYITDRFLPDKAIDLIDEAASLIRMQIGSLPLPIDEKERELSALIVKQEAIKREQAPAYQEEAEDMQKAIDRVKEELAALRLRWDEEKGLITGLKEKKNALENLKFAEEEAERTADYNRVAELRYSLIPSLEEEIHLAEEALNQRDGRLLQEEVDERLIAQVVANWTGIPVQKMLEGESEKLLVLEESLEERVVGQPFAIAAVSDSIRAARVGLSDPQRPLGVFLFLGPTGVGKTELAKALAELLFNKEEAMIRFDMTEYMEKHSVSKLIGSPPGYVGYEEGGSLSEALRRRPYSVVLFDEIEKADKEVFNILLQIFDDGILTDSKKRKVNCKNALFIMTSNIGSQELADYCTKKGTIVDKEAVLSVVAPALKNYFSPEFINRIDDILPFVPLTTEDIVKIVGIQMNRVALRLLERKISLTWDDSLVLFLSEQGYDSAFGARPLKRLIQQKVVTMLSKALLKGDIKPGMAVELTMAKDVVVFKIKTNPAV

SEQ ID NO: 6903 - protein, 442 aa, Bacteroides fragilis
ACVKLTDRYITDRNFPDKAIDALDEAGSRVHLTNVSVPKEIEDQEKLIEEAKNNKNEAVKSQNFELAASFRDKEKELAVQLDVMKKDWEERLKDNRETVDEEEIANVVSMMSGIPVQRMAQAEGIKLAGMKEDLQSKVIAQDDAIKKLVKAILRSRVGLKDPNKPIGTFMFLGPTGVGKTHLAKELAKYMFGSSDALIRIDMSEFMEKFTVSRLVGAPPGYVGYEEGGQLTEKVRRKPYSIVLLDEIEKAHPDVFNLLLQVMDEGRLTDSYGRMVDFKNTVIIMTSNIGTRQLKEFGRGVGFATQSRLDDKEFSRSVIQKALNKSFAPEFINRVDEIITFDQLSLEAITKIIDIELKGLYNRIESIGYKLVIEDKAKQFVASKGYDVQYGARPLKRAIQTYLEDGLSELIISADLNEGDTITVSLNEEKGELEMKNEAKTAE

SEQ ID NO: 6904 - protein, 848 aa, Mycobacterium tuberculosis H37Rv
MDSFNPTTKTQAALTAALQAASTAGNPEIRPAHLLMALLTQNDGIAAPLLEAVGVEPATVRAETQRLLDRLPQATGASTQPQLSRESLAAITTAQQLATELDDEYVSTEHVMVGLATGDSDVAKLLTGHGASPQALREAFVKVRGSARVTSPEPEATYQALQKYSTDLTARAREGKLDPVIGRDNEIRRVVQVLSRRTKNNPVLIGEPGVGKTAIVEGLAQRIVAGDVPESLRDKTIVALDLGSMVAGSKYRGEFEERLKAVLDDIKNSAGQIITFIDELHTIVGAGATGEGAMDAGNMIKPMLARGELRLVGATTLDEYRKHIEKDAALERRFQQVYVGEPSVEDTIGILRGLKDRYEVHHGVRITDSALVAAATLSDRYITARFLPDKAIDLVDEAASRLRMEIDSRPVEIDEVERLVRRLEIEEMALSKEEDEASAERLAKLRSELADQKEKLAELTTRWQNEKNAIEIVRDLKEQLEALRGESERAERDGDLAKAAELRYGRIPEVEKKLDAALPQAQAREQVMLKEEVGPDDIADVVSAWTGIPAGRLLEGETAKLLRMEDELGKRVIGQKAAVTAVSDAVRRSRAGVSDPNRPTGAFMFLGPTGVGKTELAKALADFLFDDERAMVRIDMSEYGEKHTVARLIGAPPGYVGYEAGGQLTEAVRRRPYTVVLFDEIEKAHPDVFDVLLQVLDEGRLTDGHGRTVDFRNTILILTSNLGSGGSAEQVLAAVRATFKPEFINRLDDVLIFEGLNPEELVRIVDIQLAQLGKRLAQRRLQLQVSLPAKRWLAQRGFDPVYGARPLRRLVQQAIGDQLAKMLLAGQVHDGDTVPVNVSPDADSLILG

SEQ ID NO: 6905 - protein, 472 aa, Escherichia coli K12
IHTIIGAGAASGGQVDAANLIKPLLSSGKIRVIGSTTYQEFSNIFEKDRALARRFQKIDITEPSIEETVQIINGLKPKYEAHHDVRYTAKAVRAAVELAVKYINDRHLPDKAIDVIDEAGARARLMPVSKRKKTVNVADIESVVARIARIPEKSVSQSDRDTLKNLGDRLKMLVFGQDKAIEALTEAIKMARAGLGHEHKPVGSFLFAGPTGVGKTEVTVQLSKALGIELLRFDMSEYMERHTVSRLIGAPPGYVGFDQGGLLTDAVIKHPHAVLLLDEIEKAHPDVFNILLQVMDNGTLTDNNGRKADFRNVVLVMTTNAGVRETERKSIGLIHQDNSTDAMEEIKKIFTPEFRNRLDNIIWFDHLSTDVIHQVVDKFIVELQVQLDQKGVSLEVSQEARNWLAEKGYDRAMGARPMARVIQDNLKKPLANELLFGSLVDGGQVTVALDKEKNELTYGFQSAQKHKAEAAH

SEQ ID NO: 6906 - protein, 867 aa, Chlamydia muridarum
MEKFSDAVSEALEKAFELAKDAKHSYVTENHLLKSLLQNPGSLFCLVIKDVHGNLGLLTSAVDDALHREPTVVEGAAIPKPSPSLQQLLLNAQEEARSMGDEYLSGDHLLLAFWKTTKEPFASWRKTVKTSPEALKELIIKLRQGSRMDSPSAEENLKGLEKYCKNLTILAREGKLDPVIGRDEEIRRTIQVLSRRTKNNPMLIGEPGVGKTAIAEGLALRIVQGDVPESLKDKHLYVLDMGALIAGAKYRGEFEERLKSVLKGVEASEGACILFIDEVHTLVGAGATDGAMDAANLLKPALARGTLHCIGATTLNEYQKYIEKDAALERRFQPIFVTEPSLEDAVFILRGLREKYEIFHGVRITEGALNAAVVLSYRYITDRFLPDKAIDLIDEAASLIRMQIGSLPLPIDEKERELSALIVKQEAIKREQAPAYQEEANEMQKAIDRVKEELAALRLRWDEEKGLIAGLKEKKNSLENLKFAEEEAERTADYNRVAELRYSLIPSLEKEIRLAEEALNQRDGRLLQEEVDERLIAQVVANWTGIPVQKMLEGESEKLLVLEESLEERVVGQPFAITAVSDSIRSARVGLSDPQRPLGVFLFLGPTGVGKTELAKALAELLFNKEEAMIRFDMTEYMEKHSVSKLIGSPPGYVGYEEGGSLSEALRRRPYSVVLFDEIEKADKEVFNILLQIFDDGILTDSKKRKVNCKNALFIMTSNIGSQELADYCAKKGTIVDKEAVLSVVAPALKNYFSPEFINRIDEILPFVPLTTEDIVKIVGIQMNRVALRLLERRISLTWDDSVVLFLSEQGYDGAFGARPLKRLIQQKVVTMLSKALLKGDIKSGMSVELTMAKDVVVFKTKTNSVV

SEQ ID NO: 6907 - protein, 214 aa, Plasmodium relictum
KTELAKILAKQLFGSETELIRFDMSEYMEKHSISRLIGSPPGYIGYSEGGQLTEQVYKKPYSIILFDEIEKAHPDIYNIMLQILDEGRLTDTTGKLIDFTNTIILLTSNLGCPKNYDIYLKNKDYLSNFDLEQINKNIKLNINNYFKPELLNRLTNILIFNPLNINNLLLIFDKFIHELKNKLNLNKININIHINNKIKYILTKISYNPLYGAR

SEQ ID NO: 6908 - protein, 856 aa, Helicobacter pylori 26695
MNLFEKMTDQLHETLDSALALALHHKNAEVTPMHMLFAMLNNSQGILIQALQKMPVDIQALRLSVQSELNKFAKVSQISKQNIQLNQALIQSLENAQGLMAKRGDSFIATDVYLLANMGLFESVLKPYLDAKELQKTLESLRKGRTIQDKNDDSNLESLEKFGIDLTQKALENKLDPVIGRDEEIIRMMQILIRKTKNNPILLGEPGVGKTAVVEGLAQRIMNKEVPKTLLNKRVIALDLSLLVAGAKYRGEFEERLKKVIEEVKKSANVILFIDEIHTIVGAGASEGGMDAANILKPALARGELHTIGATTLKEYRKYFEKDMALQRRFQPILLNEPSINEALQILRGLKETLETHHNITINDSALIASAKLSSRYITDRFLPDKAIDLIDEGAAQLKMQMESEPAKLSSVKRSIQRLEMEKQALEMEKKESNAKRMQEILKELSDLKEEKIQLEAQFENEKEVFKEISRLKMEMESLKKEAERFKRNGDYQQAGEIEYSKIPENKKKEEELQRKWEAMQQNGALLQNALTENNIAEIVSQWTHIPVQKMLQSEKNRVLNIESELQKRVVGQEKAIKAIAKAIKRNKAGLSDSNKPIGSFLFLGPTGVGKTESAKALAQFLFDSDKNLIRIDMSEYLEKHAMSRLIGAAPGYVGYEEGGQLTEAVRRKPYSVVLLDEVEKAHPDVFNLLLQVLDEGHLTDSKGVRVDFKNTILILTSNVASGALLEENLSEAEKQKAIKESLRQFFKPEFLNRLDEIISFNALDSHAVINIVGILFENIQKKALERGINITLDEEAKELIAEAGFDRFYGARPLKRALYEMVEDKLAELILEDKVKENDSVAFVVENNEIVPKIK

SEQ ID NO: 6909 - protein, 856 aa, Helicobacter pylori J99
MNLFEKMTDQLHETLDSAIALALHHKNAEVTPMHMLFAMLNNSQGILIQALQKMPVDIEALKLSVQSELNKFAKVSQISKQNIQLNQALIQSLENAQGLMAKRGDSFIATDAYLLANMNLFESVLKPYLDTKELQKTLESLRKGRTIQDKNDDSNLESLEKFGIDLTQKALENKLDPVIGRDEEIIRMMQILIRKTKNNPILLGEPGVGKTAVVEGLAQRIVNKEVPKTLLNKRVVALDLSLLVAGAKYRGEFEERLKKVIEEVKKSANVILFIDEIHTIVGAGASEGGMDAANILKPALARGELHTIGATTLKEYRKYFEKDMALQRRFQPILLNEPSINEALQILRGLKETLETHHNITINDSALIASAKLSSRYITDRFLPDKAIDLIDEGAAQLKMQMESEPAKLSSVKRSIQRLEMEKQALEMENKESNHKRMQEILKELSDLKEEKIQLEAQFENEKEVFKEISRLKMEMEGLKKEAERFKRNGDYQQAAEIEYSKIPEKEKKEKELQHKWETMQQNGALLQNALTENNIAEIVSQWTHIPVQKMLQSEKNRVLNIESELQKRVVGQEKALKAIAKAIKRNKAGLSDSNKPIGSFLFLGPTGVGKTESAKALAQFLFDSDKNLIRIDMSEYMEKHAISRLIGAAPGYVGYEEGGQLTEAVRRKPYSVVLLDEVEKAHPDVFNLLLQVLDEGHLTDSKGVRVDFKNTILILTSNVASGALLEEDLSEADKQKAIKESLRQFFKPEFLNRLDEIISFNALDSHAIINIVGILFENVQKKALERGINITLDEKAKELIAEAGFDRFYGARPLKRALYEMVEDKLAELILEDKIKENDSVAFVVENNEIVPKIK

SEQ ID NO: 6910 - protein, 860 aa, Dichelobacter nodosus
MEFMQMSKKFTARFQEALSAAQSLAVGKDHAYIEPLHIFSALLDQEGSSIIAIAQRAGGQIGAVRQAVMQALERLPRVKNPTGDVNISPESMRLLNLCDKYAQQNGDEYISSELFLRAVYDAKGDLEQLLRANGLEKAAVVAAIDAVRGGEAVTDEYAEDKRGALKKYTLDVTQRPLDGKIDPVIGRDEEIRRAMQILQRRSKNNPVLIGEPGVGKTAIVEGLAQRIADRAVPESLKGKRLLSLDLAALLAGTKYRGEFEERLKAVLDEITKADGQIILFIDEIHTMVGAGKSEGSLDAGNMLKPALARGDLHCIGATTLDEYRQYMEKDAALERRFQKVIVDEPSVEDTIAILRNLQERYEVHHGINITDPALVAAAQLSHRYISGRKLPDKAIDLMDEAAAQIRMELDSKPEVMDKIDRRLIQLQIERMALEKETDAASKRRLSDLEAEIAAQEKEYADLEEIWLAEKAGNAGAAEIKEQLDKLRVELEAAKRRGDFARASEIQYGLIPAKEKQLLENEQQTEQRPHRLMRNKVTAEEIAEIVSRWTGIPVAKMMEGEKERLLHLETVLNERVVGQKTAVEAVANAIRRNRAGLSDPKRPIGSFLFLGPTGVGKTELCRTLAQFLFDSEENMVRIDMSEFMEKHSVARLIGAPPGYVGYDQGGYLTEAVRRKPYSVVLFDEVEKAHSDVFNTLLQVLDEGRLTDGQGRTVDFRHTVIIMTSNLGSDMIQLLAEKSYEEMKSAVMEIVMAHFRPEFINRIDEAIVFHGLAKTHMYRIAQIQLERLRQRLQTRELLLSVEEDAINQLVELGYDPLFGARPLKRAIQNYIENPLAQALLAGQYLPQSTITIGFDGTNFTFH

SEQ ID NO: 6911 - protein, 731 aa, Dichelobacter nodosus
MQMSKKFTARFQEALSAAQSLAVGKDHAYIEPLHIFSALLDQEGSSIIAIAQRAGGQIGAVRQAVMQALERLPRVKNPTGDVNISPESMRLLNLCDKYAQQNGDEYISSELFLRAVYDAKGDLEQLLRANGLEKAAVVAAIDAVRGGEAVTDEYAEDKRGALKKYTLDVTQRPLDGKIDPVIGRDEEIRRAMQILQRRSKNNPVLIGEPGVGKTAIVEGLAQRIADRAVPESLKGKRLLSLDLAALLAGTKYRGEFEERLKAVLDEITKADGQIILFIDEIHTMVGAGKSEGSLDAGNMLKPALARGDLHCIGATTLDEYRQYMEKDAALERRFQKVIVDEPSVEDTIAILRNLQERYEVHHGINITDPALVAAAQLSHRYISGRKLPDKAIDLMDEAAAQIRMELDSKPEVMDKIDRRLIQLQIERMALEKETDAASKRRLSDLEAEIAAQEKEYADLEEIWLAEKAGNAGAAEIKEQLDKLRVELEAAKRRGDFARASEIQYGLIPAKEKQLLENEQQTEQRPHRLMRNKVTAEEIAEIVSRWTGIPVAKMMEGEKERLLHLETVLNERVVGQKTAVEAVANAIRRNRAGLSDPKRPIGSFLFLGPTGVGKTELCRTLAQFLFDSEENMVRIDMSEFMEKHSVARLIGAPPGYVGYDQGGYLTEAVRRKPYSVVLFDEVEKAHSDVFNTLLQVLDEGRLTDGQGRTVDFRHTVIIMTSNLGSDMIQLLA

SEQ ID NO: 6912 - protein, 863 aa, Nitrosomonas europaea
MRFDKFTTKFQQALADAQSMALGQDHPYIEPQHLLLALMQQDDGSITSLLQRAGVNAQPLRQALTQSLKLLPKVEGTGGEINVSRDLANLLNLTDKEAQKRGDQYIASEMFLLAALEDKGETGRLLKQYGATRAALEQAVDSVRGGEKVTDAEAEGSREALKKYTLDLTERARSGKLDPVIGRDDEIRRTIQVLQRRTKNNPVLIGEPGVGKTAIVEGLAQRIVNGEVPETLKNKRVLSLDMAALLAGAKYRGEFEERLKAVLKELAQDEGRTIVFIDELHTMVGAGKAEGAMDAGNMLKPALARGELHCVGATTLDEYRKYVEKDAALERRFQKVLVDEPGVEATIAILRGLQEKYELHHGVEITDPAIVAAAELSHRYITDRFLPDKAIDLIDEAAARIRMEQDSKPEVMDKLDRRLIQLKIEREAVRKEKDDASKKRLALLEEEISKLEREYADLDEILKAEKSRAKGSQEIKEELDKLRREEEAARRKGDLQRASELLYGRIPQLEAQLAEQLHHAESAEEAVQPKLFRTQVGAEEIAEVVSRATGIPVSKMMQGEREKLLFMEDKLHERVIGQDEAVRLVSDAIRRSRSGLADPNRPYGSFLFLGPTGVGKTELCKALAGFLFDSEEHLIRVDMSEFMEKHSVARLIGAPPGYVGYEEGGYLTEQVRRKPYSVILLDEVEKAHPDVFNVLLQVLDDGRMTDGQGRTVDFKNTVIVMTSNLGSQMIQQMSGDDYQVIKLAVMGEVKTYFRPEFINRIDEVVVFHALGEAHIKSIARIQLSNLGKRLAQMEMKLVVSEPALTKLAEVGFDPVFGARPLKRAIQAQIENPLAKELLEGHFSAGDTILVEYSNGHMQFTAQR

SEQ ID NO: 6913 - protein, 871 aa, Cytophaga hutchinsonii
MNINNYTIKGQEAFQKAMEIVAANEQQSIESVHLLKGIIVADENVVPFLFKKNNINPVTFNQTLDAVIKTYGKVSGGSPYLSNDATQVLNKATALSKEFGDEYISIEHMLLALVSGKDKAATLLKDAGLSEKGLRAAIQELRGTSKVTDQHAEGKYRSLEKYSKNLNDLARSGKIDPVIGRDEEIRRVLQILSRRTKNNPILLGEPGVGKTAIAEGLAQRIVSGDVPENLKSKQLISLDMGLLVAGAKYKGEFEERLKSVIKEVIDSDGEIVLFIDEIHTLIGAGGGEGAMDAANLLKPALARGELHAIGATTLKEYQKYIEKDKALERRFQAVIVDEPNTQDAISILRGIKEKYEVHHGIRIQDDAIIAAVELSQRYISDRYLPDKAIDLMDEASAKLRIELDSMPQELDEILRRIMQLEIEREAIRRENNKEKETILSRELAELNEQKSQIMAKWQEEKRVIDGLKQAKEDIDRYKMEAEQAERNGDYGKVAEIRYGKIQESEKQLVEFNKQLQELKQTLGSSMLKEEVTPEDIAEVVAKWTGIPVSKMLQSEREKLLHLEEELGKRVAGQAEAIEAISDAVRRSRAGLQDPKRPIGSFIFLGTTGVGKTELAKALADYLFNDDNAMVRIDMSEYQESHAVSRLVGAPPGYIGYEEGGQLTEAVRRKPYSVILLDEIEKAHPDVFNILLQVLDEGRLTDNKGRVANFKNAIIIMTSNMGAHVIQENFDKLTAANEDQVVEETKNEVIDLLRKTIRPEFLNRVDEIIMFRPLTRKEIRKIVGIQFSLIQKRLEENGIKVEASTEVLDKLGELGFDPQFGARPLKRVMQRLILNELSKEILSGNIQKESVVGITLGEDGNLQFLNLDSVPL

SEQ ID NO: 6914 - protein, 586 aa, Bos taurus
IDPFNNDMDDLFNQLMGGMNGVNSENRRYLINGREVTPEEYAAFRQTGKLPGVTDPTQAKTKQPQPDSMLAKLGRNLTQEAKEGKLDPVIGRNKEIQETAEILSRRTKNNPVLVGDAGVGKTAVVEGLAQAIVAGDVPAAIKNKQIISIDISSLEAGTQYRGSFEENMQKLIDEVKKDGNVILFFDEIHQIIGAGNAGDASGSKGMADILKPALSRGEVTLIGATTQDEYRNTILKDAALSRRFNQVTVNAPSKEDTFKILQGLRKLYEKHHNVSLPDEVLKAAIDYSVQYIPQRSLPDKAIDLIDVTAAHLASKHPVKDAKTIEEEIKKTEAKQQEAVEKEDYQAAQEAKDQVAKLQDQLKDHSESERVVATPSDVAAAVERMTGIPVSKMGASDIERLKGLATRLEGKVIGQQEAVEAVSRAIRRNRAGFDEGNRPIGSFLFVGPTGVGKTELAKQLALDMFGSTNDIIRLDMSEYTDRTAVSKLIGTTAGYVGYDDNSNTLTEKVRRHPYSIVLLDEIEKANPQVITLLLQVLDDGRLTDGQGNTVDFKNTIIIATSNAGFSSDAVAGEDAKLMDKLQPYFRP

SEQ ID NO: 6915 - protein, 879 aa, Salmonella typhimurium LT2
METPVSRSALYGKLAGPLFRSLESATAFCKLRSNPWVELTHWLHQLTQQPDNDILHVLRHYQIPLSDVEKALLRQLDMLPAGASAISDFSHHIDLSVEKAWMLASVRYGDNKIRSGWLLLALLTTPELRRVLSSICAPLATLPVDELTEILPSLIETSPEAQERPYDGSGLASAIPGESSQAIPNGGQDGKSALAKYCQDMTAQARDGKIDPVTGREHEIRTMTDILLRRRQNNPLLTGEAGVGKTAVVEGFALAIAQGEVPPALREVRLLALDVGALLAGASMKGEFESRLKGLLEEAGRSPQPVILFVDEVHTLVGAGGASGTGDAANLLKPALARGTLRTIGATTWSEYKRHIEKDPALTRRFQVLQIAEPEEIPAMEMVRGLVDTLEKHHNVLILDEAVRAAVQLSHRYIPARQLPDKAISLLDTAAARVALTLHTPPASVQFLRQQLKAAEMERSLLQKQEKMGIQSDERRDALMARIFSLNNELTASESRWQRELELVHTLQELRLAESDADDKTTLQQAETALREWQGDAPVVFPEVSAAVVAAIVADWTGIPAGRMVKDEASQVLELPARLAQRVTGQDGALAQIGERIQTARAGLGDPRKPVGVFMLAGPSGVGKTETALALAEAIYGGEQNLVTINMSEFQEAHTVSTLKGAPPGYVGYGEGGVLTEAVRRHPWSVVLLDEIEKAHHDVHELFYQVFDKGGMEDGEGTHVDFKNTTLLLTTNVGSDLISQMCEDPALMPDATGLKEALMPELRKHFPAAFLGRVTVIPYLPLDETSRGVIARLHLDRLVARMSEQHGVTLTYSEELVAHIVACCPMHETGARLLIGYIEQHILPRLSRYWLQAMTEKAAIRQIDIGVNGDEQIVFEIVC

SEQ ID NO: 6916 - protein, 758 aa, Salmonella typhimurium LT2
MLNQELELSLNMAFARAREHRHEFMTVEHLLLALLSNPSAREALEACSVDLVALRQELEAFIEQTTPVLPASEEERDTQPTLSFQRVLQRAVFHVQSSGRSEVTGANVLVAIFSEQESQAAYLLRKHEVSRLDIVNFISHGTRKDEPSQSSDLGNQPTGDEQAGGEERMENFTTNLNQLARVGGIDPLIGREKELERAIQVLCRRRKNNPLLVGESGVGKTAIAEGLAWRIVQGDVPEVMADCTIYSLDIGSLLAGTKYRGDFEKRFKALLKQLEQDTNSILFIDEIHTIIGAGAASGGQVDAANLIKPLLSSGKIRVIGSTTYQEFSNIFEKDRALARRFQKIDITEPSVEETVQIINGLKPKYEAHHDVRYTAKAVRAAVELAVKYINDRHLPDKAIDVIDEAGARARLMPVSKRKKTVNVADIESVVARIARIPEKSVSQSDRDTLKNLGDRLKMLVFGQDNAIEALTEAIKMSRAGLGHEHKPVGSFLFAGPTGVGKTEVTVQLSKALGIELLRFDMSEYMERHTVSRLIGAPPGYVGFDQGGLLTDAVIKHPHAVLLLDEIEKAHPDVFNLLLQVMDNGTLTDNNGRKADFRNVVLVMTTNAGVRETERKSIGLIHQDNSTDAMGEIKKVFTPEFRNRLDNIIWFDHLSGEVIHQVVDKFIVELQAQLDQKGVSLEVSQEARDWLAEKGYDRAMGARPMARVIQDNLKKPLANELLFGSLVDGGQVTVALDKEKNALTYDFQSAQKHKPEAAH

SEQ ID NO: 6917 - protein, 865 aa, Streptomyces coelicolor A3(2)
MDAELTNRSRDAINAASNRAVTEGNADLTPAHLLLALLQGQDNENITDLLAAVEADLAAVRTGAERIVAGLPSVTGSTVAPPQPSREMLAVVADAQARAKELGDEYLSTEHLLLGIAAKGGAAGEVLEGQGASAKKLQEAFRKARGGRRVTTADPEGQYKALEKFGTDLTAAARDGKLDPVIGRDQEIRRVVQVLSRRTKNNPVLIGEPGVGKTAVVEGLAQRIVKGDVPESLKDKRLVALDLGAMVAGAKYRGEFEERLKTVLAEIKDSDGQVVTFIDELHTVVGAGAGGDSAMDAGNMLKPMLARGELRMVGATTLDEYRERIEKDPALERRFQQVLVAEPTVEDSIAILRGLKGRYEAHHKVQIADSALVAAASLSDRYITSRFLPDKAIDLVDEAASRLRMEIDSSPVEIDELQRSVDRLKMEELAIGKETDAASLERLERLRRDLADKEEELRGLTARWEKEKQSLNRVGELKEKLDELRGQAERAQRDGDFDTASKLLYGEIPDLERDLEAASEAEEEVARDTMVKEEVGADDIADVVASWTGIPAGRLLEGETQKLLRMEDELGKRLIGQTQAVRAVSDAVRRSRAGIADPDRPTGSFLFLGPTGVGKTELAKALADFLFDDERAMVRIDMSEYSEKHSVARLVGAPPGYVGYEEGGQLTEAVRRRPYTVVLLDEVEKAHPEVFDILLQVLDDGRLTDGQGRTVDFRNTILVLTSNLGSQYLVDPTTGEAEKKQQVLEVVRSSFKPEFLNRLDDLVVFSALSQEELSRIARLQINGLARRLAERRLTLEVTDEALAWLAEEGNDPAYGARPLRRLVQTAIGDRLAREILSGEIKDGDTVRVDRFGDELIVGPASGKTL

SEQ ID NO: 6918 - protein, 837 aa, Streptomyces coelicolor A3(2)
MSMSSFGFGASDPFSDLFNRFFGTSPASSPPAVQRVPIGRMLTESSQELLNLAARRSLEDGTSDLDTEHLLWAATKVEPARGLLARAGADPDALASRIAEVLPREAGEPSAEPGLTPAAKRTLATAYARSRASGVSYIGPEHILGALLADGDTGAARLLGAQGQDIGKLEGLTEQAARPGGAPGDDGGRPATTLDEYGRDLTDEAKAGKLDPVVGRAEEIEQTVEILSRRSKNNPVLIGEPGVGKTAIVEGLAQRIVAGEVPNTLKDKRVVALDLSAMVAGAQYRGQFEERLKKVIEDVQQARGDIILFIDELHTVVGAGASGESSMDAGNMLKPALARGELHVVGATTIDEYRKYVEKDAALERRFQPVMVPEPSVEETVQILEGLRDAYEAHHQVRFADGALTAAAELSDRYVSDRFLPDKAIDVMDQAGARVRLRSASRSTEVVGREDRIAKLRREQEQAVAAEDYARAGELKREIAEAEGELAGIEERREGVVSVTADDIADVISRRTGIPVSQLTAGEKERLLRLEEEMHARIVGQDEAVTAVSRAVRRNRAGMGDPDRPVGSFLFLGPTGVGKTELAKTLAELLFGEENRMIRFDMSEFQEKHTVARLVGAPPGYVGYEEAGQLTEKVRRQPYSVVLFDEVEKAHPDVFNTLLQILDDGRLTDGQGRTVDFRHCVVIMTSNIGAHRILDHKGDVSDLKDELMQELRGRFLPEFLNRIDEIIVFHGLTEDDLSRIVDHLLAQSERRVHAQGMTLKVTEAAKKLLIAHGHQPEFGARPLRRTIQAELDNRVADLLLGGEADPGDTIVADVVDDSLHCTVDKSGTARPAEASGT

SEQ ID NO: 6919 - protein, 841 aa, Streptomyces coelicolor A3(2)
MFERFTDRARRVVVLAQEEARMLNHNYIGTEHILLGLIHEGEGVAAKALESLGISLEAVRQQVEEIIGQGQQAPSGHIPFTPRAKKVLELSLREALQLGHNYIGTEHILLGLIREGEGVAAQVLVKLGADLNRVRQQVIQLLSGYQGKETATAGGPAEGTPSTSLVLDQFGRNLTQAARESKLDPVIGREKEIERVMQVLSRRTKNNPVLIGEPGVGKTAVVEGLAQAIVKGEVPETLKDKHLYTLDLGALVAGSRYRGDFEERLKKVLKEIRTRGDIILFIDELHTLVGAGAAEGAIDAASILKPMLARGELQTIGATTLDEYRKHLEKDAALERRFQPIQVAEPSLPHTIEILKGLRDRYEAHHRVSITDEALVQAATLADRYISDRFLPDKAIDLIDEAGSRMRIRRMTAPPDLREFDEKIAGVRRDKESAIDSQDFEKAASLRDKEKQLLAAKAKREKEWKAGDMDVVAEVDGELIAEVLATATGIPVFKLTEEESSRLLRMEDELHKRVIGQKDAVKALSKAIRRTRAGLKDPKRPGGSFIFAGPSGVGKTELSKALAEFLFGDEDALISLDMSEFSEKHTVSRLFGSPPGYVGYEEGGQLTEKVRRKPFSVVLFDEVEKAHPDIFNSLLQILEDGRLTDSQGRVVDFKNTVIIMTTNLGTRDISKGFNLGFAAAGDTKSNYERMKNKVQDELKQHFRPEFLNRVDDVVVFPQLSQDDILQIVDLMIQKVDERLKDRDMGIELSQSAKELLSKRGYDPVLGARPLRRTIQREVEDSLSEKILFGELRPGHIVVVDTEGEGDAATFTFRGEEKSTLPDVPPIEQAAGGAGPNLSKEA

SEQ ID NO: 6920 - protein, 842 aa, Streptomyces coelicolor A3(2)
MTSGYMGPEGDPFAEFLARFFGGPRPRQIDIGRLLSQPARELVRGAAQYAAEHGSRDLDTEHLLRAALATEPTRGLLSRAGADPDSLASQIDERTGPVQHPPGEVPPPTSLSLTPAVKRALLDAHELARSTGTGYIGPEHVLSALAANPDSAAGHILNAARFAPSNLPTETPEAAKGRTESARTTNTPTLDKYGRDLTDLAQQGRIDPVIGREEEIEQTVEVLSRRGKNNPVLIGDAGVGKTAIVEGLAQRITDGDVPDVLIGRRVVALDLTGVVAGTRYRGDFEERMNNIVGEIRAHSDELIIFIDELHTVVGAGGGGESGSMDAGNILKPALARGELHIVGATTLEEYRRIEKDAALARRFQPILVPEPTTADAIEILRGLRDRYEAHHQVRYTDEALVAAVEMSDRYLTDRRLPDKAIDLIDQAGARVRLRARTKGTDVRALEREVDQLVRDKDQAVADEQYEQATQLRDRIVGLKQRITEATGDGQADEGLDLVVDTESIAEVVSRQTGIPVSSLTQEEKDRLLGLESHLHERVVGQDEAVRVVSDAVLRSRAGLSSADRPIGSFLFLGPTGVGKTELARALAEALFGSEDRMVRLDMSEYQERHTVSRLVGAPPGYVGHEEAGQLTEVVRRHPYSLLLLDEVEKAHPDVFNILLQVLDDGRLTDSQGRTVDFSNTVVVMTSNLGSDVITRRGAGIGFGAGGAEADEEARREQVLRPLREHFRPEFLNRVDEIVVFRQLSGEQLRQITSLLLEQTRRMVHAQGVTVDFTDAAVDWLAERGYQPEYGARPLRRTIQREVDNELSRLLLDGRVAEGGRVTVDVEDGRLAFRTPERPVPEL

SEQ ID NO: 6921 - protein, 678 aa, Mus musculus
MMLSAVLRRTTPAPRLFLGLIKSPSLQSRGGAYGRGVVTGDRGEPQRLRAAAWVRPGASSTFVPGRGAATWGRRGERTEIPYLTAASSERGPSPEETLPGQDSWNGVPNKTGLGMWALAMALVVQCYSKNPSNKDAALMEAARANNVQEVRRLLSEGADVNARHKLGWTALMVASISHNESVVQVLLAAGADPNLGDEFSSVYKTANEQGVHSLEVLVTREDDFNNRLNHRASFKGCTALHYAVLADDYSIVKELLDRGANPLQRNEMGHTPLDYAREGEVMKLLKTSETKYMEKQRKREAEERRRFPLEQRLKEHIIGQESAIATVGAAIRRKENGWYDEEHPLVFLFLGSSGIGKTELAKQTAKYMHKDAKKGFIRLDMSEFQERHEVAKFIGSPPGYIGHEEGGQLTKKLKQCPNAVVLFDEVDKAHPDVLTIMLQLFDEGRLTDGKGKTIDCKDAIFIMTSNVASDEIAQHALQLRQEALEMSRNRIAENLGDVQMSDKITISKNFKENVIRPILKAHFRRDEFLGRINEIVYFLPFCHSELIQLVNKELNFWAKRAKQRHNITLLWDREVADVLVDGYNVHYGARSIKHEVERRVVNQLAAAYEQDLLPGGCTLRITVEDSDKHLLKSPELPSPQAEKRPPTLRLEIIDKDSKTRKLDIQAPLHPEKPTTHRK

SEQ ID NO: 6922 - protein, 677 aa, Mus musculus
MMLSAVLRRTTPAPRLFLGLIKSPSLQSRGGAYGRGVVTGDRGEPQRLRAAAWVRPGASSTFVPGRGAATWGRRGERTEIPYLTAASSERGPSPEETLPGQDSWNGVPNKTGLGMWALAMALVVQCYSKNPSNKDAALMEAARANNVQEVRRLLSEGADVNARHKLGWTALMVASISHNESVVQVLLAAGADPNLGDEFSSVYKTANEQGVHSLEVLVTREDDFNNRLNHRASFKGCTALHYAVLADDYSIVKELLDRGANPLQRNEMGHTPLDYAREGEVMKLLKTSETKYMEKQRKREAEERRRFPLEQRLKEHIIGQESAIATVGAAIRRKENGWYDEEHPLVFLFLGSSGIGKTELAKQTAKYMHKDAKKGFIRLDMSEFQERHEVAKFIGSPPGYIGHEEGGQLTKKLKQCPNAVVLFDEVDKAHPDVLTIMLQLFDEGRLTDGKGKTIDCKDAIFIMTSNVASDEIAQHALQLRQEALEMSRNRIAENLGDVQMSDKITISKNFKENVIRPILKAHFRRDEFLGRINEIVYFLPFCHSELIQLVNKELNFWAKRAKQRHNITLLWDREVADVLVDGYNVHYGARSIKHEVERRVVNQLAAAYEQDLLPGGCTLRITVEDSDKHLLKSPELPSPQAEKRPPTLRLEIIDKDSKTRKLDIQAPLHPEKVCYTI

SEQ ID NO: 6923 - protein, 955 aa, Mus musculus
MVLAVQCYKNPFNKDAALMGAARANNVQEVRRPLLEGADVNIRHKRGWIALMVTAISHNESVVQEHIIGQESAITTVGAAMRRKENGWYEEGHPLIVLFLGSSGIGKTELAKQTAKYMHKDAIKGFIGLDMSEFQDRHEIAKFIGSPPGYVGHEEGGQLTKKVKQCSNAVVLLDEVDKTSDKITISKNLKENVIRSILKAHFRRVKFQGINEIVYFLPFCHSELLQLVNKELNFRAKRAKQRHNITLLCDREWEDALVDGYNVHYGACSIKNEVERCVVNQLAAAYEQDLLPGGCTLRITVEDSDKIVRIYRELQEISYYLVKVNKGLLDSVKYRAEHKHKIGVPPVCGSRVNEHRRMTTVLYLIIWSETTTQDKDEDNEENLPGVKLQTPTRGKKTCLMRRSLWLKDCCTPLGGSLDEQRGGAPKGVFVRNGGSFEDDLLLGAEANHLHEPDAQVENYNNILAKERRLQFHHVSEPLELYEKDPEEILCNLGFGRDEPDTASKIPSRFLNSSPFARGIDIKVFLSAQMQQLEVENSNYALTSQFCQIEVLTTVANAFSSLYSQVSGTPLQRVGRETALMQTDFPRKQTVTLATRRKVKKSREAQSQEKDALQKSAVTDPDFGHDGSMSSHCELESNSELKSAQESWSQIEPCAPLAIPSTRNVTMQQKDPLGDGRGHVPGTCQLSFAKSKRGHLLRTASQHSNSSIFAEDSTDCSFLNHLQVHEFLQAMGSSADICDSETTVTSLGEDIVTPTAQDQPYFSESEEESLASLQKGKQTTKISLRQETRCSPPSFTYKYTPEEEQELEKQGTEHDSQSLVKSTIFIPPPSVKNEEAPQSEGTRLEECHCGRPAPCPPFAPVSQSTWSLHSVYSELQDRPLCEHTRTPSAHIVPNISGAAAAERHWIVQTNEQTDTQTTELDQAAHFEDVLTSEWRSGEEALSSFPQVMKDYRFHQN

SEQ ID NO: 6924 - protein, 331 aa, Mus musculus
MMLSVVWRRTIPAPQLLLGCSPSPEKTLPVRNSWNGVPNKALMVAAISHNESVVQVLLAAEADSNLGDGFSSVYKTANEQGVHSLEVLVIQEDDFNNRLNYLASFKSCTALHYAVQAHNYSIVKELLDGEANPLQRNMMGHTTLDYAQEEEVIKLLKTSETKYMEKQRKLGYIGHEEGGQLTKKLKQCPNAVVLFDEIDKAHPDVLTIMLQLFDEGYLTDGKGKTIDCKDAIFIMTPISSSSWSTRNFRTKRAKQRHITLLCDRKVADVLVDGYNVHYSACSIKHKVERCVLKQLAAAYEQDLLPGGRHHSNQRRCVTPSSIHLSVCALNI

SEQ ID NO: 6925 - protein, 677 aa, Rattus norvegicus
MMLSAVLRRTAPAPRLFLGLIKSPSLQSRGGAYNRSVITGDRGEPQRLRTAAWVRPGASSVLFPGRGAATGGRRGERTEIPYLTAASSGRGPSPEETLPGQDSWNGVPNKAGLGMWALAMALVVQCYNKNPSNKDAALMEAARANNVQEVRRLLSEGADVNARHKLGWTALMVAAISHNESVVQVLLAAGADPNLGDDFSSVYKTANEQGVHSLEVLVTREDDFNNRLNHRASFKGCTALHYAVLADDYSIVKELLGGGANPLQRNEMGHTPLDYAREGEVMKLLKTSETKYMEKQRKREAEERRRFPLEQRLEQHIIGQESAIATVGAAIRRKENGWYDEEHPLVFLFLGSSGIGKTELAKQTAKYMHKDAKKGFIRLDMSEFQERHEVAKFIGSPPGYIGHEEGGQLTKKLKQCPNAVVLFDEVDKAHPDVLTIMLQLFDEGRLTDGKGKTIDCKDAIFIMTSNVASDEIAQHALQLRQEALEMSRNRIAENLGDVQISDKITISKNFKENMIRPILKAHFRRDEFLGRINEIVYFLPFCHSELIQLVNKELNFWAKRAKQRHNITLLWDREVADVLVDGYNVQYGARSIKHEVERRVVNQLAAAYEQDLLPGGCTLRITVEDSDKQLLKSPELPSPQAEKRPPTLRLEIIDKDSKTHKLDIQAPLHPEKVCYTI

SEQ ID NO: 6926 - protein, 835 aa, Nostoc sp. PCC 7120
MKALLEQDGLASGILTKAGVNLQKISDRTEQYIQRQPKVSGNSTSVYLGRSLDTLLDRAEAHRKDFQDEYISIEHLLLAYPKDDRFGKGLFQEFALDESKLKNIIKQVRGSQTVTDQNPEGKYQSLEKYGRDLTEAARKGQLDPVIGRDDEIRRTIQILSRRTKNNPVLIGEPGVGKTAIAEGLAQRIVAGDVPQSLKDRKLISLDMGAMIAGAKFRGEFEERLKAVLKEVTESGGNIVLFIDEIHTVVGAGATQGAMDAGNLLKPMLARGELRCIGATTLDEYRKYIEKDAALERRFQQVYVDQPSVEDTISILRGLKERYEVHHGVKISDSSLVAAATLSSRYISDRFLPDKAIDLVDEAAARLKMEITSKPEELDEIDRKILQLEMEKLSLQKESDAASRERLERLEKELADLKEEQRTLNTQWQSEKDVINKLQSVKEEIDKVNLEIQQAERNYDLNRAAELKYGNLTDLHRRLEATERELSQTQGTGKSLLREEVTEADIAEIISKWTGIPISKLVESEKEKLLHLEDELHHRVIGQDEAVTAVADAIQRSRAGLADPNRPTASFVFLGPTGVGKTELAKALASYMFDTEDALVRIDMSEYMEKHAVSRLIGAPPGYVGYEEGGQLTETIRRRPYAVILFDEIEKAHPDVFNIFLQILDDGRVTDAQGHTVDFKNTIIIMTSNIGSQYILDIAGDNSRYDEMRHRVMEAMRNSFRPEFLNRIDEVIIFHSLDKKELRQIVQLQVERLKARLDDRKISLRLSDVALDFLAEVGYDPVFGARPLKRAIQRELETQIAKAILRGEFNDGDTIFVDVQNERLSFSRLPVEVFSS

SEQ ID NO: 6927 - protein, 880 aa, Nostoc sp. PCC 7120
MQPTDPNKFTDKAWEVIVKSQDIVRAYQQQQLDVEHLILALIEDPTSLAVRILGRAEIDPIRLQQQLEAFTQRQTKVGKSDQLYLGRSLDVMLDRAEEIRERMKDGYISVEHMLLAFVDDERVGRKVLKGFNVDSAKIEASIKAVRGSQKVTDQNPESRYEALQKFGRDLTEQAKSGKLDPVIGRDDEIRRVIQVLSRRSKNNPVLIGEPGVGKTAIAEALAQRIVNGDVPESLKNRQLISLDIGSLIAGAKYRGEFEDRLKAVLREVTESNGNIVLFIDELHTVVGTGSNQQGAMDAGNLLKPMLARGELRCIGATTLDEFRKFIEKDAALERRFQQVYVDQPSVENTISILRGLKERYEVHHNVKISDSALVAAATLSARYIADRFLPDKAIDLVDEAAAQLKMEITSKPADLEAIDRRLMQLEMEKLSLAGEEKVAAPTKERLQRIELEITNLTEKQQDLNNQWQGEKQVLEAISLLKKEEDALRVQIEQAERAYDLNKAAQLKYGKLEGVQRDREAKEAKLLELQSQGSTLLREQVTEADIAEIVAKWTGIPVNRLLESERQKLLQLESHLHQRVIGQQEAVEAVSAAIRRARAGMKDPNRPIGSFLFMGPTGVGKTELARALAQFLFDADDALVRLDMSEYMEKHSVSRLVGAPPGYVGYEEGGQLSEAVRRHPYSVVLLDEVEKAHPDVFNILLQVLDDGRITDSQGRTVDFRNTVIVMTSNIGSEHILDVSGDDTQYETMRNRVMDALRSHFRPEFLNRVDDTILFHALSRSEMSHIIRIQLKRVESLLRDQKISFEISPAACDFLVEKGYDPVYGARPLKRAIQREIENPLATKILENTFISGDTIYIDQDENGLSFTNKAPVKVSVTQITT

SEQ ID NO: 6928 - protein, 839 aa, Nostoc sp. PCC 7120
MLKSAYRHDAGDGKNAMFERFTEKAIKVIMLAQEEARRLGHNFVGTEQILLGLIGEGTGVAAKVLKSMGVNLKDARIEVEKIIGRGSGFVAVEIPFTPRAKRVLELSLEEARQLGHNYIGTEHLLLGLIREGEGVAARVLENLGVDLSKVRTQVIRMLGETAEVSATGQSGRTKTPTLDEFGSNLTQMATDNKLDPVVGRAKEIERVIQILGRRTKNNPVLIGEPGVGKTAIAEGLASRIANKDVPDILEDKRVVTLDIGLLVAGTKYRGEFEERLKKIMDEIRQAGNVILVIDEVHTLIGAGAAEGAIDAANILKPALARGELQCIGATTLDEYRKHIERDAALERRFQPVMVGEPSVDETIEILYGLRDRYEQHHKLKISDEALVAAAKLSDRYISDRYLPDKAIDLVDEAGSRVRLMNSQLPPAAKELDKELRQILKEKDDAVRSQDFDRAGELRDREMEIKAEIRAIAQSKTNASGTEGQEPVVTEEDIAHIVASWTGVPVNKLTESESEKLLHMEDTLHQRLIGQEDAVKAVSRAIRRARVGLKNPNRPIASFVFSGPTGVGKTELAKSLASYFFGSEEAMIRLDMSEYMERHTVSKLIGSPPGYVGYNEGGQLTEAVRRRPYTVVLFDEIEKAHPDVFNMLLQILEDGRLTDAKGRTVDFKNTLLILTSNIGSKVIEKGGGGIGFEFSEDQTETQYNRIRSLVNEELKQYFRPEFLNRLDEIIVFRQLSKLEVTEIADIMLKEVFGRLTEKGITLEVSDRFKGRLIEEGYSPSYGARPLRRAIMRLLEDSLAEEILSGRIKDGDVALIDIDENGNVQVTSQQRRELLPQGVES

SEQ ID NO: 6929 - protein, 814 aa, Nostoc sp. PCC 7120
MFEHFTSEAIKVIMLAQEEARRLGHNFVGTEQILLGLMGEGTGVAAKVLTEMGVTLKDARREVEKIIGRGSGFVPPEIPFTPKVKSLFEQSFREAHNLGNNYINTEHLLLGLTEAGEGVAAKVLQNLGVDLKSVRSAVIRRLGEDPTVVVGGGGSRRNQTPMMEEFGRNLTKLAKEGKLDPVVGRQKEIERTVQILGRRTKNNPVLIGEPGVGKTAIAEGLAQRIINQDVPDILQDKQVVSLDMGSLVAGTRFRGDFEERIKKIVEEVRSAGNIILVIDEIHTLVGAGGTEGGLDAANILKPALARGELQCIGATTLDEYRQYIERDAALERRFQPIMVGEPSVAETIDILYGLRGAYEQHHKVHISDEAVVAAAQLADRYISDRFLPDKAIDLIDEAGSRVRLRNSQISPNKELKRQLTDITKSKNEAVRLQDFDKAAKLRDEEIALETELQAATTGQTIKPVVDEEDIAQIVASWTGVPVNKLTESESELLLHLEDTLHKRLIGQEQAVTSVSRAIRRARVGLKSPNRPIASFIFSGPTGVGKTELAKALAAYFFGAEDAMIRFDMSEYMESHTVSKLIGSPPGYVGYDEGGQLTEAVRRRPYTVLLFDEIEKAHPDVFNMLLQLLDDGHLTDAKGRKVDFKNTLIILTSNIGSKVIEKGGGGLGFEFDNQAEASYNRIRNLVNEELKNYFRPEFLNRLDEVIVFTQLSRDEVKQIADIMLRDVASRLTEKGITLEVTERFKELVVTEGYNPSYGARPLRRAIMRLLEDSLAEVLLSGEITEGDTAIADVNDDGQVQIRQSEERELLLANVG

SEQ ID NO: 6930 - protein, 870 aa, Rhodobacter sphaeroides
MNLEKFTERSRGFLQAAQTIAMRESHQRLASEHLLKALMDDDQGLASNLIRRSGGEPARVAETVELTIAKLPKVSGDAQPFMDPGLVRVLDEAEKLAKKAGDSFVPVERILMALAMVASKAKDALDAGAVTAQKLNAAINDIRKGRTADTASAEEGYDALKKYARDLTQAARDGKIDPIIGRDDEIRRAMQVLSRRTKNNPVLIGEPGVGKTAIAEGLALRIVNGDVPESLKNKRLLSLDMGALIAGAKYRGEFEERLKAVLNEVTSAAGEIILFIDEMHTLVGAGKSEGAMDAANLIKPALARGELHCIGATTLDEYRKHVEKDAALARRFQPLMVEEPTVEDTISILRGIKEKYELHHGVKIADAALVAAATLSHRYITDRFLPDKAIDLVDEAASRLRMEVDSKPEELDALDRQILQAQIEAEALKKEDDAASKDRLAKLEKELSGMTERAAEMTAQWQAERDKLEAARDLKEQLDRARAELEQVKREGNLARAGELSYGVIPQIEKKLEEAEAREGDLLVSEAVRPEQIAEVVERWTGIPTSKMLEGEREKLLKMEEELGRRVIGQRAALRAVANAVRRARAGLNDERRPLGSFLFLGPTGVGKTELTKAVAEYLFDDDQAMVRIDMSEFMEKHSVARLIGAPPGYVGYDEGGVLTEAVRRRPYQVVLFDEVEKAHPEVFNVLLQVLDDGVLTDGQGRTVDFKQTLIILTSNLGAYALSQLPEGADPAPARAAVMEAVRGHFRPEFLNRLDEMVIFDRLSRDDMGQIVEIQLGLLGKRLATRKIGLELDAAAKQWLADEGYDPVYGARPLKRVIQRHLQDPLAEMILAGDVLDGSVVQVSAGADGLIIGDRVSSSRRERPQDAVVH

SEQ ID NO: 6931 - protein, 889 aa, Rhodobacter sphaeroides
MPRGSQETVKRKELVAKLNPTCLAAFSAAAQAAKARGNPYVELVHLIEALLAADRSDMALLMRAAGCDAGRLSADVARAVDALPRGASAVEEFSDHLFHAIREGWTFGSLRFGDDRVRSGYLLLGALRVPVLEALLMRISGAFGQVDAESLSETFRDLTQGSAEGDAAPPPARPGAADGSALARYATDLTARAREGRLDPVVGRDPEIRQIIDILMRRRQNNPILTGEAGVGKTAVVEGLALRLARGDVPPPLRPVTLWMLDLGLMQAGASMKGEFEKRLKSVIDEVHASDAPVILFIDEAHTLIGAGGAAGTGDAANLLKPALARGELRTIAATTWAEYKQHIEPDPALTRRFQVVRIEEPSEEAAIRMCRGVAAVLERHHRVEILDEAVGAAVRLSQRYLPARQLPDKAISLLDTACARVAVSQHATPAEVEDIDRRAQALALEAGILEREEAVGMDVTARRGEVEAARTAVAADRAAAEARWEAEKALVAEILELRARLRAEGDALDGTAAQAAEEAEPPKDDRAALLDRLRRCSRDLAEAQGERPLILPTVDRQAVASVVQDWTGIPMGRMLASRNERALGLADLLARRVVGQDHAMEAIASRIQTAQAGLGPPEKPLGVFLLCGPSGVGKTETALALAEQLHGGEQALITINMSEFQEAHTVSTLKGSPPGYVGYGKGGILTEAVRRKPYSVILLDEVEKAHPDVHEIFFQVFDKGRMDDSEGRQIDFRNTVILLTSNVGTDEIVEAAGQDLARVSATLRAPLLQVFPAALLGRMIVLPFLPLSDRMIAAIAGQKLEAIARRLKAGHGAELVLGEGVLETIRARCTEVESGGRMIDAILSGTLLPELSRKLLERQLAGAAFSRVTLTGGPAGFSYAFETEADHA

SEQ ID NO: 6932 - protein, 879 aa, Rhodopseudomonas palustris
MNVEKYTERVRGFIQSAQSLAMREGHQQFSPLHILKVLLDDSEGLAGGLIDRAGGNSRAILKATEEALGKMPKVSGSGAGQVYLAPATARAFDAAEKAAEKAGDSFVTVERLLLALSLDKDSEAGQLLTKGGVTPQNLNAAINALRKGRTADSATAENAYDALKKYARDLTQAARDGKLDPVIGRDEEIRRTIQVLSRRTKNNPVLIGEPGVGKTAIVEGLALRILNGDVPESLKDKKLLALDMGALIAGAKYRGEFEERLKAVLNEVTAAEGGIILFIDEMHTLVGAGKADGAMDASNLLKPALARGELHCIGATTLDEYRKHVEKDAALARRFQPVFVSEPTVEDTVSILRGLKDKYEQHHGVRIADSALVAAVTLSNRYITDRFLPDKAIDLMDEAAARLKMQVDSKPEELDSMDREIVRLKIEQEALKKETDPGSKARLVTLEKELADLEEKSAALTQRWSAEKNKLSDAQKLKSELDALRIELANAQRRGEYQRAGELAYGRIPELEKKIAEIEANENSGAMVEEAVTANHIAQVVSRWTGVPVDKMLEGEKEKLLRMEEQLGQRVVGQFEAVHAVSTAVRRARAGLQDPNRPMGSFMFLGPTGVGKTELTKALAEYLFDDETAMVRIDMSEFMEKHSVARLIGAPPGYVGYDEGGVLTEAVRRRPYQVILFDEIEKAHPDVFNVLLQVLDDGRLTDGQGRTVDFRNTLIVMTSNLGSEYLVNQPEGEDTGAVREQVMGMVRAHFRPEFLNRVDEIILFHRLQKSEMGRIVDIQFARLTKLLEDRKIVLDLDAAARDWLAEKGWDPAYGARPLKRVIQRSVQDPLAEMILEGSVKDGDHVAISAEGGVLTFNGKPPHTAEVEPFTGRPPKRMLN

SEQ ID NO: 6933 - protein, 826 aa, Chloroflexus aurantiacus
MRLERFTEKAQNAFHIAQEIMQEHQHSQLDVEHLFLAMLRQRDGLAARALARLNVDPHEVERRVERELEKLPKILSPYGMGSQVYITPRTQRLVKRAEEEANRLGDQYVGLDHLLIGLANERDGPSARILQSYQIDQERIYQVLMEIRGSQRSDDPSAESRYEILSKYSVDLTELAREDKLDPVIGREAEITRVIRILSRRTKNNPVLVGETGVGKTAIVEGLAQRIARGDVPPTLRDRKLLALDLAGMVAGSKFRGEFEERLKAVMDEVRNAKGRIILFIDELHTVVGAGAATGSIDASNMLKPALSRGEIQVIGATTIDEYRKHVEKDAALERRFSPVFVEEPDPETTVEMLRGLRKRYEEHHQLTISDEALRAAVQLSSRYINDRFLPDKAIDLIDEASAKLRIDIFSMPPELKAKEEELTRLQAEEEEAGARRDYERAALLRSRYLALQAQFEAERNEWLARNNLDEVVDDEDVAQIVSSWTGVPVSRMLETEREKLIHMEERLHERVIGQHEAIVALSDAIRRARSGLRDPRRPIGSFLFVGPTGVGKTELARALAEFMFDSEEAMTRVDMSEYQERHTVSRLIGAPPGYVGYDEGGQLTESIRRRPYQVVLFDEIEKAHRDVFNALLQVLDDGRLTDGQGRTVDFRNTIIIMTSNAGTEHLQGGGIGFNVGGKNAKTIDMREARKKVDEALRQTFRPEFLNRIDEIILFHPLSMDDLTRIVELQIADLVERLREQQIGLSLTQAAKEYLVQEGYNPVFGARPLRRTIQRLLETPISRELLRGMFRAGDQIEVDVENGQLVFHRGGILTMEEHRPAEPLDA

SEQ ID NO: 6934 - protein, 833 aa, Chloroflexus aurantiacus
MSDLYSKFTKRAKQVLQLAAEEARAFNHPYIGTEHILLGLIRESEGIAARVLDELGVKLPQARSAVEFIVGPGESTMVTDQELTARAQKVIKYAIEEANRLNHHYIGTEHLLLGLVRNGEGVATGVLDILGVSLEQVRNQVMRVLRHGTAGATAEGRTAPGTTPTQRQSKTPYLDALGTDLTEMAEQGRLDPIIGRQHEIERVIQILSRRTKNNPALIGEPGVGKTAIVEGLAQRIVQGDVPDSIKGKRVVTLDMGALVAGTKYRGQFEERLKRVIDEIKESRCILFIDEFHTIIGAGGAEGTLDAANILKPALSRGELQTIGATTLDEYRKYIERDAALERRFQPVMVDEPSIEDTIQILRGIKSRYEDFHQLQISDEAIRAAAVLSARYVPDRQLPDKAIDLIDEAASRVRMYRSATPPRLRDALRGLEALRKEREAALEDQQFELANDLREREERMLSRIQEIEAELGTRSDERYERPYVTEEDIAEVVGMWTGVPVTRLTGNETQRLMQMEEFLHSRIVGQHEAIVTISKAVRRARAGLKDPKRPIGSFIFLGPTGVGKTELAKALAEFMFGTEEALIKIDMSEFQERHTTSRLVGSPPGYIGYGEGGQLTDAVRRKPYSVVLFDEIEKAHPDAFNLLLQVLEDGHLTDGKGRRVDFRNTIIIMTSNVGTEHIRRASRIGFGSNAAEIDQNDMRRKVDEALRMLFRPEFLNRIDATIIFHPLTTEEIQSITRLMLKRVQTQLDEHQIKLEVQPDALEFLARRGYDPAFGARPLRRVITNLIEDPLAEGLLSGQFRDGDTVIVDTFEDQLRLRSQREIDQEHVEESPALA

SEQ ID NO: 6935 - protein, 181 aa, Chloroflexus aurantiacus
MHQQKPVAVRGGVMTEERTMKLAIRGDKNPLDLVEKRLREQIFGQERAIESVIRVLNRSRFGFSAGNSRRPRATLLFLGPTGVGKTATARALAELLRPDGSAFLKIDCSLFSQGHEVSALVGAPPSYVGRDQKPLLNPDIIEQENSVVLFDEIEKGQPELWNLLLQVMEDGEILLLNGGDG

SEQ ID NO: 6936 - protein, 839 aa, Synechococcus sp.
MPVLESAYRHAGREAMFERFTEKAIKVIMLAQEEARRLGHNFVGTEQILLGLIGEGTGVAAKVLKSMGVNLKDARIEVEKIIGRGSGFVAVEIPFTPRAKRVLELSLEEARQLGHNYIGTEHLLLGLIREGEGVAARVLENLGVDLSKVRTQVIRMLGETAEVSTGGGQGRTKTPTLDEFGSNLTQQAADGKLDPVVGRQKEIERVIQILGRRTKNNPVLIGEPGVGKTAIAEGLAQRIATGDIPDILEDKRVVTLDIGLLVAGTKYRGEFEERLKKIMDEIRSAGNVILVIDEVHTLIGAGAAEGAIDAANILKPALARGELQCIGATTLDEYRKHIERDAALERRFQPVMLGEPSVDDTIEILRGLRERYEQHHKLKIADEALEAAAKLADRYISDLFLPDKAIDLIDEAGSRVRLMNSQLAPAAKELDKELRQVLKDKDDAVRSQDFDKAGELRDREMEIKTQIRSIAQSKKADGTSSTDDSPIVTEEDIAHIVASWTGVPVNKLTESESTKLLNMEETLHSRLIGQDEAVKAVSRAIRRARVGLKNPNRPIASFIFSGPTGVGKTELTKALAAYFFGSEEAMIRLDMSEYMERHTVSKLIGSPPGYVGYNEGGQLTEAVRRRPYTVVLLDEIEKAHPDVFNLLLQLLEDGRLTDAKGRTVDFKNTLIILTSNIGSKVIEKGGGGLGFEFSGVDEAENQYNRIRSLVNEELKQYFRPEFLNRLDEIIVFRQLNKEEVKEIADIMLREVFGRMLEKGISLSVTEKFKDRLVEEGYNPSYGARPLRRAIMRLLEDSLAEEFLSGKLREGDTAVVDIGEEGKVQVLAQEKRELLPQAVD

SEQ ID NO: 6937 - protein, 883 aa, Synechococcus sp. PCC 7942
MGSSLELLTMQPTNPNQFTEKAWEAIVRTTDVAKQAQHQQIESEHLFLALLQEPGLALNILKKAGLEAAQLQQFTERFIARQPKVSGGNQSVYLGRSLDQLLDQADQFRKDFGDEFISVEHLILSFPRDSRFGRLLSQEFKVDEKQLRQIIQQIRGSQKVTDQNPEGKYEALEKYGRDLTEMARRGKLDPVIGRDDEIRRTIQILSRRTKNNPVLIGEPGVGKTAIAEGLAQRIINGDVPQSLKDRRLIALDMGALIAGAKFRGEFEERLTAVLKEVTDSEGIIILFIDEMHTVVGAGAVQGSMDAGNLLKTMLARGELRCIGATTLGKYRQYIEKDAALERRFQQVFVDQPTVEDTISILRGLKERYEVHHGVRISDNALVAAAVLSTRYISDRFLPDKAIDLVDESAARLKMEITSKPEELDEIDRKILQLEMERLSLQKESDLASQERLQRLEKELADLKEEQRSLSSQWQAEKDVITDIQSVKEEIDQVNLLIQQAERDYDLNKAAELKYGKLTELQRKLNEMEGGLATTHTSGKSLLREEVTEVDIAEIISKWTGIPVSKLVESEMQKLLNLDEELHQRVIGQEEAVSAVADAIQRSRAGLSDPKRPIASFIFLGPTGVGKTELAKALAAYLFDTEDAMIRIDMSEYMEKHAVSRLIGAPPGYVGYDEGGQLTEAVRRRPYSVILFDEIEKAHPDVFNVMLQILDDGRVTDSRGRTVDFKNTILILTSNIGSQYILDVAGDDSRYEEMRSRVTEALRANFRPEFLNRVDETIIFHSLRKDQLQQIVRIQLHRLEERLSDRKLSLSMSPEAIDFLVEIGFDPVYGARPLKRVIQRELETAIAKAILRGQFSDGDTIQVAVENERLVFKAIATPTAVPLS

SEQ ID NO: 6938 - protein, 895 aa, Synechococcus sp. PCC 7942
MQPTDPNRFTDQAWDAIVESQTVARQLRQQQLEVEHVLLALLDQESGVAAEILAKAGVAVANLRQPLEDFARRQPRNASGTQLYLGRGLDRLLDLAERARELWQDEFIGVEHLLMGFVEDDRIGRRLAQGLKLDAKTLETTIQALRSPAADEAEAEESEPSYPFLSKYGRDLTALAEQEKLDPVIGRDLEIRRVIQVLSRRSKNNPVLIGEPGVGKTAIAEGLAQRIVAGEVPDSLKQRRLISLDMGSLIAGAKYRGEFEERLRAVLHEVTHSDGQMVLFIDELHTVVGAGAGQQGSAMDAGNLLKPMLARGELRCIGATTTDEYRRTIEKDPALERRFQQVYVSQPSVEDTIAILRGLKERYEGHHGVKITDGALMAAAKLSHRYISDRFLPDKAIDLIDEASAQLKMEITSKPSELEDLERRLLQLEMEQLSLSGENGQASVHSDRLQQIQTELQTLQEQQARLNQQWQQEKQLLEELGRLQEEEETLRQQVNQAEREHDLNKGAELKFGQLEALQQQRQAIEEQIQALHANGQTLLREQVEEADIAEIVARWTNIPVQRLLESERQKLLQLESFLHQRVIGQDEAVVAVAAAIRRARAGMKDPSRPIGSFLFLGPTGVGKTELARALANCLFDAEDALIRFDMSEYMEKNSISRLIGAPPGYIGYEEGGQLSEAIRRHPYAVVLFDEVEKAHPDVFNLLLQVLDDGRITDSQGRTIDFCNAVIVMTSNIGSQFILEMGEEEASLDAVELKVLGALRQHFRPEFLNRIDDTILFQPLSRGQLQQIVDIQLQRLKRLLAEQAIALNVTPAAAANLADRGYDPVYGARPLKRAIQRLIENPVASLILEQQFDAGDALIVDVDAEGQLQFQVSKPVTATVVEPDDSPAIAVEAIPS

SEQ ID NO: 6939 - protein, 872 aa, Synechocystis sp. PCC 6803; identical to SEQ ID NO: 426

SEQ ID NO: 6940 - protein, 898 aa, Synechocystis sp. PCC 6803
MQPTDPTKFTEQAWDAIVKSQEVARRYKNTNLEVEHILLALLEQDMGLAARIFQRAAVDGEGLRQQLEIFTNRQPKQAYVEQLYLGRSLDVMLDRADAARSSWEDKFISVEHLLVGFAEDDRVGRKTLRAFNLDPQDLELAIKAIRGSQKVTEPNQEEKYEALDKYGRDLTEQARQGKLDPVIGRDEEIRRVIQVLSRRSKNNPVLIGEPGVGKTAIAEGLAQRIINGDVPESLKNRQLISLDMGSLIAGAKYRGEFEERLRSVMKEVTNSDGQIILFIDEVHTVVGAGGREGSGSMDAGNLLKPMLARGELRCIGATTLDEYRKNIEKDPALERRFQQVYVKQPSVDDTISILRGLKEKYEVHHGVKITDSALVAAATLSHRYIQDRFLPDKAIDLVDEAAARLKMEITSKPVELEDIDRRLMQLQMEKLSLEGEEKRPGLGADKSSKERLEKIQQEITELEGQQQELSGQWLSEKQMLEEINTLKEKEQELRLQVEKAERATDWEKAAKIKYGELEVLQHDIEEKESKLLEIQGSGNTLLREQVTESDIAEIVAGWTGIPMNRLMETERQKLLQLEGHLHQRVIGQKEAVAAVSAAIRRARAGMKDPSRPIGSFLFMGPTGVGKTELARALAGFLFDSEEAMVRIDMSEYMEKHAVSRLIGAPPGYVGYEEGGQLSEAVRRRPYSVVLLDEVEKAHLDVFNILLQVLDDGRITDSQGRVVDFRNTIIVMTSNIGSDHILSLSADDADYDKMQKQVLQSLRKHFRPEFLNRIDDLIIFHTLKRDELRRIVVLQIKRIEKLLDEQKITLSLSDAALDHIVSAGYDPTYGARPLKRAIQRQLENPIATKILENTFVAGDKILIDCVDGQLIFDKEIEPTTLPEEPEENITAVEVEVLSS

SEQ ID NO: 6941 - protein, 821 aa, Synechocystis sp. PCC 6803
MFERFTEKAIKVIMLAQEEARRLGHNFVGTEQILLGLIGEGTGVAAKVLKSMGVNLKDARIEVEKIIGRGSGFVAVEIPFTPRAKRVLELSLEEARQLGHNYIGTEHLLLGLIREGEGVAARVLENLGVDLSKVRTQVIRMLGETAEVAAGGGSGGRTKTPTLDEFGSNLTQMAAEGKLDPVVGRQKEIERVIQILGRRTKNNPVLIGEPGVGKTAIAEGLAQRIANKDIPDILEEKRVVTLDIGLLVAGTKYRGEFEERLKKIMDEIRQAGNIILVIDEVHTLIGAGAAEGAIDAANILKPALARGELQCIGATTLDEYRKHIERDAALERRFQPVMVGEPSVEETIEILYGLRERYEQHHKLKILDEALEAAAKLSDRYISDRFLPDKAIDLIDEAGSRVRLINSQLPPAAKELDKELRQILKEKDDAVRNQDFEQAGELKDREDEIKKQIRAIASSKKAEGDNGEPEVTSEEIAHIVASWTGVPVNKLTESESEKLLHMEDTLHQRLIGQEDAVKAVSRAIRRARVGLKNPNRPIASFIFSGPTGVGKTELTKALAAYFFGSEEAMIRLDMSEFMERHTVSKLIGSPPGYVGYNEGGQLTEAVRRRPYTVVLFDEIEKAHPDIFNMLLQILEDGRLTDAKGRTVDFKNTLLIMTSNIGSKVIEKGGGGLGFDFADDQAESQYNRIRSLVNEELKNYFRPEFLNRLDEIIVFRQLNKEEVKEISEILLRDVFARLVEKEISLQVTDKFKERIVEEGFNPAYGARPLRRAIMRLLEDVLAEEILSGRLKEGSQALVDIGEDNQVVVIPGETRELIAPGVE

SEQ ID NO: 6942 - protein, 845 aa, Chlamydophila pneumoniae AR39
MFEKFTNRAKQVIKLAKKEAQRLNHNYLGTEHILLGLLKLGQGVAVNVLRNLGIDFDTARQEVERLIGYGPEIQVYGDPALTGRVKKSFESANEEASLLEHNYVGTEHLLLGILHQSDSVALQVLENLHIDPREVRKEILKELETFNLQLPPSSSSSSSSSRSNPSSSKSPLGHSLGSDKNEKLSALKAYGYDLTEMVRESKLDPVIGRSSEVERLILILCRRRKNNPVLIGEAGVGKTAIVEGLAQKIILNEVPDALRKKRLITLDLALMIAGTKYRGQFEERIKAVMDEVRKHGNILLFIDELHTIVGAGAAEGAIDASNILKPALARGEIQCIGATTIDEYRKHIEKDAALERRFQKIVVHPPSVDETIEILRGLKKKYEEHHNVFITEEALKAAATLSDQYVHGRFLPDKAIDLLDEAGARVRVNTMGQPTDLMKLEAEIENTKLAKEQAIGTQEYEKAAGLRDEEKKLRERLQSMKQEWENHKEEHQVPVDEEAVAQVVSLQTGIPSARLTEAESEKLLKLEDTLRRKVIGQNDAVTSICRAIRRSRTGIKDPNRPTGSFLFLGPTGVGKSLLAQQIAIEMFGGEDALIQVDMSEYMEKFAATKMMGSPPGYVGHEEGGHLTEQVRRRPYCVVLFDEIEKAHPDIMDLMLQILEQGRLTDSFGRKVDFRHAIIIMTSNLGADLIRKSGEIGFGLKSHMDYKVIQEKIEHAMKKHLKPEFINRLDESVIFRPLEKESLSEIIHLEINKLDSRLKNYQMALNIPDSVISFLVTKGHSPEMGARPLRRVIEQYLEDPLAELLLKESCRQEARKLRATLVENRVAFEREEEEQEAALPSPHLES

SEQ ID NO: 6943 - protein, 845 aa, Chlamydophila pneumoniae CWL029
MFEKFTNRAKQVIKLAKKEAQRLNHNYLGTEHILLGLLKLGQGVAVNVLRNLGIDFDTARQEVERLIGYGPEIQVYGDPALTGRVKKSFESANEEASLLEHNYVGTEHLLLGILHQSDSVALQVLENLHIDPREVRKEILRELETFNLQLPPSSSSSSSSSRSNPSSSKSPLGHSLGSDKNEKLSALKAYGYDLTEMVRESKLDPVIGRSSEVERLILILCRRRKNNPVLIGEAGVGKTAIVEGLAQKIILNEVPDALRKKRLITLDLALMIAGTKYRGQFEERIKAVMDEVRKHGNILLFIDELHTIVGAGAAEGAIDASNILKPALARGEIQCIGATTIDEYRKHIEKDAALERRFQKIVVHPPSVDETIEILRGLKKKYEEHHNVFITEEALKAAATLSDQYVHGRFLPDKAIDLLDEAGARVRVNTMGQPTDLMKLEAEIENTKLAKEQAIGTQEYEKAAGLRDEEKKLRERLQSMKQEWENHKEEHQVPVDEEAVAQVVSLQTGIPSARLTEAESEKLLKLEDTLRRKVIGQNDAVTSICRAIRRSRTGIKDPNRPTGSFLFLGPTGVGKSLLAQQIAIEMFGGEDALIQVDMSEYMEKFAATKMMGSPPGYVGHEEGGHLTEQVRRRPYCVVLFDEIEKAHPDIMDLMLQILEQGRLTDSFGRKVDFRHAIIIMTSNLGADLIRKSGEIGFGLKSHMDYKVIQEKIEHAMKKHLKPEFINRLDESVIFRPLEKESLSEIIHLEINKLDSRLKNYQMALNIPDSVISFLVTKGHSPEMGARPLRRVIEQYLEDPLAELLLKESCRQEARKLRATLVENRVAFEREEEEQEAALPSPHLES

SEQ ID NO: 6944 - protein, 883 aa, Plectonema boryanum
  unsure (1)..(883): unsure at all Xaa locations
MHDRHRRGNTMQPTNSEKFTEKVWEAIYRTQEMYKQAQQQQIETEHLMKALLEQDGLAISIFNKLAVPVDRVRDRTDDFIRRQPKVSGSGTSVYWGRRADALLXRAEEYRKQFEDSFISIEHLLLGYAQDSRFGKALLSEFRYPDEAKLRNAIEQVRGNQKVTDQTPENKYESLEKYGRDLTQYAREGKLDPVIGRDDEIRRTIQILSRRTKNNPVLIGEPGVGKTAIAEGLAQRILSGDVPQSLKDRKLIALDMGALIAGAKYRGEFEERLKAVLKEVTDSRGNIILFIDEIHTVVGAGATQGAMDAGNLLKPMLARGELRCIGATTLDEYRKYIEKDAALERRFQQVFVDQPSVEDTISILRGLKERYEVHHGVKISDSALVAAATLSTRYISDRFLPSKAIDLVDEAAAKLKMEITSKPEELDEVDRKVLQLEMERLSLQKENDAGSRDRLERLERELADFKEDQSKLNAQWQAEKSVITDLQKLKEEIDRVNLEIQQAERDYDLNRAAELKYGKLNELNRKVEETESQLSQIQKSGATLLREEVLESDIAEIISKWTGIPVSKLVESEMQKLLQLDDVLHQRVIGQDEAVTAVSDAIQRSRAGLSDPNRPTASFIFLGPTGVGKTELAKALAAFLFDTEEAMVRIDMSEYMEKHSVSRLIGAPPGYVGYEEGGQLTEAVRRRPYSVILFDEIEKAHPDVFNVMLQILDDGRVTDSQGRTVDFKNTIIIMTSNIGSQYIFEYGGDDDRYEEILSRVMEAMLSNFRPEFLNRIDEIIIFHSLQKAQLREIVKIQTHRLESRLARKMSLKLSDAALDFLAEGFDPVYGARPLKRAIQRELETTIAKEILRSNFTEGDTIFVDVGETERLEFKRLPSEVLTTQ

SEQ ID NO: 6945 - protein, 816 aa, Thermoanaerobacter tengcongensis
MAMFGRFTERAQKALYLAQEEARSFYHNYVGTEHILLGLLKEDEGIAARVLKKLGVTYEATREKVLSLIGMGNIPGDVVGYTPRAKRVLELSLSEARRFNTSYVGTEHILLGLLREGEGVAVRILMEQGIDFNRVREEIVKMLSEEPAAGPSKVSKAKNTNTPTLNQFGRDLTDLARDGKLDPVIGREKEIERVIQILSRRTKNNPVLIGEPGVGKTAIVEGLAQKIVEGEVPEILKDKRVVTLDLASLVAGTKYRGEFEDRLKTVINEVIKAGNVILFVDEMHTLIGAGAAEGAIDASNILKPALARGEIQVIGATTLDEYRKYVERDPALERRFQPIMVEEPTVEETIEILKGLRDKYEAHHRVKITDEALEAAAKLSHRYITDRFLPDKAIDLIDEAASRVRLKTVTAPPEIKELEDKINDLIKEKEEAIRTQEYEKAAKIRDEEQKLREQLEELKAKWQQNSLSEEKSVGPEEIAQVVSMWTGIPVKKLAEEESERLLHLEEILHERVIGQDEAVEAVAKAIRRARVGLKDPKRPIGSFIFLGPTGVGKTELSKALAEALFGDENAMIRLDMSEYMERHTVSKLIGSPPGYVGFEEGGQLTEKVRRRPYSVILLDEIEKAHPDVFNILLQILEDGRLTDSKGRTVDFKNTVIIMTSNVGAELLKKQTTLGFMPQEKEDKASFEKIKETLMAELRKTFRPEFLNRVDEIIVFHPLSKEHIEKIADIMIKELNKRLEENNIKLEFTPEAKEEIIKQGYDPNYGARPLRRVIQRIVENQLSELMLQGEVKPGDELIVTAEDGKIKFVKKDVVQKA

SEQ ID NO: 6946 - protein, 114 aa, Paracoccidioides brasiliensis
EDQRDSLNKYTVDLTERALAGKLDPVIGRDDEIRRTVQVLSRRTKNNPVLIGEPGVGKTAIVEGLAQRIVNGEVPESLKGKRVLSLDLGSLLAGAKYRGEFEERLKAVLKDLAK

SEQ ID NO: 6947 - protein, 671 aa, Burkholderia fungorum
MVIEIGGLLMRIDKLTTKFQEALADAQSLAVGHDNQYIEPVHVLSALVAQQDGSARSLLSRAGVHVQALQTALGDAITRLPQVQGTDGNVQIGRDLTGLLNQADKEAQKLNDTFIASEMFLLAVADDKGEAGRLARQHGLSRKSLESAIAAVRGGSQVHSQDAESQREALKKYTVDLTERARAGKLDPVIGRDDEIRRSIQILQRRTKNNPVLIGEPGVGKTAIVEGLAQRIVNGEVPETLKGKRVLSLDMAALLAGAKYRGEFEERLKAVLNDIAKDEGQTIVFIDEIHTMVGAGKAEGAMDAGNMLKPALSRGELHCVGATTLDEYRKYIEKDAALERRFQKVLVDEPTVEATIAILRGLQEKYELHHGVDITDPAIVAAAELSHRYITDRFLPDKAIDLIDEAASKIKMEIDSKPEEMDRLDRRLIQLKIEREAVKKEKDEASQKRLQLIEEEIERLNREYSDLDEIWTAEKAAVQGSAQLKEEIEKTRAEITRLQREGKLEKVAELQYGKLPGLEAQLKEVTKAEASEQNNPTRPRLLRTQVGAEEIAEVVSRATGIPVSRMMQGEREKLLQIEEKLHARVVGQDEAISAVADAIRRSRAGLSDPNRPYGSFLFLGPTGVGKTELCKALASFLFDSEDHLIRIDMSEFMEKHSVARLIGAAGIRARR

SEQ ID NO: 6948 - protein, 961 aa, Burkholderia fungorum
MAEHLCELCGVRPATIRVAVIQGGRRRQLDVCDYHYAQLTRHQRQVSPLESLFRGGLFEGLLDSGMDGSGPEPAATRHDGPVSKGVDLQQHFSDQAKEILQRAAERAVQFGRHEVDTEHVLYELVESEAVQRILSALKISASDLQKHIEANAPKGHATSKAPQGEISVSPRLKSALERAVIASREFGQNYVGPEHILTGLAEVTDSFAGDLLMKYGLSSHQLRQQTLKQAGQEEAAQAPSNTPQLDKYSRDVTRLAREGKLDPVIGRSKETETLVEVLARRKKNNPVLIGEPGVGKTAIVEGLAQRMISGDVPETLREKRLIELNVNSLVAGSKYRGEFEERVRQVMDEIAAHKDQLVLFVDEVHTIVGAGQGGGEGGLDIANVFKPPMARGELNLIGATTLAEYQKYIEKDAALERRFQPVLVGEPSVEQTIGILRGLRDRLEAHHKVTILDEACVAAAELSDRYVTGRFLPDKAVDLIDQAAAREHLSSTSRPAEVLELESEIAQIRREQEYAASHKQFERATALGEQLSGKQTRLDDATQAWKRRVSTSTAEVTRTLVAEIVAKMTGIPVADLTQEEKTRLLQMEDRLHRRVIGQEEAISAVSDAVRRSRAGLQARHQPLAVFLFLGPTGVGKTELAKALAEVVFGDEDAIVRIDMSEYMERHAVARLIGAPPGYVGYDEGGQLTERVRRRPHSVILLDEIEKAHPDVYNVLLQVFDDGRLTDGKGRVIDFANTLIIATSNLASDVIMGTPRKRPGFIAADNDLAADKGARKDRQPDGVREGVMTVLRSHFRPEFLNRIDEIIIFESLNADQIRSIVRLQLDKVAHIAKSQDIDIVFDDSIVDQLAKEAYRPEYGARELRRRIRQVIENPLAKQMLDGAVREGNRVVCRFDPLADDTVFELGEAPQQELAGTTQQQDQKDPEAGNGAADAGPAAKPARKRASPARKRGNTDGGDHAAG

SEQ ID NO: 6949 - protein, 916 aa, Burkholderia fungorum
MAISRQALFGKLGTTLYRSIESATAFCKLRGNPYIELVHWLHQLLQQPDSDLHRLVRHCGIERETLDRDMARALAALPAGASSISDFSHHVELAVERAWVLATLSFNDRRIRSAWLVAALVQTPELRRVLLSISPAFGKLSVVGLDEALPAYMENSPEAAEAPYDNSNFSTAVPGEASHALPAQSKGSPLEQFCTDLTVRAHSGEIDPVVGRELEIRTMIDVLLRRRQNNPLLTGEAGVGKTAVVEGLACAIATGNVPPRLVGVRLLSLDVGALLAGASMKGEFELRLRGVLEAALKSAVPVILFVDEIHTLIGAGGQAGTGDAANLLKPALARGAIRMIGATTWAEYKRHIEKDAALTRRFQVLQVRQPQEPAAIDMVRGLANTFSRHHGVVVRDQAIRAAVRLSHRYIPSRQLPDKAISLLDTACARVALSQHAPPRELQDARQRVLAARVESELLVAESRIGLDTASALAAARTRIGELVAVEERIEARWKAQLAAAQALLAARDAALGADHGAPHTGANSDACASPDSLKDLERALTQLQGDAPLVFPEVSEAIVAEVVSDWTGIPVGRMVTDEVAAVQSLPATLEARVIGQPDALRQIGERVQTARAGLTDPKKPLGVFLLAGPSGVGKTETALALAEALYGGEQNLITVNMSEYQEAHTVSGLKGAPPGYVGYGEGGVLTEAVRRRPYSVVLLDEIEKAHRDVHEMFFQVFDKGYMEDGDGRYIDFRNTTILLTSNAGSELIASLCADAPLPPDAEGLREALTPALLNAFPAAFLGRVTVVPYRPLAHESLARIVRLHLDRVVTRMAQVHDIALAYSGQVVDYIVGRCLVQETGARVLIGFIEQHVLPRLSALWLDALASKQPITRIEIGVVDASAPPTAALAFPCTYAHAPAMPAAAATPSTLSVAQVD

SEQ ID NO: 6950 - protein, 335 aa, Enterococcus faecium
MIKLEIDELVQEKEAAIQKQDFENAAQLRRQEKALRKKLQKVSAIEAKQEQGYSDRVTEEDVATVVSEWTGVPLQQLEKKESERLLELEGLLHERVVGQDEAVKAVSRAIRRARSGLKDPDRPIGSFMFLGPTGVGKTELAKALSEVMFGSEDALIRVDMSEFMEKYSTSRLIGSPPGYVGYDEGGQLTEKIRQKPYSVILLDEVEKAHPDVFNLLLQVLDDGHLTDSKGRKVDFRNTIMIMTSNIGATQIREEKNVGFNVQDVTKDHKAMQKRILEELKKAFRPEFLNRIDETVVFHSLSKDEIHTIVQIMSKAIIKRLKEQDIQVKITPSASM

SEQ ID NO: 6951 - protein, 358 aa, Enterococcus faecium
MNIEKMTTTLQEAIAEAQQIAVTRKHQDIDIAHVWKIFLQSNHFGRNFYTDAGLDVESFEHEIDRLLDEYPVVSGGNVQYGQNLSQNFFRLLNEADQIRESFGDEFLSTEVVILALMKLKNYPLTVYLNKNGLSEKELRKNIEEMRGGERVTSQNQEEQYKALEKYGVDLVQQVKSGKMDPIIGRDEEIRDVIRILSRKTKNNPVLIGEPGVGKTAIVEGLAQRIVRKDVPENLKDKTIFSLDMGALIAGAKFRGEFEERLKAVLKEVKKSDGRILLFIDEIHNIVGAGKTEGSMDAGNLLKPMLARGELHLIGATTLDEYRQYMEKDKRWNVAFKGISQRTNSGRYDQYSAWIKRTF

SEQ ID NO: 6952 - protein, 450 aa, Enterococcus faecium
MHLYATVNGQRTQLDYCQSCYQKIKNQQNGGLTNMAQNDPFGFGSLDDLFRSMSRQMQQQGNYEQTPPTQFGGNNNFNGGQPPQGNTEGLLGEYGINITEQARQGDIDPVIGRDDEIKRVIEILNRRTKNNPVLIGEPGVGKTAVVEGLAQKIVDGDVPQKLMDKEVIRLDVVSLVQGTGIRGQFEERMQKLIEEIRQAENVILFIDEVHEIVGAGSAGDGNMDAGNILKPALARGELQMVGATTLNEYRIIEKDAALERRMQPVRVDEPTVEETISILKGLQKRYEDYHHVKYTDEAIEAAATLSNRYVQDRFLPDKAIDLLDETGSKKNLTIQIVDPKTIEKKLQEAEEQKVLASREEDFEKAAYYRDQINKLQKMKERQLTEEETPVITEKDMEKIVEQRTGIPVGELKEKEQTQLKNLADDLKAHVIGQDNAVDRVAKAIRRNRVD

SEQ ID NO: 6953 - protein, 244 aa, Enterococcus faecium
MIRFDMSEYMEKHSVSKLIGSPPGYVGYEEAGQLTEKVRRNPYSLVLLDEVEKAHPDVLHMFLQILDDGRLTDAQGRTVSFKDTIIIMTSNAGTGKVEANVGFGAAREGVTRSVLNQLNNYFTPEFLNRFDGIIEFSALSKENLMTIVTLMLDDVNQMLAAQQLHIEVPTNVKEKLVDLGYDPSMGARPLRRTIQEQIEDGIAEFYLDHPSIHELKAKLDKDGKIIVTSKPERLAKESAEETAE

SEQ ID NO: 6954 - protein, 111 aa, Enterococcus faecium
MKRLIQILSRRTKNNPVLVGEPGVGKTAIAEGLAQKIILGEVPEDMQEKRLMMLDMGSLVAGTKYRGEFEDRMKKVIDEIYNDGQVILFIDELHTLIGAGGAEGAMMLRIS

SEQ ID NO: 6955 - protein, 169 aa, Enterococcus faecium
MKLIVYWMSIQLFLVETSIWTNLSQNFFRLLNEADQIRESFGDEFLSTEVVILALMKLKNYPLTVYLNKNGLSEKELRKNIEEMRGGERVTSQNQEEQYKALEKYGVDLVQQVKSGKMDPIIGRDEEIRDVIRILSRKTKNNPVLIGEPGVGKTASLKGLLNVSYARCA

SEQ ID NO: 6956 - protein, 66 aa, Enterococcus faecium
MVRIDMSEYMEKHAVSRLVGAPPGYVGYEEGGQLTEAVRRNPYTSSCWMKSKKRIPMSSISCYSPR

SEQ ID NO: 6957 - protein, 748 aa, Lactococcus lactis subsp. cremoris
MLCQNCNINEATIHLYTSVNGQKKQIDLCQNCYQIMKSGGQEALFGAGNASNGNSDEPFNPFNDIFSALQGQDFNGAASNQTPPTQTGGRGPRGPQNPRAKQPKGMLEEFGINITESARRGEIDPVIGRDEEIKRVIEILNRRTKNNPVLIGEPGVGKTAVVEGLAQKIVDGDVPQKLQNKEVIRLDVVSLVQGTGIRGQFEERMQKLMDEIRKRNDVIMFIDEIHEIVGAGSAGDGNMDAGNILKPALARGELQLVGATTLNEYRIIEKDAALERRMQPVKVDEPSVDETITILRGIQARYEDYHHVKYTDEAIEAAAHLSNRYIQDRFLPDKAIDLLDESGSKKNLTLKFVDPEDINRRIADAESKKNEATKAEDFEKAAHFRDQISKLRELQKQEVTDEDMPVITEKDIEQIVEQKTQIPVGDLKEKEQTQLINLADDLKAHVIGQDEAVDKISKAIRRSRVGLGKPNRPIGFFLFVGPTGVGKTELAKQLAKELFGSSESMIRFDMSEYMEKHSVAKLIGAPPGYVGYEEAGQLTERVRRNPYSLILLDEIEKAHPDVMHMFLQILEDGRLTDAQGRTVSFKDSLIIMTSNAGTGKVEASVGFGAAREGRTKSVLGQLGDFFSPEFMNRFDGIIEFSALSKENLLKIVDLMLDEVNEQIGRNDIHLSVTQAAKEKLVDLGYNPAMGARPLRRIIQENIEDSIADFYIEHPEYKQLVADLIDDKIVISNQTQETAETTDEEVPAE

SEQ ID NO: 6958 - protein, 816 aa, Lactococcus lactis subsp. lactis
MKFENIKYTPTLDRILEKAEEYAHQYQYGTIESAHLLAAMATTSGSIAYSLLAGMNVDSSDLLIDLEDLSSHVKVKRSTLRFSPRAEEVMTAASFLAIHNNSEAVGTEHLLYALLQVEDGFGLQLLKLQKINIVSLRKELEKRTGLKVPESKKAVTPMSKRKMAKGVAENSTTPTLDSVSSDLTEEARLGKLDPMIGREAEIDRLIHILSRRTKNNPVLVGEPGVGKSAIIEGLAQRIVNGQVPIGLMNSRIMALNMATVVAGTKFRGEFEDRLTAIVEEVSSDPDVIIFIDELHTIIGAGGGMDSVNDAANILKPALARGDFQMVGATTYHEYQKYIEKDEALERRLARINVDEPSPDEAIAILQGLREKFEDYHQVKFTDQAIKSAVMLSVRYMTSRKLPDKAIDLLDEAAAAVKISVKNQQTKRLDLEKELTEAQEELSEAVIKLDIKASRTKEKAVEKIADKIYKFSVKEDKRQEVTDQAVVAVASTLTGVPITQMTKSESDRLINLEKELHKRVVGQEEAISAVSRAIRRARSGVADSRRPMGSFMFLGPTGVGKTELAKALADSVFGSEDNMIRVDMSEFMEKHSTSRLIGAPPGYVGYDEGGQLTERVRNKPYSVVLLDEVEKAHPDVFNIMLQILDDGFVTDTKGRKVDFRNTIIIMTSNLGATALRDDKTVGFGAKNITADYSAMKSRILEELKRHYRPEFLNRIDENIVFHSLESQEIEQIVKIMSKSLIKRLAEQDIHVKLTPSAVKLIAEVGFDPEYGARPLRKALQKEVEDLLSEQLLSGEIKAGNHVSIGASNKKIKIAQIV

SEQ ID NO: 6959 - protein, 748 aa, Lactococcus lactis subsp. lactis
MLCQNCNINEATIHLYTSVNGQKKQIDLCQNCYQIMKSGGQEALFGAGNASNGNSDEPFNPFNDIFSALHGQDFNGAASTQTPPTQTGGRGPRGPQNPRAKQPKGMLEEFGINITESARRGEIDPVIGRDEEIKRVIEILNRRTKNNPVLIGEPGVGKTAVVEGLAQKIVDGDVPQKLQNKEVIRLDVVSLVQGTGIRGQFEERMQKLMDEIRKRNDVIMFIDEIHEIVGAGSAGDGNMDAGNILKPALARGELQLVGATTLNEYRIIEKDAALERRMQPVKVDEPSVDETITILRGIQARYEDYHHVKYTDEAIEAAAHLSNRYIQDRFLPDKAIDLLDESGSKKNLTLKFVDPEDINRRIADAETKKNEATQAEDFEKAAHFRDQITKLRELQNHEVSDDEIPVITEKDIEQIVEQKTHIPVGDLKEKEQTQLINLADDLKAHVIGQDEAVDKIAKAIRRSRVGLGKPNRPIGSFLFVGPTGVGKTELAKQLAKELFGSSESMIRFDMSEYMEKHSVAKLIGAPPGYVGYEEAGQLTERVRRNPYSLILLDEIEKAHPDVMHMFLQILEDGRLTDAQGRTVSFKDSLIIMTSNAGTGKVEASVGFGAAREGRTKSVLGQLGDFFSPEFMNRFDGIIEFSALSKENLLKIVDLMLDEVNEQIGRNDIHLSVTQAAKEKLVDLGYNPAMGARPLRRTIQENIEDSIADFYIEHPEYKELVADLIDDKIVISNQAQETAETTDEEVPAE

SEQ ID NO: 6960 - protein, 763 aa, Lactococcus lactis subsp. lactis
MKLISLLFKQISVVILIDSISTLPSDTEKLCYNSVIVLKLSWSLTLHIQIFMEVWQYGKFQWNDPFFNNDMDDVFNQLFRRMDNQNSEVRGISLMDNRCHRMSLLNTEQLASYPKIIKQWKYLKMVNRLLKKEGFIEKLGTNLTEQARDGLLDPVIDRENEIQKPAQKFCRRRKKNPLLVGESGVGKTAVVEGLAQRIVAGKVPETIQDKEIYSIDLSSLEAGTQYRGSFEENIKQLVEEVKAAGNIILFIDEIHQILGTGALAGEEVKGLADIIKPLLCHVAKLSVIGATTQDEYRNTILKNAALARRFNDVVINEPTAADTLRILQGIKELYEKHHHVVLPDDEKKAAVDYSIKYIHNRHLPDKAIDLIDDCGSFSGKNSQTDVETLDQRLKNKRQLRRPAIKSEDFAKAADIKRVDRGTKQKIKKTHQKEKITATIDDVAQSVERLTGIPVSDMGANDIEHLKNLDKRLKVMVIGEDEAVKMVAKAIRRNRAGFSEGDQPKGSFLFVGPTGVGKTELSQALALDMFGNENALFGIDMSEYADRTAVSKLIGTSAGYVGYEDNANTLTERVRRNPYSVILLDEIEKADPQVLTLLLQVMDDGRLTDGQGSVIDFRNTIIIMTSNAGFGNEALSGDKQRVQSLMDKLAPFFAQNFRPEFRNRLDNIVEFSHLTKQDLSQIVDLMLADVQKTLAKKSIKLEVTKAAKDWLMEQGYDEAMGARPLRRVIEQQIRDKVTDFYLDHLDVKNLKADLVDAEIVISAA

SEQ ID NO: 6961 - protein, 865 aa, Clostridium acetobutylicum
MDVDKLTLKVQQAINDCQTIAVRYNHQQIDTIHLFMAIISQEDGLIPNILGKMGADVETVKRDTEAELDRMPKVLGEGAQNASIYATRRFEEVFVRGEKISRDFKDLYISVEHVMLALMDIDSGAIKSILDKNNISKKEFLKALREVRGNQRVDTSDPEGTYDALNKYGRDLVKDAKKHKLDPVIGRDEEIRRVIRILSRRTKNNPVLIGEPGVGKTAIVEGLAERIVRGDVPEGLKNKIIFSLDMGSLVAGAKYRGEFEERLKAVLKEVERSEGKIILFIDEIHTIVGAGKTEGAMDAGNIIKPMLARGELHCIGATTFDEYRKYIEKDKALERRFQKVQIDEPTVDDAISILRGLKERFEIHHGVRIHDNAIVAAAKLSDRYITGRFLPDKAIDLIDEAGAMVRMEIDSMPTELDMLKRKIFQMEIEKEALSKESDKFSRERLESIQKELSDLKDKDKAMTAKYDKEKAQIQGIKELKTKLDEIRGQIEKAEREYDLNKAAELKYGEVPKLEHEIEEKENLIKQNGQNAMLKEEVTEEQVSNIVSKWTGIPVSKLVEGERNKLMRLSDELEKRVVGQTEAVKSVADAVIRARAGLKDMSKPIGSFIFLGPTGVGKTELAKTLARVMFDSEDNIIRIDMSEYMEKYSVSRLIGSPPGYVGYEEGGQLTEAVRRKPYSVILFDEIEKAHSDVFNIFLQIFDDGRLTDNKGNTIDFKNSIIIMTSNIGSEHLLNNKGVSNVDEETKDKVMNELKGRFKPEFLNRLDDIIMFKPLSINEIGKIIDIFLENIKSKLKEKNIKIDIAEEAKKIIAEEGYDPVYGARPLKRYIENTIETHIAKMFISGEISEGDILKIEGSDSKLTIVKK

SEQ ID NO: 6962 - protein, 813 aa, Clostridium acetobutylicum
MMFGRFSDRAQKMIYYAQEEAQNFKHGYVGTEHILLGILRDENGKAQSLLANMGVTIEKVRRLIEEYEGFGDSDLYKEEPPLTPRTKRLLEISLLEARNLNHNYINPEHVLLALIRESEGVAFTILGNLGVDFERLRKEILDSLSGREENTGIKTSFSSNTSVTPTLNQYGTDLTQMALEGKLDPVIGRDNETQRILEILCRRTKNNPCLIGDPGVGKTAIAEGLAQKIVEGNIPEILKDKRVITLDVSSLVAGSKYRGEFEERLKKVMTEIKAAKNVILFIDEIHTIVGAGGAEGAIDASNILKPSLARGEIQCIGATTTEEYRRYIEKDAALERRFQPVDVGEPSKEEAVQILEGLRDKYEAHHGVKITDDAIEAAVNLSTRYIQDRFLPDKAIDLIDEAAAKVRIQNLTAPPDLKNQEEELEKTTREKSDAIRLQDFEKAAKLRDKEKKLRIAIEEFKKNWKNTSDNENYIVTQKQVAAVVAKWTSIPVEKLTEKESERLLKLESILHKRVIGQEEAVEYVSRAVRRARVGLKDPKRPIGSFIFLGPTGVGKTELSKALAEAMFGDENNIIRIDMSEYMEKHTVSRLVGSPPGYVGYDEGGQLTEKVRRKPYSVVLFDEIEKAHPDVFNILLQILDDGRLTDSKGKTVSFTNTIIIMTSNVGASTIRKQKTLGFETAKDAVRQEYDKMKENIMEELKNSFRPEFLNRIDEIVVFHKLEEKDLRQIVKLMLESVKGRLKEQNIKINFTEKAEEVLAEKGFDPTYGARPLRRTIIKAVEDKLSEEILKGTISKNDNISVDVDKDKELLFTKA

SEQ ID NO: 6963 - protein, 752 aa, Clostridium acetobutylicum
MVTCSVCKKNVAVIFTNKVIDGKQELVGLCLPCAKKLGISPLTQIIDTKDMKEDDFQNLSSQMNDMLKNIDLDKVSDESGNGGGLLNFFNNAFNNSEQPENKNSEYNNTKNDKTHKKNKKKKYLDSYGINLTLKAKNGEIDTVIGREREVDRLIQILNRRTKNNPILIGEAGVGKTAIAEGFAVRIAEKNVPARFLDTEVYMLELNSIVAGTQFRGQFEARMKGIIDEINQFKNVILIIDEIHNIIGAGNAESGSLSAANILKPALAKGELQLIGATTIEEYRKYIEKDSALERRFQPIMVEEPTIEQTIEIVKGIKSYYEIYHKITIPDDVIESAVRLSGRYISDRFFPDKAIDVIDEAGSRANLKNKGLVELEALKTELSNIQNEITKCAESNDFEKAAEYKVEECKVQTKIDNFSKEYSNVVLTLDDVASVVESWTKIPVQKITEIEAEKLLNLEERLHKRVIGQNEAVSSVARTIRRNRSGFKKLKKPSSFIFVGPTGVGKTELVKTLASELFQNEKALIRVDMSEYMEKHTVSKLIGAPPGYVGYDNGGQLTEKVRRNPYSVILLDEIEKAHPDVFNILLQILEDGRLTDSQGRTVNFENTIIIMTSNAGTNLKSSGIGFSRDDYSSLSGKIKDVLRETFRPEFLNRIDETIIFTELNKDELMKIIDLMLKEIINEGKDKDIAIEISEDVKDFIFSNGYDKKYGARPLRRTIQKYIEDELAEFYIKGIYKEGSKVRIYIQDEKIAFE

SEQ ID NO: 6964 - protein, 861 aa, Escherichia coli O157:H7 EDL933
MGGVMRLDRLTNKFQLALADAQSLALGHDNQFIEPLHLMSALLNQEGGSVSPLLTSAGINAGQLRTDINQALNRLPQVEGTGGDVQPSQDLVRVLNLCDKLAQKRGDNFISSELFVLAALESRGTLADILKAAGATTANITQAIEQMRGGESVNDQGAEDQRQALKKYTIDLTERAEQGKLDPVIGRDEEIRRTIQVLQRRTKNNPVLIGEPGVGKTAIVEGLAQRIINGEVPEGLKGRRVLALDMGALVAGAKYRGEFEERLKGVLNDLAKQEGNVILFIDELHTMVGAGKADGAMDAGNMLKPALARGELHCVGATTLDEYRQYIEKDAALERRFQKVFVAEPSVEDTIAILRGLKERYELHHHVQITDPAIVAAATLSHRYIADRQLPDKAIDLIDEAASSIRMQIDSKPEELDRLDRRIIQLKLEQQALMKESDEASKKRLDMLNEELSDKERQYSELEEEWKAEKASLSGTQTIKAELEQAKIAIEQARRVGDLARMSELQYGKIPELEKQLEAATQLEGKTMRLLRNKVTDAEIAEVLARWTGIPVSRMMESEREKLLRMEQELHHRVIGQNEAVDAVSNAIRRSRAGLADPNRPIGSFLFLGPTGVGKTELCKALANFMFDSDEAMVRIDMSEFMEKHSVSRLVGAPPGYVGYEEGGYLTEAVRRRPYSVILLDEVEKAHPDVFNILLQVLDDGRLTDGQGRTVDFRNTVVIMTSNLGSDLIQERFGELDYAHMKELVLGVVSHNFRPEFINRIDEVVVFHPLGEQHIASIAQIQLKRLYKRLEERGYEIHISDEALKLLSENGYDPVYGARPLKRAIQQQIENPLAQQILSGELVPGKVIRLEVNEDRIVAVQ

SEQ ID NO: 6965 - protein, 923 aa, Escherichia coli O157:H7 EDL933
MIQIDLPTLVKRLNLFSRQALEMAASECMSQQAAEITVSHVLIQMLAMPRSDLRVITRQGDIGMEELRQALTVENYTTARSADSYPAFSPMLVEWLKEGWLLASAEMQHSELRGGVLLLALLHSPLRYIPPAAARLLTGINRDRLQQDFVQWTQESAESVVPDADGKGAGTLTDASDTLLARYAKNMTEDARNGRLAPVLCRDHEIDLMIDILCRRRKNNPVVVGEAGVGKSALIEGLALRIVAGQVPDKLKNTDIMTLDLGALQAGASVKGEFEKRFKGLMAEVISSPVPVILFIDEAHTLIGAGNQQGGLDISNLLKPALARGELKTIAATTWSEYKKYFEKDAALSRRFQLVKVSEPNAAEATIILRGLSAVYERSHGVLIDDDALQAAATLSERYLSGRQLPDKAIDVLDTACARVAINLSSPPKQISALTTLSHQQEAEIRQLERELRIGLRTDTSRMTEVLVQYDETLTALDELEAAWHQQQTLVREIIALRQQLLGVAEDDAAPLPDADTVEDTQPESESESEQDNTGAVPADETDREQPEETAETVSPVQRLAQLTAELDALHNDRLLVSPHVDKKQIAAVIAEWTGVPLNRLSQNEMSVITDLPKWLGDTIKGQDLAIASLHKHLLTARADLRRPGRPLGAFLLAGPSGVGKTETVLQLAELLYGGRQYLTTINMSEFQEKHTVSRLIGSPPGYVGYGEGGVLTEAIRQKPYSVVLLDEVEKAHPDVLNLFYQAFDKGEMADGEGRLIDCKNIVFFLTSNLGYQVIVEHADDPETMQEALYPVLADFFKPALLARMEVVPYLPLSKETLATIIAGKLARLDNVLRSRFGAEVVIEPEVTDEIMSRVTRAENGARMLESVIDGDMLPPLSLLLLQKMAANTAIARIRLSAVDGAFTADVEDAQNDESVTKDETVL

SEQ ID NO: 6966 - protein, 861 aa, Xylella fastidiosa Dixon
MRMDKLTSRFQNALADAQSLAVGRDHTIIEPVHVFSALLDQQGGSTRPLLVQAGVNVPLLRERLTEILEALPKVSGQTVNVSPSNELSRLFHRTDKLAQQHGDQFMASEWFVLAVVDDSGGLGQALRAAGAEKKKIEAAIDKLRGGETVQTENAEEQRQALEKYTIDLTARAESGKLDPVIGRDEEIRRTIQVLQRRTKNNPVLIGEPGVGKTAIVEGLAQRIVNGEVPEGLRSKRLLSLDLGALIAGAKFRGEFEERLKGVLNDLAKNEGRVILFIDELHTMVGAGKADGAMDAGNMLKPALARGELHCIGATTLDEYRKYIEKDAALERRFQKVFVGEPTVEDTIAILRGLKEKYALHHGVEITDPAIVAAATLSNRYITDRQLPDKAIDLMDEAASRIRMEIDSKPEELDRLERRLIQLKIQREMLKKEKDEASKQRLADLERDIEVLDREFSDLEEVWRSEKAALQGATKIKESIEQAKLDLEAAQRRQDYAKMSEIQYGVLPALEKQLVAASQAEQHDFTLVQEKVTAEEIAEVVSRWTGIPVSKMLEGERDKLLRMEADLGRRVVGQEEAIKVVSDAVRRSRTGLSDPNRPSGSFLFLGPTGVGKTELCKALAEFLFDSQDAMVRIDMSEFMEKHSVARLIGAPPGYVGYEEGGYLTELVRRRPYSLILLDEVEKAHSDVFNILLQVLDDGRLTDGQGRTVDFRNTVIVMTSNLGSHQIQELSGDDSPEVYTQMKAAVMGVVQAHFRPEFINRLDDIVVFHPLDKAQIKQIARIQLRGLEKRLAESELKLDLDDRALELLGNVGFDPVYGARPLKRAIQSQLENPLAQQILAGAFVSGDTVQVGVDGGKLVFAKV

SEQ ID NO: 6967 - protein, 861 aa, Xylella fastidiosa Ann-1
MRMDKLTSRFQNALADAQSLAVGRDHTIIEPVHVFSALLDQQGGSTRSLLVQAGVNVPLLRERLTEILEALPKVSGQTVNVSPSNELSRLFHRTDKLAQQHGDQFMASEWFVLAVVDDSGGLGQALRAAGAEKKKIEAAIDKLRGGETVQTENAEEQRQALEKYTIDLTARAESGKLDPVIGRDEEIRRTIQVLQRRTKNNPVLIGEPGVGKTAIVEGLAQRIVNGEVPEGLRSKRLLSLDLGALIAGAKFRGEFEERLKGVLNDLAKNEGRVILFIDELHTMVGAGKADGAMDAGNMLKPALARGELHCIGATTLDEYRKYIEKDAALERRFQKVFVGEPTVEDTIAILRGLKEKYALHHGVEITDPAIVAAATLSNRYITDRQLPDKAIDLMDEAASRIRMEIDSKPEELDRLERRLIQLKIQREMLKKEKDEASKQRLVDLERDIEVLDREFSDLEEVWRSEKAALQGATKIKESIEQAKLDLEAAQRRQDYAKMSEIQYGVLPALEKQLVAASQAEQHDFTLVQEKVTAEEIAEVVSRWTGIPVSKMLEGERDKLLRMEADLGRRVVGQDEAIKVVSDAVRRSRTGLSDPNRPSGSFLFLGPTGVGKTELCKALAEFLFDSQDAMVRIDMSEFMEKHSVARLIGAPPGYVGYEEGGYLTELARRRPYSLILLDEVEKAHSDVFNILLQVLDDGRLTDGQGRTVDFRNTVIVMTSNLGSHQIQELSGDDSPEVYTQMKAAVMGVVQVHFRPEFINRLDDIVVFHPLDKAQIKQIARIQLRGLEKRLAESELKLDLDDRALELLGNVGFDPVYGARPLKRAIQSQLENPLAQQILAGAFVSGDTVQVGVDGGKLVFSKV

SEQ ID NO: 6968 - protein, 818 aa, Staphylococcus aureus subsp. aureus Mu50
MLFGRLTERAQRVLAHAQEEAIRLNHSNIGTEHLLLGLMKEPEGIAAKVLESFNITEDKVIEEVEKLIGHGQDHVGTLHYTPRAKKVIELSMDEARKLHHNFVGTEHILLGLIRENEGVAARVFANLDLNITKARAQVVKALGNPEMSNKNAQASKSNNTPTLDSLARDLTVIAKDGTLDPVIGRDKEITRVIEVLSRRTKNNPVLIGEPGVGKTAIAEGLAQAIVNNEVPETLKDKRVMSLDMGTVVAGTKYRGEFEERLKKVMEEIQQAGNVILFIDELHTLVGAGGAEGAIDASNILKPALARGELQCIGATTLDEYRKNIEKDAALERRFQPVQVDEPSVVDTVAILKGLRDRYEAHHRINISDEAIEAAVKLSNRYVSDRFLPDKAIDLIDEASSKVRLKSHTTPNNLKEIEQEIEKVKNEKDAAVHAQEFENAANLRDKQTKLEKQYEEAKNEWKNAQNGMSTSLSEEDIAEVIAGWTGIPLTKINETESEKLLSLEDTLHERVIGQKDAVNSISKAVRRARAGLKDPKRPIGSFIFLGPTGVGKTELARALAESMFGDDDAMIRVDMSEFMEKHAVSRLVGAPPGYVGHDDGGQLTEKVRRKPYSVILFDEIEKAHPDVFNILLQVLDDGHLTDTKGRTVDFRNTIIIMTSNVGAQELQDQRFAGFGGSSDGQDYETIRKTMLKELKNSFRPEFLNRVDDIIVFHKLTKEELKEIVTMMVNKLTNRLSEQNINIIVTDKAKDKIAEEGYDPEYGARPLIRAIQKTIEDNLSELILDGNQIEGKKVTVDHDGKEFKYDIAEQTSETKTPSQA

SEQ ID NO: 6969 - protein, 701 aa, Staphylococcus aureus subsp. aureus Mu50
MNNGFFNSDFDSIFRRMMQDMQGSNQVGNKKYYINGKEVSPEELAQLTQQGSNQSAEQSAQAFQQAAQRQQGQQGGNGNYLEQIGRNLTQEARDGLLDPVIGRDKEIQETAEVLSRRTKNNPILVGEAGVGKTAIVEGLAQAIVEGNVPAAIKDKEIISVDISSLEAGTQYRGAFEENIQKLIEGVKSSQNAVLFFDEIHQIIGSGATGSDSGSKGLSDILKPALSRGEISIIGATTQDEYRNNILKDAALTRRFNEVLVNEPSAKDTVEILKGIREKFEEHHQVKLPDDVLKACVDLSIQYIPQRLLPDKAIDVLDITAAHLSAQSPAVDKVETEKRISELENDKRKAVSAEEYKKADDIQNEIKSLQDKLENSNGEHTAVATVHDISDTIQRLTGIPVSQMDDNDIERLKNISNRLRSKIIGQDQAVEMVSRAIRRNRAGFDDGNRPIGSFLFVGPTGVGKTELAKQLAIDLFGNKDALIRLDMSEYSDTTAVSKMIGTTAGYVGYDDNSNTLTEKVRRNPYSVILFDEIEKANPQILTLLLQVMDDGNLTDGQGNVINFKNTIIICTSNAGFGNGNDAEEKDIMHEMKKFFRPEFLNRFNGIVEFLHLDKDALQDIVNLLLDDVQVTLDKKGITMDVSQDAKDWLIEEGYDEELGARPLRRIVEQQVRDKITDYYLDHTDVKHVDIDVEDNELVVKGK

SEQ ID NO: 6970 - protein, 200 aa, Lactobacillus sakei
MLCQNCQKNPATIHLYTSVNGQNQAINLCQNCYQALKQQGMSSQYNDPFGFSNLDELFNAINNPNAERNAANQGPQTQGGRNGGGNNGQNGESLFSQFGVNLTNLAKGGQIDPVIGRDKEIARVIEILNRRTKNNPVLIGEAGVGKTAVVEGLAQKIADGDVPAKLKDRQVIRLDVVSLVQGTGIRGQFEERMQQLITEL

SEQ ID NO: 6971 - protein, 814 aa, Treponema pallidum
MLQDLSANARKVLLELGQTVAREARASLLQPEHILLALIQHKVGRGYKLIEKLIEDVATVRLILEQHVLTNEGDVASPQDLPVSGRVKHLLDIAAMEARSLRCAYIGTEHLVIAFAREEQNPLFQSLIREGLSLDDLRNASIISSPHSDTTRTRLERKVASVLDEYGTDLTERARAGALNPVIGRNKEITRVIQILCRRGKNNPVLIGEPGVGKTSIVEGLAYAIVREEVPHILLHTRVVSLDLAAVIAGTKYRGQFEERLKRIIKEVEETEKVILFIDELHTLIGAGGTQGSLDAANMLKPALARGQIQCIGATTLAEYRRYFEKDAALTRRFRSVLVREPSFEETCTILRKIKSHYERHHQVIYQSDALEKIVELSRRYIPERFFPDKAIDLMDEVGAMKRVQQRADTQVLRSFSIKVANLTTETERAIALEDWARARSLHTDVVQLRRRLHALKVEWSAREALSIFAEDVAQAVSLMTDIPVHSLEGDELCRFTNIERDLCATVRGQREAIATLARAIVRARVGISSDTRPIGSFLFLGPTGVGKTLLAKTLAEFLFGSADALIRIDMSDYMERYNTSRLMGAPPGYVGFENGGLLTERVRHRPFSVILLDEIEKAHPDVFNVLLQVLEEGELQDNLGHTVNFRNTIIIMTSNAGTRGLGENVPGFQTARARNIEYRQLRVQALREIKRIFSPEFLNRVDECVVFAPLERETLQEILECELKKLAERLRGKDIVLRYSAAAKAYCLEHGFDPFLGARPLRRVLQQEIENELALRMIHGTLRAGSCVHIDSDGARLHLSTEKSYLTLHPQEI

SEQ ID NO: 6972 - protein, 940 aa, Pseudomonas putida KT2440
MLRQAPSRHLNDSRSARMASKQCQVCGQPATTRVEAKVNGRHSIMLLCDDHYRQLVRQQKRTLSPLEALFGSRSGLFEEFMGSDLLRIGEDSASVATDADEVAEASSGEPGRAASGTPRRRSSGLASRISEHSEALLQEAAKRATEFGRSEVDTEHLLLALADSDVVKTILSQFKIKVDELKRQIEAEAKRGDKPFEGEVGVSPRVKDALSRAFVASNELGHAYVGPEHFLIGLAEEGEGLAANLLRRYGLMPQALRQCVSKVVGKGAEDGRAEAPTETPELDKYSRDLTRMARDGKLDPVIGRAQEIETTIEVLARRKKNNPVLIGEPGVGKTAIVEGLAQRMVAGEVPETLRDKRLVELNINSLVAGAKYRGEFEERVQKVLKEIAEHQGELILFIDEVHTIVGAGQGGGEGGLDVANVFKPMMARGELNLIGATTLNEYQKYIEQDAALERRFQPVVVPEPTVAQTIMILRGLRDTFEAHHKVSITEEAIIAAAELSDRYVSARFLPDKAIDLLDQAAARVKLSATARPVAVQEMESELHQLRREQDYAASRKQYDNAAQISKRVEATEAELKQRVEEWERERGSGSTEVKAEHVAQIVSRLTGIPVNELTVEEREKLLHLEQRLHERLVGQDEAVRAVADAVRLSRAGLREGSKPVATFLFLGSTGVGKTELAKALAETIYGDESALLRIDMSEYGERHSVARLVGAPPGYVGYDEGGQLTEKVRRKPYSVLLLDEIEKAHADVYNILLQVFDDGRLTDGKGRVVDFTNTIIIATSNLGSDIIQRRLKAPGAAGEEYEKTKVEVMEVLRGHFRPEFLNRIDEIIVFHALGKQEIRHIVGLQLERVARNAASQGVTLTFDETLVDHLAQVGYKPEFGARELKRLIRSELETALAREMLGGGIGKGDHAHVRWDDKAERVGFDRRQAAPAKELDSENA

SEQ ID NO: 6973 - protein, 878 aa, Pseudomonas putida KT2440
MRRLPHSLRWGRLVNLKSLFAKLNETSRTATESAAALCLSEHHYEVEVEHLLLQLLDNNDSDLAPILRHYQVVAERLQAQLVTALGTFKKGNTRTPALSPHITRMIEQAWLLASIEYGVGQVRSAHLLQALLDDAELRRVVIASAPELEKINADDLRLNLAALVEGSAESRQASPLASPAAPVSTSSKASGKTPALDQYTVNLTQSAREGRIDPVLGREFEVRQMVDILTRRRQNNPILTGEAGVGKTAVVEGLALRIAQGDVPAVLKDVALHTLDLGLLQAGAGVKGEFENRLKAVIEEVKRSLHPIILFIDEAHTLIGSGGQAGQNDAANLLKPALARGELRTIAATTWAEYKKYFEKDAALARRFQVVKVEEPDEDKAIHMLRGLLGKMREHHKVAVMDEALVQAVRLSNRYITGRQLPDKAVSVLDTACARIALAQSSLPGALEDCRRQIDNLQAEIDVLGHEAGKGHDHARRLESLQAALQAEQQQEQQLNAQWQQELELVEQLKALDAANDADAQQLNTLRAELARVQGDQPLVHALVDSGAIAQVISGWTGIPLGKMLRDEIDTVQRLPALLGERVLGQDHALHEIGKRIKISRARMEDPNKPIGVFLLLGPSGVGKTETALALADTLYGGERNLITINMSEYQEAHTVSSLKGSPPGYVGYGEGGVLTEAVRRKPYSVVLLDEVEKAHPDVLELFFQVFDKGVLDDGEGREINFRNTVIILTSNTGTERIMQTCLNATELPTPEAIVEDLRDQLNHVFKPAFLGRLSIVPFYPVQDQILERIVALKLERIAKRFARNHQAELSYDQALVKAIAARCTEVDSGARNIDNILSQTLMPELAQRVLERMAQDAPIQHLAIELGSDGDFAYRLA

SEQ ID NO: 6974 - protein, 861 aa, Xylella fastidiosa 9a5c; identical to SEQ ID NO: 427

SEQ ID NO: 6975 - protein, 825 aa, Listeria monocytogenes
MMFGRFTQRAQKVLALSQEEAMRLNHSNLGTEHILLGLVREGEGIAAKALYELGISSEKVQQEVEGLIGHGEKAVTTIQYTPRAKKVIELSMDEARKLGHTYVGTEHILLGLIREGEGVAARVLSNLGISLNKARQQVLQLLGGGDATGAGRQTNTQATPTLDSLARDLTVIAREDNLDPVIGRSKEIQRVIEVLSRRTKNNPVLIGEPGVGKTAIAEGLAQQIVRNEVPETLRGKRVMTLDMGTVVAGTKYRGEFEDRLKKVMDEIRQAGNVILFIDELHTLIGAGGAEGAIDASNILKPPLARGELQCIGATTLDEYRKYIEKDRALERRFQPIKVDEPTVEESIQILHGLRDRYEAHHRVAITDEALEAAVRLSDRYISDRFLPDKAIDVIDESGSKVRLKSFTTPKNVKEMENNLSDLKKEKDAAVQGQEFEKAASLRDKEQKLKKSLDKKSLEETKANWQEKQGLDHSEVTEDIVAEVVASWTGIPVAKLAETETNKLLNMEKLLHERVIGQDAAVKAVSLAVRRARAGLKDPKRPIGSFIFLGPTGVGKTELARALAESMFGDEDSMIRIDMSEYMEKFSTARLVGAPPGYVGYEEGGQLTEKVRQKPYSVVLLDEIEKAHPDVFNMLLQVLDDGRLTDSKGRVVDFRNTVIIMTSNIGAQEMKQDKSMGFNVTDPLKDHKAMEHRVLQDLKQAFRPEFINRIDETIVFHSLQEKELKQIVTLLTAQLTKRLAERDIHVKLTEGAKSKIAKDGYDPEYGARPLKRAIQKEVEDMLSEELLRGNIKVGDYVEIGVKDGKLEVRKKDAPKKKTTSKKVKAK

SEQ ID NO: 6976 - protein, 728 aa, Listeria monocytogenes
MNCEKCNQNPATIQLYMNINGKRVEMPLCASCYAEVRNQANLGRMSPRSKWSPFDDVFRQLSGAANQANREQRSQANAQVQTQTAGGGNGILDEFGTNLTDMAKNEQLDPVIGRDKEIKRVIEILNRRNKNNPVRVIGEPGVGKTAVCEGLANAIVAGDVPEQTGMNKREVILLDVAFACFQEAGIRGQFEERMKQLIKELQERKNTILFIDEVHTIVGAGSAEGSMDAGNILKPALARGDLQMIGATTLKEYRTIEKDAALERRFQSRTSNCNRTIHKRNANYLNGLKPKYEDFHEVVYSPEALTAAVELSARYIQDRHLPDKAIDLMDEVGSKYNLSIEKLDENTVSERVARLEDEKIKALQMEDYEKAAKVRDEITRLEENKTIPSQNALSYKHQTYKRLLQEKTGLPVGRLREDEQSKMKNLERNLTGKVIGQEDAVKKVAKAIRRSRVGLKSKNRPIGSFLFVGPTGVGKTELGRTLARELFGTSEAWIRLDMSEFMEKHSISKLIGSPPGYVGHEEAGQLTEKVRRNPYSIILLDEIEKAHPDVQHMFLQILEDGRLTDSQGRTASFKDTVIIMTSNAGATDTEASVGFNTTTETKLEKGSDILAKLGAYFKPEFLNRLDSVIEFKSLEKDDLVQIIDLIARDLNEMLAQEGVTIDVSKEVKEHLVDLGYDPKFGARPLRRTIQEHLEDTIADSLIDQPEAKDLVATLNDNKEITITEQVTA

SEQ ID NO: 6977 - protein, 81 aa, Listeria monocytogenes
EKDAALERRFQKVLVPEPTVEDTVSILRGLKERFEIHHGVNIHDNALVAAASLSNRYITDRFLPDKAIDLVDEACATIRCR

SEQ ID NO: 6978 - protein, 866 aa, Listeria innocua
MDLQKFTQQVQQTIADAQNLAIASEHQEIDVIHVFKVLLTESDFAKRAYDVAEVNVEALQKVVDESLRKIPVVSGSGVNYGQAMSQALFQLMRDAEKEQKQLDDDFVSTEHLILAVMDQKSNPITVELKKQNKSKKQINEAILKIRGGKKVTSQNAEENYEALTKYGRDLVAEVRSGKLDPVIGRDAEIRNVIRILSRKTKNNPVLIGEPGVGKTAIVEGLAQRIVRKDVPEGLKDKTIISLDIGSLIAGAKYRGEFEERLKAVLQEVKQSDGQILLFIDEIHTIVGAGKTDGAMDAGNMLKPMLARGELHCIGATTLDEYRQYIEKDAALERRFQKVLVPEPTVEDTVSILRGLKERFEIHHGVNIHDNALVAAASLSNRYITDRFLPDKAIDLVDEACATIRVEIDSMPSELDEVTRKVMQLEIEEAALKEEKDPASERRLEMLQRELADYKEEANKMKSKWESEKSEISKIREVREQIDHLRHELEEAENNYDLNKAAELRHGKIPAVEKELLALETENREKTAQEDRILQEEVTENEIAEIVGRWTGIPVTKLVEGEREKLLKLADVLHQKVIGQDDAVQLVSDAVLRARAGIKDPKRPIGSFIFLGPTGVGKTELAKALAYNMFDSEDHMIRIDMSEYMEKHSVSRLVGAPPGYVGYEEGGQLTEAVRRNPYSIVLLDEIEKAHPDVFNILLQVLDDGRITDSQGRLIDFKNTVIIMTSNIGSNLLLERTEEGEISPELESDVMQILQSEFKPEFLNRVDDIILFKPLTLADIKGIVEKLVEELQIRLADQEITITISDNAKAFIAEEAYDPVYGARPLKRYIVRHVETPLAREIVSGKIMPHSSVEIDLQDKEFTFKVTE

SEQ ID NO: 6979 - protein, 820 aa, Listeria innocua
MMFGRFTQRAQKVLALSQEEAMRLNHSNLGTEHILLGLVREGEGIAAKALYELGISSEKVQQEVEGLIGHGEKAVTTIQYTPRAKKVIELSMDEARKLGHTYVGTEHILLGLIREGEGVAARVLSNLGISLNKARQQVLQLLGGGDATGAGRQTNTQATPTLDSLARDLTVIAREENLDPVIGRSKEIQRVIEVLSRRTKNNPVLIGEPGVGKTAIAEGLAQQIVRNEVPETLRGKRVMTLDMGTVVAGTKYRGEFEDRLKKVMDEIRQAGNVILFIDELHTLIGAGGAEGAIDASNILKPPLARGELQCIGATTLDEYRKYIEKDAALERRFQPIKVDEPTVEESIQILHGLRDRYEAHHRVAITDEALEAAVRLSDRYISDRFLPDKAIDVIDESGSKVRLKSFTTPKNVKEMENNLSELKKEKDAAVQGQEFEKAAALRDKEQKLKKSLEETKANWQEKQGLDHSEVTEDIVAEVVASWTGIPVAKLAETETNKLLNMEKLLHERVIGQDAAVKAVSLAVRRARAGLKDPKRPIGSFIFLGPTGVGKTELARALAESMFGDEDSMIRIDMSEYMEKFSTARLVGAPPGYVGYEEGGQLTEKVRQKPYSVVLLDEIEKAHPDVFNMLLQVLDDGRLTDSKGRVVDFRNTVIIMTSNIGAQEMKQDKSMGFNVIDPLKDHKAMEHRVLQDLKQAFRPEFINRIDETIVFHSLQEKELKQIVTLLTSQLTKRLAERDIHVKLTEGAKAKIAKDGYDPEYGARPLKRAIQKEVEDMLSEELLRGNIKVGDNVEIGVKDGKLEVRKKAATKKKAAPKKVKSK

SEQ ID NO: 6980 - protein, 724 aa, Listeria innocua
MNCEKCNQNQATIQLYMNINGKRVEMPLCASCYAEVRNQANFGANEFPGAGGSPFDDIFRQLSGAANQASREQQSQRNAQVQTQTGGAGNGLLDEFGTNLTDMAKNDQLDPVIGRDKEIKRVIEILNRRNKNNPVLIGEPGVGKTAVVEGLANAIVAGEVPSKLMNKEVILLDVASLVSGTGIRGQFEERMKQLIKELQERKNTILFIDEVHTIVGAGSAEGSMDAGNILKPALARGDLQMIGATTLKEYRTIEKDAALERRFQPVTVNEPSNEETLTILNGLKSKYEDFHEVVYSPEALKAAVELSSRYIQDRHLPDKAIDLMDEVGSKYNLSIEKLDENTVSERVARLEEEKNQALQMEDYEKAAKVRDEITRLEENKTSNSFSERPVIQSSDIQAIIEEKTGIPVGRLQEDEQSKMKNLESNLTGKVIGQDDAVKKVAKAIRRSRVGLKAKNRPIGSFLFVGPTGVGKTELGRTLARELFGTSEAMIRLDMSEFMEKHSVSKLIGSPPGYVGHEEAGQLTEKVRRNPYSIILLDEIEKAHPDVQHMFLQILEDGRLTDSQGRTVSFKDTVIIMTSNAGTTDTEASVGFNTATDNKLEKGSDILAKLGAYFKPEFLNRLDSVIEFKSLEKDDLVQIIDLMLVDLNSMLAQEGVTIDVSKEVKEHLIELGYDPKFGARPLRRTIQEHLEDAIADSLIDQPEAKKLNATLNDDKNIVITEQVTV

SEQ ID NO: 6981 - protein, 866 aa, Listeria monocytogenes EGD-e
MDLQKFTQQVQQTIADAQNLAIASEHQEIDVAHVFKVLLTESDFAKRVYDVAEVDTDALQKVIENTLEKIPVVSGSGVNYGQAMSQALFQLMRDAEKEQQQLEDDFVSTEHLILAVMDQKSNPITAELKNQHKAKKQIKEAILKIRGGKRVTSQNAEENYEALTKYGRDLVAEVRSGKLDPVIGRDAEIRNVIRILSRKTKNNPVLIGEPGVGKTAIVEGLAQRIVRKDVPEGLKDKTIISLDIGSLIAGAKYRGEFEERLKAVLQEVKQSDGQILLFIDEIHTIVGAGKTDGAMDAGNMLKPMLARGELHCIGATTLDEYRQYIEKDAALERRFQKVLVPEPTVEDTVSILRGLKERFEIHHGVNIHDNALVAAASLSNRYITDRFLPDKAIDLVDEACATIRVEIDSMPSELDEVTRKVMQLEIEEAALKEEKDPASERRLEILQRELADYKEEANQMKSKWESEKNEISKIREVREQIDHLRHELEEAENNYDLNKAAELRHGRIPAVEKELLELEAENREKTAQEDRILQEEVTENEIAEIVGRWTGIPVTKLVEGEREKLLKLADVLHQKVIGQDDAVQLVSDAVLRARAGIKDPKRPIGSFIFLGPTGVGKTELAKALAFNMFDSEDHMIRIDMSEYMEKHSVSRLVGAPPGYIGYEEGGQLTEAVRRNPYSIVLLDEIEKAHPDVFNILLQVLDDGRITDSQGRLIDFKNTVIIMTSNIGSNLLLERTEEGEISPELESDVMQILQSEFKPEFLNRVDDIILFKPLTLADIKGIVEKLVEELQIRLADQEITITISDDAKAFIAEEAYDPVYGARPLKRYIVRHVETPLAREIVSGKIMPHSSVEIDLADKEFTFKVTE

SEQ ID NO: 6982 - protein, 820 aa, Listeria monocytogenes EGD-e
MMFGRFTQRAQKVLALSQEEAMRLNHSNLGTEHILLGLVREGEGIAAKALYELGISSEKVQQEVEGLIGHGEKAVTTIQYTPRAKKVIELSMDEARKLGHTYVGTEHILLGLIREGEGVAARVLSNLGISLNKARQQVLQLLGGGDATGAGRQTNTQATPTLDSLARDLTVIAREDNLDPVIGRSKEIQRVIEVLSRRTKNNPVLIGEPGVGKTAIAEGLAQQIVRNEVPETLRGKRVMTLDMGTVVAGTKYRGEFEDRLKKVMDEIRQAGNVILFIDELHTLIGAGGAEGAIDASNILKPPLARGELQCIGATTLDEYRKYIEKDAALERRFQPIKVDEPTVEESIQILHGLRDRYEAHHRVAITDEALEAAVRLSDRYISDRFLPDKAIDVIDESGSKVRLKSFTTPKNVKEMENNLSDLKKEKDAAVQGQEFEKAASLRDKEQKLKKSLEETKANWQEKQGLDHSEVTEDIVAEVVASWTGIPVAKLAETETNKLLNMEKLLHERVIGQDAAVKAVSLAVRRARAGLKDPKRPIGSFIFLGPTGVGKTELARALAESMFGDEDSMIRIDMSEYMEKFSTARLVGAPPGYVGYEEGGQLTEKVRQKPYSVVLLDEIEKAHPDVFNMLLQVLDDGRLTDSKGRVVDFRNTVIIMTSNIGAQEMKQDKSMGFNVTDPLKDHKAMEHRVLQDLKQAFRPEFINRIDETIVFHSLQEKELKQIVTLLTAQLTKRLAERDIHVKLTEGAKSKIAKDGYDPEYGARPLKRAIQKEVEDMLSEELLRGNIKVGDYVEIGVKDGKLEVRKKDAPKKKTTSKKVKAK

SEQ ID NO: 6983 - protein, 724 aa, Listeria monocytogenes EGD-e
MNCEKCNQNPATIQLYMNINGKRVEMPLCASCYAEVRNQANFGSNEFPGASGSPFDDIFRQLSGAANQANREQRSQANAQVQTQTAGGGNGILDEFGTNLTDMAKNEQLDPVIGRDKEIKRVIEILNRRNKNNPVLIGEPGVGKTAVVEGLANAIVAGDVPSKLMNKEVILLDVASLVSGTGIRGQFEERMKQLIKELQERKNTILFIDEVHTIVGAGSAEGSMDAGNILKPALARGDLQMIGATTLKEYRTIEKDAALERRFQPVTVSEPSTKETLTILNGLKPKYEDFHEVVYSPEALTAAVELSARYIQDRHLPDKAIDLMDEVGSKYNLSIEKLDENTVSERVARLEDEKNQALQMEDYEKAAKVRDEITRLEENKTSNSFSERPVIQASDIQAIIEEKTGIPVGRLQEDEQSKMKNLERNLTGKVIGQEDAVKKVAKAIRRSRVGLKSKNRPIGSFLFVGPTGVGKTELGRTLARELFGTSEAMIRLDMSEFMEKHSISKLIGSPPGYVGHEEAGQLTEKVRRNPYSIILLDEIEKAHPDVQHMFLQILEDGRLTDSQGRTVSFKDTVIIMTSNAGATDTEASVGFNTTTETKLEKGSDILAKLGAYFKPEFLNRLDSVIEFKSLEKDDLVQIIDLMLVDLNEMLAQEGVTIDVSKEVKEHLIDLGYDPKFGARPLRRTIQEHLEDTIADSLIDQPEAKNLVATLNDNKEITITEQVTA

SEQ ID NO: 6984 - protein, 817 aa, Staphylococcus epidermidis ATCC 12228
MLFGRLTERAQRVLAHAQEEAIRLNHSNIGTEHLLLGLMKEPEGIAAKVLVSFNITEDKVIEEVEKLIGHGQEQMGTLHYTPRAKKVIELSMDEARKLHHNFVGTEHILLGLIRENEGVAARVFANLDLNITKARAQVVKALGSPEMSNKNAQANKSNNTPTLDGLARDLTVIAKDGTLDPVVGRDKEITRVIEVLSRRTKNNPVLIGEPGVGKTAIAEGLAQAIVKNEVPETLKDKRVMSLDMGTVVAGTKYRGEFEERLKKVMEEIHQAGNVILFIDELHTLVGAGGAEGAIDASNILKPALARGELQCIGATTLDEYRKNIEKDAALERRFQPIQVDEPTVEDTIEILKGLRDRYEAHHRINISDEALEAAAKLSDRYVSDRFLPDKAIDLIDEASSKVRLKSHTTPSNLKEIEQEIDKVKNEKDAAVHAQEFENAANLRDKQSKLEKQYEDAKNEWKNAQGGLDTALSEENIAEVIAGWTGIPLTKINETESDRLLNLEDTLHKRVIGQNDAVNSISKAVRRARAGLKDPKRPIGSFIFLGPTGVGKTELARALAESMFGEDDAMIRVDMSEFMEKHAVSRLVGAPPGYVGHDDGGQLTEKVRRKPYSVILFDEIEKAHPDVFNILLQVLDDGHLTDTKGRTVDFRNTVIIMTSNVGAQELQDQRFAGFGGASEGSDYETVRKTMMKELKNSFRPEFLNRVDDIIVFHKLTKDELKEIVTMMVNKLTHRLSEQNINIVVTDKAKEKIAEEGYDPEYGARPLIRAIQKTVEDNLSELILDGNKIEGKEVTIDHDGKEFKYDIYEITAKKETTES

SEQ ID NO: 6985 - protein, 848 aa, Mycobacterium leprae
MFERFTDRARRVVVLAQEEARMLNHNYIGTEHILLGLIHEGEGVAAKSLDSLGISLEAVRSQVEDIIGQGQQAPSGHIPFTPRAKKVLELSLREALQLGHNYIGTEHILLGLIREGEGVAAQVLVKLGAELTRVRQQVIQLLSGYQGKEAAEAGTGGRGGESGSPSTSLVLDQFGRNLTAAAMESKLDPVIGREKEIERVMQVLSRRTKNNPVLIGEPGVGKTAVVEGLAQAIVHGEVPETLKDKQLYTLDLGSLVAGSRYRGDFEERLKKVLKEINTRGDIILFIDELHTLVGAGAAEGAIDAASILKPKLARGELQTIGATTLDEYRKYIEKDAALERRFQPVQVGEPTVEHTIEILKGLRDRYEAHHRVSITDSAMVAAATLADRYINDRFLPDKAIDLIDEAGARMRIRRMTAPPDLREFDEKIAEARREKESAIDAQDFEKAASLRDREKQLVAQRAEREKQWRSGDLDVIAEVDDEQIAEVLGNWTGIPVFKLTEAETTRLLRMEEELHKRIIGQEDAVKAVSKAIRRTRAGLKDPKRPSGSFIFAGPSGVGKTELSKALANFLFGDDDALIQIDMGEFHDRFTASRLFGAPPGYVGYEEGGQLTEKVRRKPFSVVLFDEIEKAHQEIYNSLLQVLEDGRLTDGQGRTVDFKNTVLIFTSNLGTSDISKPVGLGFTQGSGENDYERMKQKVNDELKKHFRPEFLNRIDDIIVFHQLSRDEIIRMVDLMISRVANQLKVKDMTLELTNKAKALLAKRGFDPVLGARPLRRTIQREIEDQLSEKILFEEVGPGQVVTVDVDNWDGEGPGEDVKFTFTGIRKPSTEPDLAKAGVHSAGGPEPVEQ

SEQ ID NO: 6986 - protein, 649 aa, Mycobacterium leprae
MFERFTDRARRVVVLAQEEARMLNHNYIGTEHILLGLIHEGEGVAAKSLDSLGISLEAVRSQVEDIIGQGQQAPSGHIPFTPRAKKVLELSLREALQLGHNYIGTEHILLGLIREGEGVAAQVLVKLGAELTRVRQQVIQLLSGYQGKEAAEAGTGGRGGESGSPSTSLVLDQFGRNLTAAAMESKLDPVIGREKEIERVMQVLSRRTKNNPVLIGEPGVGKTAVVEGLAQAIVHGEVPETLKDKQLYTLDLGSLVAGSRYRGDFEERLKKVLKEINTRGDIILFIDELHTLVGAGAAEGAIDAASILKPKLARGELQTIGATTLDEYRKYIEKDAALERRFQPVQVGEPTVEHTIEILKGLRDRYEAHHRVSITDSAMVAAATLADRYINDRFLPDKAIDLIDEAGARMRIRRMTAPPDLREFDEKIAEARREKESAIDAQDFEKAASLRDREKQLVAQRAEREKQWRSGDLDVIAEVDDEQIAEVLGNWTGIPVFKLTEAETTRLLRMEEERHKRIIGQEDAVKAVSKAIRRTRAGLKDPKRPSGSFIFAGPSGVGKTELSKALANFLFGDDDALIQIDMGEFHDRFTASRLFGAPPGYVGYEEGGQLTEKVRRKPFSVVLFDEIEKAHQEIYNSLLQVLEDGRLEF

SEQ ID NO: 6987 - protein, 649 aa, Mycobacterium leprae
MFERFTDRARRVVVLAQEEARMLNHNYIGTEHILLGLIHEGEGVAAKSLDSLGISLEAVRSQVEDIIGQGQQAPSGHIPFTPRAKKVLELSLREALQLGHNYIGTEHILLGLIREGEGVAAQVLVKLGAELTRVRQQVIQLLSGYQGKEAAEAGTGGRGGESGSPSTSLVLDQFGRNLTAAAMESKLDPVIGREKEIERVMQVLSRRTKNNPVLIGEPGVGKTAVVEGLAQAIVHGEVPETLKDKQLYTLDLGSLVAGSRYRGDFEERLKKVLKEINTRGDIILFIDELHTLVGAGAAEGAIDAASILKPKLARGELQTIGATTLDEYRKYIEKDAALERRFQPVQVGEPTVEHTIEILKGLRDRYEAHHRVSITDSAMVAAATLADRYINDRFLPDKAIDLIDEAGARMRIRRMTAPPDLREFDEKIAEARREKESAIDAQDFEKAASLRDREKQLVAQRAEREKQWRSGDLDVIAEVDDEQIAEVLGNWTGIPVFKLTEAETTRLLRMEEELHKRIIGQEDAVKAVSKAIRRTRAGLKDPKRPSGSFIFAGPSGVGKTELSKALANFLFGDDDALIQIDMGEFHDRFTASRLFGAPPGYVGYEEGGQLTEKVRRKPFSVVLFDEIEKAHQEIYNSLLQVLEDGRLEF

SEQ ID NO: 6988 - protein, 874 aa, Agrobacterium tumefaciens str. C58 (U. Washington)
MNIDKYSERVRGFLQSAQTFALAENHQQFSPEHVLKVLLDDEQGMAASLIERAGGDAKEARLANDAALAKLPKVSGGNGGLSLTAPLAKVFSTAEDLAKKAGDSFVTVERLLQALAIESSASTSASLKKAGATAQALNQVINDIRKGRTADSANAEQGFDALKKYARDLTEEAREGRLDPVIGRDDEIRRTIQVLSRRTKNNPVLIGEPGVGKTAIAEGLALRIVNGDVPESLKDKKLMALDMGALIAGAKYRGEFEERLKAVLNEVQAENGGIILFIDEMHTLVGAGKADGAMDASNLLKPALARGELHCVGATTLDEYRKHVEKDPALARRFQPVLVDEPNVEDTISILRGLKEKYEQHHKVRISDSALVAAATLSNRYITDRFLPDKAIDLMDEAASRLRMQVDSKPEELDELDRRIIQLKIEREALKQETDQSSVDRLRKLEDELADTEEKADALTARWQAEKQKLGHAADLKKRLDEARNELAIAQRNGQFQRAGELTYGIIPGLEKELAAAEARDSSGAGSMVQEVVTPDNIAHVVSRWTGIPVDKMLEGQREKLLRMEDELAKSVVGQGEAVQAVSKAVRRSRAGLQDPNRPIGSFIFLGPTGVGKTELTKSLARFLFDDETAMVRLDMSEYMEKHSVARLIGAPPGYVGYEEGGALTEAVRRRPYQVVLFDEIEKAHPDVFNVLLQVLDDGRLTDGQGRTVDFKNTIIIMTSNLGSEFMTQMGDNDDVDSVRELVMERVRSHFRPEFLNRIDDIILFHRLRRDEMGAIVEIQLKRLVSLLADRKITLELDEDARSWLANKGYDPAYGARPLKRVIQKSVQDRLAEMILGGEIPDGSRVKVTSGTDRLLFKVKPAKGEAETETADAA

SEQ ID NO: 6989 - protein, 892 aa, Agrobacterium tumefaciens str. C58 (U. Washington)
MSHIDLNRLVGALEPDLRVTLEAAASVAVRMGHRYVDIPHWLLAVVDAGIYAETFDELKIPLPVLKAEIGRSLEEAIIGDGEALSLSQNILTAAREAWILASLEAGRDRVTLCDLLLAMDEETSLRSFVRSAFPSLKAMDRGALERLRSSAENGAGVDVPSALTSSGEAGSAQAAGQNDFLRLYTHDMTTDARNGKVDPVIGRDDELRQLVDILTRRRQNNPILVGEAGVGKTAVAEALALEIASGNVPEKLRNVCLLNLDISLLQAGAGVKGEFERRLHGVIDAVKRSAEPVILFIDEAHGLVGAGGAAGQGDAANILKPALARGEVRTVAATTWSEYKKYFEKDAALTRRFQPVHVREPDEATAIRMLRGVADTFVSHHNVTVRDEAIVAAVQLSARYMPARQLPDKAVSLLDTAAAAVSLARQTLPERLRAMESERHLLSDELNWLLREPQDEDMQNRIQSIRDELERLEAGIDDLRGRYDAEMAELAALSEEQPAETGASNVSHLRPATEMRPANAERLVPTVVDREAIAAVVSRWTGIPLGKLLADQIESARTLDVRMRQRVVGQDAAITRIADAMRTARAGLSDPRRPPAVFFLVGMSGTGKTETALSLADLLYGGNSHLTTINMSEFKEEHKVSLLLGSPPGYVGFGEGGVLTEAVRRRPFGVLLLDEIDKAHPGVQDIFYQVFDKGVLRDGEGRDVDFKNTTIFMTANTGSELLSALSADPDTMPEGEALEALLMPELTKQFKPAFLGRTIILPFMPLGAEELASVVDMQIGKIRDRVLATYGTDLRLSDAARDALVARAGASEIGARAIEIMIGKDLLPPLSSFFLEKVIAGERVGKIVVDFGENGFGIRAEAAGEADEFAVTEEVGVDKVAASDGATRRMRH

SEQ ID NO: 6990 - protein, 887 aa, Agrobacterium tumefaciens str. C58 (Cereon)
MPKAGGPVYGGSTMNIDKYSERVRGFLQSAQTFALAENHQQFSPEHVLKVLLDDEQGMAASLIERAGGDAKEARLANDAALAKLPKVSGGNGGLSLTAPLAKVFSTAEDLAKKAGDSFVTVERLLQALAIESSASTSASLKKAGATAQALNQVINDIRKGRTADSANAEQGFDALKKYARDLTEEAREGRLDPVIGRDDEIRRTIQVLSRRTKNNPVLIGEPGVGKTAIAEGLALRIVNGDVPESLKDKKLMALDMGALIAGAKYRGEFEERLKAVLNEVQAENGGIILFIDEMHTLVGAGKADGAMDASNLLKPALARGELHCVGATTLDEYRKHVEKDPALARRFQPVLVDEPNVEDTISILRGLKEKYEQHHKVRISDSALVAAATLSNRYITDRFLPDKAIDLMDEAASRLRMQVDSKPEELDELDRRIIQLKIEREALKQETDQSSVDRLRKLEDELADTEEKADALTARWQAEKQKLGHAADLKKRLDEARNELAIAQRNGQFQRAGELTYGIIPGLEKELAAAEARDSSGAGSMVQEVVTPDNIAHVVSRWTGIPVDKMLEGQREKLLRMEDELAKSVVGQGEAVQAVSKAVRRSRAGLQDPNRPIGSFIFLGPTGVGKTELTKSLARFLFDDETAMVRLDMSEYMEKHSVARLIGAPPGYVGYEEGGALTEAVRRRPYQVVLFDEIEKAHPDVFNVLLQVLDDGRLTDGQGRTVDFKNTIIIMTSNLGSEFMTQMGDNDDVDSVRELVMERVRSHFRPEFLNRIDDIILFHRLRRDEMGAIVEIQLKRLVSLLADRKITLELDEDARSWLANKGYDPAYGARPLKRVIQKSVQDRLAEMILGGEIPDGSRVKVTSGTDRLLFKVKPAKGEAETETADAA

SEQ ID NO: 6991 - protein, 864 aa, Agrobacterium tumefaciens str. C58 (Cereon)
MRMGHRYVDIPHWLLAVVDAGIYAETFDELKIPLPVLKAEIGRSLEEAIIGDGEALSLSQNILTAAREAWILASLEAGRDRVTLCDLLLAMDEETSLRSFVRSAFPSLKAMDRGALERLRSSAENGAGVDVPSALTSSGEAGSAQAAGQNDFLRLYTHDMTTDARNGKVDPVIGRDDELRQLVDILTRRRQNNPILVGEAGVGKTAVAEALALEIASGNVPEKLRNVCLLNLDISLLQAGAGVKGEFERRLHGVIDAVKRSAEPVILFIDEAHGLVGAGGAAGQGDAANILKPALARGEVRTVAATTWSEYKKYFEKDAALTRRFQPVHVREPDEATAIRMLRGVADTFVSHHNVTVRDEAIVAAVQLSARYMPARQLPDKAVSLLDTAAAAVSLARQTLPERLRAMESERHLLSDELNWLLREPQDEDMQNRIQSIRDELERLEAGIDDLRGRYDAEMAELAALSEEQPAETGASNVSHLRPATEMRPANAERLVPTVVDREAIAAVVSRWTGIPLGKLLADQIESARTLDVRMRQRVVGQDAAITRIADAMRTARAGLSDPRRPPAVFFLVGMSGTGKTETALSLADLLYGGNSHLTTINMSEFKEEHKVSLLLGSPPGYVGFGEGGVLTEAVRRRPFGVLLLDEIDKAHPGVQDIFYQVFDKGVLRDGEGRDVDFKNTTIFMTANTGSELLSALSADPDTMPEGEALEALLMPELTKQFKPAFLGRTIILPFMPLGAEELASVVDMQIGKIRDRVLATYGTDLRLSDAARDALVARAGASEIGARAIEIMIGKDLLPPLSSFFLEKVIAGERVGKIVVDFGENGFGIRAEAAGEADEFAVTEEVGVDKVAASDGATRRMRH

SEQ ID NO: 6992 - protein, 861 aa, Xylella fastidiosa Temecula1
MRMDKLTSRFQNALADAQSLAVGRDHTIIEPVHVFSVLLDQQGGSTRPLLVQAGVNVPLLRERLTEILEALPKVSGQTVNVSPSNELSRLFHRTDKLAQQHGDQFMASEWFVLAVVDDSGGLGQALRAAGAEKKKIEAAIDKLRGGETVQTENAEEQRQALEKYTIDLTARAESGKLDPVIGRDEEIRRTIQVLQRRTKNNPVLIGEPGVGKTAIVEGLAQRIVNGEVPEGLRSKRLLSLDLGALIAGAKFRGEFEERLKGVLNDLAKNEGRVILFIDELHTMVGAGKAEGAMDAGNMLKPALARGELHCIGATTLDEYRKYIEKDAALERRFQKVFVGEPTVEDTIAILRGLKEKYALHHGVEITDPAIVAAATLSNRYITDRQLPDKAIDLMDEAASRIRMEIDSKPEELDRLERRLIQLKIQREMLKKEKDEASKQRLVDLERDIEVLDREFSDLEEVWRSEKAALQGATKIKESIEQAKLDLEAAQRRQDYAKMSEIQYGVLPALEKQLVAASQAEQHDFTLVQEKVTAEEIAEVVSRWTGIPVSKMLEGERDKLLRMEADLGRRVVGQDEAIKVVSDAVRRSRTGLSDPNRPSGSFLFLGPTGVGKTELCKALAEFLFDSQDAMVRIDMSEFMEKHSVARLIGAPPGYVGYEEGGYLTELVRRRPYSLILLDEVEKAHSDVFNILLQVLDDGRLTDGQGRTVDFRNTVIVMTSNLGSHQIQELSGDDSPEVYTQMKAAVMGVVQAHFRPEFINRLDDIVVFHPLDKAQIKQIARIQLRGLEKRLAESELKLDLDDRALELLGNVGFDPVYGARPLKRAIQSQLENALAQQILAGAFVSGDTVQVGVDGGKLVFSKV

SEQ ID NO: 6993 - protein, 864 aa, Yersinia pestis KIM
MTNIGGVMRLDRLTSKFQLALADAQSLALGRDNQFIEPLHLMSALLNQDGGTVRPLLTSAGINVARLRSDIEQALGRLPQVEGTGGDVQPSNELVRVLNLCDKLAQKRSDKFISSELFVLAVLEDRGTLTDMLKAAGATVAIIDKAIETMRGGDKVDDQGAEDQRQALKKFTIDLTERAEQGKLDPVIGRDEEIRRTIQVLQRRTKNNPVLIGEPGVGKTAIVEGLAQRIVNGEVPEGLKHKRVLSLDMGSLIAGAKYRGEFEERLKGVLNDLSKQEGSVILFIDELHTMVGAGKGDGAMDAGNMLKPALARGELHCVGATTLDEYRQYIEKDAALERRFQKVYVAEPTVEDTIAILRGLKERYELHHHVQITDPAIVAAATLSHRYISDRQLPDKAIDLIDEAGSSIRMQMDSKPESLDRLERRIIQLKLEQQALKKESDDASKKRLEMLNTELEQKEREYSELEEEWKAEKASLTGTQNIKTELEQAKITLEQARRVGDLARMSELQYGTIPELEKQLAAATALEGKTMKLLRNRVTEIEVAEVLARWTGIPVSRMLESERDKLLRMEQDLHQRVIGQDEAVEAVSNAIRRSRAGLSDPNRPIGSFLFLGPTGVGKTELCKALATFLFDSDDAMVRIDMSEFMEKHSVSRLVGAPPGYVGYEEGGYLTEAVRRRPYSVILLDEVEKAHPDVFNILLQVLDDGRLTDGQGRTVDFRNTVVIMTSNLGSDLIQEHFGQMNYSEMKTVVMDVVSHHFRPEFINRIDEVVVFHPLGRAHLASIANIQLERLYKRLEERGYEVKITQPALEFLGEAGFDPVYGARPLKRAIQQEIENPLAQQILSGKLIPGIPVTLDVENGHIIAKQ

SEQ ID NO: 6994 - protein, 879 aa, Yersinia pestis KIM
MTTHSAHLLRRLNPYCAQALAGAATLCQTRAHAEITVEHWLLKLLEQGEGDITVIARRYEWDMDSLWQGLLSHLDTLPRTVQGKPQLSAALQQLIKNAWLDASLQENADAVRSVHLMAALIATPSLLVAEAAWPLLSLSTTQLQRLLPLLDNQSDERPEVQQAAALADSPVNLTDEAATVTSASGQPQLNDALQAALDKFTLDVTAKARANQIDPIFGRDSEIRQMIDILSRRRKNNPILVGEPGVGKTALVEGLALRIADGNVPDSLKTVSVRTLDLGLLQAGAGVKGEFEQRLKNVIEAVQQSPSPVLLFIDEAHTIIGAGNQAGGADAANLLKPALARGELRTIAATWSEYKQYFERDAALERRFQMVKVDEPDDDTACLMLRGLKERYATHHGVHILDAAITAAVTLSRRFLTGRQLPDKAVDLLDTAGARVRMSIDTLPTALMEINAELAALAMEQQAIEQDLLLLPNVSSTRLPEIEQRRAALAVGQHTLEQQYKEEKRLTTLIIEARQDIANAAHLVALQEELVQIQGNAPLLSLDVDVRTVAAVIADWTGVPLGSLLKDEQTNLLSLENRLGERVIGQDAALGALAQRLRAAKTGLTSENGPLGVFLLVGPSGIGKTETALALADSLFGGEKSLITINLSEYQEAHTVSQLKGSPPGYVGYGQGGVLTEAVRKRPYSVVLLDEVEKAHRDVLNLFYQVFDRGFMRDGEGREIDFRNTVIVMTANLGSDHLMQLLDEQPDAPDSTLHELLRPILRDHFQPALLARFQTLIYRPLQVDALKRIVAIKLNQVAQRLHCHYGLSCQIEDSLTDTLVAACLLPDTGARNIDSLLNQQILPVLSQQLLSRMSEQQRTTSLTLGWHEEDGITLTFEGE

SEQ ID NO: 6995 - protein, 916 aa, Yersinia pestis KIM
MVHQALFHEQFKLHMNAVKKTRIKNVAITRKHLFGKLDATLFKGIESATTICKLRGNPYVELVHWLNQLWHQEDNDLKQIIRYFAVDVDAFERELAQALAKLPVGATSISDFSYHIELATERAWIYASLECLDTRIRSGHLLLALLTTMELRRAFFAIAPSMEKIPLEHLSKDLNFITQASPEANEAASDGSPLYDGALPGEASNAIGAAKSGGALAQYTTDLTALAREGKIDPVLGRNHEINTMVDILLRRRQNNPLLTGDAGVGKTAIVEGLALAIAAGSMPPALSQVSLLSLDIVALSAGASMKGEFEARLKSVLDEAIAAEKPVILFIDEVHTLIGAGGNAGTGDAANLLKPALARGQLRTIGATTWSEFKRHIEKDPALTRRFQVLQVDEPDENTAISMLRGLIPALEKHHGVWIMDEALQAAVRLSHRYIPARQLPDKAISLLDTACARIAVAQFSQPIELQHLTFQSETAQTELVSLEKARHFGKAQDARTEQLKTSIAEHGEAADKLDQRWQAERELVSAITTIRTALYDLVSQPEPDEEKRRAYQAQLVQLEAQLSQVRTSLPLVQTEVNAEVIASIVADWTGIPVGQMLKDDIRAVMELPQRLEARVIGQPHALMQLGENIMTARAGLSDPRKPLGVFMLVGPSGVGKTETALAIAESMYGGEQNMITINMSEYQESHTVSSLKGSPPGYVGYGEGGVLTEAVRRKPYSVVLLDEIEKAHSDVHELFFQVFDKGQMEDGEGRFIDFKNTILLLTSNVGSELLSNLLADPDTAPDQDGILSALQPELLKVFPAAFLGRVTVIPYLPLQQDALQHIVRLHLDRIGARLYSQHQLTLKYSDEVVEDVVSRCAVSETGARMLIRYIEQNITPKIGKYILGDSDVKPEQIIFVHKNENGFVIALQCKDDEN

SEQ ID NO: 6996 - protein, 797 aa, Micromonospora echinospora
MRVRGVAAKALESLGISLEGVRQQVEEIIGQGQQAPSGHIPFTPRAKKVLELSLREALQLGHNYIGTEHILLGLIREGEGVAAQVLVKLGADLNRVRQQVIQLLSGYQGKEPAAAGAAAGEAAPSTSLVLDQFGRNLTQAAREGKLDPVIGREKEIERVMQVLSRRTKNNPVLIGEPGVGKTAVVEGLSQKIIKGEVPETLKDKQLYTLDLGALVAGSRYRGDFEERLKKVLKEIRTRGDIILFIDEIHTLVGAGAAEGAIDAASILKPMLARGELQTIGATTLDEYRKHLEKDAALERRFQPIQVGEPSLAHTIEILKGLRDRYEAHHRVSITDAALVAAATLADRYISDRFLPDKAIDLIDEAGARMRIRRMTAPPDLRDFDERIAQVRRDKESAIDAQDFERAAQLRDKEKQLLGQKAQREKEWKAGDLDVVSEVDDEQIAEVLGNWTGIPVYKLTEEETSRLLRMEDELHKRVIGQEDAVKAVSKAIRRTRAGLKDPKRPSGSFIFAGPSGVGKTELSKALAEFLFGSEDALIQLDMSEFHDRYTVSRLVGAPPGYVGYDEGGQLTEKVRRRPFSVVLFDEIEKAHPDVFNTLLQILEDGRLTDGQGRIVDFKNTVIILTTNLGTRDVAKAVSLGFQASEDSESNYDRMKQKVNDELKQHFRPEFLNRIDDTIVFHQLRENEILSIVDIMIARIETQLRNKDMGLELTDNAKKYLAKKGFDPVLGARPLRRTIQRDIEDNLSERILFNELTPGQIVVVDCEGDPSNTAKSKLVFRGADKPPTGPVPDAGAVTA

SEQ ID NO: 6997 - protein, 726 aa, Magnetospirillum magnetotacticum
AHGQEDGRAGGTCPGKISRKPRGKKLGRDQGPTGLPIFAFARRRRRVPASVTARIQNMELCDQHYSEMARRSGRSASPLESLFGRRSLLDEFFGESGFGSLFGDSPLRGGTLGSMGDGDDAVVDATVGEGAPRRGSRRGGGRTIADRLSEQGNKLLQDAAQKAGEFGRSEVDTEHLLLALTSSDVVKTILEQFKVDVDDLRRQIEKEAKRGDAKTEGEIGVSPRLKDALNRAFIASNELGHSYVGPEHLLIGLAEEGEGLAAAMLRKLGLTPQALRQQVTKVVGKGAEEGRVETPSNTPDLDQFSRDLTKLARDGKLDPVIGRAREIETTIEVLARRKKNNPVLIGEPGVGKTAIVEGLAQRIVAGEVPEALRDKRLVELNINSMVAGSKYRGEFEERVQKILKEITEEKDSLILFIDEMHTIVGAGQGGGEGGLDIANTFKPALARGELNLIGATTLNEYQKYIEKDAALERRFQPVYVDEPTVAQTIMILRGLRDTLESHHKVTITDEAIIAAAELSDRYITGRFMPDKAIDLIDQAAARVKISATARPVDVQELEAEVAQIKREQDYAAARKQFDRAAELKKELEQKQKELDELLEIWKRDQASATAEVRADHVAQIVSKITGVPVTELTAEEKDKLLKLEEKLHERVIGQEEAIRAWADAVRLARAGLREVSVPTATFLFLGPTGVGKTELAKTLAEVIFGDQHALIRIDMSEYGERHSVPG

SEQ ID NO: 6998 - protein, 846 aa, Leptospira interrogans serovar lai str. 56601
MLEFTKRAKRVINEIAQDEAKRLGSDYIGPEHILLGLLKEEDSVAIKILNNLNINLNELRKEVERRTREASGALLMDVAGGQDRYQKIIELSKEEAKRLKHNYVGTEHILLALLRDNNNIAGGALYSFSVNYNVIKSEILRLLGAPPTSSVGVSSTTQSGPQPRQEKTKTPILDEFARDLTQLARDKKLDPVVGRATEIQRVIQILSRKTKNNPVLVGESGVGKTAIVEGLALAIVEKSVPDLLFEKRVLSLDLASLIAGTKYRGEFEERLKKIMKEITSSTNIIIFIDELHTLIGAGAAEGAVDAANILKPALARGELQCIGATTSAEYRKYIEKDSALERRFQVVKVAEPSVDDAIQILQGLKKAYETHHKVRYSDKALEQSVKLSHRYINDRYLPDKAIDIIDEAGAKARLANCARPQTIKDLEEEIKSLASKKEELVRAQEYEKAAGVRDEVNRKKQAMEEKLRSWQEKMEDFAVNIEEDDILSVISLWTGIPLEKMEESESDKLLRLEEELKKRVVGQAEAIEKIAKAVRRARTGFKSERRPTGSFIFLGPTGVGKTELAKALANFLFGNDDAMLRVDMSEYMEPHAVSRLIGAPPGYVGYDDGGQLTEFVRKRPYSIILLDEIEKAHHDIFNILLQIMEEGNLTDTKGRKVNFRDTIIIMTSNIGAKEIQAGGRLGFEDRKDEALKYKSDQTRDQLKKYFNPEFLNRVDEVIYFGSLTKENIMSIIDIMVIDTNKRLHEKTIQISITQAAKDHIMDIGYDEKFGARPLRRVFQRELEDHMAVQTLKGAYKEPTKIEIDFKEGKLEFLETPWTDYKPVDPKTGGNDNSSGNPERSEEIALV

SEQ ID NO: 6999 - protein, 235 aa, Streptomyces coelicolor
KAIDVIDEAGSRMRIRRMTAPPDLREFDEKIAGVRRDKESAIDSQDFEKAASLRDKEKQLLAAKAKREKEWKAGDMDVVAEVDGELIAEVLATATGIPVFKLTEEESSRLLRMEDELHKRVIGQKDAVKALSKAIRRTRAGLKDPKRPGGSFIFAGPSGVGKTELSKALAEFLFGDEDALISLDMSEFSEKHTVSRLFGSPPGYVGYEEGGQLTEKVRRKPFSVVLFDEIEKAHP

SEQ ID NO: 7000 - protein, 861 aa, Xanthomonas campestris pv. campestris str. ATCC 33913
MRMDKLTSRFQQALADAQSLAVGRDHNIIEPVHVLAALLDQSGGSTRPLLSQSGVNVPALRERLGEALDTLPKVSGQEGNLSIGNDLNRLLNQTDKLAQQHGDAFIASEWFVLAAADDASPLGVALRAAGGDKKKIEAAIDKLRGGETVQSENAEEQRQALEKYTIDLTARAESGKLDPVIGRDEEIRRTIQVLQRRTKNNPVLIGEPGVGKTAIVEGLAQRIINGEVPEGLRGKRVLSLDMGALIAGAKFRGEFEERLKAVLSDLSKNEGQIILFIDELHTMVGAGKADGAMDAGNMLKPALARGELHCIGATTLDEYRKYIEKDAALERRFQKVFVGEPTVEDTIAILRGLKERYAVHHGVEITDPAIVAAATLSNRYITDRQLPDKAIDLMDEAASRIRMEIDSKPEELDRLERRLIQLKIQREMLKKEKDEASRQRLADLESDIDKLEREFSDLNEVWKSEKAALQGTTKIKEQIEHAKLELEAAQRRQDYAKMSEIQYGVLPQLEKQMLLANEVEHHDFKLVQDRVTAEEIAEVVSRWTGIPVNKMLEGERDKLLRMEDELHRRVVGQEEAIKVVSDAVRRSRAGLSDPNRPSGSFLFLGPTGVGKTELCKALADFLFDSTEAMIRIDMSEFMEKHSVSRLIGAPPGYVGYEEGGYLTEAVRRRPYSLILLDEVEKAHADVFNILLQVLDDGRLTDGQGRTVDFRNTVIVMTSNLGSHQIQELSGDGSAEAYTQMKAAVMGVVQAHFRPEFINRLDDIVVFHPLDKAQIKSIARIQLQGLEKRLAERGLKLDLDDPALELLGNVGFDPVYGARPLKRAIQSQVENPLAQQILSGQYTSGDTVRVRTEGGHLAFTKG

SEQ ID NO: 7001 - protein, 871 aa, Xanthomonas axonopodis pv. citri str. 306
MPATCSEDLPMRMDKLTSRFQQALADAQSLAVGRDHNIIEPVHVLAALLDQSGGSTRPLLSQAGVNVPLLRERLGEALDTLPKVSGQEGNLSIGNDLNRLLNQTDKLAQQHGDAFIASEWFVLAAADDASPLGVALRAAGGDKKKIEAAIDKLRGGETVQSENAEEQRQALEKYTIDLTARAESGKLDPVIGRDEEIRRTIQVLQRRTKNNPVLIGEPGVGKTAIVEGLAQRIINGEVPEGLRGKRVLSLDMGALIAGAKFRGEFEERLKAVLSDLSKNEGQIILFIDELHTMVGAGKADGAMDAGNMLKPALARGELHCIGATTLDEYRKYIEKDAALERRFQKVFVGEPTVEDTIAILRGLKERYAVHHGVEITDPAIVAAATLSNRYITDRQLPDKAIDLMDEAASRIRMEIDSKPEELDRLERRLIQLKIQREMLKKEKDDASRQRLADLETDIDKLEREFYDLNELWKSEKAALQGTTKVKEQIEHAKLELEAAQRRQDYAKMSEIQYGVLPQLEKQMALANEVEHHDFKLVQDRVTAEEIAEVVSRWTGIPVNKMLEGERDKLLRMEDELHHRVVGQNEAIKVVSDAVRRSRAGLSDPNRPSGSFLFLGPTGVGKTELCKALADFLFDSTEAMIRIDMSEFMEKHSVARLIGAPPGYVGYEEGGYLTEAVRRRPYSLILLDEVEKAHPDVFNILLQVLDDGRLTDGQGRTVDFRNTVIVMTSNLGSHQIQELSGDDSAEAYTQMKAAVMGVVQAHFRPEFINRLDDIVVFHPLDKAQIKSIARIQLQGLEKRLAERGLKLDLDDAALEVLGSVGFDPVYGARPLKRAIQSQVENPLAQQILSGQYLSGDSVRVRADGGRLVFTKD

SEQ ID NO: 7002 - protein, 926 aa, Xanthomonas axonopodis pv. citri str. 306
MAEISRSSLFGKLNPLAYRGIESATVFCKLRGNPYVELVHWLHQLLQLQDSDLHRIIRHFQLNPSTLARDVTAALDGLPRGSTAVTDLSANVEEAVERGWVYASLGFGEAQVRTGYLVVGMLSVRGLRHALLAISKEFDKLKPAVLNERFAEIVAGSPEDGLLPSDGFSLGQAAAPGETSGAIAPAALGKQEALKKFTTDLTAQAREGKLDPIIGRDDEIRQVVDILMRRRQNNPILVGEAGVGKTAVVEGFAQRIARGDVPPALKDVQLRALDVGLLQAGASMKGEFEQRLRAVIDEVQASPKPIILFVDETHTLIGAGGAAGTGDAANLLKPALARGTLRTVGATTFAEYKKYIEKDPALTRRFQAVQVDEPDESKAVRMMRGVASMMEQHHRVQILDEALEAAVKLSHRYIPARQLPDKSVSLLDTACARVAVSLHATPAEVDDSRRRIESLDTEQAIIERERAIGIVVEERAAACAGLLESEHGRLQALEQRWVAEKALVDELLSLRAQLRSDNAPVEGTGSALEAEADTAQAASGDIAVLDAPVQVDRDTLLARLQLVQAGLGALQGESPLILPTVDHQAVAAVVADWTGIPVGRMARDEIDTVLRLPELLAKRVIGQDHAMEMIAKRIQTSRAGLDNPDKPIGVFLLAGTSGVGKTETALALAETLYGGEQNLITINMSEYQEAHTVSSLKGAPPGYVGYGEGGVLTEAVRRKPYSVVLLDEVEKAHPDVHELFFQVFDKGWMEDGEGRRIDFRNTLIILTSNAGTDLIASLCKDPDLMPDPEGMAKAIREPLLKVFPPALLGRLVAIPYYPLSNAMLGQIVRLQLNRIKTRIEERYKIPFDYDDSVVELVISRCTESESGGRMIDAILTNSVLPEISREFLERVNSGDPVLRIELGACDRSFVYDFLKNRHQETKNGNL

SEQ ID NO: 7003 - protein, 859 aa, Caulobacter crescentus CB15
MNIDLYSDRAKQAVQSAQSLALARGHQQFAPEHILKVLLEEKDGLSRALIQSAGGRPDQLDGGVETLLAKTPRVDGAGGQLYMKPDTARVFAEAEKSAKAAGDAFVTTERLLIAIAKEGGEAAKLFKEAGVSAQSLETAANAMRKGRTADSANAEEGYEALKRYARDLTAAARDGKLDPVIGRDEEIRRTIQVLSRRTKNNPVLIGEPGVGKTAIVEGLALRIVNGDVPESLKDKKLLSLDMGSLIAGAKYRGEFEERLKAVLGEVTAAEGSIILFIDEMHTLVGAGKGDGAMDASNLLKPALARGELHCVGATTLDEYRKHVEKDAALARRFQPVFVSEPTVEDTVSILRGLKEKYEVHHGVRISDSAIVAAATLSNRYIADRFLPDKAIDLVDEASSRVRMQIDSKPEELDEIDRRLVQLKIEREALSKETDAASKQRLENLEVEIDDLQFRSDEMTARWKAEKEKVGGAAQAREALDRLRADLANAQRAGDFARAGQIQYGEIPALERRLAEAEAGDTQALTPEVVDAEQIAAVVSRWTGVPVEKMLEGEREKLLKMEDELRGRVVGQDEALEAVSDAVRRARAGLQDPSKPIGSFLFLGPTGVGKTELTKSLAEFLFADEAAITRMDMSEYMEKHSVSRLIGAPPGYVGYDEGGALTEAIRRRPYQVVLFDEIEKAHPDVFNVLLQVLDDGRLTDGQGRTVDFRNTLIIMTSNLGAEYLASQEDGEDVEAVRPMVMNTVRGHFRPEFLNRIDEIILFKRLSRHNMGDIVRIQLQRVEKLLADRRMALALDAEALNWLADKGYDPVYGARPLKRVIQKELVDPIAKKLLAGEIEDGGVIAVGVTDGQLSFGKAVLQ

SEQ ID NO: 7004 - protein, 811 aa, Bacillus anthracis str. A2012
MMFGRFTERAQKVLALSQEEAIRIGHNNIGTEHILLGLVREGEGIAAKALIALGLSPEKVQKEVEALIGRGTEASQTVHYTPRAKKVIELSMDEARKLGHSYVGTEHILLGLIREGEGVAARVLNNLGVSLNKARQQVLQLLGSNEASSGHQGGSSTNANTPTLDSLARDLTVVARENRLDPVIGRGKEIQRVIEVLSRRTKNNPVLIGEPGVGKTAIAEGLAQQIVNNEVPETLRDKRVMTLDMGTVVAGTKYRGEFEDRLKKVMDEIRQAGNIILFIDELHTLIGAGGAEGAIDASNILKPSLARGELQCIGATTLDEYRKYIEKDAALERRFQPIHVDEPSLDESTQILKGLRDRYEAHHRVSITDDAIDAAVKLSDRYITDRFLPDKAIDLIDEAASKVRLRSYTTPPNLKELEVKLEEIRKEKDAAVQSQEFEKAASLRDMEQRLREKLEDTKRQWKEQQGKENSEVTVEDIANVVSTWTRIPVSKLAQTETDKLLNLESILHDRVIGQDEAVVAVAKAVRRARAGLKDPKRPIGSFIFLGPTGVGKTELARALAESMFGDEDAMIRIDMSEYMEKHSTSRLVGSPPGYVGYEEGGQLTEKVRRKPYSVVLLDEVEKAHPDVFNILLQVLEDGRLTDSKGRTVDFRNTIVIMTSNVGAEALKRNKHLGFNVQDESRDYSDMKGKVMDELKKAFRPEFLNRIDEIIVFHMLEKKHIQEIVTLMVNQLVNRLKEQEIELHLTEGAISAIADKGFDREYGARPLRRAIQKHVEDRLSEELLKGAIEKGQKVIFDVEGESFVIHSAEKVK

SEQ ID NO: 7005 - protein, 438 aa, Chlorobium tepidum TLS
MNTADTRQRLLDIEKQIASLREEQATVKAQWEAEKELIHTSRRLKEELEDLRVQAENYERSGDYGKVAEIRYGKIAEIEKALEENNRKIEARQASGDLIMKEEIDAGDIADIVSRWTGIPVSKMLQSERQKLLGIESELHRRVVGQDEAVRAVSDAVKRSRAGMGDEKRPIGSFIFLGPTGVGKTELARTLAEYLFDDEDALIRIDMSEYMEAHTVSRLVGAPPGYVGYEEGGQLTEAVRRKPFSVVLLDEIEKAHPDVFNILLQILDDGRLTDSKGRTVNFKNTIIIMTSNIGAQLIQSEMEHLEGRDADAALAGLKEKLFQLLKQQVRPEFLNRIDEVILFTPLTRENLREIVTIQFNRIKETARRQRITLEISDEALMWLAKTGFDPAFGARPLKRVMQRQITNRLSEMILAGQVGEDDTVEIGLENDAIVMKKK

SEQ ID NO: 7006 - protein, 866 aa, Clostridium perfringens str. 13
MNADKMTLRVQQSLNDAYEIAVKYNNQQLDIIHLFSALVNQKDGLIPNIFEKMGVNIDSLKRDIHVQIDRMPKVLGEAAQSSGVTATRRINEVLIKAEEISKQFEDSYISVEHVMLAMIDIDKNGAVGEILRKNNITKDGFLKVLNEVRGSQRVDSQDPEGTYEALDKYGTNLIELVKQHKLDPVIGRDEEIRRAVRILSRKTKNNPILIGEPGVGKTAIVEGLAERIVRGDVPEGLKDKVIISLDMGALIAGAKYRGEFEERLKAVLKEVQSSEGKILLFIDEIHTIVGAGKTDGAMDAGNLIKPMLARGELHCIGATTFDEYRQYIEKDKALERRFQPVIVEEPTVEETVSILRGLKERFEIHHGIRIHDSAIVAAAKLSHRYIQDRYLPDKAIDLIDEAGAMIRSEIDSLPTELDIIRRKILMLETEKEALSKENDDASKERLVALEKELAELQDKNDEMTIKYEKEKSHISAVRDLKAELDEARGLAEKYEREYDLNKVAELKYGKIPELERKIKEQEASMEKDNENALLKEEVTENEISEIISKWTGIPVTKLVESEREKLLRLEEELRERVIGQDEATTAVANAVIRARAGLKDERKPIGSFIFLGPTGVGKTELAKTLARNLFDSEDNIVRIDMSEYMEKHAVSRLIGPPPGYVGYEEGGQLTEAVRRNPYSVILFDEIEKAHDDVFNLFLQILDDGRLTDNKGKTVDFKNTIIIMTSNIGSGYLLENKSGEGIEDDIRENVMNEMKLRFKPEFLNRVDDIIMFRPLSSEGIKKIIDIFLRDVENRLRERNITLEVTDRAKEILAEEGYDPVYGARPLKRYISNVLETEIAKKIIAGEIYDGSVALIDGVDGKIIVSRK

SEQ ID NO: 7007 - protein, 814 aa, Clostridium perfringens str. 13
MRLDNFNENSKIVINKGKESSLMLKHGYMGTEHLLIGLINENGQCSKILEESNVTEEKVLSFIKLYVGIGEVNYSLDEVPFTPRCKKILDRSVEIAKEYGHSISRPEHILLALIKEREGVANLILTKIVKNDIKNISDKLNNILGRIPSKESKSLKEKEKPKRKDTPTLNLYGINLIERADKNKLDPVIGRKDETQRLLEILCRRMKNNPCLIGEPGVGKTAVVEGLAQRILLGEVPDIIKDKRIFTLDVTSMLAGAKYRGEFEERLKKVLNEVKDSDDIILFIDEMHNIVGAGGAEGAIDASNILKPALARGEIQCIGATTTDEYRKNIEKDSALERRFQPVVVKEPSKEDSVLILKGLREKYEVHHNVKLTDEAIEAAVNLSSRYITDRFLPDKAIDLIDEAAAKVRIESMIVPPRLFKQEELIANLKVEKEEAIKLQDFELAAKLRDEELMLQEELERDKELWREENYNKIYEVNKEHIAKVVSKWTQIPVERLTEKESSRLLKLEEKLSKRVIGQLEAIRTISKAVRRSRVGLKDPKRPIGSFAFLGPTGVGKTELCKALAEAMFGDENKFIRLDMSEYMEKHGVSRLIGAPPGYVGYEEGGQLTEKVRRNPYSVILFDEIEKAHPDIFNVLLQILEDGVLTDGKGKTVDFKNTIIIMTSNIGADKLDKKNAVGFSAKEDKERDYDKMKGIMLEELKQNFKPEFVNRLDDIVVFHSLEKDHLLKIVDLMICSLKERLNDLQLSLNFSQECKEFLVKKGTELKYGARPLRRVITKYIEDRLSEELLSGNILRGSKVDVFLEDDVVKFKKTV

SEQ ID NO: 7008 - protein, 852 aa, Corynebacterium efficiens YS-314
MSSFNPTTKTSEAMQAALQQASANGNPDIRPAHLLVAILDQADGVAAPVLTAAGVDPKTILAEAQKLVDGYPKASGSNLANPNFNRDALNALTASQELAGELGDEYVSTEVLLAGIARGKSDAADLLKGKGATYDAIKAAFQSVRGSQKVTSQDPEGQFQALEKYSTDLTKLAREGKIDPVIGRDQEIRRVVQVLSRRTKNNPVLIGEPGVGKTAIVEGLARRIVAGDVPESLKGKTLISLDLGSMVAGAKYRGEFEERLKAVLDEIKGANGEIVTFIDELHTIVGAGASGESAMDAGNMIKPLLARGELRLVGATTLNEYRKYIEKDTALERRFQQVYVGEPSVEDTVGILRGLKERYEVHHGVRIQDSALVAAAELSHRYITSRFLPDKAIDLVDEAASRLRMEIDSSPQEIDELERIVRRLEIEEVALTKETDVASRERLERLRSELADEREKLSELKARWQNEKAVIDDVRKFKEELEALRSESDIAEREGDYGRVAELRYGRIPELEKKIAEAEEKIGGADNSMLTEEVTPEVIAEVVSAWTGIPAGKMMQGETEKLLNMERFLGKRVVGQHEAVTAVSDAVRRSRAGVADPNRPTGSFLFLGPTGVGKTELAKAVSEFLFDDERAMVRIDMSEYSEKHSVARLVGAPPGYVGYDQGGQLTEAVRRRPYTTVLFDEVEKAHPDVFDILLQVLDDGRLTDGQGRTVDFRNTILILTSNLGAGGTREQMMDAVKMAFKPEFINRLDDIVVFDPLSQEQLASIVEIQISQLAERLSDRRLTLRVSDAAKLWLAERGYDPAYGARPLRRLIQQAIGDQLAKELLAGEIRDGDRVLVDVADGGQYLAVSREH

SEQ ID NO: 7009 - protein, 927 aa, Corynebacterium efficiens YS-314
MFERFTDRARRVIVLAQEEARMLNHNYIGTEHILLGLIHEGEGVAAKALESMGISLDAVRQEVEEIIGHGSKPTTGHIPFTPRAKKVLELSLREGLQMGHKYIGTEFLLLGLIREGEGVAAQVLVKLGADLPRVRQQVIQLLSGYEGGQGGSPDSPQGGQGGDAVGAGSAPGGRATGSGAGERSNSLVLDQFGRNLTQAAKDGKLDPVVGRDKEIERIMQVLSRRTKNNPVLIGEPGVGKTAVVEGLALDIVNGKVPETLKDKQVYSLDLGSLVAGSRYRGDFEERLKKVLKEINQRGDIILFIDEIHTLVGAGAAEGAIDAASLLKPKLARGELQTIGATTLDEYRKHIEKDAALERRFQPVQVPEPSVELSIEILKGLRDRYEAHHRVSITDGALVAAAQLSDRYINDRFLPDKAVDLIDEAGARMRIKRMTAPESLREVDERIADVRREKEAAIDAQDFEKAAGLRDKERKLGEERAEKEKQWRSGDLEEIAEVGEEQIAEVLATWTGIPVFKLTEAESSRLLNMEEELHKRIIGQDEAVKAVSRAIRRTRAGLKDPKRPSGSFIFAGPSGVGKTELSKALAEFLFGDDDSLIQIDMGEFHDRFTASRLFGAPPGYVGYEEGGQLTEKVRRKPFSVVLFDEIEKAHKEIYNTLLQVLEDGRLTDGQGRIVDFKNTVLIFTSNLGTQDISKAVGLGFSGSNETDSDAQYDRMKNKVHDELKKHFRPEFLNRIDEIVVFHQLTREQIIQMVELLIGRVSRALADKDMGIELTDKAKALLASRGFDPVLGARPLRRTIQREIEDAMSEKILFGEIGAGEIVTVDVDGWDGESKNTDGATFTFTPRPKPLPDGKFSEISVEAAEAIQDVDSAADGDVPETGSLDGIDPETLRELDEDASSNPTESERVTGDYYGTDDQPGGAAPQREQ

SEQ ID NO: 7010 - protein, 818 aa, Staphylococcus aureus subsp. aureus MW2
MLFGRLTERAQRVLAHAQEEAIRLNHSNIGTEHLLLGLMKEPEGIAAKVLESFNITEDKVIEEVEKLIGHGQDHVGTLHYTPRAKKVIELSMDEARKLHHNFVGTEHILLGLIRENEGVAARVFANLDLNITKARAQVVKALGNPEMSNKNAQASKSNNTPTLDSLARDLTVIAKDGTLDPVIGRDKEITRVIEVLSRRTKNNPVLIGEPGVGKTAIAEGLAQAIVNNEVPETLKDKRVMSLDMGTVVAGTKYRGEFEERLKKVMEEIQQAGNVILFIDELHTLVGAGGAEGAIDASNILKPALARGELQCIGATTLDEYRKNIEKDAALERRFQPVQVDEPSVVDTVAILKGLRDRYEAHHRINISDEAIEAAVKLSNRYVSDRFLPDKAIDLIDEASSKVRLKSHTTPNNLKEIEQEIEKVKNEKDAAVHAQEFENAANLRDKQTKLEKQYEEAKNEWKNAQNGMSTSLSEEDIAEVIAGWTGIPLTKINETESEKLLSLEDTLHERVIGQKDAVNSISKAVRRARAGLKDPKRPIGSFIFLGPTGVGKTELARALAESMFGDDDAMIRVDMSEFMEKHAVSRLVGAPLGYVGHDDGGQLTEKVRRKPYSVILFDEIEKAHPDVFNILLQVLDDGHLTDTKGRTVDFRNTIIIMTSNVGAQELQDQRFAGFGGSSDGQDYETIRKTMLKELKNSFRPEFLNRVDDIIVFHKLTKEELKEIVTMMVNKLTNRLSEQNINIIVTDKAKDKIAEEGYDPEYGARPLIRAIQKTIEDNLSELILDGNQIEGKKVTVDHDGKEFKYDIAEQTSETKTPSQA

SEQ ID NO: 7011 - protein, 701 aa, Staphylococcus aureus subsp. aureus MW2
MNNGFFNSDFDSIFRRMMQDMQGSNQVGNKKYYINGKEVSPEELAQLTQQGGNHSAEQSAQAFQQAAQRQQGQQGGNGNYLEQIGRNLTQEARDGLLDPVIGRDKEIQETAEVLSRRTKNNPILVGEAGVGKTAIVEGLAQAIVEGNVPAAIKDKEIISVDISSLEAGTQYRGAFEENIQKLIEGVKSSQNAVLFFDEIHQIIGSGATGSDSGSKGLSDILKPALSRGEISIIGATTQDEYRNNILKDAALTRRFNEVLVNEPSAKDTVEILKGIREKFEEHHQVKLPDDVLKACVDLSIQYIPQRLLPDKAIDVLDITAAHLSAQSPAVDKVETEKRISELENDKRKAVSAEEYKKADDIQNEIKSLQDKLENSNGEHTAVATVHDISDTIQRLTGIPVSQMDDNDIERLKNISNRLRSKIIGQDQAVEMVSRAIRRNRAGFDDGNRPIGSFLFVGPTGVGKTELAKQLAIDLFGNKDALIRLDMSEYSDTTAVSKMIGTTAGYVGYDDNSNTLTEKVRRNPYSVILFDEIEKANPQILTLLLQVMDDGNLTDGQGNVINFKNTIIICTSNAGFGNGNDAEEKDIMHEMKKFFRPEFLNRFNGIVEFLHLDKDALQDIVNLLLDDVQVTLDKKGITMDVSQDAKDWLIEEGYDEELGARPLRRIVEQQVRDKITDYYLDHTDVKHVDIDVEDNELVVKGK

SEQ ID NO: 7012 - protein, 925 aa, Corynebacterium glutamicum ATCC 13032
MFERFTDRARRVIVLAQEEARMLNHNYIGTEHILLGLIHEGEGVAAKALESMGISLDAVRQEVEEIIGQGSQPTTGHIPFTPRAKKVLELSLREGLQMGHKYIGTEFLLLGLIREGEGVAAQVLVKLGADLPRVRQQVIQLLSGYEGGQGGSPEGGQGAPTGGDAVGAGAAPGGRPSSGSPGERSTSLVLDQFGRNLTQAAKDGKLDPVVGRDKEIERIMQVLSRRTKNNPVLIGEPGVGKTAVVEGLALDIVNGKVPETLKDKQVYSLDLGSLVAGSRYRGDFEERLKKVLKEINQRGDIILFIDEIHTLVGAGAAEGAIDAASLLKPKLARGELQTIGATTLDEYRKHIEKDAALERRFQPVQVPEPSVDLTVEILKGLRDRYEAHHRVSITDGALTAAAQLADRYINDRFLPDKAVDLIDEAGARMRIKRMTAPSSLREVDERIADVRREKEAAIDAQDFEKAAGLRDKERKLGEERSEKEKQWRSGDLEDIAEVGEEQIAEVLANWTGIPVFKLTEAESSRLLNMEEELHKRIIGQDEAVKAVSRAIRRTRAGLKDPKRPSGSFIFAGPSGVGKTELSKALAGFLFGDDDSLIQIDMGEFHDRFTASRLFGAPPGYVGYEEGGQLTEKVRRKPFSVVLFDEIEKAHKEIYNTLLQVLEDGRLTDGQGRIVDFKNTVLIFTSNLGTADISKAVGLGFSGSSETDSDAQYDRMKNKVHDELKKHFRPEFLNRIDEIVVFHQLTKDQIVQMVDLLIGRVSNALAEKDMSIELTEKAKDLLANRGFDPVLGARPLRRTIQREIEDQMSEKILFGEIGAGEIVTVDVEGWDGESKDTDRAKFTFTPRPKPMPEGKFSEISVEAAEAIQDVDSAADGDVPETDSLSDIDLETLEKFEEDVENGTDIDQVSGDYYGTDDQGGTAPSKE

SEQ ID NO: 7013 - protein, 871 aa, Thermosynechococcus elongatus BP-1
MQPSNPNQFTEKAWAAIARTPDLAKQAQHQNLESEHLMKSLLEQEGLATQIFQKAGCSVQRIRDLTDEFISRQPKISHPSGVYLGQSLDKLLDRAEEARKQFGDEFISIEHLVLAFAQDDRFGKKLFQDIGLSEKVLREAIQQIRGSQKVTDQNPEGKYAALEKYGRDLTLLARQGKLDPVIGRDDEIRRVIQILSRRTKNNPVLIGEPGVGKTAIAEGLAQRIVARDVPDSLRDRQLIALDMGALIAGAKYRGEFEERLKAVLKEVTDSNGQIILFIDEIHTVVGAGATQGAMDAGNLLKPMLARGELRCIGATTLDEYRKYIEKDAALERRFQQVYVDQPSVEDTISILRGLKERYEIHHGVKISDTALVAAATLSARYISDRFLPDKAIDLVDEAAAKLKMEITSKPEELDEIDRKILQLEMERLSLQKETSAASRDRLEKLERELADLKEEQSRLNAQWQAEKEVIDRLQSIKEEIEKVNIEIQQAERNYDLNRAAELKYGKLTELHKKLAEAEAKLREIQVGGRSLLRDEVTEADIAEIISKWTGIPVSKLVESEAQKLLHLEEELHKRVVGQDEAVSAVAEAIQRSRAGLADPNRPIASFIFLGPTGVGKTELAKALAAFMFDTEEALVRIDMSEYMEKHAVSRLIGAPPGYVGYDEGGQLTEAIRRRPYAVVLFDEIEKAHPDVFNVFLQILDDGRVTDSQGRTVDFKNTIIIMTSNIGSQYILDVAGDDSRYSEMYNRVMEAMRAHFRPEFLNRVDEFIIFHSLRKDQLRQIVQLQVQRLQQRLSDRHITLSLTEKAIDFLAEVGYDPVYGARPLKRAIQKQLETPIAKAILRGDFFDGDTILVDVGEDERLSFRRQVELATV

SEQ ID NO: 7014 - protein, 887 aa, Thermosynechococcus elongatus BP-1
MQPTDPTKFTDKAWEAIVKSQDVAREYRSQYLETEHVMIALLREEGLGQVILERSDIDTEWVLKRLMDFARQQPRVPAGSELYCGRSLDALLDEANRLRQEEEDQFISIEHLLLAFVGDRRIGQRLFRALNCDRQQLAATVKAIRGAQKVLDQNPENKYAALEKYGRDLTEAARQGKLDPVIGRDEEIRRVIQVLSRRTKNNPVLIGEPGVGKTAIAEGLAQRIINGDVPESLKNRRLISLDLGSLVAGAKFRGDFEDRLKAVLHEVTHSEGQIVLFIDELHTVVGAGANQNSSMDASNLLKPMLARGELRCIGATTLDEYRKYIEKDAALERRFQQVYIGQPSVEDTISILRGLKDRYEIHHNVKITDSALVAAAMLSDRYISDRYLPDKAIDLVDEAAAKLKMEITTKPAELEALERRLRQLEMERLSLKQEESLPLSQAPLQATRDRLQRIEAEIAQLQPRQQAMQARWQAEKELLERINSLKEEEDQVKLQIEQAERDYNLNKAAQLKYGRLETLQRELEATEAQLLELQAAGGTFLRDQVTEADIAEIVAKWTGIPLQKLMASERQKLLQLEQVLHQRVIGQSDAVAAVAAAIRRARAGMKDPARPIGSFLFMGPTGVGKTELARALAEALFDDENALVRIDMSEYMEKHAVSRMIGAPPGYVGFDSGGQLTEAIRRRPYAVVLFDEVEKAHPEVFNVLLQVLDDGRITDSQGRTVDFRNTVIIMTSNLGSEHILDLAADDSRYEEMRQRVLQSAQKYFRPEFLNRIDDVILFHGLGRTELAQIAQIQLRRVEKLLADQKIHLRLTPAALDHLVAVGFDPVYGARPLKRAIQRELENPLAVKLLEEVFTPGDTILVDLVGSELTFRAVSPAGTGDRDTVSAS

SEQ ID NO: 7015 - protein, 824 aa, Thermosynechococcus elongatus BP-1
MFERFTEKAIKVIMLAQEEARRLGHNFVGTEQILLGLIGEGTGVAAKVLRSMGVNLKDARIEVEKIIGRGSGFVAVEIPFTPRAKRVLELSLEEARQLGHNYIGTEHLLLGLIREGEGVAARVLENLGVDLSKVRTQVIRMLGETAEVTAGASQGRTKTPTLDEFGVNLTQLAIEGKLDPVVGRQKEIERVIQILGRRTKNNPVLIGEPGVGKTAIAEGLAQRIANKDVPDILEDKRVVTLDIGLLVAGTKYRGEFEERLKKIMDEIRQAGNVILVIDEVHTLIGAGAAEGAIDAANILKPALARGELQCIGATTLDEYRKHIERDAALERRFQPVMVGEPSVEETIEILYGLRERYEKHHKLKISDEALEAAAKLSDRYISDRYLPDKAIDLIDEAGSRVRLINSQLPPAAKELDRELRQVLKEKDDAVRAQNFDKAGELRDREMELKAQIRAIAQQKKAEIANGEEETPVVTEEDIAHIVASWTGVPVSKLTESESEKLLHMEETLHQRVIGQDEAVKAISRAIRRARVGLKNPNRPIASFIFSGPTGVGKTELTKALAAYFFGSEEAMIRLDMSEYMERHTVSKLIGSPPGYVGYNEGGQLTEAVRRRPYTVVLFDEIEKAHPDVFNLLLQILEDGRLTDSKGRTVDFKNTLLIMTSNIGSKVIEKGAAGLGFEFGTEDAAESQYNRIRSLVNEELKQYFRPEFLNRLDEIIVFRQLTKDEVKQIADILLKEVFSRLTEKGITLEVTERFKERLIDEGYNPSYGARPLRRAIMRLLEDTLAEEMLSGRIREGDTALIDVDESGQVKIQAQPRRELLPQAVE

SEQ ID NO: 7016 - protein, 861 aa, Shigella flexneri 2a str. 301
MGGVMRLDRLTNKFQLALADAQSLALGHDNQFIEPLHLMSALLNQEGGSVSPLLTSAGINAGQLRTDINQALNRLPQVEGTGGDVQPSQDLVRVLNLCDKLAQKRGDNFISSELFVLAALESRGTLADILKATGATTANITQAIEQMRGGESVNDQGAEDQRQALKKYTIDLTERAEQGKLDPVIGRDEEIRRTIQVLQRRTKNNPVLIGEPGVGKTAIVEGLAQRIINGEVPEGLKGRRVLALDMGALVAGAKYRGEFEERLKGVLNDLAKQEGNVILFIDELHTMVGAGKADGAMDAGNMLKPALARGELHCVGATTLDEYRQYIEKDAALERRFQKVFVAEPSVQDTIAILRGVKERFELLHHVQITDPAIVAAATLSHRYIADRQLPDKAIDLIDEAASSIRMQIDSKPEELDRLDRRIIQLKLEQQALMKESDEASKKRLDMLNEELSDKERQYSELEEEWKAEKASLSGTQTIKAELEQAKIAIEQARRVGDLARMSELQYGKIPELEKQLEAATQLEGKTMRLLRNKVTDAEIAEVLARWTGIPVSRMMESEREKLLRMEQELHHRVIGQNEAVDAVSNAIRRSRAGLADPNRPIGSFLFLGPTGVGKTELCKALANFMFDSDEAMVRIDMSEFMEKHSVSRLVGAPPGYVGYEEGGYLTEAVRRRPYSVILLDEVEKAHPDVFNILLQVLDDGRLTDGQGRTVDFRNTVVIMTSNLGSDLIQERFGELDYAHMKELVLGVVSHNFRPEFINRIDEVVVFHPLGEQHIASIAQIQLKRLYKRLEERGYEIHISDEALKLLSENGYDPVYGARPLKRAIQQQIENPLAQQILSGELVPGKVIRLEVNEDRIVAVQ

SEQ ID NO: 7017 - protein, 857 aa, Shigella flexneri 2a str. 2457T
MRLDRLTNKFQLALADAQSLALGHDNQFIEPLHLMSALLNQEGGSVSPLLTSAGINAGQLRTDINQALNRLPQVEGTGGDVQPSQDLVRVLNLCDKLAQKRGDNFISSELFVLAALESRGTLADILKATGATTANITQAIEQMRGGESVNDQGAEDQRQALKKYTIDLTERAEQGKLDPVIGRDEEIRRTIQVLQRRTKNNPVLIGEPGVGKTAIVEGLAQRIINGEVPEGLKGRRVLALDMGALVAGAKYRGEFEERLKGVLNDLAKQEGNVILFIDELHTMVGAGKADGAMDAGNMLKPALARGELHCVGATTLDEYRQYIEKDAALERRFQKVFVAEPSVEDTIAILRGLKERYELHHHVQITDPAIVAAATLSHRYIADRQLPDKAIDLIDEAASSIRMQIDSKPEELDRLDRRIIQLKLEQQALMKESDEASKKRLDMLNEELSDKERQYSELEEEWKAEKASLSGTQTIKAELEQAKIAIEQARRVGDLARMSELQYGKIPELEKQLEAATQLEGKTMRLLRNKVTDAEIAEVLARWTGIPVSRMMESEREKLLRMEQELHHRVIGQNEAVDAVSNAIRRSRAGLADPNRPIGSFLFLGPTGVGKTELCKALANFMFDSDEAMVRIDMSEFMEKHSVSRLVGAPPGYVGYEEGGYLTEAVRRRPYSVILLDEVEKAHPDVFNILLQVLDDGRLTDGQGRTVDFRNTVVIMTSNLGSDLIQERFGELDYAHMKELVLGVVSHNFRPEFINRIDEVVVFHPLGEQHIASIAQIQLKRLYKRLEERGYEIHISDEALKLLSENGYDPVYGARPLKRAIQQQIENPLAQQILSGELVPGKVIRLEVNEDRIVAVQ

SEQ ID NO: 7018 - protein, 830 aa, Thermobifida fusca
MFERFTDRARRVVVLAQEEARMLNHNYIGTEHILLGLIHEGEGVAAKALESLGISLEAVRQQVEEIIGQGQQAPSGHIPFTPRAKKVLELSLREALQLGHNYIGTEHILLGLIREGEGVAAQVLVKLGADLNRVRQQVIQLLHGYQGKEPQAAGTAAESAPSTSLVLDQFGRNLTQAAREGKLDPVIGRDKEIERVMQVLSRRTKNNPVLVGDPGVGKTAVVEGLAQKIVKGEIPETLKDKQLYTLDLGALVAGSRYRGDFEERLRKVLKEIRSRGDIILFIDELHTLVGAGAAEGAIDAASILKPMLARGELQTIGATTLDEYRKYLEKDAALERRFQPIQVEEPTISHTIEILKGLRDRYEAHHRVSITDGALVAAAQLADRYISDRYLPDKAIDLIDEAGSRMRIRRMTAPPDLREFDEKIAKVRRDKEAAIDAQDFERAAALRDEEKRLQAQRAQKEKEWKAGDMDTVAEVNEELIAEVLATATGIPVFRLTEEESSRLLRMEEELHKRVIGQDDAIKALSQAIRRTRAGLKDPKRPGGSFIFAGPSGVGKTELCKALAEFLFGDEDALIQLDMSEFMEKHTVSRLFGSPPGYVGYEEGGQLTEKVRRKPFSVVLFDEIEKAHGDIFNSLLQVLEEGRLTDAQGRNVDFKNTIIVMTTNLGTRDISKGQPMGFARPDDTQTTYDRMKAKVNEELKQHFRPEFLNRVDDTIVFHQLTQKEITAIVDLMVARLDERLKDRDMGIEVRPHAKKILAERGYDPVLGARPLRRTIQREIEDALSEKILYGELKSGQIVIVDAEGEGADAKFTFRGVPKPQALPETAEVGAQ

SEQ ID NO: 7019 - protein, 818 aa, Clostridium thermocellum ATCC 27405
MYGRFTEKAQKAINISQNMAIELGHNYVGTEHLLLGLVKEGSGVAARVLQSQGVTEEKVIREIEELIGRGEMMGQPLDFTPRTKRVLELSYREARRMGHNYIGTEHLLLGIMKEGESVAVRILKDLGVEHQKLVQEIMNMLSEEAPNSTGVPKGHSSYSNTPTLNQFGRDLTEMAREAKFDPVIGRDKEIERVIQILSRRTKNNPCLIGEPGVGKTAIAEGLAQKIVEGNIPEILKDKRVVTLDLSSMVAGAKYRGEFEERLKKALDEIRRAGNVILFIDEMHTIIGAGAAEGAIDASNILKPSLARGEIQVIGATTIDEYRKHIEKDAALERRFQPILVGEPTKEEAIEILRGLRDKYEAHHSVKITDEALVAAVNMSDRYITDRFLPDKAIDLIDEAASRVRLKSFTAPPDLKHLEEKVERLRKEKEDAIVCQEFEKAARIRDEEQRLKNELEKAKDSWRQKNQTTTNVVSEDDIAVIVSDWTGIPVKRLAEEESERLMKMEDILHKRVIGQDEAVKAISKAIRRGRVGLKDPKRPVGSFIFLGPTGVGKTELSKALAEALFGEENAMIRIDMSEYMEKHSVSRLVGSPPGYVGYEEGGQLTEKVRRKPYSVVLFDEIEKAHPDIFNILLQILEDGRLTDSQGRVVDFRNTVIIMTSNIGARLITEPKQLGFAPVAQDKKKSYEDMKNNVMNELKKNFRPEFLNRIDEIIVFHPLEEEHLKQIVGLMIDNLAERLKQNSIEIEVSDEAKALLAKKGFDPVYGARPLRRAVQSMVEDRLAEEMLEGRVKSGDKVFVDVKDDELVFVKDKSELVSNKG

SEQ ID NO: 7020 - protein, 803 aa, Clostridium thermocellum ATCC 27405
MMMCSICKENLAVVFITKIINGKQTQEGLCFSCAKKQGIQPINQILEQTGISEEEIDGLNKQMETFFEDMDFSGTSDPEGGTATANPFFNLINKSLNKTMESMGFKSSKDETESDGKTDREVKDDKNNTRTKTQDKKMPKKKKYLDTYGTNLIVKAKEGKIDRVIGRNREIERVIQILNRRNKNNPVLIGEPGVGKTAIAEGLALRIVNRDVPVKLFNAEVYVLDLTSIVAGTQFRGQFENRMKGIIEECKALGNIILVIDEIHNIMGAGEAEGAMNAANILKPALAKGEIQVIGATTLDEYRKHIEKDSALERRFQPVLVDEPSVEETIEILRGIKDYYESYHRVKISDEVIRAAVILSERYITDRFLPDKAIDVLDEAGSRANIKNVVLLEYEALKEELKKVQEEKENAVSADSIEDYQKAADLKVRECKLLQQIKELEQKSKDMELTVDDIAYVIESWTKIPVQRLTEIEAEKLLNLEERLHKRVIGQHEAVKSVARAIRRNRADFKKRKKPASFIFVGPTGVGKTELVKALAVELFGSEEALIRLDMSEYMEKHTVSKLIGAPPGYVGYDEGGQLTEKVRRKPYSVILLDEIEKAHPDVFNMLLQILDDGRATDSHGRTVSFENTVLIMTSNAGTSLKASSIGFANDNYIALENKVKEVLKETFRPEFLNRVDEIIVFNHLTKDELKQIVDLMFKDVVEEVENKKMTVKFQDGVREFILEKGYDPKYGARPLRRTIQRYIEDELAEMYLKGLLAEGCSIVVGVRDGNIVFNVEKPAENAVVDTENSTTDNMKTDNTTAE

SEQ ID NO: 7021 - protein, 235 aa, Microbulbifer degradans 2-40
LDQFTTNLTQQAKDGKIDSILGRDDEIRQIIDVLCRRKQNNPILTGEAGVGKTAVVEGLAVKIAQGDVPTAIENVEIRSLDLGLLQAGAGVKGEFENRLKNVIKEVQQSVQSIILFIDEAHTLIGAGNQAGSGDAANLLKPALARGELRTIAATTWAEYKKYFESDAALTRRFQVVKVEEPSVDKAIIMLRNAAPTLEQHHKVVILDAAVSASVNLSHRYIPGRQLPDKCVSLLD

SEQ ID NO: 7022 - protein, 137 aa, Microbulbifer degradans 2-40
QVLEDGRLTDGQGRTVDFRNTVVVMTSNLGSSAIQDIAQNKSFDTISFDNESGAEEQNQYRYQAMKDAVMEVVTGHFRPEFINRIDEAVVFHPLAQQQIAGIADIQLETLRKRLAERDLRLNVTPEVMAKLAEAGFD

SEQ ID NO: 7023 - protein, 870 aa, Trichodesmium erythraeum IMS101
MQPNNPNQFTEKAWEAISRTPDIAKTSQNQQIEAEHLMKALLEQNGLVASLFSKVGVSTTKIQEYTDSFIKRQPKVKNIPNNIYLGRSLDALLDNAEKYRQEYKDEYISIEHLILAYLKDDHFGKNLYKEFKLDEVKLKKTISQVRGKQKVTDKNPEGKYEALEKYGRDLTEFAREGKLDPVIGRDDEIRRTIQILSRRTKNNPVLIGEPGVGKTAIAEGLAQRIITLDVPQSLKDRKLIALDMGALIAGAKFRGEFEERLKAVLKEVTDSEGKIILFIDEIHTVVGAGATQGAMDAGNLLKPMLARGELRCIGATTLDEYRKYIEKDAALERRFQQVYVDQPSVEDAISILRGLKERYEVHHGVKISDSSLVAAATLSTRYISDRFLPDKAIDLVDEAAAKLKMEITSKPEELDEIDRKILQLEMEKLSLQKESDTASKERLGRLEKDLANLKEGQRALNAQWESEKGIISTIQTVKEEIDKVNIEIQQAERNYDLNRAAELKYGRLINLQKQVEEAEAKLATTQTSGQTLLREEVTEADIAEIISKWTGIPISKLVESEKEKLLHLEGELHKRVIGQNEAVSAVSDAIQRSRAGLADPNRPVASFIFLGPTGVGKTELGKALAAYLFDTEDAMVRIDMSEYMEKHSVSRLIGAPPGYVGYDEGGQLTEAIRRRPYTVILFDEIEKAHPDVFNIMLQILDDGRVTDSQGHKVDFKNSVIIMTSNIGSQYILDVTDDYEQMQGRVMEALRAAFRPEFLNRIDETIIFHGLQKEQLREIVQLQVVRLEKRLAERKMSLKLTDAAINFLADVGYDPVYGARPLKRAIQRELETQIAKSILRSEFNDGDTIFVDIENERLSLKRLPMELVTAK

SEQ ID NO: 7024 - protein, 905 aa, Trichodesmium erythraeum IMS101
MQPTDPSKFTEQAWDAIVKSQDVAKRYQNQQLEVEHLIIALLEQQGTANKILSRSGIEPEKLLQQVDAFVRRQPKVGSIEHLYLGQGLETFLDLADQAKEKWEDKFIAVEHFLLAFHEDKRLGNKLIGGGTPQLPTRPGFAPPQTTLQIEFKELEATIKAFRGSSKVEDQNPEATYDALAKYGRDLTELAKVGKLDPVIGRDEEVRRVVSCLSRRTKNNPVLIGEPGVGKTAIAEGLAQRIVNGDVPESLKERQLISLDMGSLIAGAKFRGEFEERLRSVLREVTHSDGQIVLFIDELHTVVGAGSGGGNSSGVDAGNLLKPMLARGELRCIGATTIDEYRKHIEKDAALERRFQKVEVGQPSVEDTISILRGLKDRYETHHGVKITDAALVAAATLSNRYISDRFLPDKAIDLVDEAAAQLKMEITSKPVELEAIDRRIMQLEMEKLSIEGELSGTNKEKNSEAILSTKVSPALERITNEINSLKQKQEKFSSQWSGEKELLNSINSLKAEEDKIKVQIEQAERAYDLNTAAQLKYGQLETVHRDREAQEAELLKVQAQGSFLLREQVTDGDIATIVAKWTGIPVNRLLESERQKLLQLEKHLHQRVIGQSEAVAAVAAAIRRARAGMKDPGRPIGSFMFLGPTGVGKTELARALAGFLFDRDDALVRVDMSEYMEKHAVARLVGAPPGYVGYDQGGQLSEAVRRHPYSLVLFDEVEKAHPDVFNILLQVLDDGRITDSQGRVIDFSNTVIVMTSNIGSEYILDVAGDDSKYEEMYKRVMGALRKHFRPEFLNRVDEIILFHTLRKSELRQIVEIQVKRIERLLGEQKISLQLTDATLDHITEVGYDPVYGARPLKRAIQRELENPLANQILENRFVCGDVVIIDFVDSGLVFKKKEEGKLVKR

SEQ ID NO: 7025 - protein, 825 aa, Trichodesmium erythraeum IMS101
MFERFTEKAIKVIMLAQEEARRLGHNFVGTEQILLGLIGEGTGVAAKVLKSMGVNLKDARIEVEKIIGRGSGFVAVEIPFTPRAKRVLELSLEEARQLGHNYIGTEHLLLGLIREGEGVAARVLENLGVDLTKVRTQVIRMLGETAEVTAGGGGGRTKTPTLDEFGSNLTQMASEGKLDPVVGRQTEIERVIQILGRRTKNNPVLIGEPGVGKTAIAEGLAQRIANNDIPDILEEKRVVTLDIGLLVAGTKYRGEFEERLKKIMDEIRSAGNVILVIDEVHTLIGAGAAEGAIDAANILKPALARGELQCIGATTLDEYRKHIERDAALERRFQPVMVGEPSVDETIEILYGLRERYEQHHKLKILDTALEAAAKLSDRYISDRYLPDKAIDLIDEAGSRVRLINSQLPPAAKELDKELRSILKEKDEAVRSQDFDKAGELRDREMEIKSEIRSLAQNKKLDSTNEDDSPMVTEEDIAHIVASWTGVPVNKLTESESEKLLHMEDTLHQRLIGQEEAVKAVSRAIRRARVGLKNPNRPIASFVFSGPTGVGKTELTKALAAYFFGSEEAMIRLDMSEYMERHTVSKLIGSPPGYVGYNEGGQLTEAVRRRPYTVVLFDEIEKAHPDVFNMLLQILEDGRLTDAKGRTVDFKNTLIIMTSNIGSKVIEKGGGGLGFEFSENEADAQYNRIRNLVNEELKQYFRPEFLNRLDEIIVFRQLTKDEVKEISVILLKEVFSRLTEKGIKLEITDRFQERLVEEGYNPSYGARPLRRAIMRLLEDSLAEEILAGKINEGDTAVVDVGESGQIIVSKGEEKEKRELVPQGAE

SEQ ID NO: 7026 - protein, 825 aa, Trichodesmium erythraeum IMS101
MFERFTEQSIKVIMLAQEEARRLGHNFVGTEQILLGLIGEGTGIASKVLKENGVNLKDARNEVEKIIGRGSGFTPAEIPFTPRVKRMLEISLEEARKLDHNYIGTEHLLLGLLQDSEGVAAKVLDNLGVDKGKIRTQVIRSLGEVAAVAPGGSTPSGKKAVTLEEFGTDLTKLAAEGKIDPIVGRKTEIERVIQVLGRRTKNNPVLIGEPGVGKTALAEGLAQRIINQDVPDILENKQVVSLNIGSLIAGTRFRGEFEERLKKIMDEIRANGNIILVIDEIHTVVGAGAIEGSMDAANILKPALARGELQCIGATTLDEYRKHIERDAALERRFQPVKVGEPSVEQTIEILYGVRSAYEQHHRLTISDEALRAAAQLSDRYISDRFLPDKAIDLIDEAGSRVRVKNSMVSPQLRELRRELSRVIKDKEETVRQQDFEKASQLRDRELGIQAEIEETTSNKQDKKNSKSPVVTEDDIADIVASWTGVPVSKLTESESEKLLHIEDTLHQRLIGQEDAVKAVSRALRRARVGLKNPKRPIASFIFSGPTGVGKTELTKALAAYFFGSEEAMIRLDMSEYMERHTVSKLVGSPPGFVGYDEGGQLTEAVRRRPYTVVLFDEIEKAHPDVFNIMLQVLEDGRLTDSKGRVVDFKNTLIIMTSNIGSQVIEKGGGGLGFEFAEDKEEAQYNRIRNLVNEELKQYFRPEFLNRLDEIIVFRQLTKDEVKEIAEIMLREVFSRLGDREITLTVSDKFKDRLIEDGFDPSYGARPLRRAIMRLLEDVLAEALLAGKIQDGENVYVDLDENREVKVTPIGNSEKQLPEFAYSNN

SEQ ID NO: 7027 - protein, 172 aa, Trichodesmium erythraeum IMS101
MRSFIKLSTKPKRIFFFVRPTGMGKTEVAKALTELVFGDEKAFARFDMSEYKEQHAAEKLTGSPPGFVGYGEGGKLTNRVLENPYSILLFDEIEKSHSTVLDKFLQILEDGRLTDGQGKTAYFNQSIIIFTSNIGASKLLQEKANLQTKDYTEIESFFKYKVRDFFLENSRA

SEQ ID NO: 7028 - protein, 840 aa, Tropheryma whipplei str. Twist
MGEDMFERFTDKARRVIVLAQEEARTLSHNYIGTEHVLLGLISEGDGIAAQALESLDITLERAREGVAELIGRGQNATSGHIPFTPRAKKVLELSLREALQLGHNYIGTEHILLGILHEGEGIAAQVLVNMGAELPAIQQRVMHLLEDGREQEPVSVGPSESGKISGSQILDQFGRHLTRAAKEGKLDPVIGREKEIERVMQVLSRRTKNNPILIGEPGVGKTAVVEALAQAIVNGDVPVNLRNKQVYSLDLGSLIAGSRYRGDFEERLKKVTKEIRSRGDIIVFIDEIHSLVGAGSAEGAIDAATILKPLLARGELQTIGATTLDEYRKNIEKDSALERRFQPVNVSEPSIPMCIQILKGLRDRYEAHHKVKITDEAIYAAVTLSSRYINDRFLPDKAIDLIDEAGARLRLSVLSNPSQLRAVEKKILAVVARKDKAVEKQDFDKVGELKRKEKALRAELRKIKRDYENGNIASAGTVDEGLIAEVLASATGVPVFRLTEDESVRLMMMERSLHQRVIGQDEAISSLSRAMRRTRAGLKDPNRPSGSFIFAGPTGVGKTELAKALAEFLFDNEDALVSLDMSEYGERHTVSRLFGAPPGFVGFEEGGQLTEKIRRKPFSVVLFDEIEKAHPDVFNSLLQILEEGRLSDAQGRMVDFRNTIIVMTTNLGSRDIASGPVGFQSGDGSFLAYEAMKAKVNEELRRSLKPEFLNRIDEVIVFPPLNRDELLQILKIFIKKLDDRLRDRTMRLSVTDAALEQLVQIGYEPTMGARPLRRAVQREVEDRISEKILLGEIKPNQEIEMDFVNDNFTIVSRDMDYPLSPLVPSVTTGLVTPDLASHV

SEQ ID NO: 7029 - protein, 874 aa, Brucella suis 1330
MNIEKYTERVRGFIQSAQTFALSSGNQQFTPEHILKVLIDDDEGLAASLVERAGGRVGDVRMGLQSALEKLPKVSGGNDQLYLSQPLAKVFSLAEELASKAGDSFVTVERLLTALAMEKSAKTSEILSAAGVTPTALNRVINDMRKGRTADSASAESNYDALKKYARDLTEDARAGKLDPVIGRDEEIRRTIQVLSRRTKNNPVLIGEPGVGKTAIAEGLALRIVNGDVPESLKDKQLMALDMGALIAGAKYRGEFEERLKAVLSEVQTAAGQIILFIDEMHTLVGAGKTDGAMDASNLLKPALARGELHCVGATTLEEYRKYVEKDAALARRFQPVFVDEPTVEDTISILRGLKEKYEQHHKVRVSDSALVAAATLSNRYITDRFLPDKAIDLVDEAASRLRMHVDSKPEELDEIDRRIMQLKIEREALKVETDAASKDRLQRIEKELSDLEEESAELTAKWQAEKQKLGLAADLKRQLEEARNALAIAQRNGEFQKAGELAYGTIPQLEKQLADAESQENKGSLLEETVTPDHVAQVISRWTGIPVDRMLEGEREKLLRMEDEIGKRVVGQGEAVQAISKAVRRARAGLQDPNRPIGSFIFLGPTGVGKTELTKALASFLFQDDTAMVRIDMSEFMEKHSVSRLIGAPPGYVGYEEGGVLTEAVRRRPYQVILFDEIEKAHPDVFNVLLQVLDDGRLTDGQGRTVDFRNTVIIMTSNLGAEYLVNLGENDDVETVRDDVMGVVRASFRPEFLNRVDEIILFHRLRREDMGAIVDIQMQRLQYLLSDRKITLQLEDDAREWLANKGYDPAYGARPLKRVIQKEVQDPLAERILLGDILDGSLVKITAGSDRLNFRPISGAFSAAEPEREDEKA

SEQ ID NO: 7030 - protein, 894 aa, Bifidobacterium longum DJO10A
MEEYDMEQKFTTMAQEAVGDAIQSASAAGNAQVETLHVMDALLRQENGVARSLIEAAGGDPQAIGAAVRNALVALPSASGSSTSQPQASRQLTAAIAQAEKEMQQMGDEYVSTEHLLIGIAASKPNQSAEILEKNGVTAASLRKAVPGVRGGAKVTSPDAEGSYKALEKYSTDLTAAAKEGKLDPVIGRDQEIRRVIQILSRRTKNNPVLIGEPGVGKTAVVEGLAQRIVAGDVPTTLQGKKLISLDLGSMVAGSKYRGEFEERLKSVLNEIKNADGQIITFIDEIHTIVGAGAAEGSMDAGNMLKPMLARGELRLIGATTLDEYRENIEKDPALERRFQQVFVGEPSVEDTIAILRGLKQRYEAHHKVTIGDDALVAAATLSNRYISGRQLPDKAIDLVDEAAAHLRMELDSSPEEIDELQRKVTRLEMEEMQLKKAEDPASKERLGKLQAELADTREKLSGLKARWDAEQAGHNKVGDLRAKLDDLRVQADKYTREGNLAEASKILYGEIPSIQKELAAAESADAESADASAANPADEPMVPDRVDADSVAEIVSDWTGIPVGRLMQGENEKLLHMEDYLGKRVIGQKEAIAAVSDAVRRSRAGISDPNRPTGSFLFLGPTGVGKTELAKALADFLFDDEKAMVRIDMSEYMEKASVSRLIGAAPGYVGYEQGGQLTEAVRRRPYSVVLFDEVEKANPEIFDVLLQVLDDGRLTDGQGRTVDFKNTILIMTSNLGSQFLVNEDMDADAKKKAVMDAVHMNFKPEFLNRLDDIVMFHPLTREELGGIVDIQVAGVSQRLTDRRITLDVTDSAREWLANTGYDPAYGARPLRRLVQTEVGDQLARMLLAGKVHDGDTVLVDQTGGEHLELSAWASDQIVSDNPDVSVDNVTEDK

SEQ ID NO: 7031 - protein, 869 aa, Bifidobacterium longum DJO10A
MFERFTDRARRVIVLAQEEARALQHNYIGTEHLLLGLIREGEGVAAKALASKGVELDATRKQVEEMIGKGNAAPNGHIPFTPHAKQVLEFSLREALQLGHSYIGTEHILLGLIREGEGVGTQVLIKMDVDLGELRSATIDMIRGNSGTGTGDGKGDLANAGGVTDKQNKSGSAILDQFGRNLTAEAAEGKLDPVIGRTNEIERVMVVLSRRTKNNPVLIGEPGVGKTAVVEGLAQKIQAGDVPETLKGKQVYSLDLGSMVAGSRYRGDFEERLKKVLKEIKTRGDIVLFIDEIHTIVGAGSADGALGASDMLKPMLARGELQTIGATTTDEYRKYIEKDAALERRFQPIQVHEPTIAETIEILKGLRSRYENHHHVTITDGALQSAAELSSRYIQDRNLPDKAIDLIDEAGARLRIKRLTAPPELKELDEKIAKIAADKDEAIKGQDFEKAAELRDKQEKLEADRKQKEDSWREGESDVKMVVDEDVIAEVISSTTGIPVFKLTQAESKKLLNMEAELHKRIIGQDEAVSALSRSIRRTRVGLKDPKRPSGSFIFAGPTGVGKTELAKTLAEFLFDDEDALIRVDMSEFSEKYAASRLFGAPPGYVGYEEGGELTEKVRRKPFSVVLFDEIEKAHPDIFNTLLQVLDDGHLTDGQGRKVDFKNTIIILTTNLGTRDIAKAANTGFNLGANNESSYQRMKDQVSSELKQQFRPEFLNRLDDIIVFKQLTEPQVRQIVDLDVKQLNDRLFDRHMSLELTDAAKDLLAQKGFDPLLGARPLRRVIQRDIEDAISEKILMGDLEDGQRVIVDAEGEGILGEFTFKGEEFEEPAAADKPAEDGAATDGETPADATPATEPAESAPADSGDAPQE

SEQ ID NO: 7032 - protein, 872 aa, Haemophilus somnus 129PT
MVNFYDETQKLILGEIMNIDKFTTKFQQAIAEAQSLAIGKDHQFIEPVHLMTALLNQQDGSIPPLLTASGGNLALLHNELAAELSRLPQVSGNNGDIQVSRSLVKLLNLCDKLAQQRQDKFISSELFLLAIFEDKGALSESLKKCGIKQENLLQAIDKLRGGEKVNEQGAEENRQALEKYTIDLTARAESGKLDPVIGRDEEIRRAIQVLQRRTKNNPVLIGEPGVGKTAIVEGLAQRIVNGEVPEGLKGKRVLSLDMGALIAGAKYRGEFEERLKAVLKELAQEEGRVILFIDEIHTMVGAGKTDGAMDAGNLLKPSLARGELHCVGATTLDEYRQYIEKDAALERRFQKVFVGEPTVEDTIAILRGLKERYEIHHHVQITDPAIVAAATLSHRYISDRQLPDKAIDLIDEAASSIRMEIDSKPQPLDRLERRIIQLKLEQQALQKEDDEASRKRLDLLEEELGEKEREYAELEDVWKAEKAALSGAQHIKAELDNAKIQMEQARRISDFAKMSELQYGRIPELEKQLAQAESAEGKEMTLLRNRVTDEEIAEVLSRATGIPVAKMMEGEKDKLLRMEQELHKRVVGQSEAVVAVANAIRRSRAGLSDPNRPIGSFLFLGPTGVGKTELCKTLANFMFDDENAMVRIDMSEFMEKHSVSRLVGAPPGYVGYEEGGYLTEAVRRRPYSVILLDEVEKAHSDVFNILLQVLDDGRLTDGQGRTVDFRNTVVIMTSNLGSDLIQGNKELDYNAMKEIVMSVVGQHFRPEFINRIDETVVFHPLAKENIRAIATIQLQRLVKRMETHGYQLEFTDATLDFIGEVGYDVIYGARPLKRAIQQEIENPLAQQILSGQLLPGKKVIVDYVDGKVVAQQ

SEQ ID NO: 7033 - protein, 889 aa, Bifidobacterium longum NCC2705
MEQKFTTMAQEAVGDAIQSASAAGNAQVETLHVMDALLRQENGVARSLIEAAGGDPQAIGAAVRNALVALPSASGSSTSQPQASRQLTAAIAQAEKEMQQMGDEYVSTEHLLIGIAASKPNQSAEILEKNGVTAASLRKAVPGVRGGAKVTSPDAEGSYKALEKYSTDLTAAAKEGKLDPVIGRDQEIRRVIQILSRRTKNNPVLIGEPGVGKTAVVEGLAQRIVAGDVPTTLQGKKLISLDLGSMVAGSKYRGEFEERLKSVLNEIKNADGQIITFIDEIHTIVGAGAAEGSMDAGNMLKPMLARGELRLIGATTLDEYRENIEKDPALERRFQQVFVGEPSVEDTIAILRGLKQRYEAHHKVTIGDDALVAAATLSNRYISGRQLPDKAIDLVDEAAAHLRMELDSSPEEIDELQRKVTRLEMEEMQLKKAEDPASKERLGKLQAELADTREKLSGLKARWDAEQAGHNKVGDLRAKLDDLRVQADKYTREGNLAEASKILYGEIPSIQKELAAAESADAESADASAANPADEPMVPDRVDADSVAEIVSDWTGIPVGRLMQGENEKLLHMEDYLGKRVIGQKEAIAAVSDAVRRSRAGISDPNRPTGSFLFLGPTGVGKTELAKALADFLFDDEKAMVRIDMSEYMEKASVSRLIGAAPGYVGYEQGGQLTEAVRRRPYSVVLFDEVEKANPEIFDVLLQVLDDGRLTDGQGRTVDFKNTILIMTSNLGSQFLVNEDMDADAKKKAVMDAVHMNFKPEFLNRLDDIVMFHPLTREELGGIVDIQVAGVSQRLTDRRITLDVTDSAREWLANTGYDPAYGARPLRRLVQTEVGDQLARMLLAGKVHDGDTVLVDQTGGEHLELSAWASDQIVSDNPDVSVDNVTEDK

SEQ ID NO: 7034 - protein, 869 aa, Bifidobacterium longum NCC2705
MFERFTDRARRVIVLAQEEARALQHNYIGTEHLLLGLIREGEGVAAKALASKGVELDATRKQVEEMIGKGNAAPNGHIPFTPHAKQVLEFSLREALQLGHSYIGTEHILLGLIREGEGVGTQVLIKMDVDLGELRSATIDMIRGNSGTGTGDGKGDLANAGGVTDKQNKSGSAILDQFGRNLTAEAAEGKLDPVIGRTNEIERVMVVLSRRTKNNPVLIGEPGVGKTAVVEGLAQKIQAGDVPETLKGKQVYSLDLGSMVAGSRYRGDFEERLKKVLKEIKTRGDIVLFIDEIHTIVGAGSADGALGASDMLKPMLARGELQTIGATTTDEYRKYIEKDAALERRFQPIQVHEPTIAETIEILKGLRSRYENHHHVTITDGALQSAAELSSRYIQDRNLPDKAIDLIDEAGARLRIKRLTAPPELKELDEKIAKIAADKDEAIKGQDFEKAAELRDKQEKLEADRKQKEDSWREGESDVKMVVDEDVIAEVISSTTGIPVFKLTQAESKKLLNMEAELHKRIIGQDEAVSALSRSIRRTRVGLKDPKRPSGSFIFAGPTGVGKTELAKTLAEFLFDDEDALIRVDMSEFSEKYAASRLFGAPPGYVGYEEGGELTEKVRRKPFSVVLFDEIEKAHPDIFNTLLQVLDDGHLTDGQGRKVDFKNTIIILTTNLGTRDIAKAANTGFNLGANNESSYQRMKDQVSSELKQQFRPEFLNRLDDIIVFKQLTEPQVRQIVDLDVKQLNDRLFDRHMSLELTDAAKDLLAQKGFDPLLGARPLRRVIQRDIEDAISEKILMGDLEDGQRVIVDAEGEGILGEFTFKGEKFEEPAAADKPAEDGADTDGETPADVTPVTEPAESAPADSGDAPQE

SEQ ID NO: 7035 - protein, 863 aa, Desulfovibrio desulfuricans G20
MDISKFTEKSQQALGEAQNVAVRAGHQEVDVEHLALALVVQEHGIVPRLLDKAGVRPQAFAAAVEAELGRKPAVSGPGSAQGQIFVTQRLNRLLVKAQDSARRLQDEYVSVEHIFCAMAEEPASSPVGRVFAQFGLTQEKLLGVLTQVRGAQRVTSSNPEDTYEALSRYGRDLVEEARKGKLDPVIGRDAEIRRTVRILSRRTKNNPVLIGEAGVGKTAIVEGLAHRILNGDVPESLRDKSLFALDMGALIAGAKYRGEFEERLKAVLKEVEQAEGRIIMFIDELHTIVGAGKTDGAMDAGNLLKPMLARGELHCIGATTLDEYRKYIEKDPALERRFQPLVVDEPTVEDTISILRGLKERFEVHHGVRISDSALVEAVTLSNRYIADRQLPDKAIDLIDEAAALIRTEIDSLPAELDEANRKIMQLEIEREALRRETDAASRERLQKLENELAELREVQAGLNTQWEREKGSIDSVRALKEDIERTRRQIEEAERNYDLNRAAELKYSVLHDLEKRLAATEGGGENGPRLLKEEVGPDDVAEIVARWTGIPVTRLLESEREKLLRLPDVLHQRVVGQDVAVDAVAEAVLRSRAGLSDPARPIGSFIFLGPTGVGKTELCKTLAQALFDTEDNIVRLDMSEYMEKHTVARLIGAPPGYVGYDDGGQLTEAVRRKPYSVVLFDEIEKAHPDVFNVLLQLLDDGRLTDSHGRTVDFKNTIIIMTSNIGAPLMLDGISPQGEFTEGVEDRVLEELRRHFRPEFLNRVDEIVLFKPLMLEQIMHIVDLLMQRLLGRLAERKIRVSLTDKAKRFVAESAYDPVYGARPLKRYLQQRLETPLARRIIAGELRDGQQVTVDTDGHTLFFE

SEQ ID NO: 7036 - protein, 949 aa, Desulfovibrio desulfuricans G20
MARKQCQVCGQPATVRVEANLNGRHSTMLLCDDHYRQLVRQQKRTVSPLEALFGSRSGLFEDFLGNDFFRIGDDAPSMTADTDEVVDASFGEPAPAGTGTARRRGSGLASRISEQSEALLQEAARHAAEFGRAEVDTEHLLLALSDSDVVKTILGQFKIKVDDLKRQIESEAKRGDKPFEGEIGVSPRVKDALSRAFVASNELGHSYVGPEHFLIGLAEEGEGLAANLLRRYGLTPQALRQQVSKVVGKGAEDGRAETPTNTPELDKYSRDLTKMAREGKLDPVIGRAQEIETTIEVLARRKKNNPVLIGEPGVGKTAIVEGLAQRMVAGEVPETLRGKRLVELNINAMVAGAKYRGEFEERVQKVLKEVTEHQDELILFIDEVHAIVGAGQGGGEGGLDVANVFKPMMARGELNLIGATTLNEYQKYIEKDAALERRFQPVMVPEPTVAQTMMILRGLRDTFEAHHKVSITEDAIIAAAELSDRYITARFLPDKAIDLLDQAAARVKLSATARPVAVQELESELHQLRREQDYVASRKQYDKAAELGKRIEAKETELKKLVEEWERERASGSAEVKAEHVAQIVSRLTGIPVNELTVEEREKLLHLEQRLHERLVGQDEAVRAVADSVRLSRAGLREGSKPVATFLFLGPTGVGKTELAKALAESIYGDEGALLRIDMSEYGERHTVARLVGAPPGYVGYDEGGQLTEKVRRKPYSVLLLDEIEKAHPDVYNILLQVFDDGRLTDGKGRVVDFTNTIIIATSNLGSDIIQRRLKARGAGGEEYVKTKSEVMDVLRGHFRPEFLNRIDEIIVFHALGKEEIRHIVGLQLDRVARNAASQGVTLTFDQTLIDHFAEEGYKPEFGARELKRLIRSELETALAREMLGGSIGKADHASARWDDKAERVVFERQEPPAKPAEPEKPDAANAAETPPSDASKPARKKKSAGGES

SEQ ID NO: 7037 - protein, 850 aa, Pseudomonas aeruginosa PAO1
MDIAEYFSKQTTEYLQRAAQVAAEFGKREVDTEHLLYALADADVVQAVLKQFGLSPADLKQYIEANAVRGASKGEASEDMTISPRVKSALQHAFALSRELGHSYVGPEHLLLGLAAVPDSFAGTLLKKYGLTEQALRQKAVKVVGKGAEDGRVDGPSNTPQLDKFSRDLTRLAREGKLDPVIGRSKEVETTIEVLARRKKNNPVLIGEPGVGKTAIVEGLAQRMVQGEVPEVLRDKRLVELNINAMVAGAKYRGEFEERLKQVMDELQAAQSEIILFIDEVHTIVGAGQGGGEGGLDVANVLKPAMARGEMNLIGATTLNEYQKYIEKDAALERRFQPVFVPEPTVEQTISILRGLRDKLEGHHKVTIRDEAFVAAAELSDRYIGNRFLPDKAIDLIDQAAARVRIASTSRPAEIQELEAELAQLKREQDYAASRKWYDEAKVFEKRIQERKEHLEQITERWQQTQGSKTEEVRVEDIAEIISKLTGIPVTELTAEEREKLLQMEERLHQRVIGQQEAITAVSDAVRLARAGLRQGSRPIATFLFLGPTGVGKTELAKALAEVVFGDEDAMIRIDMSEYMERHAVSRLIGAPPGYVGYDEGGQLTERVRRRPYSVILLDEIEKAHADVNNILLQVFDDGRLTDGKGRVVDFTNTIIIATSNLGSELIMKNAQAGEFAQPPEKLKRELMTTLRGHFRPEFLNRLDEVIVFESLSKAQIEDIVRLQLERVKRAAHAQDIYLHIDDSLVGHLAEEAYQPEFGARELKRQIRQQLETRLATAMLKGEVKEGETVTFFYDAKDGVGYRKGAAPNPAARKKSGAGETPRGRATAARKPAAKKGAAAKGKADKPKAK

SEQ ID NO: 7038 - protein, 902 aa, Pseudomonas aeruginosa PAO1
MSEISRVALFGKLNSLAYKAIEAATVFCKLRGNPYVELVHWFHQILQLPDSDLHQIVRQSGIDPARLAKDLTEALDRLPRGSTSITDLSSHVEEAVERGWVYGSLMFGESQVRTGYLVIGILKTPSLRHALTGLSAEFAKLKVEALTERFDEYVGASPENGLSASDGFNAGAAPGEASGALAPSAMGKQEALKRFTVDLTEQARSGKLDPIVGRDEEIRQLVDILMRRRQNNPILTGEAGVGKTAVVEGFALRIVAGDVPPALKDVELRALDVGLLQAGASMKGEFEQRLRQVIEDVQSSEKPIILFIDEAHTLVGAGGAAGTGDAANLLKPALARGTLRTVAATTWAEYKKHIEKDPALTRRFQVVQVDEPSEHKAILMMRGVASTMEKHHQVQILDEALEAAVRLSHRYIPARQLPDKSVSLLDTACARTAISLHAVPAEVDDSRRRIEALETELAIIRRESAIGVATAERQRNAETLLAEERERLAALEQRWAEEKRLVDELLETRARLRAAAEAVDAGGVPLGEGEVRLDEEQRQALHARLAELQAQLSALQGEEPLILPTVDYQAVASVVADWTGIPVGRMARNEIETVLNLDRHLKKRIIGQDHALEMIAKRIQTSRAGLDNPSKPIGVFMLAGTSGVGKTETALALAEAMYGGEQNVITINMSEFQEAHTVSTLKGAPPGYIGYGEGGVLTEAVRRKPYSVVLLDEVEKAHPDVHEIFFQVFDKGVMEDGEGRVIDFKNTLILLTTNAGTEMIASLCADPELMPEPEAIAKSLREPLLKIFPPALLGRLVTIPYYPLSDDMLKAISRLQLGRIKKRVEATHKVPFEFDEGVVDLIVSRCTETESGGRMIDAILTNTLLPDMSREFLTRMLEGKPLAGVRISSRDNQFHYDFAEAE

SEQ ID NO: 7039 - protein, 877 aa, Pseudomonas aeruginosa PAO1
MSMINVDLQQLIQALDADTRRDLEGSAERCVARGGSKVLVEDLLLGLLERPQGLLARALQDAAVDAGELNAALQARGEHSASRNPVFAPELVQWLQDALLLANLELGRSQIDQAALILALLRNPLRYAGSRYQPLLARLDIERLKDFALSQPLEGAPSGKPGGGESLLQRFTHNLTQQARDGKLDPVLCRDGAIRQMVDILARRRKNNPIVVGEAGVGKTAIVEGLASRIAAGEVPPALRDVELLSLDMGLLQAGASVKGEFERRLKGVIDEVKAAPRPTILFIDEAHTLIGAGGQAGGSDAANLLKPALARGELRTIAATTWAEYKKYFEKDPALARRFQPVQLHEPSVAEAVTILRGLARVYEESHGIYLRDDAVVAAAELSARYLAGRQLPDKAVDVLDTACARVRISLAAAPESLERLRGELAEGERQRQALRRDAEAGLPIDHDALQALEERLAQAESERHVQEDQWSRQRELAERLLALRQQLARAREANREEQGSEADAEAFPADEHGGVEALEKALHETRQALADAQAQGRLVSFEVCPRLVAEVIGAWTGVPVEQLAREHNAKVMGFADDLRTRIRGQEQAVSALDRAMRATAAGLNKPDAPVGVFLLVGPSGVGKTETALALADLLYGGERFITTINMSEFQEKHTVSRLIGAPPGYVGYGEGGMLTEAVRQKPYSVILLDEVEKADPDVLNLFYQIFDKGVANDGEGREIDFRNTLILMTSNLASEHIAALCQDGARPSAELLEETIRPALSRHFKPALLARMRVVPYYPVGGPVLRELIEIKLQRLGERLARRQLAFDYSQALVGHLAERCTQSDSGARLIDHLLDTHLLPLVADRLLEAMARDERLERVHATLGEHGRVLCEFA

SEQ ID NO: 7040 - protein, 849 aa, Pseudomonas aeruginosa PAO1
MELAALIGRLNPDCRRALERAAQRCLQRTHHYVEIEHLLLELLDIDGGDFACLLPRFGLERDALVAEINLSLELFKAGNTRTPALSAHTIGLLEDAVVHASVLGQAQIRSGLLLLALLDREERRALLLNSASSLLRIPHEALQANLLEWIQASREQPPAPNRPAAGGDKPESAPDPLLDQYTQDLTAEARAGRIDPIVGRDGEIRQCVDILLRRRQNNPILVGAPGVGKTAVVEGLALRIAAGEVPPSLQEVILRVLDLGLLQAGASMKGEFEQRLKGVIDAVRNSAQPIILFIDEAHTLIGAGGAEGGSDAANLLKPALARGELRTLAATTWLEYKKYFEKDPALTRRFQLVQVEEPDEATAVEMLRGVAGKLELHHGVQIMDAAIVDAVKLSHRYISGRQLPDKAISVLDTACARVALGQHDVPPPLESLRHREQALEEELQRLRREQATGLDHSARITALESESGDNRRTIRELETRWDEEREAVRELLDIRRELLALSESADAAKPDEELDGRIDHLAAELARLAAGLEAIRQDDPLVPEQVDSRTVAAVIAGWTGIPVGKMLADEAHAIRSLAQRMGQRVMGQEAALGAIAQRIQAYRAGLSDPAKPVGVFLLPGPTGVGKTETAYALADALYGGERNLISINLSEYQEAHTVSQLKGAPPGYVGYGSGGVLTEAVRRKPYSVVLLDEIEKAHPDVLEAFYNVFDKGVMEDGTGLVVDFRNTVILATSNVGAELLLDSPAEQVATPAFDERLRKVLLQTFRPAFLARMTVVPYRPLEEATLEGIVVAKLEKLRERYKAATGKQFDFDPAIVKAVLAKCSAAGARDIENVLMAQVTGKLAEWVLE

SEQ ID NO: 7041 - protein, 865 aa, Clostridium tetani E88
MDIEKLTLKVQQTINDSQKIAVKYNHQQLEPFHLFAALVFQEDGLIPNILGKMNINIKVLRDEIKRELNEMPKVLGDGAQNSGVYATRSFEEIFIRAESIAKDFKDSYISVEHIMLSLMQGRSTSIKKILDKFNIRKDKFLNVLQQVRGNQRVDTQDPEGTYEALVKYGRNLIEDAKKHKLDPVIGRDEEIRRIVRILSRRTKNNPVLIGDPGVGKTAIIEGLAERIVRGDVPEGLKNKIIFSLDMGALIAGAKFRGEFEERLKAVLKEVENSQGKIILFIDEIHNIVGAGKTEGSMDAGNLIKPMLARGELNCIGATTFDEYRKYIEKDKALERRFQPVIIDEPTVEDTISIIRGLKERFEIHHGIRIHDSAIVAAAKLSQRYITDRYLPDKAIDLIDEAGAMIRTEIDSLPTELDSIKRKIFQMEIEKEALAKEKDSRSKERLEDLEKELSNLKEKDKEMTAKYEKEKEQIINMRNLKQKLDEVKGQLEKAEREYDLNKVAELKYGIIPGIKSQIEEKEILIKENSQGNMLKEEVTENEISKIISHWTGIPVTKLIEGEKDKLLRLEDELKSRVIGQDEAVEAVSNAVLRARAGMKDPQKPIGSFIFLGPTGVGKTELAKTLCKNLFDSEENIIRIDMSEYMEKYSVSRLIGAPPGYVGYEEGGQLTEAVRRKPYSVILFDEIEKAHDDVFNIFLQILDDGRLTDNKGKTVDFKNCIIIMTSNIGSSYLLENKKEDGIDETVKNKVSNALKDRFKPEFLNRLDDIIMFKPLTNREITKIIDIFLQDIENRLKDRNITLIVTENAKELMAKEGYDAIYGARPLKRYIENILETKIAKQIIKGDIYEGCKIGVDIKGEEIIIGKI

SEQ ID NO: 7042 - protein, 811 aa, Clostridium tetani E88
MIFGRFNERAQKVLVFAQESARNYRHGYVGTEHILLGILKEEGISKNILKDMNVELEDVESLIEEYEGKGDLDLYSNEIPLTPRTKRLLEISLLEARNLNHNFITPEHILLALIKESEGIAFTILSNLGVDFNRLRKELLENVAGERSVNRSSSDTNKKNQDTPTLNEFGRDLTDMAMEGKLDPVIGRDKETQRVLQILCRRTKNNPCLIGDPGVGKTAIAEGLAQKIVEGNIPEILKDKRVVTLDLSSMIAGAKYRGEFEDRLKKVMEEIRKSGNVILFIDEIHTIIGAGAAEGAIDASNILKPALARGEIQCIGATTIDEYRKHIEKDSALERRFQPITVGEPTKEEAILILRGLRDKYEAHHRANITDEAIEAAVNLSDRYITERYLPDKAIDLMDEAASKVRIENMIAPTDMKELEENLEKVTKEKEDAIRVQDFEKAAQLRDHEKDLKYRLENLKSDWKTQKQVATLTVDETQIAAVVSKWTNIPVRKLTEKESERLLKLEETLHNRVIGQNEAVKSVSRAVRRARVGLKDPNRPIGSFIFLGPTGVGKTELSKALAEAMFGDESSMIRIDMSEYMEKHAVSRLIGSPPGYVGYDEGGQLTEKVRRHPYSVILFDEIEKAHPDVFNILLQILEDGRLTDGKGKTVNFKNTIIIMTSNVGASTIKKQKSLGFAISDDKIESEYEQMKENVMEELKRSFRPEFLNRIDDIIVFHKLREEDLEKIVALMLESVTHRLKNQDINISFDKKSQKFLAKKGFDPVYGARPLRRAITKAVEDKLSEEILKGSIEKGDKVLVSVNEEKLIFNKE

SEQ ID NO: 7043 - protein, 767 aa, Clostridium tetani E88
MKLCSVCNKNVATIFTTRFETGKPQIVGICAECAKKMNIQPLNQIIEAAGVTPEDMETYAEQMNKLLDNMDINELLNNDLFSNMINNMNGMNMFKVQDDFIDKDKNEENTNSERNKDKSEGNSNVKTRVKFKNKRRNLDKYAINLNDKAKDKKIDVVVGRDKEIERIIQILNRRNKNNPILIGEPGVGKTAIAEGLAVKIIEKNVPIKLFDKEIYLLDLTSVVAGTQFRGQFEGRMKAIVDEVTESENVILVIDEVHNIIGAGEAQGGALNAANILKPALARGDIQVIGATTLEEYRKYIEKDSALERRFQPILVEEPSVKETIEILNNIKIYYEDYHKVKISKKIIEEAVKLSERYITDRYLPDKAIDVIDEASSRVNLRNKNLVEFKIAKEELGELQNKMLNEANSGNYEKAAQYKTEEYKLKNKVEELEKKSKVELSVDDIAYVIEAWTKIPVQKVREKEAEKLLNLEQRLHKRLIGQDKAVRKLSRTIRRNRLGFKSKKRPASFIFVGPTGVGKTELVRSLACELFGDEDSLIRIDMSEYMEKHTASKLIGSPPGYVGYDEGGQLTEKIRRKPYSVVLLDEIEKAHPDIFNMLLQVLEDGRLTDNQGRTVFFDNSVIIMTSNLGTNFKESSIGFGNTNSIQIENSIKDALKETFKPEFINRIDEIVIFEKLNKEELYDIIDIMFDEVSEDLSEKNIKVHFTKEVKDFILKVGYDEKYGARELKRAIQRYIEDEISEQYFRNEVKEGTNILVDIYEESIYIKNM

SEQ ID NO: 7044 - protein, 857 aa, Yersinia pestis CO92
MRLDRLTSKFQLALADAQSLALGRDNQFIEPLHLMSALLNQDGGTVRPLLTSAGINVARLRSDIEQALGRLPQVEGTGGDVQPSNELVRVLNLCDKLAQKRSDKFISSELFVLAVLEDRGTLTDMLKAAGATVAIIDKAIETMRGGDKVDDQGAEDQRQALKKFTIDLTERAEQGKLDPVIGRDEEIRRTIQVLQRRTKNNPVLIGEPGVGKTAIVEGLAQRIVNGEVPEGLKHKRVLSLDMGSLIAGAKYRGEFEERLKGVLNDLSKQEGSVILFIDELHTMVGAGKGDGAMDAGNMLKPALARGELHCVGATTLDEYRQYIEKDAALERRFQKVYVAEPTVEDTIAILRGLKERYELHHHVQITDPAIVAAATLSHRYISDRQLPDKAIDLIDEAGSSIRMQMDSKPESLDRLERRIIQLKLEQQALKKESDDASKKRLEMLNTELEQKEREYSELEEEWKAEKASLTGTQNIKTELEQAKITLEQARRVGDLARMSELQYGTIPELEKQLAAATALEGKTMKLLRNRVTEIEVAEVLARWTGIPVSRMLKSERDKLLRMEQDLHQRVIGQDEAVEAVSNAIRRSRAGLSDPNRPIGSFLFLGPTGVGKTELCKALATFLFDSDDAMVRIDMSEFMEKHSVSRLVGAPPGYVGYEEGGYLTEAVRRRPYSVILLDEVEKAHPDVFNILLQVLDDGRLTDGQGRTVDFRNTVVIMTSNLGSDLIQEHFGQMNYSEMKTVVMDVVSHHFRPEFINRIDEVVVFHPLGRAHLASIANIQLERLYKRLEERGYEVKITQPALEFLGEAGFDPVYGARPLKRAIQQEIENPLAQQILSGKLIPGIPVTLDVENGHIIAKQ

SEQ ID NO: 7045 - protein, 882 aa, Yersinia pestis CO92
MTTHSAHLLRRLNPYCAQALAGAATLCQTRAHAEITVEHWLLKLLEQGEGDITVIARRYEWDMDSLWQGLLAYLDTLPRTVQGKPQLSAALQQLIKSAWLDASLQENADAVRSVHLMAALINSPSLLAADAAWPLLSLSTTQLHRLLPLLDSQSDERPEIQQAAALADSPVNLTDEAATVTSASGQPQLNDALQAALDKFTLDVTAKARANQIDPIFGRDSEIRQMIDILSRRRKNNPILVGEPGVGKTALVEGLALRIAEGNVPDSLKTVSVRTLDLGLLQAGAGVKGEFEQRLKNVIEAVQQSPSPVLLFIDEAHTIIGAGNQAGGADAANLLKPALARGELRTIAATTWSEYKQYFERDAALERRFQMVKVDEPDDDTACLMLRGLKERYATHHGVHILDAAITAAVTLSRRFLTGRQLPDKAVDLLDTAGARVRMSIDTLPTALMAINAELAALAMEQQAIEQDLLLLPNVSSTRLPEIEQRRAALAVGQHTLEQQYKEEKRLTTLIIEARQDIANVAHLVALQEELVQIQGNAPLLSLDVDVRTVAAVIADWTGVPLSSLLKDEQTDLLQLENHLATRVVGQDTALGALAQRLRAAKTGLTSENGPLGVFLLVGPSGIGKTETALALADSLFGGEKSLITINLSEYQEAHTVSQLKGSPPGYVGYGQGGVLTEAVRKRPYSVVLLDEVEKAHRDVLNLFYQVFDRGFMRDGEGREIDFRNTVILMTANLGSDHLMQLLDEQPEATHSDLHELLRPILRDHFQPALLARFQTLIYRPLNAIALRTIVEMKLAQVAKRLNKHYGLHCTIEESLYDTLVAACLLPDTGARNIDSLLNQQILPVLSQQLLSRMSEQQRTTSLTLGWDEADGITLEFEGGEK

SEQ ID NO: 7046 - protein, 880 aa, Yersinia pestis CO92
MTTHSAHLLRRLNPYCAQALAGAATLCQTRAHAEITVEHWLLKLLEQGEGDITVIARRYEWDMDSLWQGLLSHLDTLPRTVQGKPQLSAALQQLIKNAWLDASLQENADAVRSVHLMAALIATPSLLVAEAAWPLLSLSTTQLQRLLPLLDNQSDERPEVQQAAALADSPVNLTDEAATVTSASGQPQLNDALQAALDKFTLDVTAKARANQIDPIFGRDSEIRQMIDILSRRRKNNPILVGEPGVGKTALVEGLALRIADGNVPDSLKTVSVRTLDLGLLQAGAGVKGEFEQRLKNVIEAVQQSPSPVLLFIDEAHTIIGAGNQAGGADAANLLKPALARGELRTIAATTWSEYKQYFERDAALERRFQMVKVDEPDDDTACLMLRGLKERYATHHGVHILDAAITAAVTLSRRFLTGRQLPDKAVDLLDTAGARVRMSIDTLPTALMEINAELAALAMEQQAIEQDLLLLPNVSSTRLPEIEQRRAALAVGQHTLEQQYKEEKRLTTLIIEARQDIANAAHLVALQEELVQIQGNAPLLSLDVDVRTVAAVIADWTGVPLGSLLKDEQTNLLSLENRLGERVIGQDAALGALAQRLRAAKTGLTSENGPLGVFLLVGPSGIGKTETALALADSLFGGEKSLITINLSEYQEAHTVSQLKGSPPGYVGYGQGGVLTEAVRKRPYSVVLLDEVEKAHRDVLNLFYQVFDRGFMRDGEGREIDFRNTVIVMTANLGSDHLMQLLDEQPDAPDSTLHELLRPILRDHFQPALLARFQTLIYRPLQVDALKRIVAIKLNQVAQRLHCHYGLSCQIEDSLTDTLVAACLLPDTGARNIDSLLNQQILPVLSQQLLSRMSEQQRTTSLTLGWHEEDGITLTFEGE

SEQ ID NO: 7047 - protein, 891 aa, Yersinia pestis CO92
MAITRKHLFGKLDATLFKGIESATTICKLRGNPYVELVHWLNQLWHQEDNDLKQIIRYFAVDVDAFERELAQALAKLPVGATSISDFSYHIELATERAWIYASLECLDTRIRSGHLLLALLTTMELRRAFFAIAPSMEKIPLEHLSKDLNFITQASPEANEAASDGSPLYDGALPGEASNAIGAAKSGGALAQYTTDLTALAREGKIDPVLGRNHEINTMVDILLRRRQNNPLLTGDAGVGKTAIVEGLALAIAAGSMPPALSQVSLLSLDIVALSAGASMKGEFEARLKSVLDEAIAAEKPVILFIDEVHTLIGAGGNAGTGDAANLLKPALARGQLRTIGATTWSEFKRHIEKDPALTRRFQVLQVDEPDENTAISMLRGLIPALEKHHGVWIMDEALQAAVRLSHRYIPARQLPDKAISLLDTACARIAVAQFSQPIELQHLTFQSETAQTELVSLEKARHFGKAQDARTEQLKTSIAEHGEAADKLDQRWQAERELVSAITTIRTALYDLVSQPEPDEEKRRAYQAQLVQLEAQLSQVRTSLPLVQTEVNAEVIASIVADWTGIPVGQMLKDDIRAVMELPQRLEARVIGQPHALMQLGENIMTARAGLSDPRKPLGVFMLVGPSGVGKTETALAIAESMYGGEQNMITINMSEYQESHTVSSLKGSPPGYVGYGEGGVLTEAVRRKPYSVVLLDEIEKAHSDVHELFFQVFDKGQMEDGEGRFIDFKNTILLLTSNVGSELLSNLLADPDTAPDQDGILSALQPELLKVFPAAFLGRVTVIPYLPLQQDALQHIVRLHLDRIGARLYSQHQLTLKYSDEVVEDVVSRCAVSETGARMLIRYIEQNITPKIGKYILGDSDVKPEQIIFVHKNENGFVIALQCKDDEN

SEQ ID NO: 7048 - protein, 867 aa, Yersinia pestis CO92
MIQIDLPTLVNRLNPIARHSLEAAAAHCVSQQEAEITVSQVLLQMISTPLCDVRLILSHAGVEEDELRESLDQRVSGYQAITQAYPSFSPLLVEWLQDSWLLASTEMEHSQLRSGVMLLTLLLSPSRYLVPTANRLLSPINRELLRQNFANWTADSAETPRAEKGAEAGNGAEINGDSLLARYASNMTEQARNGELDPVLCRDTEIDLMIDILCRRRKNNPIVVGEAGVGKSALIEGLALRIVDNQVPEKLRNSELMTLDLGALQAGAAVKGEFEKRFKGIMAEIAQSTTPIILFIDEAHTLIGAGNQQGGLDISNLLKPALARGELKTIAATTWSEYKKYFEKDAALSRRFQLVKVSEPSAQEATIIMRGLRTVYEQAHGVLIDDEALQAAAVLSDRYISGRQLPDKAIDVLDTAAARVAINLTSAPRQVSALKNELYHQGMEIEMLEREQRLSLSRPDERLSVLQQQRIEIEQQLIALNTGWEKQQHLVQQIIALRAVLLAQEESATDEQVVNLTALSDELERLQQHQTLVSPHVDKSQIAAVIAEWTGVPLNRLSQSELAVVTELPSYLGQQIKGQETAIHCLHQHLLTARADLRRPGRPMGAFLLVGPSGVGKTETVLQIADLLYGGRQYLTTINMSEFQEKHTVSRLIGSPPGYVGYGEGGVLTEAIRQKPYSVVLLDEVEKAHPDVLNLFYQAFDKGELADGEGRIIDCKNIVFFLTSNLGYQTIVDHADEPALLNERLYPELSAFFKPALLARMEVVPYLPLGMETLQIIIHGKLNRLDTLLRQRFSADVVIEPEVIDEILLRATRAENGARMLESIIDGALLPPVSLLLLQKVAAGTAISHIRIAVEGNVFTAQVEGAI

SEQ ID NO: 7049 - protein, 867 aa, Yersinia pestis CO92
MGAITVYQRERLFNRLGTFAYKTFVEATRLCRSYRHEYVELEHWLKILMDQQRGDIPALLTHYGLSQTVISTQLDRIIQHMPVTKASVQDLSSRLESVVEGGLVLSQLMASPSPIRTSHILLALLQDTQHQRWLYRLCDEFKKLPVPQVAEEYEGLLVNSIEQTSEVQRGDALVTETDSSSSKEAHAALNKWCNDLTQQARDGEIDPVIGREAELRQVIDILLRRRQNNPILVGEAGVGKTAVVEALARKLASGDVPPLLQGARLLSLDLGRMQAGASMRGEFESRLKSLIDGISQSDTPVILFCDEAHTLVGAGGQAGTGDAVNLLKPMLARGALRMIAATTWSEYKQFIEPDAALTRRFQRVLIGEPNESTAVDMLRAIAPHFAQHHNVTIRDGAIHAAVRLSLRNLPSRQLPDKAISLLDTACARVALSQYAQPQAIEQLSAQLDVLKTEHQYLVREKQLGEAVDQRLDDVQTQIQAFEHELTALQSRHLHEQQLVREVLPEGEGSGMMTENARWGELMALQEASPLVYPWVDEQSIAAVLSDWTGIPSGKMLQDDIECVLNLEQRLGDHIFGQRNAIKEISQAIRIARAGIQSQERPLGIFLLAGSTGTGKTETANVLVETLYGGAHNLITFNMSEFQEAHTLSTLKGAPPGYVGYGKGGKLTEAVRRKPYSVILLDEFDKAHADIQDAFYQVFDKGWMEDAEGRRVSFRQCFILLTCNQGAEEIEQAYLTANDIKPGALKPLVYDALLRRFAPALLARVNIIPYIPLDQDALAQIASHHLARLQTRLWDEIGATLVTEGDIPGWIASRVCSHPNHGRAVEELLRQTLLPAVGNEVLKRRHEAEPLREIRLIVEETELSIEFA

SEQ ID NO: 7050 - protein, 867 aa, Lactobacillus plantarum WCFS1
MNPEQFTESLQQALQQAQQIAQTRRHQEIGVPHLFKFLTQPGELVRQIFSEAGADLDQLQTELDRELDDIAVVSGGNVQYGGSMSSSLATLMQAADAKRKALGDDYLATDTLALALMDQTGDQLTKYLNQQGITAGQVKNAVDRIRGGQRVTSRNQEDQYQALEKYGVDLVKQARQGNQDPVIGRDEEILDVIRILSRKTKNNPVLIGEPGVGKTAIVEGLAQRIVRGDVPENLKDKTLFSLDMGSLIAGAKYRGEFEERLKAVLKEIKKSDGQIIMFIDEIHNIVGAGKTEGSMDAGNLLKPMLARGELHLIGATTLDEYRQYMEKDKALERRFQKVLVAEPSVEDTISILRGLKERFEIHHGVRIHDNALVAAAKLSDRYITDRYLPDKALDLVDEASAEIRVEMNSNPTELDQVNRQLMRLEVEEAALKKETDDASVKRLADVQKELASAKEKQRTLSERWDSEKKSLQALSDKKSALDKAKHDLENAENNYDLEQAAKLQHGTIPKLEQELKAMEANDHHEDWLVEESVTPDQIANVVSRMTGIPVAKLVAGEREKLLHLADHLHERVVGQDAAVDAVSDAVLRSRAGLQDPNRPLGSFMFLGPTGVGKTELAKALAENLFDADDHMVRIDMSEYMEKESVSRLVGAAPGYVGYEEGGQLTEAVRRNPYSIVLFDEIEKAHPDVFNILLQVLDDGRLTDGQGRTVDFKNTILIMTSNLGSELLLAGVDDQGHLSADTHQQVMQLVQSRFKPEFLNRIDDIIMFTPLQLGAIEEIVVKLIDRLSARLQDREITLKISDEAKKWIAKQGYEPAYGARPLRRFITNHVETPLAKEIIAGRVAPKSTVAINLMDDHLVFENQSTQPA

SEQ ID NO: 7051 - protein, 837 aa, Lactobacillus plantarum WCFS1
MDNLFTPSAKSVLVLAQEQAKYFKHQAVGTEHLLLALAIEKNGIANKVLQQYAVSEDDIREEIERFTGYGTLSNVGKDTYLPYSPKAKEILSVAGDEAKRLGANKIGTEHLLLAMLSDESILSSRILMNLNLDLGQTRKVVLRKLGVSDAMSKRKGNAANRGGKKTEGTPTLDSLARDLTQLASEQEMDPVVGRSKEVKRVIQILSRRTKNNPVLIGEPGVGKTAIAEGLAQKIVAGDVPTDMADKRLMMLDMGSLVAGTKYRGEFEDRLKKVIDEIYNDGHVILFIDELHTLIGAGGAEGAIDASNILKPALARGELQTIGATTLNEYQKYIESDAALERRFATVMVNEPTEDEAVEILDGLRPRYEEHHRVTITDEAVDQAVKLSSRYISDRFLPDKAIDLMDEAAAKVRIDQMDQPTKLSKNQDKLAQLREDKETAIEAQDFEQAADIRKQEMQLKQRLDRIEADQDAEVTEGATPHYDLQVTGEDIAQVVAEWTGVPLTQLQKSESERLVNLEKILHERVVGQPEAVSAVARAIRRARSGLKDPSRPIGSFMFLGPTGVGKTELAKALAAAMFGSEDNMIRIDMSEYMERYSTSRLIGSAPGYVGYDEGGQLTEKVRQKPYSVVLFDEVEKAHPDVFNILLQVLDDGYLTDSKGRKVDFRNTILIMTSNLGATTLRDEKSVGFGATDKANDYNAVAATIRATLKQTFRPEFLNRIDETIVFHSLNKEELHEIVKLMSQEIVDRVGQQGIKIKITPAAIDVVAKAGFDPEYGARPIRRALQTEIEDRLSEELLTGAIKVDDQVTIGASKGTITINIKTSLRQMVVRPFLQSRRD

SEQ ID NO: 7052 - protein, 739 aa, Lactobacillus plantarum WCFS1
MLCDNCHKNEATIHLYTSVNGQRRQINLCQNCYQLLKNQEQQPNNGVGGADMAQDPFGFGGLDDIFRAMQGGVDPNNAYRQQQTPPTQPAGPNGGNRRGNNNGGGLLGQYGFNLTAQAKQGKIDPVIGRDTEINRVIEILNRRTKNNPVLIGEAGVGKTAVVEGLAQKIVSGQVPQKLLDKEIIRLDVASLVQGTGIRGQFEQRMQQLMKEVQSNPNIILFIDEIHEIMGAGNAEGGMDAGNVLKPALARGDFQLVGATTLNEYRDIEKDAALARRFQPVTVNEPSVEESIKILEGIQKKYEDYHHVKYDQDAIVAAVKLSNRYIQDRFLPDKAIDLLDEAGSRKNLTLKTVDPKTIQEKIDEAEKQKQDALKKEDYEKAAYYRDQVAKLEKAKPDESSDQPNNDTATVTVKDMEQIVEEKTSIPVGDLQAKEQAQMKTLAPDLKSTVNGQDQAVEAVSRAIRRNRIGLNGTGRPIGSFMFVGPTGVGKTELAKQLAKELFGSQDAMIRFDMSEYMEPHSVAKLIGSPPGYVGYEEAGQLTEQVRRHPYSLVLLDEVEKAHPDVMHMFLQILDDGRLTDSQGRTVSFKDTIIIMTSNAGTGDSEANVGFGAAAEGKTHDITSRLTDYFKPEFLNRFDDIIQFNALSKENLMKIVGLMIEDVNGMLANQGLHVHVTEPVEEKLVELGYNPQMGARPLRRVIQEQIEDRIADFYLDHGDVKNMVAKVEDGKIVLAAETKSE

SEQ ID NO: 7053 - protein, 704 aa, Lactobacillus plantarum WCFS1
MANFYGNDPFFNNDMDDVFNQLFRRMDNQNSERARYLVNGQSLTPDEFAQYRATGKLPQNNKTIEVSKDGKQAVKKGGILEKLGTNLTEQARDGLLDPVIGRENEIQETAEILSRRTKNNPILVGDAGVGKTAVVEGLAQAIVAGKVPETIQDKEIYSIDLSSLEAGTQYRGSFEENIKQLVKEVKAAGNIILFFDEIHQIIGTGATGGEDGGKGLADIIKPALSRGELTVIGATTQDEYRNTILKNAALARRFNDVVINEPTAADTLRILQGVKKLYEKHHHVVLPDDVLKAAVDYSIQYIPQRTLPDKAIDLIDMTAAHLAAKNSQTDVETLDQRVKKLEAAKEAAVKSEDFTKAADIKKSIEETKQKIKKTDQKEKITATIDDVAQSVERLTGIPVADMGANDIEHLKNLDKRLKSKVIGQDEAVEMVAKAIRRNRAGFSEGDQPIGSFLFVGPTGVGKTELAKQLALDMFGNKNAIIRLDMSEYADRTAVSKLIGTSAGYVGYEDNANTLTERVRRNPYSIVLLDEIEKADPQVLTLLLQVMDDGRLTDGQGNVINFKNTIIIATSNAGFGNEALSGDKQRDQSLMDKLAPFFRPEFLNRFNGIVEFSHLTKQDLSQIVDLMLADVQKTLAKKSIKLEVTKAAKDWLMEQGYDEAMGARPLRRVIEQQIRDKVTDFYLDHLDVKNLKADLVDAEIVISAA

SEQ ID NO: 7054 - protein, 809 aa, Oceanobacillus iheyensis HTE831
MMFGRFTERAQKVLALSQEEAVRLGHNNIGTEHILLGLVREGEGIAAKALQSLGLEVSKIQEEVEKLIGVGKQPTQSIHYTPRAKKVVELSQDEARKLGHSYVGTEHILLGLIREGEGVAARVLNNLGVSLNKARQQVLQLLGSNESQAGRQGRSGQQSNASTPTLDSLARDLTVSAKEGKIDPVIGRSKEIERVIQVLSRRTKNNPVLIGEPGVGKTAVAEGLAQQIIDNEVPETLRDKRVMTLDMGTVVAGTKYRGEFEDRLKKVMEEIRQAGNIILFIDELHTLIGAGGAEGAIDASNILKPSLARGELQCIGATTLDEYRKYIEKDAALERRFQPIQVDEPTLEETIQILNGLRDRYEAHHRVTITDEAIEAAASLSDRYITDRFLPDKAIDLIDEAGSKVRLRSYTVPPNLKELEQKLDEVRKEKDAAVQSQEFEKAASLRDSEQRFREELETTKNQWKEKQGQTDSEVTMEDIAAVVSTWTGVPVSKLTKDETDRLLNMEKILHDRVIGQSEAVNAVAKAIRRARAGLKDPKRPIGSFIFLGPTGVGKTELARALAEVMFADEDAMIRIDMSEYMERHATSRLVGSPPGYVGYDEGGQLTEKVRRKPYSVVLLDEVEKAHPEVFNILLQVLEDGRLTDSKGRVVDFRNTVIIMTSNVGASELKRNKYVGFALDNEEKDYKDMKSKVIEELKKAFRPEFLNRIDETIVFHSLEKEHMKDIVTLMVQQLQKRLKEQDLHLSLTDKAIEKIANEGFDPEYGARPLRRSIQKNIEDLLSEELLRGAIEKEQQVKIGLNNKGEFIVLP

SEQ ID NO: 7055 - protein, 712 aa, Oceanobacillus iheyensis HTE831
MKCQNCGQNDATINAQMQMNNQRMEIHLCHECFQAIQGNMMNSDFFSNSPFGNMDQAFANNFSQGNGGSATGTRTKQKASKGNGLIDQLAKNLTDQARSGNVDPVIGRDKEIKRVTETLNRRNKNNPVLIGEPGVGKTAIAEGLAVNIVEGNVPAKLMNKEIYLLDVASLVANTGVRGQFEERMKKLVEELQSRKDVILFIDEIHLIVGAGTAESSQMDVGNLLKPALARGDLQIIGATTLKEYRQIEKDAALERRLQPIMVNEPSFEDAVTILEGIKERYEKFHEVRYSEDVIRAFVNLSSRYIQDRHLPDKAIDLMDEVGSRLNLSNAQKDSATLQQQLDEIIKKKQEAADIEDYEKAANLRYQEIQLQKQLDKVEEGEKVLDVDISDIELIVEEKTGIPVTKMQKDEQEKMKNLSDQLSQKVIGQNEAVQKVAKAIRRSRAGLKAKQRPIGSFLFVGPTGVGKTELTKVLAEELFGSRDSMVRLDMSEYMEKHAVSKIIGSPPGYVGHEEAGQLTERIRRNPYSILLLDEIEKAHPDVQNMFLQIMEDGQLTDSQGRKVSFKDTVIIMTSNAGTGVKQVNVGFNREAHESVSTLENLSEYFKPEFLNRFDAIVNFQELAEEDLLQIIDLMLSELEATIKENKMTITISEEAKQQLVKLGYDTRFGARPLRRVIQDKIEDPLTDLILEGEDITSINVDVKEDEIVVNQAS

SEQ ID NO: 7056 - protein, 810 aa, Bacillus subtilis subsp. subtilis str. 168
MMFGRFTERAQKVLALAQEEALRLGHNNIGTEHILLGLVREGEGIAAKALQALGLGSEKIQKEVESLIGRGQEMSQTIHYTPRAKKVIELSMDEARKLGHSYVGTEHILLGLIREGEGVAARVLNNLGVSLNKARQQVLQLLGSNETGSSAAGTNSNANTPTLDSLARDLTAIAKEDSLDPVIGRSKEIQRVIEVLSRRTKNNPVLIGEPGVGKTAIAEGLAQQIINNEVPEILRDKRVMTLDMGTVVAGTKYRGEFEDRLKKVMDEIRQAGNIILFIDELHTLIGAGGAEGAIDASNILKPSLARGELQCIGATTLDEYRKYIEKDAALERRFQPIQVDQPSVDESIQILQGLRDRYEAHHRVSITDDAIEAAVKLSDRYISDRFLPDKAIDLIDEAGSKVRLRSFTTPPNLKELEQKLDEVRKEKDAAVQSQEFEKAASLRDTEQRLREQVEDTKKSWKEKQGQENSEVTVDDIAMVVSSWTGVPVSKIAQTETDKLLNMENILHSRVIGQDEAVVAVAKAVRRARAGLKDPKRPIGSFIFLGPTGVGKTELARALAESIFGDEESMIRIDMSEYMEKHSTSRLVGSPPGYVGYDEGGQLTEKVRRKPYSVVLLDEIEKAHPDVFNILLQVLEDGRLTDSKGRTVDFRNTILIMTSNVGASELKRNKYVGFNVQDETQNHKDMKDKVMGELKRAFRPEFINRIDEIIVFHSLEKKHLTEIVSLMSDQLTKRLKEQDLSIELTDAAKAKVAEEGVDLEYGARPLRRAIQKHVEDRLSEELLRGNIHKGQHIVLDVEDGEFVVKTTAKTN

SEQ ID NO: 7057 - protein, 699 aa, Bacillus subtilis subsp. subtilis str. 168
MRCQHCHQNEATIRLNMQINSVHKQMVLCETCYNELTRKPSMSMGPQSFGFPFEQAFQPKEQSAAKQSEKKGLLDELAQNITNGAKAGLIDPVIGRDDEVARVIEILNRRNKNNPVLIGEPGVGKTAIAEGLALKIAEGDVPNKLKNKELYLLDVASLVANTGIRGQFEERMKQLITELKERKNVILFIDEIHLLVGAGSAEGSMDAGNILKPALARGELQVIGATTLKEYRQIEKDAALERRFQPVMVQEPSIEQAILILQGIKDKYEAYHGVTFSDEAIKACVTLSSRYIQDRHLPDKAIDLLDEAGSKANLLIDELNDEDAAERLTAIEAEKTKALEEENYELAAKLRDEELALEKKLNSSSAHTAVTVEAEHIQEIVEQKTGIPVGKLQADEQTKMKELEAKLHERVIGQEAAVQKVAKAVRRSRAGLKSKNRPVGSFLFVGPTGVGKTELSKTLADELFGTKDAIIRLDMSEYMEKHAVSKIIGSPPGYVGHEEAGQLTEKVRRNPYSIVLLDEIEKAHPDVQHMFLQIMEDGRLTDSQGRTVSFKDTVIIMTSNAGAGEKQTKVGFQSDDSVIEEQTLIDSLSMFFKPEFLNRFDSIIEFRSLEKEHLVKIVSLLLGELEETLAERGISLNVTDEAKEKIAELGYHPSFGARPLRRTIQEWVEDEMTDLLLDNGEITSFHVILEDDKIKVRAK

SEQ ID NO: 7058 - protein, 810 aa, Aquifex aeolicus VF5
MFEKFTERARQVILRAREEALELGHSYLGSEHILLALIKDEDIPVLVLSKLGVSPEKIRKAIMGQITKGSHSGEVLFAPDAKRVIEFAVEEARILHHQFVGPEHLLIGVVREKTGLGGRILRSFGLDEYSVRREVLQLLGELPPQESQRYVSTPNLDRFSRDLTQMAREGKLDPVIGREKEIERVIQILVRRRKNNPVLLGDPGVGKTAIVEGLAQRIANKEVPEPLLNKRVVALDLAALVAGTKYRGQFEERLKNILKELEKANNVILFIDELHTLVGAGSAEGSIDASNMLKPALARGEIQVIGATTVDEYRKYIEKDGALERRFQPVYVEQPSPEDTIQILYGLKPKFEEFHKVEYTPEAIEKAVELSVKYITDRNLPDKAIDVMDEAGALVKLKATQLPPELKEIEEKIKELEKEKEKAVKEQDYEKAAKIRDEELRLRAKFETMKAKWKEEMEKNRPKVTDEDVAEVVARWTGVPVKRVHESDAEKLLHIEEELKKRVVGQDEAIKAVAKAIRRSRVGLKGKHRPIGVFMFLGPTGVGKTETAKALAEYLFGTEDALIRFDMSEYMEKHTVSRLIGAPPGYVGYEEGGQLTEAVRRRPYSVLLFDEIEKAHPDVFNIFLQIFDDGRLTDGLGRTVDFSNTIIIMTSNLGARLITGGTMGFEKKQGLLNFEEMRKNVLDQVKRTFSPEFLNRLDEIIVFRPLEKKDIEQILELQLKEINEKLKDWNVRVKLHKSFVNWIIEKEYKPEFGARSLKRALQRHVEDLLAEELIKGTLKGVEEVEIRVRNDKPYLKPVKKKEKVEALLEK

SEQ ID NO: 7059 - protein, 879 aa, Bradyrhizobium japonicum USDA 110
MNIEKYTERSRGFIQSAQSLAVREGHQQFSTLHVLKVLLDDNEGLAAGLIDRAGGNSRAILKATEDALNKVPKVSGGGAGQIYLAPELARTFDAAEKAGEKAGDSFVTVERLLLGLTLEKTSEAGTILSKGGVTPQNLNAAIEALRKGRTADSATAENAYDALKKYARDLTQAARDGKLDPVIGRDEEIRRTIQVLSRRTKNNPVLIGEPGVGKTAIAEGLALRIVNGDVPESLKDKKLLSLDLGALIAGAKYRGEFEERLKAVLQEVTGSEGTFILFIDEMHTLIGAGKGDGAMDASNLLKPALARGELHCIGATTLDEYQKHVEKDAALARRFQPIFVSEPSVEDTISILRGLKDKYEQHHGVRITDSALVASATLSNRYITDRFLPDKAIDLMDEAAARLKMQVDSKPEELDSMDREIIRLKIEQEALKKESDAGSKSRLQTLEKELVELEEKSASLTARWSAEKNKLSDAQKLKAELDGLRVELANAQRRGEFQKAGELAYGRIPELERQLADIEAKENSGEMMEEAVTANHIAQVVSRWTGVPVDKMLEGEKDKLLKMEDSLGKRVVGQAEAVHAVATAVRRSRAGLQDPNRPMGSFMFLGPTGVGKTELTKALAEYLFNDETAMVRLDMSEYMEKHSVSRLIGAPPGYVGYDEGGALTEAVRRRPYQVVLFDEIEKAHPDVFNVLLQVLDDGRLTDGQGRTVDFRNTLIIMTSNLGSEFLVNQPEGEDTSAVREQVMGMVRGHFRPEFLNRVDEIILFHRLQRSEMGRIVEIQFARLQKLLTDRKIVLTLDGAARDWLAAKGWDPAYGARPLKRVIQRYLQDPLAEMILAGDVKDGDNVAISSEGNVLTFNGKAPQTAEIAQFEAPASKRKLN

SEQ ID NO: 7060 - protein, 879 aa, Bradyrhizobium japonicum USDA 110
MTDISIEAVTGKLNRAGYDAFLQALRHAKSAGNRNVELAHWLFHILQQERNDLSLSVDHYKLDRARLLSDLAGVINGFRKNETDMPGVANSVIDLLDRGWHYATLFFGETQIRTGHLLVAGLKSNDIRRTLNNLSQEFSKVNVDALAAERRAVWAGSDEETMRPMDGSGLVGAVTEGAAQAGPKGTTPLDRFSQDLTAKAKSGEMDPILGRDEEIRQLIDVLMRRRQNNPILTGEAGVGKTAVVEGFAQRIAAGDVPPPLRGVRLCALDIGLMQAGASMKGEFEQRLRSVIDEVQSSPTPIILFIDEAHTLIGAGGAAGTGDAANLLKPPLARGTLRTIAATTWAEYRQYIEKDPALTRRFQPIQIDEPDVETCCIMLRGLLGPMEKHHGVRISDAAIVAAVNLSHRYIPSRQLPDKAVSLLDTASARVAISQSATPALIEDARVAIAAREAERSALVSDSDLGIEDDERIVAIDNDVAALKDKLTNLEADWAAEQELVKDIRGIREILSEPMEGDDPAARRAELRGKFDTLESINPEKRMVYAYVDQQSVASVVSDWTGIPVGRMMRDEIETVLKLPEILNRRVVGQSHGLTMIAKRIETSRAKLDNPSKPIGVFMLAGPSGVGKTETALALAETLYGGEQNMITINMSEFQEAHTVSTLKGAPPGYVGYGEGGRLTEAVRRKPYSVILLDEVEKAHPDVHEIFFQVFDKGTMEDGNGRRIDFKNTLIILTTNVGTDLIMGLSRDPKYRSEPEELAKMLRPELLKVFPAALLGRIVSIPYFPLSDEMLAGIARLQLDRIGRRLRDNHNAAFSYDDAVVEHIVSRCNDPDSGGRMIDNIITNTLLPELSREFLSKSLAKEEVKQARVSIENDKFAYSWN

SEQ ID NO: 7061 - protein, 931 aa, Brucella melitensis 16M
MARFSAPFLFGFSDACRSCRKRAIFPYALLRRARPCGGSSPNISRCRGTDREANGDIMNIEKYTERVRGFIQSAQTFALSSGNQQFTPEHILKVLIDDDEGLAASLVERAGGRVGDVRMGLQSALEKLPKVSGGNDQLYLSQPLAKVFSLAEELASKAGDSFVTVERLLTALAMEKSAKTSEILSAAGVTPTALNRVINDMRKGRTADSASAESNYDALKKYARDLTEDARAGKLDPVIGRDEEIRRTIQVLSRRTKNNPVLIGEPGVGKTAIAEGLALRIVNGDVPESLKDKQLMALDMGALIAGAKYRGEFEERLKAVLSEVQTAAGQIILFIDEMHTLVGAGKTDGAMDASNLLKPALARGELHCVGATTLEEYRKYVEKDAALARRFQPVFVDEPTVEDTISILRGLKEKYEQHHKVRVSDSALVAAAMLSNRYITDRFLPDKAIDLVDEAASRLRMQVDSKPEELDEIDRRIMQLKIEREALKVETDAASKDRLQRIEKELSDLEEESAELTAKWQAEKQKLGLAADLKRQLEEARNALAIAQRNGEFQKAGELAYGTIPQLEKQLADAESQENKGSLLEETVTPDHVAQVISRWTGIPVDRMLEGEREKLLRMEDEIGKRVVGQGEAVQAISKAVRRARAGLQDPNRPIGSFIFLGPTGVGKTELTKALASFLFQDDTAMVRIDMSEFMEKHSVSRLIGAPPGYVGYEEGGVLTEAVRRRPYQVILFDEIEKAHPDVFNVLLQVLDDGRLTDGQGHTVDFRNTVIIMTSNLGAEYLVNLGENDDVETVRDDVMGVVRASFRPEFLNRVDEIILFHRLRREDMGAIVDIQMQRLQYLLSDRKITLQLEDDAREWLANKGYDPAYGARPLKRVIQKEVQDPLAERILLGDILDGSLVKITAGSDRLNFRPISGAFSAAEPEREDEKA

SEQ ID NO: 7062 - protein, 831 aa, Enterococcus faecalis V583
MDELFTESAKAVLAIAQEEAKYFRHQSVGSEHLLLALVLEPNGIAGKTLRQLNTDTEDIREEIEHLSGYGTMQSPMGNNNLYLPYSPRAKQIFAYAGDEAKRLGAQKIGTEHLLLGLLRDEEILASRILVNLGLSLSKMRQLLLKKMGVSEPNGAQRRRNGQNKNAPQGTPTLDSLARDLTKLAREQSLDPVVGRGTEVRRLIQILSRRTKNNPVLVGEPGVGKTAIAEGLAQKIVNREVPEDMQGKRLMMLDMGALVAGTKYRGEFEDRLKKVVDEIYQDGQVILFIDELHTLIGAGGAEGAIDASNILKPALARGELQTIGATTLDEYQKYIEKDAALERRFARIQVAEPTPEEAEEILKGLRSRYEKHHGVEITDEALHAAVQLSIRYLNDRQLPDKAIDLMDESAAKVRLDKADQPSEINELRTEISQLITEKEEAIQNQSFESAARIRQKEKQVMEKLEELIAVKEKSLSGYSTQVTEEDVAGVVSQWTGVPLQQLEKKESERLMELETILHQRVVGQNEAVEAVSRAIRRARSGLKDPARPIGSFMFLGPTGVGKTELAKALAEAMFGSEEALIRVDMSEFMEKYSTSRLIGSPPGYVGYEEGGQLTEKIRQRPYSVILLDEVEKAHPDVFNILLQVLDDGHLTDAKGRKVDFRNTILIMTSNLGATAIREEKHVGFNVKDISKNHELMQKRIMEELKKAFRPEFLNRIDETVVFHSLKQEEIHEIVKIMSQSVVKRMAEQEVKVKITPAAIEVIGKVGFDPEYGARPIRRALQKEVEDRLSEALLSGQIQLGDKVTLGASKGKITLNVRAPKAPKTEAKELQTV

SEQ ID NO: 7063 - protein, 750 aa, Enterococcus faecalis V583
MFHSMICQNCQQNEATIHLYANVNGQRKQLDYCQSCYQKLKNQANNSPQNMGQDPFGFGSLDDLYRSLSRQMQQGNPYEQQTPPTQFGDGGNGGQPPRGGAGAGQGLLGEYGINITEAARQGDIDPVVGRDQEIKRVIEILNRRTKNNPVLIGEPGVGKTAVVEGLAQKIVDGDVPQKLLDKEVIRLDVVSLVQGTGIRGQFEERMQKLIEEITEAENVILFIDEVHEIVGAGAAGDGNMDAGNILKPALARGELQLVGATTLNEYRIIEKDAALERRMQPVQVDEPTVAETITILHGLQKRYEDYHHVKYTDEAINAAANLSNRYIQDRFLPDKAIDLLDESGSKMNLTIQLVDPKTIDKKLAEAEQQKQQASAEEDFEKAAYYRDQINKLQAMKEKQISDEETPVITEKDIEAIVEQKTGIPVGDLKEKEQTQLKNLAVDLKAHVVGQDDAVDKVAKAIRRNRVGLGKQNRPIGSFLFVGPTGVGKTELAKQLAFELFGSEDSMVRFDMSEYMEKHSVSKLIGSPPGYVGYDEAGQLTEKVRRNPYSLILLDEIEKAHPDVLHMFLQILDDGRLTDAQGRTVSFKDTIIIMTSNAGTGAVEANVGFGAAREGVTKSVLGQLNNFFTPEFLNRFDGIIEFKALSKENLMNIVSLMLEEVNGLLAKQKLHIEVPTEVKEKLVDLGYDPAMGARPLRRTIQEQIEDGIAEYYLDHPENHQLVAALDNEGKIIVTGAQEVTKTETSTSDQAE

SEQ ID NO: 7064 - protein, 862 aa, Bacteroides thetaiotaomicron VPI-5482
MNFNNFTIKSQEAVQEAVNLVQSRGQQAIEPAHILHGVMKVGENVTNFIFQKLGMNGQQVALVVDKQIESLPKVSGGEPYLSRESNEVLQKATQYSKEMGDEFVSLEHILLALLTVKSTVSTILKDAGMTEKELRNAINELRKGEKVTSQSSEDNYQSLEKYAINLNEAARSGKLDPVIGRDEEIRRVLQILSRRTKNNPILIGEPGTGKTAIVEGLAHRILRGDVPENLKNKQVYSLDMGALVAGAKYKGEFEERLKSVVNEVKKSEGDIILFIDEIHTLVGAGKGEGAMDAANILKPALARGELRSIGATTLDEYQKYFEKDKALERRFQIVQVDEPDTLSTISILRGLKERYENHHHVRIKDDAIIAAVELSSRYITDRFLPDKAIDLMDEAAAKLRMEVDSVPEELDEISRKIKQLEIEREAIKRENDKPKLEIIGKELAELKEVEKSFKAKWQSEKTLMDKIQQNKVEIENLKFEAEKAEREGDYGKVAEIRYGKLQALDKEIEDTQEKLRGMQGDKAMIKEEVDAEDIADVVSRWTGIPVSKMMQSEKDKLLHLEDELHQRVIGQDEAIEAVADAVRRSRAGLQDPKRPIGSFIFLGTTGVGKTELAKALAEFLFDDESMMTRIDMSEYQEKHSVSRLVGAPPGYVGYDEGGQLTEAIRRKPYSVVLFDEIEKAHPDVFNILLQVLDDGRLTDNKGRVVNFKNTIIIMTSNMGSSYIQSQMEKLSGSNKEEVIEETKKEVMNMLKKNIRPEFLNRIDETIMFLPLTETEIRQIVLLQIKGVQKMLAENGVELEMTDAALNFLSQVGYDPEFGARPVKRAIQRYLLNDLSKKLLSQEVDRSKAIIVDSNGDGLVFRN

SEQ ID NO: 7065 - protein, 841 aa, Bacteroides thetaiotaomicron VPI-5482
MNNQFSQRVSDIIVYSKEEANRLRSRHIGPEHLLLGMLRDGEGKAIEILSKLNTNLAAVKQQIEARLKTEADDMLLPDAEIPLSNDAAKILKMCILEARGMKSNIADTEHVLLAILRERNNMAASVLEANDVNYVKVLEQATLQPDVNSGMGFPEDDDDEEMSSPRSGGSGSEERQQQAQTASKKPANDTPVLDNFGTDMTKAAEEGRLDPVVGREKEIERLAQILSRRKKNNPILIGEPGVGKSAIVEGLALRIIQKKVSRILFDKRVVALDMTAVVAGTKYRGQFEERIRSILNELQRNPNVILFIDEIHTIVGAGSAAGSMDAANMLKPALARGEIQCIGATTLDEYRKNIEKDGALERRFQKVMVEPTTAAETLQILRNIKDKYEDHHNVNYTDEALEACVKLTDRYITDRNFPDKAIDALDEAGSRVHLTNVNVPKEIEEQEKLIEEAKSKKNEAVKSQNFELAASFRDKEKELTLQLDEMKREWENSLKENRQTVDAEEIANVISMMSGIPVQRMAQAEGIKLAGMKEDLQSKVIAQDPAIEKLVKAILRSRVGLKDPNKPIGTFMFLGPTGVGKTHLAKELAKYMFGSSDALIRIDMSEFMEKFTVSRLVGAPPGYVGYEEGGQLTEKVRRKPYSIVLLDEIEKAHPDVFNLLLQVMDEGRLTDSYGRMVDFKNTVIIMTSNIGTRQLKEFGRGVGFATQSRLDDKEFSRSVIQKALNKSFAPEFINRVDEIITFDQLSLEAITKIIDIELKGLYDRIESIGYKLVIDDEAKRFVAEKGYDVQFGARPLKRAIQTHLEDGLSELIITSSLKEKDVIQVSLNKEKGELEMKVIAS

SEQ ID NO: 7066 - protein, 866 aa, Bacillus cereus ATCC 14579
MDLNQMTTKTQEAIMSAQSLAVSHHHQEVDTVHLLLALLEEQDGLAVRIFQKMNVDIEALKQGAESLIKKKPSVTGSGAEVGKLYVTSALQQLLVRAGKEAEKLQDDYISVEHVLLAFSEEKGDINQLFTRLHITKDNLLQSLMTVRGNQRVTSQNPEATYEALEKYGRDLVAEVRAGKIDPVIGRDSEIRRVIRILSRKTKNNPVLIGEPGVGKTAIVEGLAQRIVKKDVPEGLKDRTIFALDMSALVAGAKFRGEFEERLQAVLNEIKKSEGRILLFIDELHTIVGAGKTEGAMDAGNMLKPMLARGELHCIGATTLDEYRKYIEKDPALERRFQQVLAEEPTVEDTISILRGLKERFEIYHGVNIHDRAIVAASVLSDRYISDRFLPDKAIDLVDEACATIRTEIDSMPTELDEVTRRIMQLEIEEAALGKETDRGSQERLKTLQRELSDLKEVASGMRAKWEKEKEDIHKVRDLREHLERLRRELEEAEGNYDLNKAAELRHGKIPAIEKELKEAEEMGAHNKQENRLLREEVSEEEIADIVSRWTGIPVAKLVEGEREKLLRLEQILSERVIGQEEAVSLVSDAVLRARAGIKDPNRPIGSFIFLGPTGVGKTELAKTLAQSLFDSEEQMIRIDMSEYMEKHAVSRLIGAPPGYVGYEEGGQLTEAVRRKPYSVVLLDEIEKAHPEVFNILLQMLDDGRITDSQGRTVDFKNTVIIMTSNIGSAHLLDGLEEDGSIKEESRDLVMGQLRGHFRPEFLNRVDEIILFKPLTTNEIKGIVDKIVKELQGRLADRHITVELTDAAKEFVVEAGFDPMYGARPLKRYVQRQVETKLARELIAGTITDNSHVVVDVENNELVVHVK

SEQ ID NO: 7067 - protein, 811 aa, Bacillus cereus ATCC 14579
MMFGRFTERAQKVLALSQEEAIRIGHNNIGTEHILLGLVREGEGIAAKALIALGLSPEKVQKEVEALIGRGTEASQTVHYTPRAKKVIELSMDEARKLGHSYVGTEHILLGLIREGEGVAARVLNNLGVSLNKARQQVLQLLGSNEASSGHQGGSSTNANTPTLDSLARDLTVVARENRLDPVIGRSKEIQRVIEVLSRRTKNNPVLIGEPGVGKTAIAEGLAQQIVNNEVPETLRDKRVMTLDMGTVVAGTKYRGEFEDRLKKVMDEIRQAGNIILFIDELHTLIGAGGAEGAIDASNILKPSLARGELQCIGATTLDEYRKYIEKDAALERRFQPIHVDEPSLEESTQILKGLRDRYEAHHRVSITDDAIDAAVKLSDRYITDRFLPDKAIDLIDEAASKVRLRSYTTPPNLKELEVKLEEIRKEKDAAVQSQEFEKAASLRDMEQRLREKLEDTKRQWKEQQGKENSEVTVEDIANVVSTWTRIPVSKLAQTETDKLLNLESILHDRVIGQDEAVVAVAKAVRRARAGLKDPKRPIGSFIFLGPTGVGKTELARALAESMFGDEDAMIRIDMSEYMEKHSTSRLVGSPPGYVGYEEGGQLTEKVRRKPYSVVLLDEVEKAHPDVFNILLQVLEDGRLTDSKGRTVDFRNTIVIMTSNVGAEALKRNKHLGFNVQDESRDYSDMKGKVMDELKKAFRPEFLNRIDEIIVFHMLEKKHIQEIVTLMVNQLVNRLKEQEIELHLTEGAIAAIADKGFDREYGARPLRRAIQKHVEDRLSEELLKGAIEKGQKVIFDVEGETFVIHSAEKVK

SEQ ID NO: 7068 - protein, 870 aa, Streptomyces avermitilis MA-4680
MDAELTNRSRDAINAATNRAVSEGHPDLTPAHLLLALLGGKDNENITDLLAAVDADQAAVRAGTERVLAKLPSVTGSTVAPPQPNRELLAVVADASQRAQDLGDDFLSTEHLLIGIAANGGAAGDVLSQQGASAKKLLEAFQKTRGGRRVTTPDPEGQYKALEKFGTDFTAAARDGKLDPVIGRDQEIRRVVQVLSRRTKNNPVLIGEPGVGKTAVVEGLAQRIVKGDVPESLKNKRLVALDLGAMVAGAKYRGEFEERLKTVLAEIKDSDGQIITFIDELHTVVGAGAGGDSAMDAGNMLKPMLARGELRMVGATTLDEYRERIEKDPALERRFQQVLVAEPSVEDTIAILRGLKGRYEAHHKVQIADSALVAAAALSDRYITSRFLPDKAIDLVDEAASRLRMEIDSSPVEIDELQRQVDRLKMEELAIGKETDAASRERLEKLRRDLADKEEELRGLTARWEKEKQSLNRVGELKEKLDELRGQAERAQRDGDFDTASKLLYGEIPALERDLEEASEAEEEAARDTMVKEEVGPDDIADVVGSWTGIPAGRLLEGETQKLLRMEEELGHRLIGQSEAVQAVSDAVRRTRAGIADPDRPTGSFLFLGPTGVGKTELAKALADFLFDDERAMVRIDMSEYGEKHTVARLVGAPPGYVGYEEGGQLTEAVRRRPYSVVLLDEVEKAHPEVFDILLQVLDDGRLTDGQGRTVDFRNTILILTSNLGSQFLSGHGPAEPQTSEEEKKRQVLEVVRASFKPEFLNRLDDLVVFSALNRQELERIAKLQIDRLAQRLAQRRLRLEVTDAALAWLAEEGNDPAYGARPLRRLVQTAIGDRLAKEILAGEVKDGDTVRVDAFGEGLIVGPATGKTL

SEQ ID NO: 7069 - protein, 879 aa, Streptomyces avermitilis MA-4680
MDMNRLTQKSQEALQEAQTAAGRMGHTEVDGEHLLLALLDQEDGLIPRLLQQAGTEPKELRAAVREELSHRPKATGPGAAPGQVFVTQRLARLLDAAEREAKRLKDEYVSVEHLLLALAEESSSTAAGLLLKQAGITRDSFLSALTQVRGNQRVTSANPEVAYEALEKYGRDLVLEARSGRLDPVIGRDAEIRRVTQILSRKTKNNPVLIGDPGVGKTAIVEGLAQRIVRGDVPEGLRDKTVFALDMGSLVAGAKYRGEFEERLKAVLSEVKAAEGRILLFVDELHTVVGAGAAEGAMDAGNMLKPMLARGELHMIGATTLDEYRKHIEKDAALERRFQQVLVDEPSVEDTISILRGLRERLEVFHGVKIQDTALVSAATLSHRYITDRFLPDKAIDLVDEACARLRTEIDSMPAELDEITRRVTRLEIEEAALSKESDPASKTRLEELRRELADLRGEADAKHAQWEAERQAIRRVQELRQELEQVRHEAEEAERAYDLNRAAELRYGRLQDLERRLAAEEEQLAAKQGENRLLREVVTEEEIAEIVAAWTGIPVARLQEGEREKLLRLDEILRERVIGQDEAVKLVTDAIIRARSGIRDPRRPIGSFIFLGPTGVGKTELAKTLARTLFDSEENMVRLDMSEYQERHTVSRLMGAPPGYVGYEEGGQLTEAVRRKPYSVVLFDEIEKAHTDVFNTLLQILDDGRITDAQGRTVDFRNTVIIMTSNIGSEHLLDGATAEGEIKPDARALVMGELRGHFRPEFLNRVDDIVLFKPLGERQIERIVELQFDELRQRLAERRITVELTDAGREVIAHQGYDPVYGARPLRRYISHEVETLVGRALLRGDVQDGATVRVDAEHGELVVTYDQPEDVKGAWAA

SEQ ID NO: 7070 - protein, 841 aa, Streptomyces avermitilis MA-4680
MFERFTDRARRVVVLAQEEARMLNHNYIGTEHILLGLIHEGEGVAAKALESLGISLEAVRQQVEEIIGQGQQAPSGHIPFTPRAKKVLELSLREALQLGHNYIGTEHILLGLIREGEGVAAQVLVKLGADLNRVRQQVIQLLSGYQGKETAAAGGPAEGTPSTSLVLDQFGRNLTQAARESKLDPVIGREKEIERVMQVLSRRTKNNPVLIGEPGVGKTAVVEGLAQAIVKGEVPETLKDKHLYTLDLGALVAGSRYRGDFEERLKKVLKEIRTRGDIILFIDELHTLVGAGAAEGAIDAASILKPMLARGELQTIGATTLDEYRKHLEKDAALERRFQPIQVAEPSLPHTIEILKGLRDRYEAHHRVSITDEALVQAATLADRYISDRFLPDKAIDLIDEAGSRMRIRRMTAPPDLREFDEKIAGVRRDKESAIDSQDFEKAASLRDKEKQLLAAKAKREKEWKAGDMDVVAEVDGELIAEVLATATGIPVFKLTEEESSRLLRMEDELHKRVIGQKDAVKALSKAIRRTRAGLKDPKRPGGSFIFAGPSGVGKTELSKALAEFLFGDEDALISLDMSEFSEKHTVSRLFGSPPGYVGYEEGGQLTEKVRRKPFSVVLFDEVEKAHPDIFNSLLQILEDGRLTDSQGRVVDFKNTVIIMTTNLGTRDISKGFNLGFAAQGDTKSNYERMKNKVADELKQHFRPEFLNRVDDVVVFPQLTQDDILRIVDLMITKVDERLKDRDMGIELAQSAKELLAKKGYDPVLGARPLRRTIQREIEDTLSEKILFGELRPGHIVVVDTEGEGETKTFTFRGEEKSALPDVPPIEQAAGGAGPNLSKDA

SEQ ID NO: 7071 - protein, 842 aa, Streptomyces avermitilis MA-4680
MFERFTDRARRVVVLAQEEARMLNHNYIGTEHILLGLIHEGEGVAAKALESLGISLEAVRQQVEEIIGQGQQAPSGHIPFTPRAKKVLELSLREALQLGHNYIGTEHILLGLIREGEGVAAQVLVKLGADLNRVRQQVIQLLSGYHQGKESTVEGGPAEGTPSTSLVLDQFGRNLTQAARESKLDPVIGREKEIERVMQVLSRRTKNNPVLIGEPGVGKTAVVEGLAQAIVKGEVPETLKDKHLYTLDLGALVAGSRYRGDFEERLKKVLKEIRTRGDIILFIDELHTLVGAGAAEGAIDAASILKPMLARGELQTIGATTLDEYKKYLEKDAALERRFQPIQVAEPSLPHTIEILKGLRDRYEAHHRVSITDEALVQAATLADRYVSDRFLPDKAIDLIDEAGSRMRIRRMTAPPDLREFDEKIAGVRHDKESAIDSQDFEKAASLRDKEKQLLAAKAKREKEWKTGDMDVVAEVDGELIAEVLAASTGIPVFKLTEEESSRLLRMEDELHKRVIGQKDAVKALSKAIRRTRAGLKDPKRPGGSFIFAGPSGVGKTELSRALAEFLFGDEDALISLDMSEFSEKHTVSRLFGSPPGYVGYEEGGQLTEKVRRKPFSVVLFDEVEKAHADIFNSLLQILEDGRLTDSQGRVVDFKNTVIIMTTNLGTRDISKGFNLGFAAQGDSKSTYERMKNKVADELKRHFRPEFLNRVDDVVVFPQLTRDDILAIVDLMITKVDERLKDRDMGIELAQSAKELLAQKGYDPMLGARPLRRTIQREIEDTLSEKILFGELRPGHIVVVDTEGEGETKTFTFRGEEKSALPDVPPIEQATGGDRPGSGTES

SEQ ID NO: 7072 - protein, 846 aa, Chlamydophila caviae GPIC
MFEKFTNRAKQVIKLAKKEAQRLNHNYLGTEHILLGLLKLGQGVAVNVLRNLGVDFDTAKQEVERLIGYGPEIQVYGDPALTGRVKKSFESANEEAGVLEHNYVGTEHLLLGILNQADGVALQVLENLHIDPREVRKEILKELETFNLQLPPSSSSNPRGSSSSSSKSSSLGHALGGEKSDKLSALKAYGYDLTEMFRESKLDPVIGRSAEVERLILILCRRRKNNPVLIGEAGVGKTAIVEGLAQKIISNEVPDTLRKKRLITLDLALMIAGTKYRGQFEERIKAVMDEVRKHGNILLFIDELHTIVGAGAAEGAIDASNILKPALARGEIQCIGATTIDEYRKHIEKDAALERRFQKIIVQPPSVDETIEILRGLKKKYEEHHNVAITEEALKAAATLSDQYVHGRFLPDKAIDLLDEAGARVRVNTMDQPTELMKLEAEIETTKLAKEQAIGTQEYEKAAGLRDEEKKLRERLSNMKQEWENHKEEHQIPVDEEAVAQVVSLQTGIPSARLTEAESEKLLKLEDTLRKKVIGQDQAVKSICRAIRRSRTGIKDPNRPTGSFLFLGPTGVGKTLLAQQIAIEMFGGEDALIQVDMSEYMEKFAATKMMGSPPGYVGHEEGGHLTEQVRRRPYCVVLFDEIEKAHPDIMDLMLQILEQGRLTDSFGRKIDFRHAIIIMTSNLGADLIKKSGEIGFGSRSNFDYKVIQEKIENAVKKHLKPEFINRLDESVIFRPLEKDALSEIIHLEINKLDSRLKNYQMALSIPDSVISFLVTKGHSPEMGARPLRRVIEQYLEDPLAELLLKESCRQEARKLRARLSEDRVTFERDEAQETESVAAAIPNGES

SEQ ID NO: 7073 - protein, 791 aa, Thermotoga maritima
MFNLEEYTEKAQKVMMSIQDIMTRYRQNQLSSEHILLAILEEGNNVGVELLKELNVDINRLKDEVEVFIGKYGVRVPEGASVSQIFITPDARHVIEKAREEARRMGDSKIGTEHLILGMVLSPDSTAFRILSRYGVTPERVYEAIRKIRSTGKTDEAENVEALARFTVDLTQLAREKKLMPVVDREKEIRRVIQILSRRTKNNPVLIGDPGVGKTAVVEGLAQRIVEGKVPLFLRNVRVLKLDMGRLVAGTRFRGDFEERLKRLLDELKRKKGEVILFIDEVHTVVGAGAAEGALDAANIMKPELTTGEIQIIGATTVEEYRKYIEKDRALERRFQPVMVEEPTVEQTIEILKGLRKVFEEHHHVKITDDALEAAAKLSARYITNRFLPDKAVDLIDEAAAYVRLESSYPSEELLKLEEEIKNLEDKINDAVVKGEYEEAAKLKVELQKLKNEYEEKRKKQEKVEPVVDENVVAKIVEQWTGIPVSRIMESEREKLLKLEEFIHQRLVNQEEAVKIVARTIRRARVGIKNPRRPIGVFLFLGPTGVGKTELARTLADVLFGSEDAMIRLDMSEYMEKHSVARLIGAPPGYVGYEEGGQLTEAVRKRPYSVILLDEIEKAHPDVFNILLQVFEDGRLTDGKGNTVDFRNTIIIMTSNIGSEKILEMSENGVRIEIEKELRNTFKPEFLNRIDAIVYFKPLTMEEVKKIVEIMVRQLQEILKEKNISIELTERAKEYLAEAGYVPSLGARPLRRIIELELESMIADKILEGEIKEGDRVLVDADEYGLKIERR

SEQ ID NO: 7074 - protein, 820 aa, Thermotoga maritima
MFDKFSEKTAQIFVTAQEEAKELGHSYVGTEHLLLAILKVDRSPAVELLEEMGASYSKVRSEIISMVGMGMRGFVPSPQMTPRAKRVTELAYEEAKILGSDKINPEHLLLGILREGEGIAIHILRKLGVDIATLRREIIDIYSYSSNKNLEYEEEEDYTYRSVKQLEGFGVNLTELAAKKELDPVIGREEEIERVMQVLVRRKKNNPVLIGDPGVGKTAIVEGLAQRIVAGDVPEILKNKVIFSLDVAALVAGTKYRGEFEKRMKKLLQIVTKDKNIILFIDEIHTIVGAGSAEGAIDAANILKPALARGEISCIGATTPDEYRRYIEKDAALERRFQKIYVKEPTEEETLEILKGLKRKYEAHHKVIYTDKALEAAVYLSKRYITDHYLPDKAIDVIDEAGARARLKVFVLPPELKDMKLELERIRSDKELAVLNQDYEKAAQLKEEEMELEAEYRKRYAEWRRRAETAVVKVDVDDVAEVVSSWTGVPLRKIEETEVEKLLNLEEALHQRIVAQDEAIKAVARAIRRARSGLKDPRRPIGVFLFLGPTGVGKTELAKALAEYLFGDERALIRFDMSEYMERFSVSRLIGAPPGYVGYEEGGTLTEKVRRRPFSVILFDEIEKAHPDVFNILLQIMDDGRLTDSQGREVDFRNTIIIMTSNIGSSYINKSKRTLGFVGDNNEEKEFEKIKDLVLEEVKRTFRPEFLNRIDETIIFHPLKKEHIEQIIDILLRDLRKRLSEKNMKLVLTKSAKEFLVEKGFDPVYGARPLKRAIQRYVEDPLSEEILRGKFNEGDTIVCRARKDALRFTRKGEKKEKVVQ

SEQ ID NO: 7075 - protein, 854 aa, Thermus thermophilus
MNLERWTQAAREALAQAQVLAQRMKHQAIDLPHLWAVLLKDERSLAWRLLEKAGADPKALKELQERELARLPKVEGAEVGQYLTSRLSGALNRAEGLMEELKDRYVAVDTLVLALAEATPGLPGLEALKGALKELRGGRTVQTEHAESTYNALEQYGIDLTRLAAEGKLDPVIGRDEEIRRVIQILLRRTKNNPVLIGEPGVGKTAIVEGLAQRIVKGDVPEGLKGKRIVSLQMGSLLAGAKYRGEFEERLKAVIQEVVQSQGEVILFIDELHTVVGAGKAEGAVDAGNMLKPALARGELRLIGATTLDEYREIEKDPALERRFQPVYVDEPTVEETISILRGLKEKYEVHHGVRISDSAIIAAATLSHRYITERRLPDKAIDLIDEAAARLRMALESAPEEIDALERKKLQLEIEREALKKEKDPDSQERLKAIEAEIAKLTEEIAKLRAEWEREREILRKLREAQHRLDEVRREIELAERQYDLNRAAELRYGELPKLEAEVEALSEKLRGARFVRLEVTEEDIAEIVSRWTGIPVSKLLEGEREKLLRLEEELHKRVVGQDEAIRAVADAIRRARAGLKDPNRPIGSFLFLGPTGVGKTELAKTLAATLFDTEEAMIRIDMTEYMEKHAVSRLIGAPPGYVGYEEGGQLTEAVRRRPYSVILFDEIEKAHPDVFNILLQILDDGRLTDSHGRTVDFRNTVIILTSNLGSPLILEGLQKGWPYERIRDEVFKVLQQHFRPEFLNRLDEIVVFRPLTKEQIRQIVEIQLSYLRARLAEKRISLELTEAAKDFLAERGYDPVFGARPLRRVIQRELETPLAQKILAGEVKEGDRVQVDVGPAGLVFAVPARVEA

SEQ ID NO: 7076 - protein, 508 aa, Thermus thermophilus
MNLERWTQAAREALAQAQVLAQRMKHQAIDLPHLWAVLLKDERSLAWRLLEKAGADPKALKELQERELARLPKVEGAEVGQYLTSRLSGALNRAEALMEELKDRYVAVDTLVLALAEATPGLPGLEALKGALKELRGGRTVQTEHAESTYNALEQYGIDLTRLAAEGKLDPVIGRDEEIRRVIQILLRRTKNNPVLIGEPGVGKTAIVEGLAQRIVKGDVPEGLKGKRIVSLQMGSLLAGAKYRGEFEERLKAVIQEVVQSQGEVILFIDELHTVVGAGKAEGAVDAGNMLKPALARGELRLIGATTLDEYREIEKDPALERRFQPVYVDEPTVEETISILRGLKEKYEVHHGVRISDSAIIAAATLSHRYITERRLPDKAIDLIDEAAARLRMALESAPEEIDALERKKLQLEIEREALKKEKDPDSQERLKAIEAEIAKLTEEIAKLRAEWEREREILRKLREAQHRLDEVRREIELAERQYDLNRAAELRYGELPKLEAEVEALS

SEQ ID NO: 7077 - protein, 854 aa, Cyanidium caldarium
MNIQPNTFFLKAMLTLLNIKGNNMCWAHKKNMFERFTEKAVKVIMLAQEEARRLGHNFVGTEQILLGILGEGTGLAAKALKSMGITLKDARIEVEKIIGRGSGFVAIEIPFTPRAKKILELAIEESRILTHNYVGTEHLLLGLIKEGEGVAARVLENLGVDLPKLRSNIIRMIGETSEVSVGATSGRSKVPTLEEFGTNLTQMAVEGKLDPVVGRAKEIERVVQILGRRTKNNPVLIGEPGVGKTAIAEGLAQRIINNEVPDTLEDKKVITLDVSLLVAGTKYRGEFEERLKKIMDEIRMADNVILVIDEVHTLIGAGAAEGAIDAANILKPALARGELQCIGATTLEEYRKHIEKDAALERRFQPVMVEEPTVEETIEILRGLRDRYEAHHRLKISDSAIVAAAKLSDQYIADRFLPDKAIDLVDEASSRVRLMNYKLPPSAEYLDEELRHIQKIKNELIRSGDFEEASQFREREIEVKVQMAALMKAKKEAIEEELALNPPIVNEDDIANIVSSWTGIPVSKLTKSESEKLLHMEETLHSRIVGQNEAVIAVSKAIRRARVGLKNPNRPIASFIFSGPTGVGKTELTKAMASYFFGSEEAMVRLDMSEYMERHTVSKLIGSPPGYVGYNEGGQLTEAVRKRPYTVVLFDEIEKAHPDVFNLLLQILEDGRLTDSKGRTIDFKNTLLIMTSNIGSKVIEKKGGGLGFELEENIEELQYSRMRNLVNEELKQYFRPEFLNRVDEIIVFRQLTKDEVRDIAHIMLREIFERVKQQGISLQVTERFKNLLIEEGYNPSYGARPLRRALVRLLEDSLAEEVLSGKIKEGDNAMIDVDENKQVKILLGNSNNQHAFLA

SEQ ID NO: 7078 - protein, 864 aa, Geobacter metallireducens
MIRPEKMTIKTQEALAGAQQLAARQGNGTIEPEHLLAALLEQEGGLVAPILQKVGAAPASLRSSVDALLKKLPQVSGATAQAYLSPSLNRILDGAQREADAMKDEFVSTEHLLLGFFADKQCAATRALLDGGATRENVLAALVEIRGGERVTDQSPEDKYQALTKYARDLTDLARQGKLDPVIGRDDEIRRVLQVLSRRTKNNPVLIGEPGVGKTAIVEGLAQRIVSGDVPESLKDKRLVALDMGALIAGAKYRGEFEERLKAVIKEVAKSEGKVILFIDELHTLVGAGAAEGAMDASNMLKPALARGELHCIGATTLNEYRKYIEKDAALERRFQQVYTGEPSVEDTIAILRGLKEKYETYHGIRIKDSAIIAAATLSDRYITDRFLPDKAIDLIDEAASRLRIEIDSMPTEIDEVERKIIQLEIEKQALLREQDPHALERLQKLTDELNGLQAQAAELKAHWRQEKEIIKGLSELKQQLEERKEQAKKAEREGNLARTAEIRYGEIPAIEKEMEEKKQQLEALQKEGKMLPEEVDGELVAEIVSRWTGVPVSRMMEGEADKLVHMEERLKTRVVGQNDALLLVANAIRRARSGLSDPNRPIGSFLFLGPTGVGKTETAKALAEFLFNDDQAIVRIDMSEYQEKHTVARLIGAPPGYVGYEEGGQLTEAVKRRPYSIVLFDEIEKAHAEVFNVLLQVLDDGRLTDGQGRTVDFRNTVIIMTSNLGSQWIQQYGASDYTRMKQMVTETLRESFKPEFLNRIDEVVIYHALPLERIKQIIDIQIQGLKKRLAERHITLEITDKAREYLAQEGYDPAYGARPLKRAIQRKVQDPLALMLLEGKFREGDTIRADLSHGGEGLVITKK

SEQ ID NO: 7079 - protein, 878 aa, Geobacter metallireducens
MLTVDLKALISRLNPHCSGALEGAAGLCVARGHYEVTVEHLLARLLDEPGGDLPLILRAFEVDAASVKAGITRVLDELPSGNSGKPVFSPVLLEWLQAAWLITSLDLNEERIRSGALLLALLARPLQLTAGRYVDLLMAVGRETLLSRFGTATAGSVEHAPTSVRSATSDEAPKGTTSLDRFCTDFTRQAAEGNIDPVFGRDREIGQMVDILARRRKNNPIIVGEAGVGKTAVAEGLALRIVEGDVPEALREVRLLGLDLGLLQAGAGVKGEFENRLKSVIEEVKGSPRPIILFIDEAHTIIGAGGQTGGGDAANLLKPALARGELRTIAATTWSEYKKYFEKDAALARRFQPVKLDEPDVETAVLILRGLKEKYEAAHGVTIRDDGIRAAAELSSRYLSGRQLPDKAVDLLDTAAARVKLLLTGKPGAVEEKERRIQALEREEAAMARDQLHGRPVDDERLDLLKAELLTLREELAAVTARWHREQELAAEVMALRKELSTEAEENEDRRGLKRQVTEATARLAEFQGDAPLVRIEVEPEVVARVVADWTGIPLGSLQKDRAAGVLTLEGDLRRRIKGQEPALSAVAEVLRSSAAGLKDPRQPLGVFLLVGPSGVGKTETALAVADLLFGGERFLTVINMSEFQERHTTSRLIGSPPGYVGYGEGGVLTEAVRRQPYSVVLLDEVEKAHPDVMNLFYQVFDKGMLADGEGRVIDFANTVIFLTSNLASDVITSLCCGDQAPTAEGLTSAIRPHLSRHFKPALLARMSVVPYLTLAPEYLGEIVTLKLGRVAERLRENSRTALSWTPAVTERIAARCTEVESGARTIDHILRSTLLPLLSREILPRLGTGETPEAIRLDTTADGDFAVTFDTSGGMEQ

SEQ ID NO: 7080 - protein, 53 aa, Pseudomonas aeruginosa
PEELDRLDRRLIQLKIEREALKKEDDEATRKRLAKLEEDIVKLERGYADLEEI

SEQ ID NO: 7081 - protein, 1070 aa, Azotobacter vinelandii
MPAGRTVRVSPAPFSPPTACRYCSATVPARAWRQPMPAGAGWPAACWRRPWMPWPWRRRSCWSGSVRPSDRRPSKWGPRCARPFSSIIRRLPRPSCRVETPGVSWPISTGSPASAWLPAVSRRFMAVASAPSGMSVSTPIAARRAPAVSPVWCGWPRPDRLVSRPGGFPRRFFGPWAWLLTRINSAALNPRRSSLSMLQPGRPSSMPARSFRKDDSMRIDRLTSKLQLALSDAQSVAVGLDHAAIEPLHLMQALLDQQGGSIRPLLMQVGFDINGLRQALSKELDQLPKLQNPTGDVNLSQDLARLLNQADRLAQQKGDQFISSELVLLAALDGNTRLGKLLLGQGVSKKAIENAIGNLRGGQTVNDPNAEESRQALDKYCVDMTARAEEGKLDPVIGRDDEIRRTIQVLQRRTKNNPVLIGEPGVGKTAIVEGLAQRIVNGEVPDGLRDKRLLALDMGSLIAGAKFRGEFEERLKAVLNELAKQEGRVILFIDELHTMVGAGKAEGAMDAGNMLKPALARGELHCVGATTLDEYRQYIEKDAALERRFQKVLVDEPSEEDTIAILRGLKERYEVHHGVTITDGAIIAAAKLSHRYITDRQLPDKAIDLIDEAASRIRMEIDSKPEELDRLDRRLIQLKIEREALKKETDEATKKRLAKLEEDIAKLEREYADLEEIWKSEKAEVQGSAQIQQQLEQAKLDLEAARRKGDLNRMAELQYGLIPELERKLASADGGQPRENQLLRNRVTDEEIAEVVSKWTGIPVAKMLEGEREKLLKMEELLHQRVIGQNEAVTAVANAVRRSRAGLADPNRPSGSFLFLGPTGVGKTELCKALAEFLFDTEEALVRIDMSEFMEKHSVARLIGAPPGYVGYEEGGYLTEAVRRKPYSVVLMDEVEKAHPDVFNILLQVLEDGRLTDSHGRTVDFKNTVVVMTSNLGSAQIQELAGDREAQRAAVMDAVSHHFRPEFINRIDEVVVFDPLAREQIAGIAEIQLKRLRQRLAERELSLELSDEALDKLIAVGYDPVYGARPLKRAIQRWIENPLAQQILAGQFAPGAKIFARVEGDEIVFG

SEQ ID NO: 7082 - protein, 1082 aa, Azotobacter vinelandii
MAAATGAAEGPRPRRISRPVPAPPAQPAVPQPAQAPCRPGLRGAAEQPGTRSVARPDRLAAQGPARAPEPAGRGDPRPRRAVRRRPPLAGRLRRRRPPAFPPAGAGRALPGRLAPHPAGRSQHPRSRSPQPEPGSRRRGRYPDLGRARRHPPDPRPSGAGAGRGVPAGRRRPPATRLPGRPPLRPGPGLRAAPAGQWRPAAVARSPGAAAAELERRSAPPALRGHPPLRYPTAPAGDELNMELGTLIGRLDSDCRRALERAAQRCLQRTHHYVEIEHLLLELLDIEGGDLARVLPRFGLERDTVAGEINRALELFKAGSTRTPALSPNLIGLLEDAVVHASLQNQPSIRSGLLLLALLDREERRSLLLNSASSLLRIPREALRNQLAECSRERPARPSQDKTDASAEDGFLAQYTQDLTADARAGRIDPIVGRDGEIRQSIDILLRRRQNNPILVGAPGVGKTAVVEGLALRIAAGDVPPPLQNVEVRVLDLGLLQAGAGVKGEFEQRLKGVIDGVRNAERPVILFIDEAHTLIGAGGAEGGSDAANLLKPALARGELRTLAATTWLEYKKYFEKDPALARRFQLVQVEEPDEATAVEMLRGVAAKLEQHHGVLVLDAAIQDAVKLSHRYISGRQLPDKAISVLDTACARVALGQHDVPPPLESLRHRQQALKEELDRLRREQTTGLDHRERITALEHEAAGNTVAIRELEGRWQEEREAVRALLEARRELLALSDNADASNSDEELDGRIDHLAAELLRLEAGLEAIRQDDPLVPEQVDSKAVAAVIASWTGIPVGKMLADEVHAVRTLGQRLAQRVMGQDAALATIAQRIQAYRAGLTDPQKPVGVFLLLGPTGVGKTETAYALADALYGGERNLIAINLSEYQEAHTVSQLKGAPPGYVGYGSGGVLTEAVRRRPYSVVLLDEIEKAHPDVLEAFYNVFDKGVMEDGTGLVVDFKNTVILATSNVGAELILDTPADQVGGDAFNERLRSVLLQAFRPAFLARMTVVPYRPLDTVTLESIVEAKLEKLRERYKTATGKPLELDEDIVETVLGRCASTGVRDIENLLMGEVVGKLAEWVLK

SEQ ID NO: 7083 - protein, 968 aa, Arabidopsis thaliana
MATATTTATAAFSGVVSVGTETRRIYSFSHLQPSAAFPAKPSSFKSLKLKQSARLTRRLDHRPFVVRCEASSSNGRLTQQEFTEMAWQSIVSSPDVAKENKQQIVETEHLMKALLEQKNGLARRIFSKIGVDNTKVLEATEKFIQRQPKVYGDAAGSMLGRDLEALFQRARQFKKDLKDSYVSVEHLVLAFADDKRFGKQLFKDFQISERSLKSAIESIRGKQSVIDQDPEGKYEALEKYGKDLTAMAREGKLDPVIGRDDEIRRCIQILSRRTKNNPVLIGEPGVGKTAISEGLAQRIVQGDVPQALMNRKLISLDMGALIAGAKYRGEFEDRLKAVLKEVTDSEGQIILFIDEIHTVVGAGATNGAMDAGNLLKPMLGRGELRCIGATTLDEYRKYIEKDPALERRFQQVYVDQPTVEDTISILRGLRERYELHHGVRISDSALVEAAILSDRYISGRFLPDKAIDLVDEAAAKLKMEITSKPTALDELDRSVIKLEMERLSLTNDTDKASRERLNRIETELVLLKEKQAELTEQWEHERSVMSRLQSIKEEIDRVNLEIQQAEREYDLNRAAELKYGSLNSLQRQLNEAEKELNEYLSSGKSMFREEVLGSDIAEIVSKWTGIPVSKLQQSERDKLLHLEEELHKRVVGQNPAVTAVAEAIQRSRAGLSDPGRPIASFMFMGPTGVGKTELAKALASYMFNTEEALVRIDMSEYMEKHAVSRLIGAPPGYVGYEEGGQLTETVRRRPYSVILFDEIEKAHGDVFNVFLQILDDGRVTDSQGRTVSFTNTVIIMTSNVGSQFILNNTDDDANELSYETIKERVMNAARSIFRPEFMNRVDEYIVFKPLDREQINRIVRLQLARVQKRIADRKMKINITDAAVDLLGSLGYDPNYGARPVKRVIQQNIENELAKGILRGDFKEEDGILIDTEVTAFSNGQLPQQKLTFKKIESETADAEQEEAAFSK

SEQ ID NO: 7084 - protein, 964 aa, Arabidopsis thaliana
MALRRLSKSVSSAIKAQYTLSRPSPLLRSRSLSSSPHYTSIGRPTNSFIGKINNSSITHATTTHGQLFPLSSPRRFCTTTAQVNQNEFTEMAWEGLINAFDAARESKQQIVESEHLMKALLEQKDGMARKIFTKAGIDNSSVLQATDLFISKQPTVSDASGQRLGSSLSVILENAKRHKKDMLDSYVSVEHFLLAYYSDTRFGQEFFRDMKLDIQVLKDAIKDVRGDQRVTDRNPESKYQALEKYGNDLTEMARRGKLDPVIGRDDEIRRCIQILCRRTKNNPVIIGEPGVGKTAIAEGLAQRIVRGDVPEPLMNRKLISLDMGSLLAGAKFRGDFEERLKAVMKEVSASNGQTILFIDEIHTVVGAGAMDGAMDASNLLKPMLGRGELRCIGATTLTEYRKYIEKDPALERRFQQVLCVQPSVEDTISILRGLRERYELHHGVTISDSALVSAAVLADRYITERFLPDKAIDLVDEAGAKLKMEITSKPTELDGIDRAVIKLEMEKLSLKNDTDKASKERLQKIENDLSTLKQKQKELNVQWEKEKSLMTKIRSFKEEIDRVNLEIESAEREYDLNRAAELKYGTLLSLQRQLEEAEKNLTNFRQFGQSLLREVVTDLDIAEIVSKWTGIPLSNLQQSEREKLVMLEEVLHHRVIGQDMAVKSVADAIRRSRAGLSDPNRPIASFMFMGPTGVGKTELAKALAGYLFNTENAIVRVDMSEYMEKHSVSRLVGAPPGYVGYEEGGQLTEVVRRRPYSVVLFDEIEKAHPDVFNILLQLLDDGRITDSQGRTVSFKNCVVIMTSNIGSHHILETLRNNEDSKEAVYEIMKRQVVELARQNFRPEFMNRIDEYIVFQPLDSNEISKIVELQMRRVKNSLEQKKIKLQYTKEAVDLLAQLGFDPNYGARPVKRVIQQMVENEIAVGILKGDFAEEDTVLVDVDHLASDNKLVIKKLESNASAEEMAA

SEQ ID NO: 7085 - protein, 874 aa, Arabidopsis thaliana
MAWEGLINAFDAARESKQQIVESEHLMKALLEQKDGMARKIFTKAGIDNSSVLQATDLFISKQPTVSDASGQRLGSSLSVILENAKRHKKDMLDSYVSVEHFLLAYYSDTRFGQEFFRDMKLDIQVLKDAIKDVRGDQRVTDRNPESKYQALEKYGNDLTEMARRGKLDPVIGRDDEIRRCIQILCRRTKNNPVIIGEPGVGKTAIAEGLAQRIVRGDVPEPLMNRKLISLDMGSLLAGAKFRGDFEERLKAVMKEVSASNGQTILFIDEIHTVVGAGAMDGAMDASNLLKPMLGRGELRCIGATTLTEYRKYIEKDPALERRFQQVLCVQPSVEDTISILRGLRERYELHHGVTISDSALVSAAVLADRYITERFLPDKAIDLVDEAGAKLKMEITSKPTELDGIDRAVIKLEMEKLSLKNDTDKASKERLQKIENDLSTLKQKQKELNVQWEKEKSLMTKIRSFKEEIDRVNLEIESAEREYDLNRAAELKYGTLLSLQRQLEEAEKNLTNFRQFGQSLLREVVTDLDIAEIVSKWTGIPLSNLQQSEREKLVMLEEVLHHRVIGQDMAVKSVADAIRRSRAGLSDPNRPIASFMFMGPTGVGKTELAKALAGYLFNTENAIVRVDMSEYMEKHSVSRLVGAPPGYVGYEEGGQLTEVVRRRPYSVVLFDEIEKAHPDVFNILLQLLDDGRITDSQGRTVSFKNCVVIMTSNIGSHHILETLRNNEDSKEAVYEIMKRQVVELARQNFRPEFMNRIDEYIVFQPLDSNEISKIVELQMRRVKNSLEQKKIKLQYTKEAVDLLAQLGFDPNYGARPVKRVIQQMVENEIAVGILKGDFAEEDTVLVDVDHLASDNKLVIKKLESNASAEEMAA

SEQ ID NO: 7086 - protein, 929 aa, Arabidopsis thaliana
MAMATRVLAQSTPPSLACYQRNVPSRGSGRSRRSVKMMCSQLQVSGLRMQGFMGLRGNNALDTLGKSRQDFHSKVRQAMNVPKGKASRFTVKAMFERFTEKAIKVIMLAQEEARRLGHNFVGTEQILLGLIGEGTGIAAKVLKSMGINLKDARVEVEKIIGRGSGFVAVEIPFTPRAKRVLELSLEEARQLGHNYIGSEHLLLGLLREGEGVAARVLENLGADPSNIRTQVIRMVGENNEVTANVGGGSSSNKMPTLEEYGTNLTKLAEEGKLDPVVGRQPQIERVVQILGRRTKNNPCLIGEPGVGKTAIAEGLAQRIASGDVPETIEGKKVITLDMGLLVAGTKYRGEFEERLKKLMEEIRQSDEIILFIDEVHTLIGAGAAEGAIDAANILKPALARGELQCIGATTLDEYRKHIEKDPALERRFQPVKVPEPTVDETIQILKGLRERYEIHHKLRYTDESLVAAAQLSYQYISDRFLPDKAIDLIDEAGSRVRLRHAQVPEEARELEKELRQITKEKNEAVRGQDFEKAGTLRDREIELRAEVSAIQAKGKEMSKAESETGEEGPMVTESDIQHIVSSWTGIPVEKVSTDESDRLLKMEETLHKRIIGQDEAVKAISRAIRRARVGLKNPNRPIASFIFSGPTGVGKSELAKALAAYYFGSEEAMIRLDMSEFMERHTVSKLIGSPPGYVGYTEGGQLTEAVRRRPYTVVLFDEIEKAHPDVFNMMLQILEDGRLTDSKGRTVDFKNTLLIMTSNVGSSVIEKGGRRIGFDLDYDEKDSSYNRIKSLVTEELKQYFRPEFLNRLDEMIVFRQLTKLEVKEIADILLKEVFERLKKKEIELQVTERFKERVVDEGYNPSYGARPLRRAIMRLLEDSMAEKMLAREIKEGDSVIVDVDAEGNVTVLNGGSGTPTTSLEEQEDSLPVA

SEQ ID NO: 7087 - protein, 952 aa, Arabidopsis thaliana
MAWSIALLTPPFFGPGRHVQAKEYREPRGCVMKMSSLKAPVLRIQATEYREPRGRVKMMSSLQAPLLTIQSFSGLRAPSALDYLGRPSPGFLVKYKLAKSSGREKASRCVPKAMFERFTEKAIKVIMLSQEEARRLGHNFVGTEQILLGLIGEGTGIAAKVLKSMGINLKDSRVEVEKIIGRGSGFVAVEIPFTPRAKRVLELSLEEARQLGHNYIGSEHLLLGLLREGEGVAARVLENLGADPSNIRTQVIRMVGENNEVTASVGGGSSGNSKMPTLEEYGTNLTKLAEEGKLDPVVGRQPQIERVVQILARRTKNNPCLIGEPGVGKTAIAEGLAQRIASGDVPETIEGKTVITLDMGLLVAGTKYRGEFEERLKKLMEEIRQSDEIILFIDEVHTLIGAGAAEGAIDAANILKPALARGELQCIGATTIDEYRKHIEKDPALERRFQPVKVPEPTVEEAIQILQGLRERYEIHHKLRYTDEALVAAAQLSHQYISDRFLPDKAIDLIDEAGSRVRLRHAQLPEEARELEKQLRQITKEKNEAVRSQDFEMAGSHRDREIELKAEIANVLSRGKEVAKAENEAEEGGPTVTESDIQHIVATWTGIPVEKVSSDESSRLLQMEQTLHTRVIGQDEAVKAISRAIRRARVGLKNPNRPIASFIFSGPTGVGKSELAKALAAYYFGSEEAMIRLDMSEFMERHTVSKLIGSPPGYVGYTEGGQLTEAVRRRPYTLVLFDEIEKAHPDVFNMMLQILEDGRLTDSKGRTVDFKNTLLIMTSNVGSSVIEKGGRRIGFDLDHDEKDSSYNRIKSLVTEELKQYFRPEFLNRLDEMIVFRQLTKLEVKEIADIMLKEVVARLEVKEIELQVTERFKERVVDEGFDPSYGARPLRRAIMRLLEDSMAEKMLSRDIKEGDSVIVDVDAEGSVVVLSGTTGRVGGFAAEEAMEDPIPIL

SEQ ID NO: 7088 - protein, 952 aa, Arabidopsis thaliana
MAWSIALLTPPFFGPGRHVQAKEYREPRGCVMKMSSLKAPVLRIQATEYREPRGRVKMMSSLQAPLLTIQSFSGLRAPSALDYLGRPSPGFLVKYKLAKSSGREKASRCVPKAMFERFTEKAIKVIMLSQEEARRLGHNFVGTEQILLGLIGEGTGIAAKVLKSMGINLKDSRVEVEKIIGRGSGFVAVEIPFTPRAKRVLELSLEEARQLGHNYIGSEHLLLGLLREGEGVAARVLENLGADPSNIRTQVIRMVGENNEVTASVGGGSSGNSKMPTLEEYGTNLTKLAEEGKLDPVVGRQPQIERMVQILARRTKNNPCLIGEPGVGKTAIAEGLAQRIASGDVPETIEGKTVITLDMGLLVAGTKYRGEFEERLKKLMEEIRQSDEIILFIDEVHTLIGAGAAEGAIDAANILKPALARGELQCIGATTIDEYRKHIEKDPALERRFQPVKVPEPTVEEAIQILQGLRERYEIHHKLRYTDEALVAAAQLSHQYISDRFLPDKAIDLIDEAGSRVRLRHAQLPEEARELEKQLRQITKEKNEAVRSQDFEMAGSHRDREIELKAEIANVLSRGKEVAKAENEAEEGGPTVTESDIQHIVATWTGIPVEKVSSDESSRLLQMEQTLHTRVIGQDEAVKAISRAIRRARVGLKNPNRPIASFIFSGPTGVGKSELAKALAAYYFGSEEAMIRLDMSEFMERHTVSKLIGSPPGYVGYTEGGQLTEAVRRRPYTLVLFDEIEKAHPDVFNMMLQILEDGRLTDSKGRTVDFKNTLLIMTSNVGSSVIEKGGRRIGFDLDHDEKDSSYNRIKSLVTEELKQYFRPEFLNRLDEMIVFRQLTKLEVKEIADIMLKEVVARLEVKEIELQVTERFKERVVDEGFDPSYGARPLRRAIMRLLEDSMAEKMLSRDIKEGDSVIVDVDAEGSVVVLSGTTGRVGGFAAEEAMEDPIPIL

SEQ ID NO: 7089 - protein, 928 aa, Arabidopsis thaliana
MAMATRVLAQSTPPSLACYQRNVPSRGSGRSRRSVKMMCIIFNVWLPMQGFMGLRGNNALDTLGKSRQDFHSKVRQAMNVPKGKASRFTVKAMFERFTEKAIKVIMLAQEEARRLGHNFVGTEQILLGLIGEGTGIAAKVLKSMGINLKDARVEVEKIIGRGSGFVAVEIPFTPRAKRVLELSLEATRQLGHNYIGSEHLLLGLLREGEGVAARVLENLGADPSNIRTQVIRMVGENNEVTANVGGGSSSNKMPTLEEYGTNLTKLAEEGKLDPVVGRQPQIERVVQILGRRTKNNPCLIGEPGVGKTAIAEGLAQRIASGDVPETIEGKKVITLDMGLLVAGTKYRGEFEERLKKLMEEIRQSDEIILFIDEVHTLIGAGAAEGAIDAANILKPALARGELQCIGATTLDEYRKHIEKDPALERRFQPVKVPEPTVDETIQILKGLRERYEIHHKLRYTDESLVAAAQLSYQYISDRFLPDKAIDLIDEAGSRVRLRHAQVPEEVRELEKELRQITKEKNEAVRGQDFEKAGTLRDREIELRAEVSAIQAKGKEMSKAESETGEEGPMVTESDIQHIVSSWTGIPVEKVSTDESDRLLKMEETLHKRIIGQDEAVKAISRAIRRARVGLKNPNRPIASFIFSGPTGVGKSELAKALAAYYFGSEEAMIRLDMSEFMERHTVSTLIGSLPGYVGYTEGGQLTEAVRRRPYTVVLFDEIEKAHPDVFNMMLQILEDGRLTDSKGRTVDFKNTLLIMTSNVGSSVIEKGGRRIGFDLDYDEKDSSYNRIKSLVTEELKQYFRPEFLNRLDEMIVFRQLTKLEVKEIADILLKEVFERLKKKEIELQVTERFKERVVDEGYNPSYGARPLRRAIMRLLEDSMAEKMLAREIKEGDSVIVDVDAEGNVTVLNGGSGTPTTSLEEQEDSLPVA

SEQ ID NO: 7090 - protein, 945 aa, Arabidopsis thaliana
MEVLSTSSPLTLHSHRLLSASSSSSHVTSIAASSLSSFASSYLGISLSNRTIHRFSTTPTNLRRFPQRKRKKFTPISAVFERFTERAIRAIIFSQKEAKSLGKDMVYTQHLLLGLIAEDRDPQGFLGSGITIDKAREAVWSIWDEANSDSKQEEASSTSYSKSTDMPFSISTKRVFEAAVEYSRTMDCQYIAPEHIAVGLFTVDDGSAGRVLKRLGANMNLLTAAALTRLKGEIAKDGREPSSSSKGSFESPPSGRIAGSGPGGKKAKNVLEQFCVDLTARASEGLIDPVIGREKEVQRVIQILCRRTKNNPILLGEAGVGKTAIAEGLAISIAEASAPGFLLTKRIMSLDIGLLMAGAKERGELEARVTALISEVKKSGKVILFIDEVHTLIGSGTVGRGNKGSGLDIANLLKPSLGRGELQCIASTTLDEFRSQFEKDKALARRFQPVLINEPSEEDAVKILLGLREKYEAHHNCKYTMEAIDAAVYLSSRYIADRFLPDKAIDLIDEAGSRARIEAFRKKKEDAICILSKPPNDYWQEIKTVQAMHEVVLSSRQKQDDGDAISDESGELVEESSLPPAAGDDEPILVGPDDIAAVASVWSGIPVQQITADERMLLMSLEDQLRGRVVGQDEAVAAISRAVKRSRVGLKDPDRPIAAMLFCGPTGVGKTELTKALAANYFGSEESMLRLDMSEYMERHTVSKLIGSPPGYVGFEEGGMLTEAIRRRPFTVVLFDEIEKAHPDIFNILLQLFEDGHLTDSQGRRVSFKNALIIMTSNVGSLAIAKGRHGSIGFILDDDEEAASYTGMKALVVEELKNYFRPELLNRIDEIVIFRQLEKAQMMEILNLMLQDLKSRLVALGVGLEVSEPVKELICKQGYDPAYGARPLRRTVTEIVEDPLSEAFLAGSFKPGDTAFVVLDDTGNPSVRTKPDSSTIRVTDKTSIA

SEQ ID NO: 7091 - protein, 623 aa, Arabidopsis thaliana
MNDLKFDPNVKLILASARSHAMSLSHGQVTPLHLGVTLISDLTSVFYRAITSAGDGDISAQSVVNVINQSLYKLTKRNLGDTKVGVAVLVISLLEDSQISDVLKEAGVVPEKVKSEVEKLRGEVILRALKTYGTDLVEQAGKLDPVIGRHREIRRVIEVLSRRTKNNPVLIGEPGVGKTAVVEGLAQRILKGDVPINLTGVKLISLEFGAMVAGTTLRGQFEERLKSVLKAVEEAQGKVVLFIDEIHMALGACKASGSTDAAKLLKPMLARGQLRFIGATTLEEYRTHVEKDAAFERRFQQVFVAEPSVPDTISILRGLKEKYEGHHGVRIQDRALVLSAQLSERYITGRRLPDKAIDLVDESCAHVKAQLDIQPEEIDSLERKVMQLEIEIHALEKEKDDKASEARLSEVRKELDDLRDKLEPLTIKYKKEKKIINETRRLKQNRDDLMIALQEAERQHDVPKAAVLKYGAIQEVESAIAKLEKSAKDNVMLTETVGPENIAEVVSRWTGIPVTRLDQNEKKRLISLADKLHERVVGQDEAVKAVAAAILRSRVGLGRPQQPSGSFLFLGPTGVGKTELAKALAEQLFDSENLLVRLDMSEYNDKFSVNKLIGAPPGYVHWS

SEQ ID NO: 7092 - protein, 460 aa, Arabidopsis thaliana
MNPEKFTHKTNETIATAHELAVNAGHAQFTPLHLAGALISDPTGIFPQAISSAGGENAAQSAERVINQALKKLPSQSPPPDDIPASSSLIKVIRRAQAAQKSRGDTHLAVDQLIMGLLEDSQIRDLLNEVGVATARVKSEFEKLRGKEGKKVESASGDTNFQALKTYGRDLVEQAGKLDPVIGRDEEIRRVVRILSRRTKNNPVLIGEPGVGKTAVVEGLAQRIVKGDVPNSLTDVRLISLDMGALVAGAKYRGEFEERLKSVLKEVEDAEGKVILFIDEIHLVLGAGKTEGSMDAANLFKPMLARGQLRCIGATTLEEYRKYVEKDAAFERRFQQVYVAEPSVPDTISILRGLKEKYEGHHGVRIQDRALINAAQLSARYITGRHLPDKAIDLVDEACANVRVQLDSQPEEIDNLERKRMQLEIELHALEREKDKASKARLIEVRKELDDLRDKLQPLT

SEQ ID NO: 7093 - protein, 558 aa, Arabidopsis thaliana
MAWSIALLTPPFFGPGRHVQAKEYREPRGCVMKMSSLKAPVLRIQATEYREPRGRVKMMSSLQAPLLTIQSFSGLRAPSALDYLGRPSPGFLVKYKLAKSSGREKASRCVPKAMFERFTEKAIKVIMLSQEEARRLGHNFVGTEQILLGLIGEGTGIAAKVLKSMGINLKDSRVEVEKIIGRGSGFVAVEIPFTPRAKRVLELSLEEARQLGHNYIGSEHLLLGLLREGEGVAARVLENLGADPSNIRTQVIRMVGENNEVTASVGGGSSGNSKMPTLEEYGTNLTKLAEEGKLDPVVGRQPQIERVVQILARRTKNNPCLIGEPGVGKTAIAEGLAQRIASGDVPETIEGKTVITLDMGLLVAGTKYRGEFEERLKKLMEEIRQSDEIILFIDEVHTLIGAGAAEGAIDAANILKPALARGELQCIGATTIDEYRKHIEKDPALERRFQPVKVPEPTVEGAIQILQGLRERYEIHHKLRYTDEALVAAAQLSHQYISDRFLPDKAIDLIDEAGSRVRLRHAQLPEEARELEKQLRQITKEKNEAVRKPRLRDGWFSS

SEQ ID NO: 7094 - protein, 640 aa, Arabidopsis thaliana
MEVLSTSSPLTLHSHRLLSASSSSSHVTSIAASSLSSFASSYLGISLSNRTIHRFSTTPTNLRRFPQRKRKKFTPISAVFERFTERAIRAIIFSQKEAKSLGKDMVYTQHLLLGLIAEDRDPQGFLGSGITIDKAREAVWSIWDEANSDSKQEEASSTSYSKSTDMPFSISTKRVFEAAVEYSRTMDCQYIAPEHIAVGLFTVDDGSAGRVLKRLGANMNLLTAAALTRLKGEIAKDGREPSSSSKGSFESPPSGRIAGSGPGGKKAKNVLEQFCVDLTARASEGLIDPVIGREKEVQRVIQILCRRTKNNPILLGEAGVGKTAIAEGLAISIAEASAPGFLLTKRIMSMDIGLLMAGAKERGELEARVTALISEVKKSGKVILFIDEVHTLIGSGTVGRGNKGSGLDIANLLKPSLGRGELQCIASTTLDEFRSQFEKDKALARRFQPVLINEPSEEDAVKILLGLREKYEAHHNCKYTMEAIDAAVYLSSRYIADRFLPDKAIDLIDEAGSRARIEAFRKKKEDAICILSKPPNDYWQEIKTVQAMHEVVLSSRQKQDDGDAISDESGELVEESSLPPAAGDDEPILVGPDDIAAVASVWSGIPVQQITADERMLLMSLEDQLRGRVVGQDEAVSCHI

SEQ ID NO: 7095 - protein, 265 aa, Arabidopsis thaliana
MLEQILHERIIAQDLDVESVADAIRCSKAGISDPNRLIASFMFMGQPSVVSQLVGASPGYVGYGDGGKLTEVVRRRPYSVVQFDEIEKPHLDVFSILLQLLDDGRITNSHGSLHILETIRNNEDIKEAFYEMMKQQVVELARKTFRPKFMNRIDEYIVSQPLNSSEISKIVELQMRQVKKRLEQNKINLEYTKEAVDLLAQLGFDPNNGARPVKQMIEKLVKKEITLKVLKGDFAEDGTILIDADQPNNKLVIKKMENNAHVKEN

SEQ ID NO: 7096 - protein, 319 aa, Arabidopsis thaliana
MLEQILHERIIAQDLDVESVADAIRCSKAGISDPNRLIASFMFMGQPSVVSQLVGASPGYVGYGDGGKLTEVVRRRPYSVVQFDEIEKPHLDVFSILLQLLDDGRITNSHGSLHILETIRNNEDIKEAFYEMMKQQVVELARKTFRPKFMNRIDEYIVSQPLNSSEISKIVELQVVQMRQVKKRLEQNKINLEYTKEAVDLLAQLGFDPNNGARPVKQMIEKLVKKEITLKVLKGDFAEDGTILIDADQPNNKLTDAKHEALETYGSDLTKMARQGKLPPLIGRDDEVNRCIQILCRMTESNPVIIGEPGVGKTAIVEG

SEQ ID NO: 7097 - protein, 235 aa, Arabidopsis thaliana
MLEQILHERVIAQDLDVESVADAIRCSKAGISDPNRPIASFMFMGPTSVVSQLVGASVGYVGYEDGGKSTEVVRRRPYSVVQFDEIEKPHPNVFSILLQLLDDGRITDSHGSLHILIETIRNNEDIKEAVYEMMKQQVVELARKTFKPKFMNRIDEYIVSQPLNSSVISKIVELQVVQMRQMKKRLEQPNNKLEITLNVLKGDFAENDTILIDADQPFNKLVIKKMENNAHVKQN

SEQ ID NO: 7098 - protein, 341 aa, Arabidopsis thaliana
MFERFTEKAIKVITLAQEEARRLGYNFFGTEHILLSLIGEGTGIAAKVLKSMGINLKDARVEVEKIIGRGSGFVVVEIPFTPRKACAGFVTRGSSTTRHKGIAVRVLEILGADPSNIRTQVNAPILVNSQQALVAEVMETATWQVGNTRRGKLDPVVGRQPQIKRVVQILARRTCRNNACLIGKPGVGKRAIAEGIAQRIASGDVPETIKGKMNVAGNCGWNEIRWRSRGKIEEVYGQSDDIILFIDEMHLLIGAGAVEGAIDAANILKPALERCELQYRKHIENDPALERRFQPVKVPEPTVEEAIQITTVLAKGKEVNKADNEAEEGRPTVTEADNEAE

SEQ ID NO: 7099 - protein, 173 aa, Arabidopsis thaliana
MTSNVGSQFILNNTDDDANELSYETIKERVMNAARSIFRPEFMNRVDEYIVFKPLDREQINRIVRLQLARVQKRIADRKMKINITDAAVDLLGSLGYDPNYGARPVKRVIQQNIENELAKGILRGDFKEEDGILIDTEVTAFSNGQLPQQKLTFKKIESETADAEQEEAAFSK

SEQ ID NO: 7100 - protein, 135 aa, Arabidopsis thaliana
MHYSNFCCILRSFLFRPDFFIGVSGNGITSATQAASRSRGQLLPLSLQFPSLRRFSDKANQTDAKHEALETYGSDLTKMARQGKLPPLIGRDDEVNRCIQILCRMTESNPVIIGEPGVGKTAIVEGLAERIVKGD

SEQ ID NO: 7101 - protein, 422 aa, Arabidopsis thaliana
MEDLTASVTNRTVSLPLSCVTTDFGLGVIYASKNQESKTTREKPMLVTLNSSLEHTYQKDFKSLREILSRKVAWQTEAVNAISQIICGCKTDSTRRNQASGIWLALLGPDKVGKKKVAMTLSEVFFGGKVNYICVDFGAEHCSLDDKFRGKTVVDYVTGELSRKPHSVVLLENVEKAEFPDQMRLSEAVSTGKIRDLHGRVISMKNVIVVVTSGIAKDNATDHVIKPVKFPEEQVLSARSWKLQIKLGDATKFGVNKRKYELETAQRAVKVQRSYLDLNLPVNETEFSPDHEAEDRDAWFDEFIEKVDGKVTFKPVDFDELAKNIQEKIGSHFERCFGSETHLELDKEVILQILAASWSSLSSGEEEGRTIVDQWMQTVLARSFAEAKQKYGSNPMLGVKLVASSSGLASGVELPAKVDVIW

SEQ ID NO: 7102 - protein, 979 aa, Arabidopsis thaliana
MPTPVTTARECLTEEAARALDDAVVVARRRSHAQTTSLHAVSALLAMPSSILREVCVSRAARSVPYSSRLQFRALELCVGVSLDRLPSSKSPATEEDPPVSNSLMAAIKRSQANQRRHPESYHLQQIHASNNGGGGCQTTVLKVELKYFILSILDDPIVNRVFGEAGFRSSEIKLDVLHPPVTQLSSRFSRGRCPPLFLCNLPNSDPNREFPFSGSSGFDENSRRIGEVLGRKDKKNPLLIGNCANEALKTFTDSINSGKLGFLQMDISGLSLISIEKEISEILADGSKNEEEIRMKVDDLGRTVEQSGSKSGIVLNLGELKVLTSEANAALEILVSKLSDLLKHESKQLSFIGCVSSNETYTKLIDRFPTIEKDWDLHVLPITASTKPSTQGVYPKSSLMGSFVPFGGFFSSTSNFRVPLSSTVNQTLSRCHLCNEKYLQEVAAVLKAGSSLSLADKCSEKLAPWLRAIETKEDKGITGSSKALDDANTSASQTAALQKKWDNICQSIHHTPAFPKLGFQSVSPQFPVQTEKSVRTPTSYLETPKLLNPPISKPKPMEDLTASVTNRTVSLPLSCVTTDFGLGVIYASKNQESKTTREKPMLVTLNSSLEHTYQKDFKSLREILSRKVAWQTEAVNAISQIICGCKTDSTRRNQASGIWLALLGPDKVGKKKVAMTLSEVFFGGKVNYICVDFGAEHCSLDDKFRGKTVVDYVTGELSRKPHSVVLLENVEKAEFPDQMRLSEAVSTGKIRDLHGRVISMKNVIVVVTSGIAKDNATDHVIKPVKFPEEQVLSARSWKLQIKLGDATKFGVNKRKYELETAQRAVKVQRSYLDLNLPVNETEFSPDHEAEDRDAWFDEFIEKVDGKVTFKPVDFDELAKNIQEKIGSHFERCFGSETHLELDKEVILQILAASWSSLSSGEEEGRTIVDQWMQTVLARSFAEAKQKYGSNPMLGVKLVASSSGLASGVELPAKVDVIW

SEQ ID NO: 7103 - protein, 868 aa, Mesorhizobium loti
MNLEKYSERVRGFIQSAQTMALSRNHQQFTPEHILKVLVDDDEGLAASLIERAGGNVRDVKLGVETALEAMPKVEGGNGQLYLAQPLAKVFSTAEELAKKAGDSFVTVERLLQALTMEKSAKTADILAKAGVTAQALNQVINDVRKGRTADSASAEQNYDALKKYARDLTADARAGKLDPVIGRDDEIRRTIQVLSRRTKNNPVLIGEPGVGKTAIAEGLALRIVNGDVPESLKDKQLMALDMGALIAGAKYRGEFEERLKAVLSEVTSANGNIILFIDEMHTLVGAGKADGAMDASNLLKPALARGELHCVGATTLDEYRKHVEKDPALARRFQPVFVDEPTVEDTVSILRGLKEKYEQHHKVRISDSALVAAATLSNRYIADRFLPDKAIDLVDEAASRLRMQVDSKPEALDEIDRRIMQLKIEREALKVETDDASKDRLVRLEKELVGLEEESTEITAKWQAEKQKLGLAADLKKQLDEARNELAIAQRKGEFQRAGELAYGKIPELEKKLKEAEAQDGKAGMVEEVVTPDHVAHIVSRWTGIPVDKMLQGERDKLLRMEDEIGKRVVGQGEAVQAVSKAVRRARAGLQDPNRPIGSFIFLGPTGVGKTELTKALASFLFDDDSAMVRIDMSEFMEKHSVARLIGAPPGYVGYEEGGALTEAVRRRPYQVVLFDEIEKAHPDVFNVLLQVLDDGRLTDGQGRTVDFRNTLIIMTSNLGAEYLVNLGEDQDVDAVRDEVMGVVRASFRPEFLNRVDEVILFHRLRRKDMDRIVEIQFKRLESLLVDRKITLSLDHEAIEWLAAKGYDPAYGARPLKRVMQKELQDPLAEKILLGEILDGSTVKVTSGSDRLNFRSKPTVVATEAAA

SEQ ID NO: 7104 - protein, 945 aa, Mesorhizobium loti
MEQRRSSQSFKRKELVAKLNPTGLRAFKAAADTAKMRGNPYVELVHFVQQLVLSERSDVQMIVADAGLDVSRLTADMTRAIDKLPYGATSVEEFSDHIFHAIQEGWSLATLEFGVEEVRSAHILLACLKTPALEGLVSKISAEFDKIDADGVIARFADVTEGSLEAGSPPAAAAAETPMKRGLGGDSALAKYATDLTQRARDGKIDPVIGRDPEIRQIVDILMRRRQNNPILTGEAGVGKTAVVEGFALRIAQGDVPPTLQNVSVRMLDVGLMQAGASVKGEFEKRLKAVIDEVQASETPIILFIDEAHTLIGAGGAAGTGDAANLLKPALARGELRTIAATTWAEYKQHIEKDPALTRRFQVVKIEEPSETVAVLMLRGVAGVLEQHHKVQILDEAIEASVSLSHRYIPARQLPDKAVSLLDTACARVAVSQHATPAEVEDILRRRQALEVEEGIIGREAAIGIEVVDRQARVEAGLAETETTLAAAQARWDREKALVAEILDLRAKLRGEGVPLDAVEGGEAAPGEAVDAPAATSHERKAPEAKTPKPETAEPKGSKSKSAKTKAAKMEAVAAHEPVPVPDSAADLARLRELMAELAEAQGETPLILPSVDRNAVAAVVQDWTGIPTGRMLSSQTEKALKLAATLAERVVGQDHAMEMIARRVQTSRAGLGAPEKPVGVFLLCGPSGVGKTETALALAETLYGGEQNLISINMSEFQEAHTVSTLKGAPPGYVGYGKGGILTEAVRRKPYSVILLDEVEKAHPDVHEIFFQVFDKGMMDDSEGRRIDFKNTLILLTSNVGSEVIMDRTKNGTLRTGMDDLDTALRGPLLKVFPAAFLGRVVTIPYYPLSDAMIEAITRHQFGKIARRLKATNDAELVIGDGVMDMVKARCTEIESGGRMIDAILTNTLLPELSRGVLNRSLEGKKMTKVTVGASSEGFTYSFE

SEQ ID NO: 7105 - protein, 868 aa, Sinorhizobium meliloti
MDIEKYSERVRGFLQSAQTYALAEGHQQFTPEHVLKVLLDDDQGMAASLIERAGGNAREAKVGTAAALAKLPKVTGGNGSVYLSQPLAKVFTAAEDAAKKAGDSFVTVERLLLALAIESSAATASILSKAGVTPTKLNQVINEIRKGRTADSANAEQGFDSLKKYARDLTAEAREGKLDPVIGRDDEIRRTIQVLSRRTKNNPVLIGEPGVGKTAIAEGLALRIVNGDVPESLKDKRLMALDMGALIAGAKFRGEFEERLKAVLNEVRSEGGEIILFIDEMHTLVGAGKADGAMDASNLLKPALARGELHCVGATTLDEYRKHVEKDAALARRFQPVMVEEPTVEDTISILRGLKEKYEQHHKVRISDSALVAAAALSNRYITDRFLPDKAIDLMDEAASRLRMQVDSKPEELDELDRRVIQLKIEREALKKETDVSSKDRLAKLELDLSSLEEEAAALTARWQAEKQKLGQAADLKKQLDEARNELQIAQRKGEFQRAGELAYGVIPNLEKELAEAESQDGASANPMVQEVVTPDNIAHIVSRWTGIPVDKMLEGERDKLLRMEDELAKWVVGQGDAVQAVSRAVRRSRAGLQDPNRPIGSFIFLGPTGVGKTELTKALARFLFDDETALMRIDMSEYMEKHSVARLIGAPPGYVGYEEGGALTESVRRRPYQVVLFDEIEKAHPDVFNVLLQVLDDGRLTDGQGRTVDFKNTMIIMTSNLGAEYLTALGENEDSDAVRDQVMEVVRAAFRPEFLNRVDEIILFHRLRRSEMGAIVDIQLERLRKLLSDRKITLELEDDARVFLADRGYDPAYGARPLKRAIQKYVQDPLAEKVLQGEFPDGSVIKVVAGSDRLNFKRGAGANKEAA

SEQ ID NO: 7106 - protein, 807 aa, Glycine max
  unsure (1)..(807): unsure at all Xaa locations
XAGAHFVLAFAQDKRFGKRWFGVFRISQQAQISAIGSTGGRQSVIDQEPAEKYEALEMPGKDLTAMAKAGKLDPVIGRDDEIRRCIHILSRRTKNNPVLIGEPGVGKTAISEGLAQRIVQGDVPQALMNRRLISLDMGALIAGAKYRGEFEDRLKAVLKEVTESDGQTILFIDEIHTVVGEGVXKGCKDTCKRLKCMPAQLELRYINPITISDCRFYHDKDPALERRFQQVYVDQPSVEDTISILRGLRERYELHHGVRISDSALVDAAILSDRYISGRFLPDKAIDLVDEAAAKLKMEITSKPTALDEINRSVLKLEMERLSLMNDTDKASKDRLNRLETELSLLKEKQDELTGQWEHEKSVMTNLQSIKEEIDRVNLEIQQAEREYDLNRAAELKYGSLNSLQRQLESAEKELHEYMNSGKSMLREEVTGNDIAEIVSKWTGIPISKLQQSDREKLLYLEEELHKRVVGQDPAVKAVAEAIQRSRAGLSDPHRPIASFMFMGPTGVGKTELAKALASYLFNTEEALVRIDMSEYMEKHTVSRLIGAPPGYVGYEEGGQLTETVRRRPYAVILFDEIEKAHSDVFNVFLQILDDGRVTDSQGRTVSFTNTVIIMTSNVGSQYILNTDDDTAKESAYETIKQRVMDAARSIFRPEFMNRVDEYIVFQPLDRNQISSIVRLQLERVQKRIADRKMKIQVTEAAIQLLGSLGYDPNYGARPVKRVIQQNVENELAKGILRGEFKEEDTILVDTEVTVFANGQLPQQKLVFRRVEADSNSTETEGKAFHRFCERTLLLLISPHARFHNKF

SEQ ID NO: 7107 - protein, 920 aa, Glycine max
  unsure (1)..(920): unsure at all Xaa locations
MARVLVQSTGMPGLLSGQRHGKHKGSGKSKRSVKMMSTLRMPALRMSSFSGLRTLNPMDSLSRPRHTFPLXXTTSRRERAKRCVPKAMFERFTEKAIKVIMLAQEEARRLGHNFVGTEQILLGLIGEGTGIAAKVLKSMGINLKDARVEVEKIIGRGSGFVAVEIPFTPRAKRVLEFSLEEARQLGHNYIGSEHLLLGLLREGEGVAARVLENLGADPNNIRAQVIRMVGEGADSVGATVGPGSSNNNKMPTLEEYGTNLTKLAEEGKLDPVVGRQQQIERVTQILGRRTKNNPCLIGEPGVGKTAIAEGLAQRIANGDVPETIEGKKVITLDMGLLVAGTKYRGEFEERLKKLMEEIKQSDEIILFIDEVHTLIGAGAAEGAIDAANILKPALARGELQCIGATTLDEYRKHIEKDPALERRFQPVKVPEPTVDETIQILKGLRERYEIHHKLRYTDDALVAAAQLSHQYISDRFLPDKAIDLIDEAGSRVRLQHAQLPEEARELDKEVRQIVKEKEEFVRNQDFEKAGELRDREMDLKAQISALIEKGKEMSKAESEAGDEGPMVTEVDIQHIVSSWTGIPVEKVSTDESDRLLKMEETLHKRVIGQDEAVKAISRAIRRARVGLKNPNRPIASFIFSGPTGVGKSELAKALAAYYFGSEEAMIRLDMSEFMERHTVSKLIGSPPGYVGYTEGGQLTEAVRRRPYTVVLFDEIEKAHPDVFNMMLQILEDGRLTDSKGRTVDFKNTLLIMTSNVGSSVIEKGGRKIGFDLDYDEKDSSYNRIKSLVTEELKQYFRPEFLNRLDEMIVFRQLTKLEVKEIADIMLKEVFDRLKAKEIDLSVTERFRERVVDEGYNPSYGARPLRRAIMRLLEDSMAEKMLAREIKEGDSVIVDADSDGNVIVLNGSSGAPDSLEEALPV

SEQ ID NO: 7108 - protein, 925 aa, Glycine max
  unsure (1)..(925): unsure at all Xaa locations
MARVLAQSVNVPGLVAEHRHGQQKGSGKLKRSTKMMSALRTNGLRMSGFSGLRTFNPLDTMLRPGIDFHSKVSIATSSRQARATRCVPKAXMFERFTEKAIKVIMLAQEEARRLGHNFVGTEQILLGLIGEGTGIAAKVLKSMGINLKDARVEVEKIIGRGSGFVAFLXIPFTPRLSRLPVPPLQKARQLGHNYIGXSEHLLLGLLREGEGVAARVLENLGADPTNIRTQVIRMVGESADSVTATVGSGSSGNKMPTLEEYGTNLTKLAEEGKLDPVVGRQPQIERVTQILGRRTKNNPCLIGEPGVGKTAIAEGLAQRIANGDVPETIEGKKVITLDMGLLVAGTKYRGEFEERLKKLMEEIKQSDEIILFIDEVHTLIGAGAAEGAIDAANILKPALARGELQCIGATTLDEYRKHIEKDPALERRFQPVKVPEPTVDETIQILKGLRERYEIHHKLRYTDEALVAAAQLSYQYISDRFLPDKAIDLIDEAGSRVRLQHAQLPEEARELDKEVRQIIKEKEEAVRNQDFEKAGELRDREMDLKAQISTLVEKGKEMSKAETEAGDEGPIVTEADIQHIVSSWTGIPVEKVSTDESDRLLKMEETLHKRVIGQDEAVKAISRAIRRARVGLKNPNRPIASFIFSGPTGVGKSELAKALAAYYFGSEEAMIRLDMSEFMERHTVSKLIGSPPGYVGYTEGGQLTEAVRRRPYTVVLFDEIEKAHPDVFNMMLQILEDGRLTDSKGRTVDFKNTLLIMTSNVGSSVIEKGGRKIGFDLDYDEKDSSYNRIKSLVTEELKQYFRPEFLNRLDEMIVFRQLTKLEVKEIADIMLKEVFDRLKVKDIELQVTERFRDRVVEEGYNPSYGARPLRRAIMRLLEDSMAEKMLAREIKEGDSVIVDVDSDGNVIVLNGSSGAPESLPETLPV

SEQ ID NO: 7109 - protein, 922 aa, Pisum sativum
MARVLAQSLSVPGLVAGHKDSQHKGSGKSKRSVKTMCALRTSGLRMSGFSGLRTFNHLNTMMRPGLDFHSKVSKAVSSRRARAKRFIPRAMFERFTEKAIKVIMLAQEEARRLGHNFVGTEQILLGLIGEGTGIAAKVLKSMGINLKDARVEVEKIIGRGSGFVAVEIPFTPRAKRVLELSQEEARQLGHNYIGSEHLLLGLLREGEGVAARVLENLGADPTNIRTQVIRMVGESADSVTATVGSGSSNNKTPTLEEYGTNLTKLAEEGKLDPVVGRQPQIERVTQILGRRTKNNPCLIGEPGVGKTAIAEGLAQRIANGDVPETIEGKKVITLDMGLLVAGTKYRGEFEERLKKLMEEIKQSDDIILFIDEVHTLIGAGAAEGAIDAANILKPALARGELQCIGATTLDEYRKHIEKDPDLERRFQPVKVPEPTVDETIQILKGLRERYEIHHKLRYTDEALIAAAQLSYQYISDRFLPDKAIDLVDEAGSRVRLQHAQLPEEAKELDKEVRKIVKEKEEYVRNQDFEKAGELRDKEMDLKAQISALIEKGKEMSKAETETADEGPIVTEVDIQHIVSSWTGIPVDKVSADESDRLLKMEDTLHKRIIGQDEAVQAISRAIRRARVGLKNPNRPIASFIFSGPTGVGKSELAKALAAYYFGSEEAMIRLDMSEFMERHTVSKLIGSPPGYVGYTEGGQLTEAVRRRPYTVVLFDEIEKAHPDVFNMMLQILEDGRLTDSKGRTVDFKNTLLIMTSNVGSSVIEKGGRRIGFDLDYDEKDSSYNRIKSLVTEELKQYFRPEFLNRLDEMIVFRQLTKLEVKEIADIMLKEVFQRLKTKEIELQVTERFRDRVVDEGYNPSYGARPLRRAIMRLLEDSMAEKMLAREIKEGDSVIVDVDSDGKVIVLNGSSGTPESLPEALSI

SEQ ID NO: 7110 - protein, 926 aa, Lycopersicon esculentum
MMARALVQSTNILPSVAGERAGQFNGSRKDQRTVRMLCNVKCCSSRLNNFAGLRGCNALDTLLVKSGETLHSKVAAATFVRRPRGCRFVPKAMFERFTEKAIKVIMLAQEEARRLGHNFVGTEQILLGLIGEGTGIAAKVLKSMGINLKDARVEVEKIIGRGSGFIAVEIPFTPRAKRVLELSLEEARQLGHNYIGSEHLLLGLLREGEGVAARVLENLGADPTNIRTQVIRMVGESSEAVGASVGGGTSGLKMPTLEEYGTNLTKLAEEGKLDPVVGRQAQIERVTQILGRRTKNNPCLIGEPGVGKTAIAEGLAQRIANGDVPETIEGKKVITLDMGLLVAGTKYRGEFEERLKKLMEEIKQSDEIILFIDEVHTLIGAGAAEGAIDAANILKPALARGELQCIGATTLDEYRKHIEKDPALERRFQPVKVPEPSVDETIQILKGLRERYEIHHKLHYTDEAIEAAAKLSHQYISDRFLPDKAIDLIDEAGSRVRLRHAQLPEEARELEKELRQITKEKNEAVRGQDFEKAGELRDREMDLKAQISALIDKNKEKSKAESEAGDAAGPIVTEADIQHIVSSWTGIPVEKVSTDESDRLLKMEETLHTRVIGQDEAVKAISRAIRRARVGLKNPNRPIASFIFSGPTGVGKSELAKSLATYYFGSEEAMIRLDMSEFMERHTVSKLIGSPPGYVGYTEGGQLTEAVRRRPYTVVLFDEIEKAHPDVFNMMLQILEDGRLTDSKGRTVDFKNTLLIMTSNVGSSVIEKGGRRIGFDLDFDEKDSSYNRIKSLVTEELKQYFRPEFLNRLSEMIVFRQLTKLEVKEIADIMLKEVFVRLKNKEIELQVTERFRDRVVDEGYNPSYGARPLRRAIMRLLEDSMAEKMLAGEIKEGDSVIVDVDSDGNVTVLNGTSGAPSDSAPEPILV

SEQ ID NO: 7111 - protein, 923 aa, Lycopersicon esculentum
MARALVQSTSIPSSVAGERTTKFNGSGKTKRAVTMLCNAQSSSLTLRDFTGLRGCNAIDTLVRSGETLQSKVAAATYVRRPRGCRFVPKAMFERFTEKAIKVIMLAQEEARRLGHNFVGTEQILLGLIGEGTGIAAKVLKSMGINLKDARVEVEKIIGRGSGFVAVEIPFTPRAKRVLELSLEEARQLGHNYIGSEHLLLGLLREGEGVAARVLENLGADPSNIRTQVIRMVGESNEAVGASVGGGTSGQKMPTLEEYGTNLTKLAEEGKLDPVVGRQPQIERVTQILGRRTKNNPCLIGEPGVGKTAIAEGLAQRIANGDVPETIEGKKVITLDMGLLVAGTKYRGEFEERLKKLMEEIKQSDEIILFIDEVHTLIGAGAAEGAIDAANILKPALARGELQCIGATTLDEYRKHIEKDPALERRFQPVKVPEPTVDETIQILKGLRERYEIHHKLRYTDEDLVAAAQLSYQYISDRFLPDKAIDLIDEAGSRVRLRHAQLPEEAKELEKELRQITKEKNEAVRGQDFEKAGELRDREMDLKAQITALIDKNKEVSKAESEAADTGPLVTEADIQHIVSSWTGIPVEKVSTDESDRLLKMEETLHTRIIGQDEAVKAISRAIRRARVGLKNPNRPIASFIFSGPTGVGKSELAKALAAYYFGSEEAMIRLDMSEFMERHTVSKLIGSPPGYVGYTEGGQLTEAVRRRPYTVVLFDEIEKAHPDVFNMMLQILEDGRLTDSKGRTVDFKNTLLIMTSNVGSSVIEKGGRRIGFDLDLDEKDSSYNRIKSLVTEELKQYFRPEFLNRLDEMIVFRQLTKLEVKEIADIMLKEVFERLKVKEIELQVTERFRDRVVDEGYNPSYGARPLRRAIMRLLEDSMAEKMLANEIKEGDSVIVDVDSDGNVTVLNGSSGTPSDPAPEPIPV

SEQ ID NO: 7112 - protein, 1168 aa, Oryza sativa
  unsure (1)..(1168): unsure at all Xaa locations
MWGLHFSQVLSRRSDRGGERWPAAGEGERDGRRDSGGGRGGEVAAGATASSVAVGLLRCRKSCCLHWMNYLSPDLKRGNFTDDDDELTIKLHALLGNKWNTHIKRKLLSQGIDPQTHQPVSAGTSVAAASELTTTAITVGFPSLAVAPARGSSRRKEGRLGGVFLVVVASGGGVSGGGRVSDGGELELRVEERREVVVAGRWRRGGQRLGGLVAAPSSPPRLRSGQVGMEGSLVQSAIAPTIYRRSGTARFRVRARATMMRTMPTRTLTLGGFQGLRQTNFLDSRSVIKRDFGSIVASQISRPRGLGSRGVVRAMFERFTEKAIKVIMLAQEEARRLGHNFVGTEQILLGLIGEGTGIAAKVLKSMGINLKDARVEVEKIIGRGSGFVAVEIPFTPRAKRVLELSLEEARQLGHNYIGSEHLLLGLLREGEGVAARVLESLGADPNNIRTQVIRMVGESTEAVGAGVGGGSSGQKMPTLEEYGTNLTKLAEEGKLDPVVGRQDQIERVTQILGRRTKNNPCLIGEPGVGKTAIAEGLAQRISNGDVPETIEGKKVITLDMGLLVAGTKYRGEFEERLKKLMEEIKQNDDIILFIDEVHTLIGAGAAEGAIDAANILKPALARGELQCIGATTLDEYRKHIEKDPALERRFQPVKVPEPTVDETIQILRGLRERYELHHKLRYTDDSLIAAAQLSYQYISDRFLPDKAIDLIDEAGSRVRLRHAQLPDEAKELDKELRQVTKDKNEAVRGQDFEKAGELRDREMELKAQITAIIDKSKEMVKAETESGEVGPLVTEADIQHIVSSWTGIPVEKVSSDESDRLLKMEETLHTRIIGQDEAVKAISRAIRRARVGLKNPNRPIASFIFSGPTGVGKSELAKALAAYYFGSEEAMIRLDMSEFMERHTVSKLIGSPPGYVGYTEGGQLTEAVRRRPYTVVLFDEIEKAHPDVFNMMLQILEDGRLTDSKGRTVDFKNTLLIMTSNVGSSVIEKGGRKIGFDLDYDEKDTSYNRIKSLVTEELKQYFRPEFLNRLDEMIVFRQLTKLEVKEIADIMLKEVFDRLKAKDIDLQVTEKFRDRVVDEGYNPSYGARPLRRAIMRLLEDSLAEKMLAGEVKEGDSAIVDVDSEGKVIVLNGGSGVPEPLAPALSVXLKDNIVVLELWPFLFSQLGRS

SEQ ID NO: 7113 - protein, 772 aa, Oryza sativa
  unsure (1)..(772): unsure at all Xaa locations
RGAPPXPRGVRPLAGGVPRAPPADRGWAPPAVHARPLRRDRIGSEHLLLGLVREGEGVAARVLESLGAVPSNIRTQVIRMIGETTEAVGAGVGGGSSGNKMPTLEEYGTNLTKLAEEGKLDPVVGRQPQIERVVQILGRRTKNNPCLIGEPGVGKTAIAEGLAQRISTGDVPETIEGKKVITLDMGLLVAGTKYRGEFEERLKKLMEEIKQSDEIILFIDEVHTLIGAGAAEGAIDAANILKPALARGELQCIGATTLDEYRKHIEKDPALERRFQPVRVPEPTVDETIEILRGLRERYEIHHKLRYTDDALISAAKLSYQYISDRFLPDKAIDLIDEAGSRVRLRHAQVPEEARELDKELKQITKDKNEAVRSQDFEKAGELRDREMELKAQITALIDKSKEMSKAETESGETGPLVNEADIQHIVSSWTGIPVEKVSSDESDKLLKMEETLHQRVIGQDEAVKAISRSIRRARVGLKNPNRPIASFIFAGPTGVGKSELAKALAAYYFGSEEAMIRLDMSEFMERHTVSKLIGSPPGYVGYTEGGQLTEAVRRRPYTVVLFDEIEKAHPDVFNMMLQILEDGRLTDSKGRTVDFKNTLLIMTSNVGSSVIEKGGRKIGFDLDYDEKDSSYSRIKSLVVEEMKQYFRPEFLNRLDEMIVFRQLTKLEVKEIAEIMLKEVFDRLKAKDIDLQVTEKFKERIVDEGFNPSYGARPLRRAIMRLLEDSLAEKMLAGEVKEGDSAIVDVDSEGKVIVLNGQSGLPELSTPAVTVX

SEQ ID NO: 7114 - protein, 859 aa, Oryza sativa
MERTLLNPPPRRGARVVARMGFDMFTDKAIKAIMMAQEEARRLGHHAAGSEQLLLGVIGEGTGIGAKVLRGAGLSLKAARAEVEKMAGRGPGMVPMEIKFTPAAKNVLQASQEEAHQLGHNYVGSEHLLLGLLREHGAALVVLKNFQADPSNIRSEVIRMISDTSEDHQPVSAAVGGGSSTTKIPTLLEYGTNLTKLAEEGKLDPVVGRQNQVDRVVQILGRRTKNNPCLIGEPGVGKTAIAEGLAQRIAAGNVPETIDGKTVITLDMGLLVAGTKYRGEFEERLKKLMDEVKQNGEIILFLDEVHTLVGAGAAEGAIDAANILKPALARGELQCIGATTIDEYRKHIEKDPALERRFQPVKVPEPTVDETIGILKGLRERYEIHHKVQYTDESLIAAARLSYQYISDRFLPDKAIDLVDEAGSLVRLRNAQLPDEAKELEKKLKKIMAEKSEAIRSQDFEKAGALRGEEVELKSEIMSLVDKSKEMSKAAVDSGESPGPTVTEADVQHIVSSWTGVPVEKVTVDESSRLLAMESSLHRRIVGQDEAVTAISRAIRRARVGLRDPRRPIASFIFAGPTGVGKSELAKALAAYYYGSPEAMVRLDMSEFMEKHTVAKLVGSPPGYVGYAEGGQLTEAIRRRPYAVVLFDKVEKAHPDVFNMMLQILDDGRLTDSKGRTVDFKNSLIIMTSNVGSGVIEKGGRQLGFAGDGSGDGGYGVIKNMVEEEMKRYFRPEFLNRLDEMIVFRQLTKLEVKEIAGIMLAEVTGRIGGKGIGLQVTERFKELVVEQGFDPSYGARPLRRAIMRLLEDTLTDKMLAGEICAGDSVIVDADGDGNVVVVEGHPGNKYANLLEEHSSTSRS

SEQ ID NO: 7115 - protein, 691 aa, Triticum aestivum
  unsure (1)..(691): unsure at all Xaa locations
EFGTREPQIERVVQILGRRTKNNPCLIGEPGVGKTAIAEGLAQRISSGDVPETIEGKKVITLDMGLLVAGTKYRGEFEERLKKLMEEIKQSDEIILFIDEVHTLIGAGAAEGAIDAANILKPALARGELQCIGATTLDEYRKHVEKDPALEXRRFQPVKVPEPSVDETIEILRGLRERYEIHHKLRYTDDSLIAAAKLSYQYISDRFLPDKAIDLIDEAGSRVRLRHAQVPEEARELDKELKQITKDKNEAVRGQDFEKAGELRDREMELKAQITALIDKSKEMNKAETESGETGPMVHESDIQHIVSSWTGIPVEKVSTDESDKLLKMEETLHKRVIGQDEAVKAISRSVRRARVGLKSPNRPIASFIFAGPTGVGKSELAKTLASYYFGSEEAMIRLDMSEFMERHTVSKLIGSPPGYVGYTEGGQLTEAVRRRPYSVVLFDEIEKAHPDVFNMMLQILEDGRLTDSKGRTVDFKNTLLIMTSNVGSSVIEKGGRKIGFDLDSDEKDSSYGRIKSLVIEEMKQYFRPEFLNRLDEMIVFRQLTKLEVKEIADIMLQEVFTRLKTKDINLQVTEKFKERVVDEGYNPSYGARPLRRAIMRLLEDSLAEKILGGEVKEGDSVIVDVDPEGKVIVLNGESGLPELPTPAVAVXLLVLYRIRRRLLSIYIQYSVFISFQHISLHRCGSQVRCI

SEQ ID NO: 7116 - protein, 617 aa, Triticum aestivum
  unsure (1)..(617): unsure at all Xaa locations
EFGTRVITLGXGLLVAGTKYRGEFEERLKKLMEEIKQNDDIILFIDEVHTLIGAGAAEGAIDAANILKPALARGELQCIGATTLDEYRKHIEKDPALERRFQPVKVPEPTVEESIQILRGLRERYELHHKLRYTDDALVAAAQLSYQYISDRFLPDKAIDLIDEAGSRVRLRHAQLPDEAKELDKKLRQITKDKNEAVRGQDFEKAGELRDEEMELKAQITAIIDKSKEMVKAETESGEVGPLVTEADIQHIVSSWTGIPVEKVSSDESDRLLKMEETLHTRIIGQDEAVKAISRAIRRARVGLKNPNRPIASFIFSGPTGVGKSELAKALASYYFGSEEAMIRLDMSEFMERHTVSKLIGSPPGYVGYTEGGQLTEAVRRRPYTVVLFDEIEKAHPDVFNMMLQILEDGRLTDSKGRTVDFKNTLLIMTSNVGSSVIEKGGRKIGFDLDSDEKDTSYNRIKSLVTEELKQYFRPEFLNRLDEMIVFRQLTKLEVKEIADIMLKEVFDRLKAKEIDLQVTEKFRDRVVDEGYNPSYGARPLRRAIMRLLEDSLAEKMLAGEVKEGDSAIVDVDSDGKVVVLNSGGGIAEPLEPALSAXLGTPSFYFVISAWGPGDGT

SEQ ID NO: 7117 - protein, 452 aa, Triticum aestivum
  unsure (1)..(452): unsure at all Xaa locations
XRDDEVRRCIQIFCRRTKNNPVIIGEPGVGKTAIAEGLAQRIVRGDVPEPLQNRKLISLDMGALLAGSKYRGEFEERLKAVLKEVTASNGQIILFIDEIHTVVGAGATGGAMDAGNLLKPMLGRGELRCIGATTLDEYRKYIEKDAALERRFQQVYCGEPAVEDTVSILRGLRERYEMHHGVKISDGALVAAAALSDRYITGRFLPDKAIDLVDEAAAKLKMEITSKPIELDEVDREIIRFEMEKLSLKNDTDKASRERLSKLEAELESLKQKQKNLSEHWEYEKSLMTRIKSIKEEIDRVNLEIEAAEREYNLNRAAELKYSTLLTLQKQLDEAEENLTEFQQSGKSMLQEEVTDVDIAEIVSKWTGIPVSNLQQSDREKLLLLEDVLHKRVIGQDIAVKSVANAIRRSRAGLSDPNRPIASFMFMGPTGVGKTELGKTLAEFLFNTENAX

SEQ ID NO: 7118 - protein, 442 aa, Triticum aestivum
  unsure (1)..(442): unsure at all Xaa locations
XAAWAPPRPRPSPPRRGAAAGGRRARRRPASVRCNASSRDGRITQQEFTEMAWQSIVLAPEVAKESKHQIVETEHLMKSLLEQRNGLARRIFSKAGVDNTRLLDATEKFIQRQPKVLGEDPGSMLGRDLEALIQRARNFKKEYGDSFVSVEHIVLGFADDKRFGRQLFKDFQITVEALKTAIESIRGKQNVIDQDPEGKYEALDKYGKDLTAMARQGKLDPVIGRDDEIRRCIQILSRRTKNNPVLIGEPGVGKTAIAEGLAQRIVQGXDVPQALTNRRLITLDMGALIAGAKYRGEFEDRLKAVLKEVTDSDGQVVLFIDEIHTVXVGASATSGAMDAGNLLKPMLGRGELRCIXGATTLXDEYPQYIEKDPALERRFQQVYVDQPTVEDTVSILRGLRERYELHHGVRISDSALVAAALLSDRYISGRFLPDKAIDLVDE

SEQ ID NO: 7119 - protein, 492 aa, Triticum aestivum
  unsure (1)..(492): unsure at all Xaa locations
XPRVREDAVKILLGLRENYETYHKCKFTLEAINAAVYLSARYIPDRQLPDKAIDLIDEAGSRARIESYQKKKEGQSSVLLKEPDEYWQEIKAVQAMHEVVLSNKMKYSPNENKQQNASVNTEGPHQDKAATIEEPIVVGTEEIARVASLWSGIPVQQLTADDKKILVGLDDELRKRVIGQDDAVAAISRAAKRSRVGLSDPDRPIATMLFCGPTGVGKTELTKALAASYFGSESAMLRLDMSEYMERHTVSKLIGSPPGYIGYGETGTLTEAVRRKPFTVVLLDEIEKAHPDIFNILLQIFEDGHLADSQGRRVSFKNTLIVMTSNVGSTSISNGRRSMGFXXTEDTESSRYVAVKSLVMEELKGFFRPELLNRIDETVVFRPLEQTQMLAILDILLEELKGKLLAVGIGLEVSDAMKELICREGYDKNYGARPLRRAITQLMEDVISEAILFGEYKPGDTILVDTDSKGKPCLSRLNQPPIVQVSDSTRTF

SEQ ID NO: 7120 - protein, 325 aa, Triticum aestivum
  unsure (1)..(325): unsure at all Xaa locations
XSKRVVGQAPAAEAGPPAVQRASAGLSDPNRPIASFMFMGPTGVGKTELAKALASFMFNTEDAVVRIDMSEYMEKHSVSRLIGAPPGYVGQGVPGRLAGPGRRRPCSLGLFDEIEKAHSDVFNVFLQILDDGRVTDSQGRKVSFTNSIIIMTSNVGSQYILNMDEDGETDSAYESMKKRVMDAARSVFRPEFMNRVDEYIVFKPLERKQINSIVKLQLARVQKRIADRKIKLDVSPAAIEFLGSLGYDPNYGARPVKRVLQQYVENELAKGILRGEFKDEDSISVDTQVTVPSNGKLPQQKLVFRKTNEESKPAAAQDEKFLPTV

SEQ ID NO: 7121 - protein, 309 aa, Triticum aestivum
  unsure (1)..(309): unsure at all Xaa locations
XRSPAXPPSPRTPRPAVGQDQAAPLLAHPVXRAGPGCALPVQPFPSSPVXRSAGVGKTELAKALAEQLFDSQKMLVRFYMSEFVDRGSVLRLIGAPPSYNGHEDGGQLTEKIRRRPYSVILFDEVEKADPSVLNLFVQLLDDGVLTDGKGRTVDFKNTIIIMTSNLGAEHLTAGMAGNGTMEAARDLVMHQVQKHFKPELCNRMSEIVIFEPLSRDKLKEIVKIQMKRIVARVASKGICLSVSDAALEVVLSESYNPMYGARPVKRWLLKNVMTDLSEMLVNGQVVEGSSVSIDAADDXGGSIXIRIXV

SEQ ID NO: 7122 - protein, 248 aa, Triticum aestivum
  unsure (1)..(248): unsure at all Xaa locations
XLTAEVKHGTRTQSYNKKEVTAQSRSIKAVKKGIVGPGQVAQVVSLWTGIPVAAIDQGEKEKLLHLAEKLHERVVGQDEAVNLVAQAVLRSRVGLDQPGQPIGSFLFLGSTGVGKTELAKALAEQLFDNENMLVRFDMSEYGTKGSVLRLIGAPPSYFGYDDGGQLTEKVKSHPYSVTLFDEVEKAHREVXNVFLQLLDDGLLTDGKGRTVDFXNTIIIMTSNLGSKHLAAGMVGKNTXQETHKLVMX

SEQ ID NO: 7123 - protein, 299 aa, Triticum aestivum
  unsure (1)..(299): unsure at all Xaa locations
XRIRHEDRPIAALLFCGPTGVGKTELTKALASTYFGSESAMCRLDMSEYMERHAVSKLIGSPPGYMGFGEGGTLTEAVRRKPFTVVLFDEIEKAHPDIFNILLQVFEDGHLTDSQGRRVSFKNTLIVMTSNVGSTSIFQRNDXSMGFQTQNDTEENTYAVMKSLVMEELKAFFRPELLNRMDEVVVFRPLEKTEMLAILKRILEEGKGRLLALGIGLVVCGAMGCRRSEPGXXRSXGARXPLRRAVTRLVEEVVSEAIGCGQYKRGDTLRMDTDGKGQPCXXSRLNGQTVQVSDPTPTL

SEQ ID NO: 7124 - protein, 257 aa, Triticum aestivum
  unsure (1)..(257): unsure at all Xaa locations
XEFEERLKKLMEEIKQSDDIILFIDEVHTLIGAGAAEGAIDAANILKPALARGELQCIGATTLDEYRKXHIEKDPALERRFQPVKVPEPTVDETIQILRGLRERYELHHKLQYTDDALVAAAKLSYQYISDRFLPDKAIDLIDEAGSRVRLRHAQLPDEAKELNKELRQVTKDKNEAVRGQEFEKAGELRDREMXELKAQITAIIDKSKEMVKAESESGEVGPLVTEADIQHIVSSWTGIPVEKVSADESDRLLKMX

SEQ ID NO: 7125 - protein, 297 aa, Triticum aestivum
  unsure (1)..(297): unsure at all Xaa locations
GCRRVFEVAVELSRNMGCSFISPEHLAIALFTLDDPTTNNLLRSLGADPSQLASVAVTRLHEELAKDGRDPGASSLKVPEKAPAGAGAGRSAFSKSLSKKKDKGALDQFCLDLTTQASGGFIDPIIGREEEIERVVQIICRRTKNNPILLGEAGVGKTAIAEGLALRIANGDVPIFLVAKRIMSLDIGLLIAGAKERGELESRITSLIREVREAGDVILFIDEVHNLVGSGTAGKGKGAGLDISNLLKPPLARGELQCIAATTLDEHRMHFEKDKALNRRFQPVSVDEPSQXDAVKI

SEQ ID NO: 7126 - protein, 149 aa, Triticum aestivum
  unsure (1)..(149): unsure at all Xaa locations
XSEIRRSLLFLITPPRSDPVIGRDDDIDRVICILCRRSKNCAALVGPAGVGKTAIVEGLARRIAAGTVPEALAGARVAELDVGAMVAGTHWRGMFEQRLKDAIKKAEDSAGKLILFIDEMHMIIGAGDQRGAGDAANILKPALARGXXX

SEQ ID NO: 7127 - protein, 153 aa, Triticum aestivum
  unsure (1)..(153): unsure at all Xaa locations
XIDLIDEACTFIARKMKQIEKSSSTNRVKKAIVDPNDVAQVVSRWTGIPVATLCEEEKDKLIHIGDRLHERVIGQDEAVNLVAQAVLRSRAGLDQPSQPTGSFLFLGPSGVGKTELAKALAEQLFDSEKMLVRVDMSEYATAGSVTRLIGAPX

SEQ ID NO: 7128 - protein, 126 aa, Triticum aestivum
  unsure (1)..(126): unsure at all Xaa locations
XILCRRTKNCAALVGEAGVGKTAIIEGLTQRIASGKVPASLAGARVVEVDLGAMLAGTSLRGMFEERIKDVIKSAEDGDGKVILFIDEMHMLLGAGDDVSGTDAANLLKPALARGLIRCVGATTLX

SEQ ID NO: 7129 - protein, 211 aa, Triticum aestivum
  unsure (1)..(211): unsure at all Xaa locations
XGMGCKFISPDXIALGLFDLDDPTTNSILKSLGVVPTQLAKQALTRVKGELAKDGREPLGLSSFKLRDKSTGTAIAKYSNKKKEKSALAQFCIDLTMRASGGFIDPVIGRTKEIERVVQIICRRTKNNPILLGEAGVGKTAIAEGLALKIANGDVPIFLVGKRILSLDVALLMAGAKERGELEARVTSLIREVRKADDVILFIDEVHTLIX

SEQ ID NO: 7130 - protein, 138 aa, Triticum aestivum
  unsure (1)..(138): unsure at all Xaa locations
YYDRKAALRTYGRHMTGQAXXGPVVGRDDEIDRVISILCRKTKNCAALVGPAGVGFTAIAEGLVQRIATGKVPAALAGARVVEVDLGAMVAGTRYRGMFEERMKSVINQAEKAIGKIILFIDEMHMLLGAGAGRGVTX

SEQ ID NO: 7131 - protein, 167 aa, Triticum aestivum
  unsure (1)..(167): unsure at all Xaa locations
XVDGDTDKXTSRDRLSRIEAELSLLKERQKGLTEQWEREKSVMTKIQSIKEEIDRLNVEIQQAEREYDLNRAAELKYGSLNALQRDLQKTEDELNEYQSSGKSMLREEVTQDDIAEIVSRWTGIPVSKLKQSDREKLLYLEDELHKRVVGQDPAVKAVAEAIQRSRA

SEQ ID NO: 7132 - protein, 173 aa, Triticum aestivum
  unsure (1)..(173): unsure at all Xaa locations
VDRPPERDAAKEAIVSPNHVAQVVSQWTGDSCRCAXPRGEAYSCLRSYGRDMTCSKQAANPVVGRDSEIDRVVSILCRKTKNCAALVGAAGVGKTAIAEGLAQRIAAGKVPAALAGARVVEVDLAAMVSGTLFRGMFEERIKSVIKQAEDSGGKIVLFIDEMHMLLGAGDGLG

SEQ ID NO: 7133 - protein, 115 aa, Triticum aestivum
  unsure (1)..(115): unsure at all Xaa locations
PTRTDAGPLLKPMLVRGVLPCIGATSLDEFRKYIEIDPALERRFEHVPADQPTVEDPVXLLRRLHERYELHHGVRILDSAVVAADLLSDRHIRGRFSPDKAIDSVDESAAEMTLE

SEQ ID NO: 7134 - protein, 295 aa, Triticum aestivum
  unsure (1)..(295): unsure at all Xaa locations
XMLVSKIKSLLGSGVLQAPTAAGRAFASLLAPARAARGSQGSASPARAHRRRPGDAAFALPPRLLPVVGXGPTLVVAGDGVLGLRAGEGAWHKCKYTLEGINAAVYLSVRYIPDRHLPDKAIDLIDEAGSRARMESFKKKKEEQCSIILKSPDEYWQEIRAVQAMHEVALTNRLKYSLNENDQENEVNVEVLDDSKTSPTATPSASADEPSVVGLEEIARVTSLWSGIPVQQLTADERKLLVGLDDELRKRVIGQDDAVVAISRAVKRSRTGMSDPDRPIATLLFCGPTRVGKTX

SEQ ID NO: 7135 - protein, 232 aa, Triticum aestivum
  unsure (1)..(232): unsure at all Xaa locations
XXMVXAGELRSQRLELKNSRIMSLVDNSNEVSQPEVESVASAGAMVRKANMQXHIVPSRSSVAVEKVSVDESNQSFKMEETLLGRVAGQAEAVRAIGRAIPRARVGLRTPSRPVASFNFASPPGVGKSELAKALATSYCGLEEAMVQLHMSEFMEQHTVAKLIGPPLGYVSCGRAGAMXVEGKDDGSKIRLVRKAAGEGRGEIWWRQLEMAKGRDAASSSSGQPSSLEPPAP

SEQ ID NO: 7136 - protein, 128 aa, Triticum aestivum
  unsure (1)..(128): unsure at all Xaa locations
GSATVEAPSRGNIESTSGSSLSADEPIVVGTEEIARVASLWSGIPVQQLTADDKKLLVXLDDELRKRVIGQDDAVVAISRAVKRSRVGLNDPDRPIATLLFCGPTGVGKTELTKALAACYFGSESAMX

SEQ ID NO: 7137 - protein, 105 aa, Triticum aestivum
  unsure (1)..(105): unsure at all Xaa locations
XIRLEEYGTNLTKLANDGKLDPVVGREPQIEPVVHILGKRTKNNPCLIGEPLVAXTAIAYRLAXRMCSGYLPVTIYGKMVITLDMGLIDAGTNYRGEFDERMKKL

SEQ ID NO: 7138 - protein, 146 aa, Triticum aestivum
IRTRAARSVFRPEFMNRVDEYIVFKPLEREQINSIVKLQLARVQKRIADRKIKLEVSPGAIEFLGSLGYDPNYGARPVKRVIQQYVENELAKGILRGDFKDEDSIFVDTQVTVPSNGQLPQQKLVFRKVGEQSKAAAEDEKFLPAV

SEQ ID NO: 7139 - protein, 159 aa, Triticum aestivum
  unsure (1)..(159): unsure at all Xaa locations
SKDAVYEVMKKQVTEIARQTFRPEFLNRIDEYIVFQPLDSTEINRIVEIQLNRVKNRLLQQKIPLQYTPEAVEHFGAFGFDPKYGARPVKRVIQQMVENEIAFGVLKGDFKEDDTVVVDVSSVSXSQRLCSKKAAGPSEGRKRKPRVGCQGRKHRVGRQ

SEQ ID NO: 7140 - protein, 151 aa, Triticum aestivum
  unsure (1)..(151): unsure at all Xaa locations
XDLDYDEKDTTYNRIKSLVTEELKQYFRPEFLNRLDEMIVFRQLTKLEVKEIADIMLKEVFDRLKVKEIDLQVTERFRDRVVDDGYNPSYGARPLRRAIMRLLEDSLAEKMLAGEVKEGDSAIVDVDSEGKVIVLNGGNGVLEPLTPILST

SEQ ID NO: 7141 - protein, 131 aa, Triticum aestivum
  unsure (1)..(131): unsure at all Xaa locations
EFGTRDDGRITDSQGRTVSFTNCVIIMTSNIGSPLILDTLRNTTDSKDAVYEVMKKQVTEIARQTFRPEFLNRIDEYIVFQPLDSTEINRIVEIQLNXRVKNRLLQXRKIHLQYTPEGXVEHXGAXGFDPX

SEQ ID NO: 7142 - protein, 221 aa, Triticum aestivum
  unsure (1)..(221): unsure at all Xaa locations
VIIMTSNIGADHLLKGIKGSSTSMEQAHGKVMEEVKGHFHPELLNRLDKIVIFDPLSHKQLRKVARRHMKDVEARLAERRVALVITDDALHVILSQPHDPGHGARPIKGWIEDNIVTVLSVMLINEEIAENSTVYVDAAPNKNELTYRVDKDGGVVNAQAGHESDIVIYVPSGSGAIGKXGYVRGRHIHGPGHLPMNSRGQLPLNSQVTYMRIDFDPVIAM

SEQ ID NO: 7143 - protein, 320 aa, Triticum aestivum
  unsure (1)..(320): unsure at all Xaa locations
MAGTLVLPVALEITFAGRTGGRHCKSHGTRRTPSMLAMSLNRPVRMAAFVGLRSVHSFSAMRSSNFRSTVASYRFSRQGRRASFVTRAMFERFTEKAIKVIMLAQEEARRLGHNFVGTEQVLLGLVGEGTGIAAKVLKSMGINLKDARVEVEKIIGRGNGFVAVEIPFTPRAKRVLELSLEEARQLGHNYIGSEHLLLGLLREGEGVXAARVLXESLGADPSNIRTQVVRMIGXDNRSXXGAGVGGGXTSGNKMPTLEXEYGTNLTKLAEEGKLDPVVGREPQIARLLLWLGQTTXXXVIGPGVGNTXAKASTILCXCLT

SEQ ID NO: 7144 - protein, 978 aa, Zea mays
  unsure (1)..(978): unsure at all Xaa locations
MAAAPPLSADVLSFLTSAPAAPTPVVAAAWGAARAGPVRGKAALRTTRGGRGGVLAPLNSARVGRRPRRTPLSVRCNATSRDGRITQQEFTEMAWQAIVSSPEVAKESKHQIVETEHLMKSLLEQRNGLARRIFSKAGVDNTRLLDATKKFIQRQPKVLGEEPGSMLGRDLEALIQRARDFKKEYGDSYVSVEHLVFGFAEDKRFGTQLFKDFQITVKTLKSAIESIRGKQNVIDQDPEGXYEALEKYGKDLTAMARQGKLDPVIGRDDEIXRRCIQILSRRTKNHPVLIGEPGVGKTAIAEGLAQRIVQGDVPQALTNRRLIALDMGALIAGAKYRGEFEDRLKAVLKEVTDSDGQTVLFIDEIHTVVGAGATNGAMDAGNLLKPMLGRGELRCIGATTLDEYRKYIEKDPALERRFQQVFVDQPSVEDTISILRGLRERYELHHGVRISDSALVAAAVLSDRYISGRFLPDKAIDLVDESAAKLKMEITSKPTALDEIDRAVLKLEMERLSLTNDTDKASRGRLSRLEAELSLLKDKQRQLTEQRGLPRARPTKILSIKEEIDRVNVEIQQAEREYDLNRAAELKYGSLNALQRQLQATEKELDEYQSSGKSMLREEVTQDDIAEIVSRWTGIPVSKLKQSDREKLLYLEDELHKRVVGQDPAVKAVAEAIQRSRAGLSDPNRPIASFMFMGPTGVGKTELAKALAAFMFNTEEAVVRIDMSEYMEKHSVSRLIGAPPGYVGYEEGGQLTEAVRRRPYSVVLFDEIEKAHSDVFNVFLQILDDGRVTDSQGRKVSFTNTIIIMTSNVGSQYILNMDEDGSSDSAYENIKRRVMDAARSVFRPEFMNRVDEYIVFKPLEREQINSIVKLQLARVQKRIADRKIKLEVSPGAIEFLGSLGYDPNYGARPVKRVIQQHVENELAKGILRGDFKDEDSIFVDTQVTVPSNGQLPQQKLVFRKVGEQSKPAAEGEKFLPAV

SEQ ID NO: 7145 - protein, 912 aa, Zea mays; identical to SEQ ID NO: 424

SEQ ID NO: 7146 - protein, 912 aa, Zea mays; identical to SEQ ID NO: 424

SEQ ID NO: 7147 - protein, 912 aa, Zea mays; identical to SEQ ID NO: 424

SEQ ID NO: 7148 - protein, 912 aa, Zea mays; identical to SEQ ID NO: 424

SEQ ID NO: 7149 - protein, 912 aa, Zea mays; identical to SEQ ID NO: 424

SEQ ID NO: 7150 - protein, 922 aa, Zea mays
  unsure (1)..(922): unsure at all Xaa locations
MAGTLLQSVALGTPFGGRMRTHCWRSHGTRRPASMLAVSLSRPVKMSAFVGLRSVHSFSVTPTVSNSRSAVASYRSSRQTRRSRFVTRAMFERFTEKAIKVIMLAQEEARRLGHNFVGTEQILLGLIGEGTGIAAKVLKSMGINLKDARVEVEKIIGRGNGFVAVEIPFTPRAKRVLELSLEEARQLGHNYIGSEHLLLGLLREGEGVAARVLESLGADPSNIRTQVIRMIGETTEAVGAGVGGGSSGNKMPTLEEYGTNLTKLAEEGKLDPVVGRQPQIERVVQILGRRTKNNPCLIGEPGVGKTAIAEGLAQRISTGDVPETIEGKKVITLDMGLLVAGTKYRGEFEERLKKLMEEIKQSDEIILFIDEVHTLIGAGAAEGAIDAANILKPALARGELQCIGATTLDEYRKHIEKDPALERRFQPVKVPEPTVDETIEILRGLRERYEIHHKLRYTDEALIAAAKLSYQYISDRFLPDKAIDLIDEAGSRVRLQHAQVPEEARELDKELKQVTKQKNEAVRSQDFEKAGELRDREMELKAQITALIDKSKELSKAEEESGETGPMVNEEDIQHIVSSWTGIPVEKVSSDESDKLLKMEETLHKRVIGQDEAVVAISRSIRRARVGLKNPNRPIASFIFAGPTGVGKSELAKALAAYYFGSEEAMIRLDMSEFMERHTVSKLIGSPPGYVGYTEGGQLTEAVRRRPYTVVLFDEIEKAHPDVFNMMLQILEDGRLTDSKGRTVDFKNTLLIMTSNVGSSVIEKGGRKIGFDLDSDEKDSSYSRIKSLVIEEMKQYFRPEFLNRLDEMIVFRQLTKLEVKEIADIMLQEVFDRLKAKDINLQVTEKFKERVVDEGYNPSYGARPLRRAIMRLLEDSLAEKMLAGEVKEGDSAIVDVDSEGKVVVLNGQGGIPELSTPXXITV

SEQ ID NO: 7151 - protein, 668 aa, Zea mays
  unsure (1)..(668): unsure at all Xaa locations
XNSRANLTKLAEEGKLDPVVGRQPQIERVVQILGRRTKNNPCLIGEPGVGKTAIAEGLAQRISTGDVPETIEGKKVITLDMGLLVAGTKYRGEFEERLKKLMEEIKQSDEIILFIDEVHTLIGAGAAEGAIDAANILKPALARGELQCIGATTLDEYRKHIEKDPALERRFQPVKVPEPTVDETIEILRGLRERYEIHHKLRYTDEALIAAAKLSYQYISDRFLPDKAIDLIDEAGSRVRLQHAQVPEEARELDKELKQVTKQKNEAVRSQDFEKAGELRDREMELKAQITALIDKSKELSKAEEESGETGPMVNEEDIQHIVSSWTGIPVEKVSSDESDKLLKMEETLHKRVIGQDEAVVAISRSIRRARVGLKNPNRPIASFIFAGPTGVGKSELAKALAAYYFGSEEAMIRLDMSEFMERHTVSKLIGSPPGYVGYTEGGQLTEAVRRRPYTVVLFDEIEKAHPDVFNMMLQILEDGRLTDSKGRTVDFKNTLLIMTSNVGSSVIEKGGRKIGFDLDSDEKDSSYSRIKSLVIEEMKQYFRPEFLNRLDEMIVFRQLTKLEVKEIADIMLQEVFDRLKAKDINLQVTEKFKERVVDEGYNPSYGARPLRRAIMRLLEDSLAEKMLAGEVKEGDSAIVDVDSEGKVVVLNGQGGIPELSTPXXITV

SEQ ID NO: 7152 - protein, 555 aa, Zea mays
  unsure (1)..(555): unsure at all Xaa locations
XKAVLKEVTDSDGQTVLFIDEIHTVVGAGATNGAMDAGNLLKPMLGRGELRCIGATTLDEYRKYIEKDPALERRFQQVFVDQPSVEDTISILRGLRERYELHHGVRISDSALVAAAVLSDRYISGRFLPDKAIDLVDESAAKLKMEITSKPTALDEIDRAVLKLEMERLSLTNDTDKASRGRLSRLEAELSLLKDKQRQLTEQWEHEQAVMTKIQSIKEEIDRVNVEIQQAEREYDLNRAAKLKYGSLNALQRQLQATEKELDEYQSSGKSMLREEVTQDDIAEIVSRWTGIPVSKLKQSDREKLLYLEDELHKRVVGQDPAVKAVAEAIQRSRAGLSDPNRPIASFMFMGPTGVGKTELAKALASFMFNTEEAVVRIDMSEYMEKHSVSRLIGAPPGYVGYEEGGQLTEAVRRRPYSVVLFDEIEKAHLDVFNVFLQILDDGRVTDSQGRKVSFTNSIIIMTSNVGSQYILNNEEDGSSDSAYENIKRRVMDAARSVFRPEFMNRVDEYIVFKPLEREQINSIVKLQLCRVQKRIADRKXKLDVSPGAIEFLGX

SEQ ID NO: 7153 - protein, 967 aa, Zea mays
  unsure (1)..(967): unsure at all Xaa locations
GSSLIFLAFFCVCRCWRGSYGGVLLLHLVVRPHRRGPRRRGAEAGRAGGSLGRGGVREGGGGGAGAPAPAPGTQAGHAAGAQGGRRRRQPASAVFERFTERAVKAVVLSQREARGLGEPAVAPSHLLLGLVAEDRSSGGFLSSGINIERAREECRGIAASANADSATATSRPGSSGLDTDVPFAAPTKQVFDVAVVLSKNMGSSFVSPEHLAIALFSLDDPTTNNLLRSLGADPSHLASVAVDRLQAELAKDGRDPAEPSSXQSSKESPCSGRSAFSQSSKKKDKGALDQFCLDLTTQASGGFIDPIIGREEEIERVVQIVCRRTKNNPILLGEAGVGKTAIAEGLALRIANGDVPIYLVAKRILSLDVGLLIAGAKERGELESRVTNIIREVREAGDVILFIDEVHNLIGSGTVGKSKGSGLDIGNLLKPALARGELQCIAATTLDEHRMHFEKDKALARRFQPVLVDEPSQEDAVKILLGLREKYEAYHKCKFTLEAINAAVYLSARYIPDRQLPDKAIDLIDEAGSRARMESFNRKKEGQSSILLKSPDEYWQEIRAAQAMHEVVLSNKEKYSPNENAEESGSSNVEAPRRDNIESTSTSSLSADEPVVVGTEEIARVASLWSGIPVQQLTADDKKLLVGLDDELRKRVIGQDDAVVAISRAVKRSRVGLNDPDRPIATLLFCGPTGVGKTELTKALAASYFGSESAMLRLDMSEYMERHTVSKLIGSPPGYIGYGETGTLTEAVRRKPFTVVLLDEIEKAHPDIFNILLQIFEDGHLTDSQGRRVSFKNTLIVMTSNVGSTSISKGRXXSIGFLKEDTESGSYFAMKSLVMEELKAFFRPELLNRIDEMVVFRPLEKTQMLAILDIILKEVKGRLLALGIGLEVSDAMKDLICQEGYDKSYGARPLRRAVTHIIEDVISEAILFGEFKPGDTILMDIDAEGKPCXXGHLDQQIVQVSDPTRAI

SEQ ID NO: 7154 - protein, 622 aa, Zea mays
  unsure (1)..(622): unsure at all Xaa locations
XHVSAREVLRRRLQEGFTEAMVRMASLSRLTTGLLVAGTKYRGEFEVRLKKLMEEIKQNEDIILFIDXVHTLIGAGAAEGVIDAANILKPAFCNFPKICIGATTLDEYRKHIEKDPALERRFQPVKVPEPTMDETIQILRGLRERYELHHKLRYTDDALIAAAQLSYQYISDRFLPDKAIDLIDEAGSRVRLRHAQLPDEAKELDKELRQISKQKNEAVRGQDFEKAGELRDREMELKAQITAIIDKSKEMIKAETESGEVGPLVTEADIQHIVSSWTGIPVEKVSSDESDRLLKMEETLHTRIIGQDEAVKAISRAIRRARVGLKNPNRPIASFIFSGPTGVGKSELAKALAAYYFGSEEAMIRLDMSEFMERHTVSKLIGSPPGYVGYTEXGGQLTEAVRRRPYTVVLFDEIEKAHPDVFNMMLQILEDGRLTDSKGRTVDFKNTLLIMTSNVGSSVIEKGGRKIGFDLDYDEKDTSYNRIKSLVTEELKQYFRPEFLNRLDEMIVFRQLTKLEVKEIADIMLKEVFDRLKAKDINLQVTEKFRDRVVDEGYNPSYGARPLRRAIMRLLEDSLAEKMLAGEVKEGDSAIVDVDSDGKVIVLNGGSGVAEPLEPAPVPNRG

SEQ ID NO: 7155 - protein, 582 aa, Zea mays
AFERRFQQVFVAEPSVPDTVSILRGLKEKYEGHHGVRIQDRALVVAAQLSARYIMGRHLPDKAIDLVDEACANVRVQLDSQPEEIDNLERKRIQLEVELHALEKEKDKASKARLIEVRKELDDLRDKLQPLTMKYRKEKERIDEIRKLKQRREELQFTLQEAERRMDLARVADLKYGALQEIDAAISKLESETGENLMLTETVGPEQIAEVVSRWTGIPVTRLGQNDKERLVGLADRLHQRVVGQTEAVSAVAEAVLRSRAGLGRPQQPTGSFLFLGPTGVGKTELAKALAEQLFDDENLLVRIDMSEYMEQHSVARLIGAPPGYVGHEEGGQLTEQVRRRPYSVILFDEVEKAHVAVFNTLLQVLDDGRLTDGQGRTVDFRNTVIIMTSNLGAEHLLAGMVGKNSMKVARDLVMQEVRRHFRPELLNRLDEIVIFDPLSHEQLRKVARLQMKDVAVRLAERGIALAVTDAALDIILSLSYDPVYGARPIRRWIEKRVVTQLSKMLIQEEIDENCTVYIDAAPGKDELVYRVDRSGGLVNAETGMKSDILIQVPTSSTRSDAAQAVKKMRIMEEDEDGMDEE

SEQ ID NO: 7156 - protein, 582 aa, Zea mays; identical to SEQ ID NO: 7155

SEQ ID NO: 7157 - protein, 662 aa, Zea mays
  unsure (1)..(662): unsure at all Xaa locations
XSHRRCSPPPVVXDPARGAACSRLGLPQGMLNGVHTDAIDGRMAAAPSLASHVLCEWSRLSFDCRVYYQXVPLXQSEHTSSSMPQPNTLIGAGAAHGAGNALIIFSPAVARGELQCIGATTLDEYRKHVETDPALXERRFQPLKVPEPTVDETIHILRGLRERYELHHKLLYTDVALIAAAQLSYHYISDRFLPNKVIDLLDEAGKRVRRSHPQLPDETKYMNYDLRQITKQKNEAVRGQDFEKAGELRDREMELKAQITAIIDKSKEMIKAETESGDVGPLVTEADIQHIVSSWTGIPVEKVSSDESDRLLKMEETLHTRIIGQDEAVKAISRAIRRARVGLKNPNRPIASFIFSGPTGVGKSELAKALAAYYFGSEEAMIRLDMSEFMERHTVSKLIGSPPGYVGYTEGGQLTEAVRRRPYTVVLFDEIEKAHPDVFNMMLQILEDGRLTDSKGRTVDFKNTLLIMTSNVGSSVIEKGGRKIGFDLDYDEKDTSYNRIKSLVTEELKQYFRPEFLNRLDEMIVFRQLTKLEVKEIADIMLKEVFDRLKAKEINLQVTEKFRDRVVDEGYNPSYGARPLRRAIMRLLEDSLAEKMLAGEVKEGDSAIVDVDSDGKVIVLNGGSGVAEPLEPAPVPNRGQNHHWSEIWPSLQVSWVSRDGKN

SEQ ID NO: 7158 - protein, 461 aa, Zea mays
TDKASKDRLSRLEAELSLLKDKQRQLTEKWEHEKSVMTKIQSIKEEIDRVNVEIQQAEREYDLNRAAELKYGSLNALQRQLQTTEKELDEYQSSGKSMLREEVTQDDIAEIVSRWTGIPVSKLKQSDREKLLYLEEELHKRVVGQDPAVKAVAEAIQRSRAGLSDPNRPIASFMFMGPTGVGKTELAKALASFMFNTEEAVVRIDMSEYMEKHSVSRLIGAPPGYVGYEEGGQLTEAVRRRPYSVVLFDEIEKAHSDVFNVFLQILDDGRVTDSQGRKVSFTNTIIIMTSNVGSQYILNMDEDGSSDSAYENIKRRVMDAARSVFRPEFMNRVDEYIVFKPLEREQINSIVKLQLARVQKRIADRKIKLEVSPGAIEFLGSLGYDPNYGARPVKRVIQQHVENELAKGILRGDFKDEDSIFVDTQVTVPSNGQLPQQKLVFRKVGEQSKPAAEGEKFLPAV

SEQ ID NO: 7159 - protein, 324 aa, Zea mays
IDLTESARRGKLDPVIGRDDEVRRCIQILCRRTKNNPVIIGEPGVGKTAIAEGLAQRIVRGDVPEPLMNRRLISLDMGALLAGAKFRGDFEERLKAVLKEVTASNGQIILFIDEIHTVVGAGAAGGAMDAGNLLKPMLGRGELRCIGATTLDEYRKYIEKDAALERRFQQVYCGEPAVEDTISILRGLRERYELHHGVKISDGALVAAAVLSDRYITGRFLPDKAIDLVDEAAAKLKMEITSKPIELDEVDREIIRLEMEKLSLKNDTDKASKERLSKLEAELESLKQKQKSLSEHWEYEKSLMTRIRSIKEEFQRISLKLSLM

SEQ ID NO: 7160 - protein, 374 aa, Zea mays
  unsure (1)..(374): unsure at all Xaa locations
ADNKLVEFQQSGKSMLRXEVTDVDIAEIVSKWTGIPVSNLQQSEREKLLLLEDVLHKRVIGQDIAVKSVANAIRRSRAGLSDPNRPIASFMFMGPTGVGKTELGKTLAEFLFNTENALIRIDMSEYMEKHAVSRLVGAPPGYVGYEEGGQLTESVRRRPYSVVLFDEIDKALQDVFSILLQLLDDGRITDSQGRTVSFTNCVIIMTSNIGSPLILDTLRNTTDSKEAVYEIMKKQVIEMARQTFRPEFLNRIDEYIVFQPLDTTEINHIVEIQLNRVKNRLRQQKIHLQYTAEAVELLGSLGFDPNYGARPVKRVIQQMVENEIALGVLKGDFKEDDTVLVDVSSAAIAKGLAPQKKLVLQRVENGNDELVAND

SEQ ID NO: 7161 - protein, 404 aa, Zea mays
  unsure (1)..(404): unsure at all Xaa locations
PTRALVXARLLGHNYIGSEHLLLGLLREGEGVAARVLESLDADPNNITREAVVTTQSTREAVGAGVGGGSSGQKMPTLEEYGTNLTKLAEEGKLDPVVGRQDQIERVTQILGRRTKNNPCLIGEPGVGKTAIAEGLAQRISNGDVPETIEGKKVITLDMGLLVAGTKYRGEFEERLKKLMEEIKQNEDIILFIDEVHTLIGAGAAEGAIDAANILKPALARGELQCIGATTLDEYRKHIEKDPALERRFQPVKVPEPTVDETIQILRGLRERYELHHKLRYTDDALIAAAQLSYQYISDRFLPDKAIDLIDEAGSRVRLRHAQLPDEAKELDKELRQITKQKNEAVRGQDFEKAGELRDREMELKAQITAIIDKSKEMIKAETESGEVGPLVTEADIQHIVSSW

SEQ ID NO: 7162 - protein, 276 aa, Zea mays
GKSMLREEVTDVDIAEIVSKWTGIPVSNLQQSEREKLLLLEDVLHKRVIGQDIAVKSVANAIRRSRAGLSDPNRPIASFMFMGPTGVGKTELGKTLAEFLFNTENALIRIDMSEYMEKHAVSRLVGAPPGYVGYEEGGQLTESVRRRPYSVVLFDEIEKAHQEVFNILLQLLDDGRITDSQGRTVSFTNCVIIMTSNIGSPLILDTLRNTTDSKEAVYEIMKKQVIEMARQTFRPEFLNRIDEYIVFQPLDTTEINHIVEIQVDWVLNRVGRRCVG

SEQ ID NO: 7163 - protein, 438 aa, Zea mays
  unsure (1)..(438): unsure at all Xaa locations
PRGRXRAFKRKKEXTCSILSKSPDEYWQEIRAVQSTHEVALANRLKYSLDENDKDDGVNIEVIGDNKIASPSMPPTSVDEPILVGSEEIARVTSLWSGIPVQKLTADETKLLVGLDDELRKRVIGQDDAVVAISRAVKRSRVGLNDPDRPIATLLFCGPTGVGKTELTKALAASYFGSESAMIRLDMSEYMERHAVSKLIGSPPGYMGFGEGGTLTEAVRRTPFTVVLLDEIEKAHPDIFNILLQVFEDGHLTDSQGRRVSFKNTLIVMTSNVGSTSISSGRRSIGFSTQRDTEETTYAAMKSLVMEELKAFFRPELLNRLDEVVVFHPLEKTQMMAILNLILQEVKSRLLALGIGLEVSESMKILISQQGYDRSYGARPLRRAVTQLVEDVISEAILFGQFKPGDTILMGTDATGKPCLXXRLNDQTVQLSDTAPTI

SEQ ID NO: 7164 - protein, 360 aa, Zea mays
  unsure (1)..(360): unsure at all Xaa locations
LDAKVVGDTTGPIIGSSFVLILDNAKKHKKEHGDEFVSVEHILQAFTSDKRFGQQLFKDLKIVENDLKEAISAVRGSQRVTDQXLISLDMGALLAGAKFRGDFEERLKAVLKEVTASNGQIILFIDEIHTVVGAGAAGGAMDAGNLLKPMLGRGELRCIGATTLDEYRKYIEKDAALERRFQQVYCGEPAVEDTISILRGLRERYELHHGVKISDGALVAAAVLSDRYITGRFLPDKAIDLVDEAAAKLKMEITSKPIELDEVDREIIRLEMEKLSLKNDTDKASKERLSKLEAELESLKQKQKSLSEHWEYEKSLMTRIRSIKEETDRVNLEIEAAEREYDLNRAAELKYGTLLSLQKQ

SEQ ID NO: 7165 - protein, 286 aa, Zea mays
  unsure (1)..(286): unsure at all Xaa locations
XQEAERRMDLARVADLKYGALQEIDAAISKLESETGENLMLTETVGPEQIAEVVSRWTGIPVTRLGQNDKERLVGLADRLHQRVVGQTEAVSAVAEAVLRSRAGLGRPQQPTGSFLFLGPTGVGKTELAKALAEQLFDDENLLVRIDMSEYMEQHSVARLIGAPPGYVGHEEGGQLTEQVRRRPYSVILFDEVEKAHVAVFNTLLQVLDDGRLTDGQGRTVDFRNTVIIMTSNLGAEHLLAGMVGKNSMKVARDLVMQEVRRHFRPELLNRLDEIVIFDPLSHEQX

SEQ ID NO: 7166 - protein, 238 aa, Zea mays
  unsure (1)..(238): unsure at all Xaa locations
EAGVSAARVRAELEKLRGGEGRRVESASGDTNFQALKTYGRDLVEQAGKLDPVIGRDEEIRRVVRILSRRTKNNPVLIGEPGVGKTAVVEGLAQRIVRGDVPSNLLDVRLIALDMGALVAGAKYRGEFEERLKAVLKEVEEAEGKVILFIDEIHLVLGAGRTEGSMDAANLFKPMLARGQLMCIGATTLEEYRMYVENDAVFERRFQQVFVAEPSVPDPXSILRGLKEKYEVHHGVRX

SEQ ID NO: 7167 - protein, 307 aa, Zea mays
  unsure (1)..(307): unsure at all Xaa locations
ATTGKLDPVVGRQDQIERVTQILGKRTKNNPCLXGEPGVGKTPIAEGLAQRIANWDVPKTIEGKKVITLDMGLLVAGTKYRGEFEERLKKLMDEIKQNEDIILFIDEVHTLIGAGAAEXCIGATTLDEYRKHIEKDPSLERRFQPVKVPEPTVDETIQILRGLRERYELHHKLRYTDDALIAAAQLSYQYISDRFLPDKAIDLIDEAGSRVRLRHAQLPDEAKELDKELRQITKQKNEAVCGQDFEKYGLARVYCYLVQRRQRRSAPTSLATPIWLIPSIMLFPFEINILLPILPFVSSSCFLFYNL

SEQ ID NO: 7168 - protein, 859 aa, Novosphingobium aromaticivorans
MNLEKFTDRAKGFLQAAQTVAIRMNHQRITPDHILKALLEDSEGMASGLIQRAGGNAALAQTEVDKALAKIPAVSGSGAQATPGLDNDAVRVLDSAEQIAAKSNDSFVTVERMLVALTLATTTSAGQALKAANVTAQALEAAITQLRGGRTADSASAENAYDAMKKYARDLTEAAREGKLDPVIGRDEEIRRTVQILARRTKNNPALIGEPGVGKTAIAEGLALRIANGDVPDSLKDRRLMALDMGSLIAGAKYRGEFEERLKAVLDEVKGAEGEIILFIDEMHTLIGAGKSEGAMDAGNLLKPALARGELHCIGATTLDEYQKYVEKDPALQRRFQPVFVGEPTVEDTISILRGIKDKYELHHGVRIADNAIVAAATLSNRYISDRFLPDKAIDLMDEAASRIRMEVESKPEEIEKLDRRIIQMKIEEMALAKETDQASKDRLATLREELANQEQQSAELTTRWQNERDKIAAEGKVKEALDAARSELEVAQRNGDLAKAGELAYGRIPELERQLAEAQGVSQNAMLREEVTAEDIAAVVSKWTGVPVDRMMEGEREKLLHMEEALGKRVIGQKDAVLAVSKAVRRARAGLQDPNRPLGSFLFLGPTGVGKTELTKALAGFLFDDDNAMVRIDMSEFMEKHSVSRLIGAPPGYVGYDEGGVLTEAIRRRPYQVVLFDEVEKAHSDVFNVLLQVLDDGRLTDGQGRVVDFTNTLIILTSNLGSQYLANLEEGQDVQSVEPQVMDVVRAHFRPEFLNRLDEIILFHRLGHEHMAPIVDIQVGRVANLLKDRKIVLDLTDAAKRWLGRVGYDPVYGARPLKRAVQRYLQDPLAEKLLGGEVPDGSTVRIDEGDGALSFVIA

SEQ ID NO: 7169 - protein, 803 aa, Schizosaccharomyces pombe
MNILPKSIPIRIQSLRRYQGSLKTSLRALSTRPIFEKRLLAETPFSIRPSNASVLIAKRSPKFGWKQVRFYAANPNGGNFRMDLGGGRKQGAALEEYGTDLTALAKQGKLDPVIGREEEIQRTIQILSRRTKNNPALVGPAGVGKTAIMEGLASRIIRGEVPESMKDKRVIVLDLGALISGAKFRGDFEERLKSVLSDLEGAEGKVILFVDEMHLLLGFGKAEGSIDASNLLKPALARGKLHCCGATTLEEYRKYIEKDAALARRFQAVMVNEPSVADTISILRGLKERYEVHHGVRITDDALVTAATYSARYITDRFLPDKAIDLVDEACSSLRLQQESKPDELRRLDRQIMTIQIELESLRKETDTTSVERREKLESKLTDLKEEQDKLSAAWEEERKLLDSIKKAKTELEQARIELERTQREGNYARASELQYAIIPELERSVPKEEKTLEEKKPSMVHDSVTSDDIAVVVSRATGIPTTNLMRGERDKLLNMEQTIGKKIIGQDEALKAIADAVRLSRAGLQNTNRPLASFLFLGPTGVGKTALTKALAEFLFDTDKAMIRFDMSEFQEKHTIARLIGSPPGYIGYEESGELTEAVRRKPYAVLLFDELEKAHHDITNLLLQVLDEGFLTDSQGRKVDFRSTLIVMTSNLGSDILVADPSTTVTPKSRDAVMDVVQKYYPPEFLNRIDDQIVFNKLSEKNLEDIVNVRLDEVQQRLNDRRIILTVTEAARKWLAEKGYSPAYGARPLNRLIQKRILNTMAMKIIQGEIKSDENVVIDVLDGELEFKANKLEPQSTSHED

SEQ ID NO: 7170 - protein, 160 aa, Saccharomyces cerevisiae
LVMGAVRQHFRPEFLNRISSIVIFNKLSRKAIHKIVDIRLKEIEERFEQNDKHYKLNLTQEAKDFLAKYGYSDDMGARPLNRLIQNEILNKLALRILKNEIKDKETVNVVLKKGKSRDENVPEEAEECLEVLPNHEATIGADTLGDDDNEDSMEIDDDLD

SEQ ID NO: 7171 - protein, 826 aa, Desulfitobacterium hafniense
MNEKYTEKALKALQFASDEAKRMGSNVIGTEHLLLGLVAEGEGIAAKSLHGIGVTPEKIREQIGNLTGIGQPFTGEVSLTPRVKRVMELAHEEARRHGVSYIGTEHLLLGLLMEGEGVAARVLRNLGVSPERIWKQVVQLLGGQPDDIPMPGGAPGPGTAKNNGAANTPALNEFGRDLTQQAREGRLDPVVGREDEIERVVQVLSRRTKNNPVLIGEPGVGKTAIAEGLAQRIINNKVPETLAGKRVVTLDLSAVVAGSKYRGEFEERLKKVMEEIRVDGRIIVFIDELHTLIGAGAAEGAIDAANILKPALARGELQCIGATTLDEYRKYIEKDPALERRFQPITVGEPTVEQAVQILLGLRDRYEAHHRTQITDEAVEAAVKMSDRYISDRFLPDKAIDLMDEAASRVRLAAFTAPPDLKSLEEKIEALKSEKEAAVLGQEFEKAAKFRDEEHQLREELAQLRNTWESKRDISQSQVTADDIAQIVASWTGIPVKKLAQEESERLLGLEETLHQRVVGQEDAVKAVSRAVRRARAGLKDPKRPVGSFIFLGPTGVGKTELARALAEALFGEEDALIRIDMSEYMEKHAVSRLVGAPPGYIGHDEGGQLTEAIRRKPYSVILLDEIEKAHPEVFNILLQVLEDGRLTDTKGRTVDFRNAVIIMTSNVGASFMKKEALGFASRRDEETEYKNMSSRVMEELKKTFRPEFLNRVDEIVVFHSLQTEGLLKITEILMKQVNGRLQEQGYDLQVEKSALELIAKEGNDPTFGARPLRRAIQRLIEDSLSEKILLGEFKSGDKIKVEAVEDKMKFAKVRARKSKKAEAAE

SEQ ID NO: 7172 - protein, 354 aa, Desulfitobacterium hafniense
ELEKQLKAAQEAETQGFKLLQDKVTAEEIAEVVARWTGIPVAKMLEGERDKLLKMEQALHARVVGQDEAVRVVSDAVRRSRAGLSDPNRPSGSFLFLGPTGVGKTELCKALAEFLFDSSDAMIRIDMSEFMEKHAVSRLVGAPPGYVGYEEGGYLTEAVRRRPYSVILLDEVEKAHPDVFNILLQVLDDGRLTDGQGRTVDFRNTVIVMTSNLGSQMIQELSSDSSPEAYTQMKAAVMGVVQTHFRPEFINRLDDIVVFHPLEKSQIREIAKIQLHGLEKRLGERGLKLALSEAALTLIGNVGFDPVYGARPLKRAVQQQIENPLAQKILSGEFVSGDTIRVDAAGGHLVFAKG

SEQ ID NO: 7173 - protein, 384 aa, Desulfitobacterium hafniense
MLKEVQEREDIILFIDELHTVVGAGAAEGAMDAGNMLKPMLARGELHMVGATTLDEYRKYIEKDAALERRFQPVTVGAPSVEDTISILRGLKERYETHHGVRITDGAIIAAAVLSDRYISDRFLPDKAIDLIDEAAARMRMEITSDPYELDQIKRRILQLEIEREALKKEKDEGSKERLEKIEEDLANLKEERSALEAQLQGEREVLTRINSLKEDIDQNRLKMEQAQQAFDYNKAAELQYGILPKLEKELNALEEQLRNRKNTLLKQEVGEEDIAEVVAKWTQVPVAKLLESEMDKLVHMEARIHQRVIGQEEAVKAVADAVRRSRAGLQDPNRPLGSFLFLGPTGVGKTELAKALAEFLFDDDQGSCASTCPNIWRSIPFPA

SEQ ID NO: 7174 - protein, 232 aa, Desulfitobacterium hafniense
MRIDMSEYMEKHTVSRLIGAPPGYVGYEEGGQLTEAVRRKPYSVVLFDEVEKAHGDVFNVLLQLLDDGRLTDGQGRVVNFKNTVVILTSNIASPLIQELTASGAAQEVLRSRVTEELRLHFRPEFLNRLDEIIVFHPLGQEHIGSIVQIQINKLRDYLAPRKMTLELSQGALNKIIQQGYDPIYGARPLKRVIQQNLQNPLAMKILQGILHEGDHVLVDLDPQGQLLFKKSE

SEQ ID NO: 7175 - protein, 810 aa, Neurospora crassa
MQTRRQLLSTATRRISEASRASLSRTTRQFPRAPALGVTVPALNATHLASSLRLLPTIATRSYANGRPRPPGGTHRMNLGGEDEKPALEQYGIDLTAKAREGKLDPVIGRAAEIQRTIQILSRRTKNNPVLIGCAGVGKTAILEGLALEIVKGAVPESIKNRRVISLDLGSLIAGAKFRGDFEERLKKVLGEVQEANGEVILFIDELHTLLGLGKAEGSIDASNLLKPALSRGELQCCGATTMTEYRQIEKDVALARRFQPIIVSEPTVEDTISILRGIKEKYEVHHGVRITDGALVAAATYSNRYITDRFLPDKAIDLMDEAASSLRLQQESKPDDIQRLDQKIMTIQIELESLRKEKDVASVERREKLEADLKKYQDEVAVLTERWLKEKAEIDSIKQTQAELDRARIELEQAQRTGNFARASELRFGVIPNLEKKLPKDGERPTRDLSLIHDSVTADDIANVVSRITGIPISKLSSGHTERLIHMEDILRESVRGQDEALKAVADAVRMQRAGLSGENRPLASFFFLGPTGVGKTELCKKLAGFLFSTETAVVRFDMSEFQEKHTISRLIGAPSGYVGYEDAGQLTEAVRRKPYAVILLDEFEKAHRDISALLLQVLDEGYLTDAQGHKVDFKNTIIVLTSNLGADILVGANPMVPYKETEDGDIHPDVKQAVMDVVASQYPPEFLNRIDSFIIFKRLAMEALRDIVDIRLKELQERLNDRRITLDVPEEVRQWLAERGYDPKFGARPLNRLITTEIGNGLADKIIRGQIKSGDKAVVEIKEDRSGLNVYAEQQEQPPAAEEAEAEA

SEQ ID NO: 7176 - protein, 819 aa, Guillardia theta
MFERFTEKAIKVIMLAQEEARRLGHNFVGTEQILLGLIGEGTGIAAKVLKSMGVNLKDARVEVEKIIGRGSGFVAVEIPFTPRAKRVLELSLEEARQLGHNYIGTEHLLLGLIREGEGVAARVLENLALDLTKVRTQVIRLLGDTAEVSATNGQTKGKTPTLEEFGSNLTQKAAEGKLDPVIGRQKEIERVIQILGRRTKNNPILIGEPGVGKTAIAEGLAQRINNRDVPDILEDKRVVTLDIGLLVAGTKYRGEFEERLKKIIDEIRVANNVILVIDEVHTLIGAGAAEGAIDAANILKPALARGEMQCIGATTLEEYRKHIEKDSALERRFQPVMVGEPSVEETIEILYGLRDRYEKHHKLVISDEALSAAAKFADQYIADRFLPDKAIDLIDEAGSRVRLMNSQLPPAARELDKELREILKQKDEAVRSQDFETAGQLRDREMEIKAQIAAIAHSKKGDEENTKEVSVVTEEDIAQIVAAWTGIPVNKMTRSESEKLLQMEETLHGRIIGQDEAVVAVSKAIRRARVGLKNPNRPIASFIFSGPTGVGKTELTKALASYFFGSEEAMVRLDMSEYMERHTVSKLIGSPPGYVGYNEGGQLTESVRRRPYTVVLFDEIEKGHPDVFNLLLQILEDGRLTDSKGRTVDFKNTLLILTSNVGSKVIEKGGGGLGFDLSEDQTESQYGRIKALVNEELKQYFRPEFLNRLDEIIVFRQLTKDEVGEIAEIMLKEVFTRISEKGIQLEVTARFKTHLINEGYNPIYGARPLRRAVMRLLEDTLSEEFLAEKIKEGDTAVVDVDDDGKVKVLLGEKLELVAN

SEQ ID NO: 7177 - protein, 765 aa, Plasmodium falciparum
MIILNNLYCTKELIIIFIKSEYLALKYNNNFIMPIHLLLGLLLTDNLCTKFLKINKKIINNKIILSLLNKYKYNNKNIININFSNKVINILIKLNFNFKINSFNLLLLLLEEKNNNKDINYLFKYLNLNFSNLNLNNYIKTNIFSNNIRIKLKEISVNLLNLNYIYNNNLNFYKQQYIQLLQILNLKIKKHIILEGVNDNIFIFLQLLINNIKNKIIPIYLKYTEIWVLNDLLTYDIQTLIYKILNISKYFTNKYKLILIIKNIEIFNLSDNINNDNNKLYYLFLLLNKLYGYNIHIIIVTNKKEYNTYFKYNIIKDSYFYKIRIKDLSILQTFLIIKNNIYKYINYYKININNYIIYELINLSKKYIKPLILPTTPLILLENSCSNKYLLNNKISYSNFNYLFTYNNNIIYNNKNNNLTIEDIKNSISNYLNISKTILFKDNKLTKLNLTKLENYLYNHIYGQNHIFNKIIPFIKQNFIGLKNKNKPIGSWILCGPSGTGKTELAKILSKQLFGSEKELIRFDMSEYMEKHSISRLIGSPPGYVGYSEGGQLTEQVYKKPNSVILFDEIEKAHPDIYNIMLQILDEGRLTDSTGKLIDFTHTIILLTSNLGCPKNYDLYLKNKNFLSKSDLKEIEKNIKININNYFKPELLNRLTNILIFNPLNINNLLFIFNKFINELKIKLYLNKLNIIIHINKELKYFLVKLMYNPLYGARPLKRILELIFDKSISDLLLTYNKHYFIKNKYILYYYLNKYYKLNFNIYLL

SEQ ID NO: 7178 - protein, 766 aa, Plasmodium falciparum
MIILNNLYCTKELIIIFIKSEYLALKYNNNFIMPIHLLLGLLLTDNLCTKFLKINKKIINNKIILSLLNKYKYNNKNIININFSNKVINILIKLNNFNFKINSFNLLLLLLEEKNNNKDINYLFKYLNLNFSNLNLNNYIKTNIFSNNIRIKLKEISVNLLNLNYIYNNNLNFYKQQYIQLLQILNLKIKKHIILEGVNDNIFIFLQLLINNIKNKIIPIYLKYTEIWVLNDLLTYDIQTLIYKILNISKYFTNKYKLILIIKNIEIFNLSDNINNDNNKLYYLFLLLNKLYGYNIHIIIVTNKKEYNTYFKYNIIKDSYFYKIRIKDLSILQTFLIIKNNIYKYINYYKININNYIIYELINLSKKYIKPLILPTTPLILLENSCSNKYLLNNKISYSNFNYLFTYNNNIIYNNKNNNLTIEDIKNSISNYLNISKTILFKDNKLTKLNLTKLENYLYNHIYGQNHIFNKIIPFIKQNFIGLKNKNKPIGSWILCGPSGTGKTELAKILSKQLFGSEKELIRFDMSEYMEKHSISRLIGSPPGYVGYSEGGQLTEQVYKKPNSVILFDEIEKAHPDIYNIMLQILDEGRLTDSTGKLIDFTHTIILLTSNLGCPKNYDLYLKNKNFLSKSDLKEIEKNIKININNYFKPELLNRLTNILIFNPLNINNLLFIFNKFINELKIKLYLNKLNIIIHINKELKYFLVKLMYNPLYGARPLKRILELIFDKSISDLLLTYNKHYFIKNKYILYYYLNKYYKLNFNIYLL

SEQ ID NO: 7179 - protein, 842 aa, Prochlorococcus marinus subsp. pastoris str. CCMP1378
MFERFTEKAIKVIMLAQEEARRLGHNFVGTEQILLGLIGEGTGVAAKVLKSLGVNLKDSRIEVEKIIGRGSGFVAVEIPFTPRAKRVLELSLEEARQLGHNYIGTEHLLLGLIREGEGVAARVLENLGIDLTKVRTQVIRMLGETAEVGSGGSSNKGNLKTATLDEFGTNLTKLASESKLDPVVGRYAEIDRVIQILGRRTKNNPVLIGEPGVGKTAIAEGLAQRIQLGEIPDILEDKRVLTLDIGLLVAGTKYRGEFEERLKKIMEEIKSAGNVILVIDEVHTLIGAGAAEGAIDAANILKPALARGELQCIGATTLDEYRKHIERDAALERRFQPVMVGEPSIADTIEILKGLRERYEQHHRLKITDNALEAAAHLGDRYISDRFLPDKAIDLIDEAGSRVRLINSKLPPEAKQIDKELRQVQKQKEESVRDQNFDQAGVLREKEIELSAKIKELLENKKESSEKNEISNANETTENNSTIIHDPLVSEEDVAHIVASWTGVPVQKLTETESVKLLNMEETLHQRLIGQDEAVKAVSKAIRRARVGLQNPNRPIASFIFSGPTGVGKTELTKSLASYFFGSEEAMIRLDMSEFMERHTVSKLIGSPPGYVGFNEGGQLTEAVRRRPYTVVLFDEVEKAHPDVFNLLLQLLEDGRLTDSKGRTVDFKNTLLIMTSNIGSKVIEKGGGGLGFEFSGDSVEDSQYNRIKSLVNEELKQYFRPEFLNRLDEIIVFRQLSKNEVKDIAEIMLKEVFSRLNEKGIKLDVTDAFKERLVEEGYNPAYGARPLRRAVMRLLEDSLAEEVLSGRIKDGDKAIVDIDENKKVIVNISTEESSQELAGANF

SEQ ID NO: 7180 - protein, 919 aa, Prochlorococcus marinus subsp. pastoris str. CCMP1378
MRETLTSNPELFSDISWNLLLLGEETAKKWDHSEFNIEHIIHTLFTSSEFFSFIEKLSIDQNTVLDITEEFLEETPINDSDIFTIGEELEILLDNANQIKTQWGSKFIDIPHLLIALGSDPRIGNYVFQEGDLSVEQLEEELKFSPNIIQRQNYIENKKYISDEDKILINKSIDESDKEELIKESKAIIPSPKSNLIIKTKQKTEENVLSLYGKDLTESAEKGLLDPVIGRGDEINNVMRVLSRRSKNNPILIGHPGVGKTSIAKLLAQLIVEKKVPDLLKNSKIISLDLGALVSGTKFRGQLEERLSLILNEIKDSNQGIILFIDEIHTIITSDRTTTDISNILKPLLTDGELRCIGTTTPEKFRESIEKDQSLNNCFQKILVNEPSVELSAKILQGIKKKYELHHGIRITEEAINCSARLADRYISDKCLPDKAIDLIDEAAAQLKIESNIKPQTIIDEEKNIDTIESKLQNIFPENIEEREKLLESKELSIKKLNEITNDWENDREKMEQLFFLLKEENRLILKIEELSIHSDEIDNFDNLNNLEAELNEVECEIKNVEISCQKLQRNRNYNLKYQVEPDDIADVISKITGIPIAKVVSNERKKLVNLELEISEKVIGQEKAIKAVSSAIRRARVGMKNPKRPIGSFLFMGPTGVGKTELAKSLASSLFDEEEALLRLDMSEYMEKNAVARLLGAPPGYVGYEEGGQLTEAVRRKPYSVILLDEIEKAHSEVFNILLQVLDEGRLTDSQGRTVDFKNTVIIMTSNLAGKIILEDSKIITNQKENSELRKQTLQDSINKSLSSIFRPEFLNRIDEIVKFDTLSIDQLQKIILLQIEDLKKLLLEQGIKINIDKRVIQKIANDSYQPEYGARPLGRELRRQIENPLASKLLEDNFKNKKNISVKISPSKKDEILFKPS

SEQ ID NO: 7181 - protein, 880 aa, Nostoc punctiforme
MQPTNPEQFTEKAWEALVRTPEIAKQFQHQQIESEHLMLALLEQEGLASSIFNKAGVNVQKLHERTIDFINRQPKVSGASSGSVYIGHSLERLLDRAEQYRKEFGDEYISIEHLILAFAKDDRFGKGLFQEFGLDEKKLRNIIQQIRGSQKVTDQNPEVKYEALEKYGRDLTQLAHEGILDPVIGRDEEIRRTIQILSRRTKNNPVLIGEPGVGKTAIVEGLAQRIVSGDVPESLRVGIAGRRHRKLIALDMGALIAGAKYRGEFEERLKAVLKEIQEAQGQIVLFIDEIHTVVGAGATQGSMDASNLLKPMLARGELRCIGATTLDEYRKYIEKDAALERRFQQVYVDQPSVEDTISILRGLKERYELHHGVKISDSALVAAATLSARYISDRFLPDKAIDLVDEAAAKLKMEITSKPEELDEIDRKILQLEMERLSLQKETDSASRERLERLERELAELKERQDALNAQWQAEKQIIDRIRQIRQEIERVNVEIQQAERDYDLNRAAELKYSKLTELQRQLKEAEARLAQIQTSGKSLLREEVTEADIAEIISKWTGIPVSRLVESEMQKLLHLEEELHKRVIGQDEAVRAVADAIQRSRAGLADPNRPIASFIFLGPTGVGKTELAKALAEYLFDTEDALVRIDMSEYMEKHAVARLIGAPPGYVGYEEGGQLTEAIRRRPYSVILFDEIEKAHPDVFNVLLQILDDGRLTDSQGRTVDFKNTIAIMTSNIGSIYILDVAGDDSKYEQMRDRVMEAVRESFRPEFLNRIDEIIIFHSLRKDELREIVKLQVQRLEERLRERKLSLKISDQALDWIVQVGYDPVYGARPLKRAIQRELETPIAKAILRGEFHEGDTIYVHVEHERLVLKRLSPELVNA

SEQ ID NO: 7182 - protein, 872 aa, Nostoc punctiforme
MQPTNPNQFTEKAWEAIAHTPDIVKQYQQQQIESEHLMKALLEQDGLATGILTKAGVNLQKLRDRTEQFFQRQPKVSGTSSSVYLGRSLDTLLDRADVYRKEFQDEYISIEHLLLAYAKDDRFGKALFQEFGLDEGKLKDIIKQVRGSQKVTDQNPEGKYEALEKYGRDLTEAARKGQLDPVIGRDDEIRRTVQILSRRTKNNPVLIGEPGVGKTAIAEGLAQRIIAGDVPQSLKDRKLISLDMGALIAGAKFRGEFEERLKAVLKEVTESGGNIVLFIDEIHTVVGAGATQGAMDAGNLLKPMLARGELRCIGATTLDEYRKHIEKDAALERRFQQVYVDQPSVEDSISILRGLRERYENHHGVKISDSALVAAAVLSSRYISDRFLPDKAIDLVDEAAARLKMEITSKPEELDEIDRKILQLEMEKLSLQKESDAASRERLERLEKEIADLKEEQRTLNTQWQSEKDIIDKIQSVKKEIERVNLEIQQAERDYDLNRAAELKYGNLTSLHRQLEAVEAELASAQRSGKSLLREEVTEADIAEIISKWTGIPISKLVESEKEKLLHLEDELHHRVIGQEEAVTAVADAIQRSRAGLADPNRPIASFIFLGPTGVGKTELAKALAGYMFDSEDALVRIDMSEYMEKHAVSRLIGAPPGYVGYEEGGQLTEAIRRRPYSVILFDEIEKAHPDVFNIFLQILDDGRVTDAQGHKVDFKNAIIIMTSNIGSQYILDVAGDNAHYDEMRRRVMEAMRNSFRPEFLNRIDEIIIFHGLDKKELRQIVLLQVQRLRQRLADRKISLKLSDAALDFLAEVGYDPVYGARPLKRAIQRELETQIAKAILRGEFTDGNTIFVDVQNERLSFSRLPAEVFTS

SEQ ID NO: 7183 - protein, 879 aa, Nostoc punctiforme
MQPTDPNKFTDKAWEAIVKSQDIVRAYQQQQLDVEHLIIALLEEPTSLAIRILARSEVDPIRFQQQLEAFIQRQPKVGKSDQLYLSRSLDVLLDKAEEARVRMKDSYISVEHILLAFAEDDRIGRKILKSFSADAAKLEATIKAVRGSQKVTDQSPESRYEALQKFGRDLTEQAKAGKLDPVIGRDDEIRRVIQVLSRRSKNNPVLIGEPGVGKTAIAEALAQRMVNGDVPESLKNRQLISLDIGSLIAGAKLRGEFEERLKAVLKEVMDSNGQIVLFIDELHTVVGTGSSQQGAMDAGNLLKPMLARGELRCIGATTLDEFRKHIEKDAALERRFQQVFVDQPSVENTISILRGLKERYEVHHNVKISDSALVAAATLSARYISDRFLPDKAIDLVDEAAAQLKMEITSKPAELETIDRRLMQLEMEKLSLAGEEKGTPQTKERLERIEQEIANLTEKQQIFNEQWQGEKQILEAISALKKEEDALRVQIEQAERAYDLNKAAQLKYGKLEGVQHEREAKEASLLEIQNQGSTLLREQVTEADIAEIVAKWTGIPVNRLLESERQKLLQLESHLHQRVIGQEEAVEAVAAAIRRARAGMKDPSRPIGSFLFMGPTGVGKTELARALAQFLFDSDDALVRLDMSEYMEKHSVSRLVGAPPGYVGYEEGGQLSEAVRRRPYSVVLLDEVEKAHPDVFNILLQVLDDGRITDSQGRTVDFRNSVIVMTSNIGSEHILDVSGDSQYETMRKRVMEGLRSHFRPEFLNRVDDIILFHTLNRTEMRQIIRIQLKRVENLLREQKIFFEISQAACDHLVESGYDPVYGARPLKRAIQREVENPLATKLLENTFISGDTILIDKNENGLSFSKKVLVKVSVPQIAT

SEQ ID NO: 7184 - protein, 822 aa, Nostoc punctiforme
MFERFTEKAIKVIMLAQEEARRLGHNFVGTEQILLGLIGEGTGVAAKVLKSMGVNLKDARIEVEKIIGRGSGFVAVEIPFTPRAKRVLELSLEEARQLGHNYIGTEHLLLGLIREGEGVAARVLENLGVDLSKVRTQVIRMLGETAEVSPGGSSGRTKTPTLDEFGSNLTQMAIDNKLDPVVGRAKEIERVIQILGRRTKNNPVLIGEPGVGKTAIAEGLASRIATKDVPDILEDKRVVTLDIGLLVAGTKYRGEFEERLKKIMDEIRSAGNVILVIDEVHTLIGAGAAEGAIDAANILKPALARGELQCIGATTLDEYRKHIERDAALERRFQPVMVGEPTVDETIEILYGLRERYEQHHKLKISDEALVAAAKLSDRYISDRYLPDKAIDLVDEAGSRVRLINSQLPPAAKELDKELRQILKEKDDAVRSQDFDKAGELRDREMEIKAEIRAIAQSKTNATGTEGEEPVVTEEDIAHIVASWTGVPVNKLTESESEKLLHMEDTLHQRLIGQDEAVRAVSRAIRRARVGLKNPNRPIASFVFSGPTGVGKTELAKSLAAYFFGSEEAMIRLDMSEYMERHTVSKLIGSPPGYVGYNEGGQLTEAVRRRPYTVVLFDEIEKAHPDVFNMLLQILEDGRLTDAKGRTVDFKNTLLILTSNIGSKVIEKGGSGIGFEFSEDASESTYNRIRSLVNEELKQYFRPEFLNRLDEIIVFRQLSKPEVTQIAEIMLKEVFGRLTEKGITLEVTDRFKDRLIQEGYSPSYGARPLRRAIMRLLEDSLAEEILSGRIKDGDTALVDVDENGVVQVSSQQRRELLPQGVE

SEQ ID NO: 7185 - protein, 836 aa, Nostoc punctiforme
MRVNFISPKVQAAREQEPIMFEHFTSEAIRVIMLAQEEARRLGHNFVGTEQILLGLMGEGTGVAAKVLAELGVTLKDARREVEKIIGRGSGFVPPEIPFTPKVKSLFEQSFKEAHSLGQNYINTEHLLLGLTEAGEGVAAKVLQNLGVDFKSVRSAIVRRLGENAPAFAGSGSQKRTQPLTMEEYGRNLTKLAQEGRLDPVVGREKEIERAIQILGRRTKNNPVLIGEPGVGKTAIAEGLAQRIINQDVPETLQDKQVISLDMGSLVAGTRFRGDFEERIKKVVEEVRTVGNIILVIDEIHTLVGAGGTEGGLDAANILKPALARGELQCIGATTLDEYRKHIERDAALERRFQPIMVGEPSVEETVQILYGLRGAYEQHHKVTILDSALVAAAELSDRYISDRFLPDKAIDLIDEAGSRVRLRNSQSSPNKELKRELAGVTKEKEAAVRVQDFDKAVTLRDQELKLAEQLQATFTPNEQPVNSTVVDEEDIAQIVASWTGVPVNKLTESESELLLHLEDTLHQRLIGQEQAVSAVSRGIRRARVGLKNPNRPIASFIFSGPTGVGKTELAKALASYFFGAEDSMIRLDMSEYMESHTVAKLIGSPPGYVGYDEGGQLTEAVRRKPYTVLLFDEIEKAHPDVFNMLLQILDDGHLTDAKGRKVDFKNTLIILTSNIGSKVIEKGGSGLGFDFDTQANASYNRIRTLVNEELKAYFRPEFLNRLDEIIVFTQLSRDEVKQIAEIMLREVSKRLTEKGITLEVSDRFKELVVQEGYNPSYGARPLRRAIMRLLEDSLAEAMLSGEITDGDTALIDVDDDSQVRVQKLEKRELLLANVG

SEQ ID NO: 7186 - protein, 856 aa, Haemophilus influenzae Rd
MNIEKFTTKFQEALSERQSLAIGKDNQFIEPVHLLTALLNQQGGSIAPILTASGVNVALLRNELKTELNKLPQVIGNGGDVQLSRQLINLLNLCDKFAQQNQDKFISSELFLFAALEERGTISDILKKCGAKKEQISQAIQHIRGGQNVNDQNAEESRQALEKYTIDLTARAESGKLDPVIGRDEEIRRAIQVLQRRTKNNPVLIGEPGVGKTAIVEGLAQRIVNGEVPEGLKNKRVLSLDMGALIAGAKYRGEFEERLKAVLNELSKEEGRVILFIDEIHTMVGAGKTDGAMDAGNLLKPSLARGELHCVGATTLDEYRQYIEKDAALERRFQKVFVDEPSVEDTIAILRGLKERYEIHHHVDITDPAIVAAATLSHRYISDRQLPDKAIDLIDEAASSIRMEIDSKPEPLDRLERRIIQLKLEQQALQKEEDEASRKRLEMLEKELAEKEREYAELEEVWKSEKATLSGSQHIKQELDTAKTELEQARRAGDLAKMSELQYGRIPDLEKQLEQAETSEGKEMTLLRYRVTDEEIAEVLSKATGIPVSKMMEGEKEKLLRMEDELHKRVIGQEEAVDAVANAIRRSRAGLSDPNRPIGSFLFLGPTGVGKTELCKTLAKFLFDSEDAMVRIDMSEFMEKHSVSRLVGAPPGYVGYEEGGYLTEAVRRRPYSVILLDEVEKAHADVFNILLQVLDDGRLTDGQGRTVDFRNTVVIMTSNLGSDLIQGNKDESYSEMKALVMSVVSQHFRPEFINRIDETVVFHPLGKENIRAIASIQLERLAKRMETRGYELVFTDALLDFIGEVGYDPIYGARPLKRAIQQEIENSLAQQILSGALLPGKVVTIDYANAEVQARQ

SEQ ID NO: 7187 - protein, 1122 aa, Plasmodium yoelii yoelii
MILRFVLNIKISKKVSFLNNTYNLNKYNEFKIKRNKYIKIYNSKNDKTNKFLFDEYDENCIKALIMAREVAKNNNENEVLLKHLLVAIIKTDSHIIDHIFKYFNISLQHFINKFNTEIAKNSFKKTGQEPYDNNHIPPEQIEFQKCSTKNNDQEKTLINNIIGNKIKDEEYNHIVTNNLDKEATKNNDTEASKNNSTESTKDNSTEATNNENCESEHVTDVSSSYNKMQENGIDTKLAAHEKDEKQNDEKQNEKQNDEPFLVNDNSGKRNNQKELKSNKEIKFSENCKLVLQNAILEAKKKNKIFVNLTDILISIINIAQENKECDFVKYLNELNISLSDLKKQVTNYDENNLNSNLIHCPINKNPIKNDEEQDGNKNLNNYSDKQNKNMTDQPNNIINNMNNEYINQEKYFKNNEDNNFTQNNKFMSSIITKDCLVDMVQQAYEKKLENFFGRKDEIKRIIEILGRKKKSNPLLVGETGVGKTAIVEQLAYLILKNKVPYHLKNCKIFQMNLGNIVAGTKYRGEFEEKMKQILANISKDKKNILFIDEIHVIVGAGSGEGSLDASNILKPFLSSDNLQCIGTTTFQEYSKYIETDKALRRRFNCVNIKPLNSNETYKLLKKIKNSYEQYHNIYYTDEALKSIILLSDDYLPTLNFPDKAIDILDEAGSYQKIKYERYITKKLRNENNIKTDSIKVSTNTNSNKIDNNSTNVTSQIESNYLVDDLHMKYVTSDVIENIVSKKSSISFIKKNKKEEEKIQNLKEKLNKIIIGQEKVIDILAKYLFKAITNIKDANKPIGTLLLCGSSGVGKTLSAQVISQYLFNDDNIIVINMSEYIDKHSVSKLFGSYPGYVGYKEGGELTEAVKKKPFSIILFDEIEKAHSDVLHVLLQILDNGLLTDSKGNKVSFKNTFIFMTTNVGSDIITDYFKVYNKNYANFGFKYYTQKEKIEKPDLQNSTNNNTQNDKDKIQTDLDIFEEKIKTNKWYDELKPEIEEELKKKFLPEFLNRIDEKILFRQFLKRDIIQILENMIQDLKKRIKKRKKLNILIDDNIIKYICSDENNIYDINFGARSIRRALYKYIEDPIAAFLISNEYNPNDTMHLTLLPNNKIHVELLNHTTTSLS

SEQ ID NO: 7188 - protein, 865 aa, Prochlorococcus marinus str. MIT 9313
MQPTADQFTEKGWAAIVLAQQLAQQRKHQQLETEHLLLSLLQQNALAGRILEKAGVSIGNLQTAVEAHLQEQPTMQAAPDSVYLGKGVNDLLDQAEKHKQAFGDSFISIEHLLLALAGDNRCGRKLLNQAGVDAGKLKVAIDAVRGNQKVTDQNPEGTYESLEKYGRDLSAAAREGKLDPVIGRDDEIRRTIQILSRRTKNNPVLIGEPGVGKTAIVEGLAQRIVNGDVPAALQNRQLITLDMGALIAGAKYRGEFEERLKAVLKEVTASEGQIVLFIDEIHTVVGAGATGGAMDASNLLKPMLARGELRCIGATTLDEHRQHIEKDPALERRFQQVLVDQPTVQDTISILRGLKERYEVHHGVRIADNALVAAAVLSSRYIADRFLPDKAIDLMDESAARLKMEITSKPEEIDEIDRKIVQLEMEKLSLGRESDSVSKERLEKLERELAELAEQQSALNAQWQQEKGAIDDLSSLKEEIERVQLQVEQAKRSYDLNKAAELEYGTLAGLQKQLSEKETALAQDGEAGDKSLLREEVTEDDIADVIAKWTGIPVAKLVQSEMEKLLGLEAELHQRVIGQEQAVQAVADAIQRSRAGLSDPNRPIASFLFLGPTGVGKTELSKALASQLFDSEAALVRIDMSEYMEKHSVSRLIGAPPGYVGYEAGGQLTEAVRRRPYAVILFDEVEKAHQDVFNVMLQILDDGRVTDGQGRTVDFTNTVLILTSNIGSQSILDLGGDDSQYREMERRVHDALHAHFRPEFLNRLDETIIFHSLRREELRQIVALQVNRLRERLCDRKLGLEISDTAADWLANAGYDPVYGARPLKRAIQRELETPIAKSILAGLYGDSQIVHVDVDVDQERLSFR

SEQ ID NO: 7189 - protein, 863 aa, Prochlorococcus marinus str. MIT 9313
MPRTMFERFTEKAIKVIMLAQEEARRLGHNFVGTEQILLGLIGEGTGVAAKVLKSMSVNLKDARVEVEKIIGRGSGFVAVEIPFTPRAKRVLELSLEEARQLGHNYIGTEHLLLGLIREGEGVAARVLENLGVDLAKVRTQVIRMLGETAEVTAGGGGGKGSTKTATLDEFGSNLTQLANESKLDPVVGRQNEIDRVIQILGRRTKNNPVLIGEPGVGKTAIAEGLAQRIQQGDIPDILEEKRVLTLDIGLLVAGTKYRGEFEERLKKIMEEIKAAGNVILVIDEVHTLIGAGAAEGAIDAANILKPALARGELQCIGATTLDEYRKHIERDAALERRFQPVMVGEPSIAETIEILQGLRERYEQHHRLKITDEALDAAANLGDRYISDRFLPDKAIDLIDEAGSRVRLLNSKLPPAAKEVDKELRKVQKEKEDAVRDQDFAKAGELREKEVELREKIRTLLQSSRQGSEESPPAEAENAVRSSDETPTPQPEKNTTAALIPHLTTPLVTEEDIANIVAAWTGVPVQKLTESESVKLLNMEETLHQRLIGQDEAVKAVSKAIRRARVGLKNPNRPIASFIFSGPTGVGKTELTKALATYFFGSEEAMIRLDMSEFMERHTVSKLIGSPPGYVGFNEGGQLTEAVRRRPYTVVLFDEIEKAHPDVFNLLLQLLEDGRLTDSKGRTVDFKNTLIIMTSNIGSKVIEKGGGGLGFEFSGENAEDSQYNRIKSLVNEELKQYFRPEFLNRLDEIIVFRQLSRNEVKEIAEIMLQEVFSRMQDKGITLTVSDAFKERLVEEGYNPSYGARPLRRAVMRLMEDSLAEEVLTGRIKDGDAAEMDVDDNKQIVVRHVSKTTATPELAGAGV

SEQ ID NO: 7190 - protein, 928 aa, Prochlorococcus marinus str. MIT 9313
MHPETSQAASAQGSLTSDPDRFSDDAWDLLLVGQDVARRWRHGQLDVEHLIQVLFSDRRYSDWVLALPIDSTALLDRLEGFLAEQPMARGDELFIGDDLEDLLEEADRSRVRWGSRLIDVSHLLIALGRDPRIGAELFEELGMPSERLEAELRRLPKGRRQLRTSTPTSPPAPDSAPPAPASVASQTRPVSSPTPPIIQEPAVATEEPTPLQLQQEPQALEAYGRDLTAAAQAGQLDPVIGRDPEIRRLIKVLSRRSKNNPVLIGAPGVGKTAIAELLAQRIVAGEVPDSLKGLRLVSLDLGALIAGAKFRGQFEERLRSVLKEVSDPDAGVVLFIDELHTVVSSDRSSADAGSLLKPALARGDLRCIGATTPENYRRTVEKDQALNRRFQQVLIKEPSLELSVEILRGLKERYELHHGVTITDGAVTAANRLADRYISDRCLPDKAIDLIDEAAAQLKMDVTSKPQVVEEAEAELRRVELALLAAEQAPEVERVQLQAARIAAASQLTELQERWQIERDHLAELRDLLQQDEDLRNAIAEAERLGDLEAAARLQYDQLHRVQQRRADLEETLAVAQASGSALLREQVEAEDIADVVARWTGIPVQRLLAAERQKLLDLEAHLGERVIGQPEAVQAVAAAIRRARAGMKDPRRPVGSFLFLGPTGVGKTELAKALAASLFDEEEALVRLDMSEFMERNAVARLLGAPPGYVGYEEGGQLTEAVCRRPYAVLLLDEIEKAHPDVFNVLLQVLDDGRLTDSQGRTVDFRHTVVVMTSNLASRAILDASRLAQQEGTDGDCLDQSLTQKVDQALNKQFRPEFLNRIDEVIRFRPLKAADLQRIVQLQLADLSSLLAEQGLELRVEADAVEALALQGYEPEYGARPLRRVLRRRVENPLATELLEERFSGARAVRVIPGAQASEPFQFLSED

SEQ ID NO: 7191 - protein, 855 aa, Pasteurella multocida
MNIEKFTTKFQQALQEAQSLAIGKDNQFIEPVHLLTALLNQQGGSTAPILTASGANLPLLRNELNAELSKLPQVSGSGGDVQVSRSLVNLLNLCDKLAQQRQDKFISSELFLLAALEDKTLGDVLKKCGVKKENLQQAIEKVRGGQNVNDPNAEESRQALEKYTIDLTARAESGKLDPVIGRDEEIRRAIQVLQRRTKNNPVLIGEPGVGKTAIVEGLAQRIVNGEVPEGLKNKRVLSLDMGALIAGAKYRGEFEERLKAVLNELSKEEGRVILFIDEIHTMVGAGKTDGAMDAGNLLKPSLARGELHCVGATTLDEYRQYIEKDAALERRFQKVFVGEPTVEDTIAILRGLKERYEIHHHVQITDPAIVAAATLSHRYVSDRQLPDKAIDLIDEAASSIRMEIDSKPQPLDRLERRIIQLKLEQQALQKEDDDASRKRLAMLEKELGEKEREYAELEDVWKAEKAALSGTQHIKAELDSAKTQMEQARRASDFAKMSELQYGVIPALEKQLAQAESAEGKEMTLLRYRVTDEEIAEVLSRATGIPVAKMMEGEKEKLLRMEEELHKRVIGQHEAIEAVSNAIRRSRAGLSDPNRPIGSFLFLGPTGVGKTELCKTLANFLFDDENAMVRIDMSEFMEKHSVSRLVGAPPGYVGYEEGGYLTEAVRRRPYSVILLDEVEKAHHDVFNILLQVLDDGRLTDGQGRTVDFRNTVVIMTSNLGSHLIQENSTLDYPSMKELVMSVVGQHFRPEFINRIDETVVFHPLGKENIREIATIQLARLIKRMESHGYQLHFTDACLDFIGEVGYDPVYGARPLKRAIQQEIENPLAQQILSGKLLPNQLVTIDYVDGKVIANQ

SEQ ID NO: 7192 - protein, 854 aa, Chlamydia trachomatis
MFEKFTNRAKQVIKLAKKEAQRLNHNYLGTEHILLGLLKLGQGVAVNVLRTLGVDFDTAKHEVERLIGYGPEIQVCGDPALTGRVKKSFESANEEAALLEHNYVGTEHLLLGILNQSDGVALQVLENLHVDPKEIRKEILKELETFNLQLPPSSSITPRNTNSSSSSKSSSPLGGHTLGGDKPEKLSALKAYGYDLTEMFKESRLDPVIGRSAEVERLILILCRRRKNNPVLVGEAGVGKTAIVEGLAQKIVSGEVPEALRKKRLITLDLALMIAGTKYRGQFEERIKAVMDEVRKHGNILLFIDELHTIVGAGAAEGAIDASHILKPALARGEIQCIGATTLDEYRKHIEKDAALERRFQKIVVQPPSVDETVEILRGLKKKYEEHHNVFITDEALVAAAKLSDQYVHGRFLPDKAIDLLDEAGARVRVNTMGQPSDLVRLEAEIEKTKQAKEQAIGTQEYEKAASLRDEEKKLREKLGNMKQQWESNKEEHQVPVDEEAVAQVVSVQTGIPAARLTEAESEKLLTLETTLQKKVIGQSQAVASICRAIRRSRTGIKDPNRPMGSFLFLGPTGVGKTLLAQQIAIEMFGGEDSLIQVDMSEYMEKFAATKMMGSPPGYVGHEEGGHLTEQVRRRPYCVVLFDEIEKAHPDIMDLMLQILEQGRLTDSFGRKIDFRNTIIIMTSNLGADLIRKSGEIGFGLRSHMDYAVIKEKIDAAVKKHLKPEFINRLDESVIFKPLEKEALSEIIHLEINKLGSRLQNYQMDLNIPDSVISFLVTKGHSPEMGARPLRRVVEQYLEDPLAEMLLKESCRQEARKLRARLTEERVVFEREEEAVSALAIEGDGSEPITADES

SEQ ID NO: 7193 - protein, 848 aa, Mycobacterium tuberculosis CDC1551
MFERFTDRARKVVVLAQEEARMLNHNYIGTEHILLGLIHEGEGVAAKSLESLGISLEGVRSQVEEIIGQGQQAPSGHIPFTPRAKKVLELSLREALQLGHNYIGTEHILLGLIREGEGVAAQVLVKLGAELTRVRQQVIQLLSGYQGKEAAEAGTGGRGGESGSPSTSLVLDQFGRNLTAAAMEGKLDPVIGREKEIERVMQVLSRRTKNNPVLIGEPGVGKTAVVEGLAQAIVHGEVPETLKDKQLYTLDLGSLVAGSRYRGDFEERLKKVLKEINTRGDIILFIDELHTLVGAGAAEGAIDAASILKPKLARGELQTIGATTLDEYRKYIEKDAALERRFQPVQVGEPTVEHTIEILKGLRDRYEAHHRVSITDAAMVAAATLADRYINDRFLPDKAIDLIDEAGARMRIRRMTAPPDLREFDEKIAEARREKESAIDAQDFEKAASLRDREKTLVAQRAEREKQWRSGDLDVVAEVDDEQIAEVLGNWTGIPVFKLTEAETTRLLRMEEELHKRIIGQEDAVKAVSKAIRRTRAGLKDPKRPSGSFIFAGPSGVGKTELSKALANFLFGDDDALIQIDMGEFHDRFTASRLFGAPPGYVGYEEGGQLTEKVRRKPFSVVLFDEIEKAHQEIYNSLLQVLEDGRLTDGQGRTVDFKNTVLIFTSNLGTSDISKPVGLGFSKGGGENDYERMKQKVNDELKKHFRPEFLNRIDDIIVFHQLTREEIIRMVDLMISRVAGQLKSKDMALVLTDAAKALLAKRGFDPVLGARPLRRTIQREIEDQLSEKILFEEVGPGQVVTVDVDNWDGEGPGEDAVFTFTGTRKPPAEPDLAKAGAHSAGGPEPAAR

SEQ ID NO: 7194 - protein, 848 aa, Mycobacterium tuberculosis H37Rv
MFERFTDRARRVVVLAQEEARMLNHNYIGTEHILLGLIHEGEGVAAKSLESLGISLEGVRSQVEEIIGQGQQAPSGHIPFTPRAKKVLELSLREALQLGHNYIGTEHILLGLIREGEGVAAQVLVKLGAELTRVRQQVIQLLSGYQGKEAAEAGTGGRGGESGSPSTSLVLDQFGRNLTAAAMEGKLDPVIGREKEIERVMQVLSRRTKNNPVLIGEPGVGKTAVVEGLAQAIVHGEVPETLKDKQLYTLDLGSLVAGSRYRGDFEERLKKVLKEINTRGDIILFIDELHTLVGAGAAEGAIDAASILKPKLARGELQTIGATTLDEYRKYIEKDAALERRFQPVQVGEPTVEHTIEILKGLRDRYEAHHRVSITDAAMVAAATLADRYINDRFLPDKAIDLIDEAGARMRIRRMTAPPDLREFDEKIAEARREKESAIDAQDFEKAASLRDREKTLVAQRAEREKQWRSGDLDVVAEVDDEQIAEVLGNWTGIPVFKLTEAETTRLLRMEEELHKRIIGQEDAVKAVSKAIRRTRAGLKDPKRPSGSFIFAGPSGVGKTELSKALANFLFGDDDALIQIDMGEFHDRFTASRLFGAPPGYVGYEEGGQLTEKVRRKPFSVVLFDEIEKAHQEIYNSLLQVLEDGRLTDGQGRTVDFKNTVLIFTSNLGTSDISKPVGLGFSKGGGENDYERMKQKVNDELKKHFRPEFLNRIDDIIVFHQLTREEIIRMVDLMISRVAGQLKSKDMALVLTDAAKALLAKRGFDPVLGARPLRRTIQREIEDQLSEKILFEEVGPGQVVTVDVDNWDGEGPGEDAVFTFTGTRKPPAEPDLAKAGAHSAGGPEPAAR

SEQ ID NO: 7195 - protein, 857 aa, Escherichia coli O157:H7
MRLDRLTNKFQLALADAQSLALGHDNQFIEPLHLMSALLNQEGGSVSPLLTSAGINAGQLRTDINQALNRLPQVEGTGGDVQPSQDLVRVLNLCDKLAQKRGDNFISSELFVLAALESRGTLADILKAAGATTANITQAIEQMRGGESVNDQGAEDQRQALKKYTIDLTERAEQGKLDPVIGRDEEIRRTIQVLQRRTKNNPVLIGEPGVGKTAIVEGLAQRIINGEVPEGLKGRRVLALDMGALVAGAKYRGEFEERLKGVLNDLAKQEGNVILFIDELHTMVGAGKADGAMDAGNMLKPALARGELHCVGATTLDEYRQYIEKDAALERRFQKVFVAEPSVEDTIAILRGLKERYELHHHVQITDPAIVAAATLSHRYIADRQLPDKAIDLIDEAASSIRMQIDSKPEELDRLDRRIIQLKLEQQALMKESDEASKKRLDMLNEELSDKERQYSELEEEWKAEKASLSGTQTIKAELEQAKIAIEQARRVGDLARMSELQYGKIPELEKQLEAATQLEGKTMRLLRNKVTDAEIAEVLARWTGIPVSRMMESEREKLLRMEQELHHRVIGQNEAVDAVSNAIRRSRAGLADPNRPIGSFLFLGPTGVGKTELCKALANFMFDSDEAMVRIDMSEFMEKHSVSRLVGAPPGYVGYEEGGYLTEAVRRRPYSVILLDEVEKAHPDVFNILLQVLDDGRLTDGQGRTVDFRNTVVIMTSNLGSDLIQERFGELDYAHMKELVLGVVSHNFRPEFINRIDEVVVFHPLGEQHIASIAQIQLKRLYKRLEERGYEIHISDEALKLLSENGYDPVYGARPLKRAIQQQIENPLAQQILSGELVPGKVIRLEVNEDRIVAVQ

SEQ ID NO: 7196 - protein, 175 aa, Escherichia coli O157:H7
HPDVFNILLQVLDDGRLTDGQGRTVDFRNTVVIMTSNLGSDLIQERFGELDYAHMKELVLGVVSHNFRPEFINRIDEVVVFHPLGEQHIASIAQIQLKRLYKRLEERGYEIHISDEALKLLSENGYDPVYGARPLKRAIQQQIENPLAQQILSGELVPGKVIRLEVNEDRIVAVQ

SEQ ID NO: 7197 - protein, 870 aa, Chlamydia muridarum
MSYMLKSIPPRHIQVFMFEKFTNRAKQVIKLAKKEAQRLNHNYLGTEHILLGLLKLGQGVAVNVLRTLGVDFDTAKNEVERLIGYGPEIQVYGDPALTGRVKKSFESANEEASILEHNYVGTEHLLLGILNQADGVALQVLENLHIDPKEIRKEILKELETFNLQLPPSSSITPRNTNSSSSSSSKSSSLGGHSLGGDKPEKLSALKAYGYDLTEMFKEARLDPVIGRSAEVERLILILCRRRKNNPVLIGEAGVGKTAIVEGLAQKIVSGEVPEALRKKRLITLDLALMIAGTKYRGQFEERIKAVMDEVRKHGNILLFIDELHTIVGAGAAEGAIDASHILKPALARGEIQCIGATTLDEYRKHIEKDAALERRFQKIVVQPPSVDETVEILRGLKKKYEEHHNVFITDEALVAAAKLSDQYVHGRFLPDKAIDLLDEAGARVRVNTMGQPSELLRLEAEIESTKQAKEQAIGTQEYEKAASLRDEEKKLREKLSNMKQQWESNKEEHQVPVDEEAVAQVVSVQTGIPAARLTEAESEKLLMLENTLQKKVIGQDQAVASICRAIRRSRTGIKDPNRPMGSFLFLGPTGVGKTLLAQQIAVEMFGGEDSLIQVDMSEYMEKFAATKMMGSPPGYVGHEEGGHLTEQVRRRPYCVVLFDEIEKAHPDIMDLMLQILEQGRLTDSFGRKIDFRNTIIIMTSNLGADLIRKTGEIGFGLRSHMDYGVIKEKIDAAVKKHLKPEFINRLDESVIFKPLEKEALSEIIHLEINKLGSRLQNHQMALNIPDSVVSFLVDKGHSPEMGARPLRRVVEQYLEDPLAEMLLKESCRQEARKLCARLIEERVIFEREDEISALAVEGDGPASVTADES

SEQ ID NO: 7198 - protein, 875 aa, SYNECHOCOCCUS SP. WH 8102
MPIRFVQDNRNSHMQPTAEQFTEQAWAAIVAAQQLAQASRHQQLETEHLLLALLRQNGLAGRILSKTGVDVTTFEASVEGHLQRLPSLGSAPDSVFLGRSLNKALDRAEQRRDGFGDSFIAIEHLLLALAEDDRCGRQLLSQAGVTTNTLKEAITAVRGNQTVTDQNPEATYESLAKYGRDLTAAARDGQLDPVIGRDEEIRRTIQILSRRTKNNPVLIGEPGVGKTAIVEGLAQRIVNGDVPQALQNRQLITLDMGALIAGAKYRGEFEERLKAVLKEVTTSDGQIVLFIDEIHTVVGAGASGGAMDASNLLKPMLARGELRCIGATTLDEHRQHIEKDPALERRFQQVLVDQPTVPDTISILRGLKERYEVHHGVRIADSALVAAAMLSSRYITDRFLPDKAIDLVDESAARLKMEITSKPEQIDEIDRKILQLEMEKLSLGRESDSASQERLQRIERELAELGEQQSSLNAQWQSEKGAIDQLSALKEEIERVQLQVEQAKRNYDLNKAAELEYGTLATLQRQLQEQEDLLEDEDGTDKTLLREEVTEDDIAEVIAKWTGIPVARLVQSEMEKLLQLEDDLHQRVIGQNQAVTAVADAIQRSRAGLSDPNRPIASFLFLGPTGVGKTELSKALANRLFDSDDAMVRIDMSEYMEKHTVSRLIGAPPGYVGYEAGGQLTEAVRRRPYAVILFDEVEKAHPDVFNVMLQILDDGRVTDGQGRTVDFTNTVLILTSNIGSQSILELAGDPEQHTAMEQRVNEALKAKFRPEFLNRLDDQIIFRSLEKEELRRIVSLQVERLRSRLEQRKLDLQLSDIAADWLATIGFDPVYGARPLKRAIQRELETPIAKAILAGQLSEGQTVQVDAGDDKLSIS

SEQ ID NO: 7199 - protein, 846 aa, SYNECHOCOCCUS SP. WH 8102
MFERFTEKAIKVIMLAQEEARRLGHNFVGTEQILLGLIGEGTGVAAKVLKSMGVNLKDARVEVEKIIGRGSGFVAVEIPFTPRAKRVLELSLEEARQLGHNYIGTEHLLLGLIREGEGVAARVLENLGVDLAKVRTQVIRMLGETAEVSGGGGGGGAKGSTKTPTLDEFGSNLTQMANEAKLDPVVGRHNEIERVIQILGRRTKNNPVLIGEPGVGKTAIAEGLAQRIQQGEIPDILEDKRVLTLDIGLLVAGTKYRGEFEERLKKIMEEIKAAGNVILVIDEVHTLIGAGAAEGAIDAANILKPALARGELQCIGATTLDEYRKHIERDAALERRFQPVNVGEPSIDDTIEILRGLRERYEQHHRLKITDDALVAAATLGDRYISDRFLPDKAIDLIDEAGSRVRLLNSKLPPEAKEVDKELRGVQKQKEDAVRDQDFTKAGELREKEVELRDQIRSLLQANRTDATAVAEASADQSDAPAAESAESSPMVNEEDIAQIVASWTGVPVQKLTESESVKLLNMEETLHQRLIGQDEAVKAVSKAIRRARVGLKNPNRPIASFIFSGPTGVGKTELTKALATYFFGSEEAMIRLDMSEFMERHTVSKLIGSPPGYVGFNEGGQLTEAVRRRPYTVVLFDEIEKAHPDVFNLLLQLLEDGRLTDSKGRTVDFKNTLVIMTSNIGSKVIEKGGGGLGFEFSGESAEESQYTRIRSLVNEELKQYFRPEFLNRLDEIIVFRQLSRDEVKEIAEIMLKEVFGRMGEKGITLTVSDAFKERLVEEGYNPAYGARPLRRAVMRLLEDSLAEEVLSGRIKDGDHAEVDVDDDKKVVVRHKGLAESSPQLAGAAV

SEQ ID NO: 7200 - protein, 900 aa, SYNECHOCOCCUS SP. WH 8102
MTGTPASRGSLTHEPDRFSDPAWELLLAGQDMARRWRHDQLDVEHLIQVLFSDSSFRRWVEPLPLRSDDLLDRLEDVLADQPPARGDQLFIGEDLEQLLETADQVRGRWGDRSIDVPQLIVAVGADPRIGAELFAAQGLAVDRLESLLRQPSVSPAPAPPPVPTAASAPAPTPRSAPAPRVMAPEPEPMVELEREPSALEAYGRDLTEEAEAGSLDPVIGRDSEIRNLIKVLSRRSKNNPVLIGEPGVGKTAIAELLAQRIVAGEVPDSLQGLRLIALDLGALIAGAKFRGQFEERLRSVLEEVSRSDSGVVLFIDELHTVVGSDRSSTDAGSLLKPALARGDLRCIGATTPEEYRRTVEKDPALNRRFQQVLIREPDLELSLEILRGLRERYELHHGVTITDEAIQTANRLADRYISDRCLPDKAIDLIDEAAAQLKIEVTSKPQVVEEAEADLRRVELALLAAEEAPEEERIQLQRQRLEVSSRLDDLRRRWQEERTQLEELGQLLQQDEDLRHAIAEAEREGALEEAARLQYDQLHTVQQRREALEASQAEAQSAGTALLREQVEAGDIADLVARWTGIPVQRLLAGERRKLLALESHLSERVIGQVEAVAAVAAAIRRARAGMKDPRRPVGSFLFLGPTGVGKTELAKALATSLFDEEEALVRLDMSEFMERNASARLIGAPPGYVGYEEGGQLTEAVRRRPYAVLLLDEVEKAHPDVFNLLLQVLDDGRLTDSQGLTVDFRHTVVVMTSNLASPVILEHARSGSSDDAQLQQQVDAALSSQFRPEFLNRIDEVIRFRPLKVKDLVRIVRLQLADLSTLMAEQGLSLEVDDAVADSLARQGHEPEYGARPLRRVLRRQLENPLATQLLEERFRSAHGIRVRCGTDDGASLEFEPLE

SEQ ID NO: 7201 - protein, 813 aa, Bacillus halodurans
MMFGRFTERAQKVLALAQEEAIRLGHNNIGTEHILLGLIREGEGIAAKALQALGLGPEKIQKEVETLIGKGQDGAKTIHYTPRAKKVIELSMDEARKLGHSYVGTEHILLGLIREGEGVAARVLNNLGVSLNKARQQVLQLLGSNETSSSSQQGGGAANANTPTLDSLARDLTAIAREEGLDPVIGRSKEIERVIQVLSRRTKNNPVLIGEPGVGKTAIAEGLAQAIIHNEVPETLRNKRVMTLDMGTVVAGTKYRGEFEDRLKKVMDEIRQAGNVILFIDELHTLIGAGGAEGAIDASNILKPSLARGELQCIGATTLDEYRKYIEKDAALERRFQPIQVNEPSLDESIQILKGLRDRYEAHHRVTITDEAIEEAVKLSDRYIQDRFLPDKAIDLIDEAASKVRLRSYTAPPNLKELEQKLEETRKEKDAAVQSQEFEKAASLRDSEQRIREELDQMKNDWKQKQGQENTQVVVDDIAQVVASWTGIPVSKLAEEETERLLKMEEILHKRVIGQEEAVKAISKAVRRARAGLKDPKRPIGSFIFLGPTGVGKTELARAVAETLFGDEDAFIRIDMSEYMEKHATSRLVGSPPGYVGHDEGGQLTEKVRRKPYSVILLDEIEKAHPEVFNILLQVLEDGRLTDSKGRTVDFRNTAVIMTSNVGASTLRKNKFLGFTTDSEGSEYKDMKDKVMTELKNSFRPEFLNRIDEIIVFHSLEKKHVREIITLMADQLKKRLEEQGVSFELTEAAKDKITDLGYDPEYGARPLRRALQREVEDRLSEELLKGTIQKGQRAIIDVENGELVVHSKEGATL

SEQ ID NO: 7202 - protein, 711 aa, Bacillus halodurans
MKCQQCQTNEATVTLHVKINQSSQQLHVCSSCYQQIEQPFGFSDFSSFDNMFKQWIGSTSSSMNGSDQPVSSIAMKSKTNHSGGGFLDQHGRNVTAEAKAGQIDPVIGRDQEVERLIQILCRRTKNNPVLIGEAGVGKTAIVEGFARRIAEGNVPAKMKNKEVYELELSSLVAGTSYRGQFEEKMEQLVRELEARDDVILFIDEIHMVVGAGATSEGSMDAGNILKPALARGQLQIIGATTLNEYRKIEKDPALERRFQPITVKEPTLEAAVEILKGVRPIYEAYHHVSYPDDVLEACVRLSDRYIQDRFLPDKAIDLMDEIGSALTLTSGPTTLDELKERLAEITKEKQQATAQEDYERAAKLRDEENLLHKQMNENRAEKTEVTVADIQGLIEKRTGIPVRKLQKAEQTKMKDLHNRLARQVIGQAEAVEKVAKAIKRSRAGLKPKNRPISFMFVGPTGVGKTELTKTLAQELFGSKEAMIRLDMSEFMEKHSVSKLIGSPPGYVGHDEGGQLTEQVRRKPYSIILLDEIEKAHPDVQHMFLQILEDGRLTDSQGRAVSFKDTVIIMTSNAGVGVKKITVGFEKNVETQNKAGILEQINQYFKPEFLNRLDAIIEFNHLTEQDLMRIVDLMLQDLGDRLAEQDISLTVSEKAKAQLVKIGSDRAFGARPLRRAIQDHVEDSITEKLIDEESINAIHVDYDVVQQSFTFA

SEQ ID NO: 7203 - protein, 290 aa, Dichelobacter nodosus
LNERVVGQKTAVEAVANAIRRNRAGLSDPKRPIGSFLFLGPTGVGKTELCRTLAQFLFDSEENMVRIDMSEFMEKHSVARLIGAPPGYVGYDQGGYLTEAVRRKPYSVVLFDEVEKAHSDVFNTLLQVLDEGRLTDGQGRTVDFRHTVIIMTSNLGSDMIQLLAEKSYEEMKSAVMEIVMAHFRPEFINRIDEAIVFHGLAKTHMYRIAQIQLERLRQRLQTRELLLSVEEDAINQLVELGYDPLFGARPLKRAIQNYIENPLAQALLAGQYLPQSTITIGFDGTNFTFH

SEQ ID NO: 7204 - protein, 857 aa, Salmonella enterica subsp. enterica serovar Typhi
MRLDRLTNKFQLALADAQSLALGHDNQFIEPLHLMSALLNQEGGSIRPLLTSAGINAGQLRTAIDQALSRLPQVEGTGGDVQPSSELVRVLNLCDKLAQKRGDNFISSELFVLAALESRGTLTDLLKSAGATTANITQAIEQMRGGESVNDQGAEDQRQALKKYTVDLTERAEQGKLDPVIGRDEEIRRTIQVLQRRTKNNPVLIGEPGVGKTAIVEGLAQRIINGEVPEGLKGRRVLALDMGALVAGAKYRGEFEERLKGVLNDLAKQEGNVILFIDELHTMVGAGKADGAMDAGNMLKPALARGELHCVGATTLDEYRQYIEKDAALERRFQKVFVAEPSVEDTIAILRGLKERYELHHHVQITDPAIVAAATLSHRYIADRQLPDKAIDLIDEAASSIRMQIDSKPEELDRLDRRIIQLKLEQQALMKESDEASKKRLDMLNEELDDKERQYSELEEEWKAEKASLSGTQTIKAELEQAKIAIEQARRVGDLARMSELQYGKIPELEKQLEAATQSEGKTMRLLRNKVTDAEIAEVLARWTGIPVSRMLEGEREKLLRMEQELHSRVIGQNEAVEAVSNAIRRSRAGLSDPNRPIGSFLFLGPTGVGKTELCKALANFMFDSDDAMVRIDMSEFMEKHSVSRLVGAPPGYVGYEEGGYLTEAVRRRPYSVILLDEVEKAHPDVFNILLQVLDDGRLTDGQGRTVDFRNTVVIMTSNLGSDLIQERFGELDYGRMKEMVLGVVSQNFRPEFINRIDEVVVFHPLGEQHIASIAQIQLQRLYKRLEERGYEIHISDEALKLLSANGYDPVYGARPLKRAIQQQIENPLAQQILSGELVPGKVIRLEANDDRIVAVQ

SEQ ID NO: 7205 - protein, 887 aa, Salmonella enterica subsp. enterica serovar Typhi
METPVSRSALYGKLAGPLFRSLESATAFCKLRSNPWGELTHWLHQLTQQPDNDILHVLRHYQIPLSDVEKALLRQLDMLPAGASAISDFSHHIDLSVEKAWMLASVRYGDNKIRSGWLLLALLTTPELRRVLSSICAPLATLPVDELTEILPSLIETSPEAQERPYDGSGLASAIPGESSQAIPNGVQDGKSALAKYCQDMTAQARDGKIDPVTGREHEIRTMTDILLRRRQNNPLLTGEAGVGKTAVVEGFALAIAQGEVPPALREVRLLALDVGALLAGASMKGEFESRLKGLLEEAGRSPQPVILFVDEVHTLVGAGGASGTGDAANLLKPALACGTLRTIGATTWSEYKRHIEKDPALTRRFQVLQIAEPEEIPAMEMVRGLVDTLEKHHNVLILDEAVRAAVQLSHRYIPARQLPDKAISLLDTAAVRVALTLHTPPASVQFLRQQLKAAEMERSLLQKQEKMGIQSDERCDALTARIFSLNDELTASESRWQRELELVHTLQELRVAESDADDKTTLQQAETALREWQGDAPVVFPEVSAAIVAAIVADWTGIPAGRMVKDEASQVLELPARLAQRVTGQDGALAQIGERIQTARAGLGDPRKPVGVFMLAGPSGVGKTETALALAEAIYGGEQNLVTINMSEFQEAHTVSTLKGAPPGYVGYGEGGVLTEAVRRHPWSVVLLDEIEKAHHDVHELFYQVFDKGGMEDGEGTHVDFKNTTLLLTTNVGSDLISQMCEDPALMPDATGLKEALMPELRKHFPAAFLGRVTVIPYLPLDETSRGVIARLHLDRLVARMGEQHGVTLTYSEELVAHIVACCPMHETGARLLIGYIEQHILPQLSRYWLQAMTEKAAIRQIDIGVNGDEQIVFETTSQEGICQKS

SEQ ID NO: 7206 - protein, 707 aa, Homo sapiens
MLGSLVLRRKALAPRLLLRLLRSPTLRGHGGASGRNVTTGSLGEPQWLRVATGGRPGTSPALFSGRGAATGGRQGGRFDTKCLAAATWGRLPGPEETLPGQDSWNGVPSRAGLGMCALAAALVVHCYSKSPSNKDAALLEAARANNMQEVSRLLSEGADVNAKHRLGWTALMVAAINRNNSVVQVLLAAGADPNLGDDFSSVYKTAKEQGIHSLEDGGQDGASRHITNQWTSALEFRRWLGLPAGVLITREDDFNNRLNNRASFKGCTALHYAVLADDYRTVKELLDGGANPLQRNEMGHTPLDYAREGEVMKLLRTSEAKYQEKQRKREAEERRRFPLEQRLKEHIIGQESAIATVGAAIRRKENGWYDEEHPLVFLFLGSSGIGKTELAKQTAKYMHKDAKKGFIRLDMSEFQERHEVAKFIGSPPGYVGHEEGGQLTKKLKQCPNAVVLFDEVDKAHPDVLTIMLQLFDEGRLTDGKGKTIDCKDAIFIMTSNVASDEIAQHALQLRQEALEMSRNRIAENLGDVQISDKITISKNFKENVIRPILKAHFRRDEFLGRINEIVYFLPFCHSELIQLVNKELNFWAKRAKQRHNITLLWDREVADVLVDGYNVHYGARSIKHEVERRVVNQLAAAYEQDLLPGGCTLRITVEDSDKQLLKSPELPSPQAEKRLPKLRLEIIDKDSKTRRLDIRAPLHPEKVCNTI

SEQ ID NO: 7207 - protein, 677 aa, Homo sapiens
MLGSLVLRRKALAPRLLLRLLRSPTLRGHGGASGRNVTTGSLGEPQWLRVATGGRPGTSPALFSGRGAATGGRQGGRFDTKCLAAATWGRLPGPEETLPGQDSWNGVPSRAGLGMCALAAALVVHCYSKSPSNKDAALLEAARANNMQEVSRLLSEGADVNAKHRLGWTALMVAAINRNNSVVQVLLAAGADPNLGDDFSSVYKTAKEQGIHSLEVLITREDDFNNRLNNRASFKGCTALHYAVLADDYRTVKELLDGGANPLQRNEMGHTPLDYAREGEVMKLLRTSEAKYQEKQRKREAEERRRFPLEQRLKEHIIGQESAIATVGAAIRRKENGWYDEEHPLVFLFLGSSGIGKTELAKQTAKYMHKDAKKGFIRLDMSEFQERHEVAKFIGSPPGYVGHEEGGQLTKKLKQCPNAVVLFDEVDKAHPDVLTIMLQLFDEGRLTDGKGKTIDCKDAIFIMTSNVASDEIAQHALQLRQEALEMSRNRIAENLGDVQISDKITISKNFKENVIRPILKAHFRRDEFLGRINEIVYFLPFCHSELIQLVNKELNFWAKRAKQRHNITLLWDREVADVLVDGYNVHYGARSIKHEVERRVVNQLAAAYEQDLLPGGCTLRITVEDSDKQLLKSPELPSPQAEKRLPKLRLEIIDKDSKTRRLDIRAPLHPEKVCNTI

SEQ ID NO: 7208 - protein, 322 aa, Homo sapiens
GKTELAKQTAKYMHKDAKKGFIRLDMSEFQERHEVAKFIGSPPGYVGHEEGGQLTKKLKQCPNAVVLFDEVDKAHPDVLTIMLQLFDEGRLTDGKGKTIDCKDAIFIMTSNVASDEIAQHALQLRQEALEMSRNRIAENLGDVQISDKITISKNFKENVIRPILKAHFRRDEFLGRINEIVYFLPFCHSELIQLVNKELNFWAKRAKQRHNITLLWDREVADVLVDGYNVHYGARSIKHEVERRVVNQLAAAYEQDLLPGGCTLRITVEDSDKQLLKSPELPSPQAEKRLPKLRLEIIDKDSKTRRLDIRAPLHPEKVCNTI

SEQ ID NO: 7209 - protein, 848 aa, Cytophaga hutchinsonii
MEAKFSNRVKEVISLSREEALRLGHDYIGAEHLLLGMIREGEGVAISLLKKLGITLDSLKKSLEEAVRGTATGNVKNLTNIPLTRQAEKVLKITYLEAKIFKSDLIGTEHLLLSVLRDEDNVATQILNKFDITYDVIKELLEYHTHTPKATDAEDADDDSSRLFGNSGSGAGKEAARPGAEKSRTPVLDNFGRDLTKYAEDGKLDPIIGREKEIERVAQILSRRKKNNPILIGEPGVGKTAIAEGLALRIVQKKVSRVLFGKRVVTLDLASLVAGTKYRGQFEERMKAVMNELEKSPEVILFIDEIHTIVGAGGASGSLDASNMFKPALARGDIQCIGATTLDEYRQYIEKDGALARRFQIVMVDATTPEETVQILNNIKEKYEDHHNVIYSPEALEACVKLSDRYISDRFLPDKAIDVLDEAGARVHINNIHVPADILKLEEQIENIKKEKNKVVKSQKYEEAAQLRDSEKKLIEQLDNAKLRWEEETKKKRYHVKEENVAEVIAMMTGIPSARVAQKESLKLLSMGSDLKAAVVGQDQAIEKLVKAIQRTRVGLKDPKKPIGSFIFLGPTGVGKTELAKSLAKYLFDKEDSLVRIDMSEYMEKFSVSRLVGAPPGYVGYEEGGQLTEKIRRKPYSVVLLDEIEKAHPDVFNLMLQVLDDGILTDGLGRRVDFRNTIIIMTSNIGVRDLKDFGSGIGFNTQSRKENVDEMMKGTIQNALRKAFSPEFLNRLDDVIVFNSLTREDIHVIIDITLAKVFSRITTLGYTIELTDKAKDFLAERGYDQQYGARPLNRAIQKYLEDPIAEEILKGDVQEGDTILADYKEGADGLTVRNKKQAEETTEGEKEK

SEQ ID NO: 7210 - protein, 491 aa, Burkholderia fungorum
NGDLTDVARYLFIDEIHTLIGAGAASGGTLDASNLLKPALSSGTLKCIGATTFTEYRGIFEKDAALSRRFQKVDVTEPTVEQTVAILRGLKSRFEEHHGVKYSSGALSAAAELSARFITDRHLPDKAIDVIDEAGAAQRILPKSKQKKTIGKNEIEEIISKIARVPPQSVSQDDRSKLQTLDRDLKSVVFGQDPAIDALSAAIKMARAGLGKLDKPIGAFLFSGPTGVGKTEVAKQLAFTLGIELIRFDMSEYMERHAVSRLIGAPPGYVGFDQGGLLTEAVTKKPHCVLLLDEIEKAHPDIYNVLLQVMDHGTLTDNNGRKADFRNVIIIMTTNAGAEAMGKSVIGFTNRRETGDEMVDIKRMFTPEFRNRLDAVISFRSLDEEIIMRVVDKFLMQLEDQLHEKKVDALFTDALRKHLAKHGFDPLMGARPMQRLIQDTIRRALADELLFGKLMNGGRVTVDVDAEDKVQLTFDEHPAPRNPNPEAVEVE

SEQ ID NO: 7211 - protein, 194 aa, Burkholderia fungorum
MRRNPYSVILLDEIEKAHPDVFNVLLQVLDDGRMTDGQGRTVDFKNTVIVMTSNLGSQVIQAMVGEPQEAVKDAVWEEVKLHFRPEFLNRIDDVVVFHALDRSNIQSIARIQLQRLQERLAKLDMQLLVSDEALEHVGKVGYDPLFGARPLKRAIQQEIENPVAKLILAGKFGPKDVIPVEVEDGKLVFERVVH

SEQ ID NO: 7212 - protein, 137 aa, Lactococcus lactis
EGRTKSVLGQLGDFFSPEFMNRFDGIIEFSALSKENLLKIVDLMLDEVNEQIGRNDIHLSVTQAAKEKLVDLGYNPAMGARPLRRIIQENIEDSIADFYIEHPEYKQLVADLIDDKIVISNQTQETAETTDEEVPAE

SEQ ID NO: 7213 - protein, 836 aa, Agrobacterium tumefaciens str. C58 (Cereon)
MPTFSPSLEKALHQALTFANERHHEYATLEHLLLALIDDADAAAVMAACNVDLDALRKTVSDYVDNELTNLVTGYDEDSKPTSGFQRVIQRAVIHVQSSGREEVTGANVLVAIFAERESHAAYFLQEQEMTRYDAVNYISHGIGKRPGTSQTRAPRGADEPESESKPSRGNPEEDGSSAKKQQDALKAYCVNLNDKARNGKIDPLIGRHDEVNRTIQILCRRSKNNPLYVGDPGVGKTAIAEGLAKRIVEGKVPEALANDTIFSLDMGTLLAGTRYRGDFEERLKQVVKELEEFPGAVLFIDEIHTVIGAGATSGGAMDASNLLKPALSSGAIRCIGSTTYKEYRQFFEKDRALVRRFQKIDVNEPSIDDAIAIMKGLKPYFEDYHHLRYSNEAIKAAVELSARYISDRKLPDKAIDVIDETGAAQMLLPASKRRKLITEREIEATIATMARIPPKTVSKDDEMVLANLEKELRSVVYGQDIAIEALATAIKLARAGLREPNKPIGSYVFSGPTGVGKTEVAKQLAASLGVEMLRFDMSEYMERHTVSRLLGAPPGYVGFDQGGLLTDGVDQHPHSVVLLDEIEKAHPDIYNILLQVMDHGSLTDHNGKKIDFRNVILIMTTNAGASEMAKSAIGFGSSRRTGEDEEAINRLFTPEFRNRLDAIIPFSPLPTAVIHKVVQKFVMQLETQLSERNVTFDLHEDAISWLAEKGYDEKMGARPLSRVIQEHIKKPLANEILFGKLKKGGVVSVTVGKKDDGADGLILEVLPETAPVKPQPEAELKAAKSPGKPKAKAKTASKAAKTADEAEILVAEADKSDEDKPRRKTNTVPKVPKKK

SEQ ID NO: 7214 - protein, 610 aa, Streptococcus agalactiae NEM316
MEDELKTPYLDQYTDNLTAKVTKKSDDYQVYGRNKEVQSVIISLLRRTKNNPILVGEAGVGKSAIVEGITLAILRGQVPEPLKGLTVRSLELSSLMSEDDEGFIAKFKKIIEEMVATRGHNLLFVDEFHTIIGAGSQNGQALDAGNVIKPVLARGDIQLIGATTLDEFHEYIETDRALERRMQPVMVEEPTISQAITIIEQAKVIYEKFHGIQISSDAVHQAIRLSVRYLTDRFLPDKAFDLIDEAATIASVEGKSKVTEKDIAQVLKDKTGIPVTTILKGDQERLEGFKERLMNRVKGQEDAIEAVVDAVTIAQAGLQNEKRPLASFLFLGPTGVGKTELAKAIAEALFDDEAAMIRFDMSEYKQKEDVTKLIGNRATRIKGQLTEGVKQKPYCVLLLDEIEKAHSEVMDLFLQVLDDGRLTDSSGRLISFKNTIVIMTTNIGAKKIINKWELKGNFKDLTDRDRKQFEKSMDSELQNEFRPEFLNRIENKLIFNLLERDVIEKIAEKNLSEIADRMKRQNLTLSYEPSLIQYLSDVGTDVKNGARPLERLMKRKVLAPISVKSLQLDKSKQGYNVHLWVEGRAPDGNHRQEQRQIHMEIEGERDNFFS

SEQ ID NO: 7215 - protein, 639 aa, Streptococcus agalactiae NEM316
MRLTHVSLWMPSKRSWPLKLQLLRKGVIELEDELKTPYLDQYTDNLTAKVTKKSDDYQVYGRNKEVQSVIISLLRRTKNNPILVGEAGVGKSAIVEGITLAILRGQVPEPLKGLTVRSLELSSLMSEDDEGFIAKFKKIIEEMVATRGHNLLFVDEFHTIIGAGSQNGQALDAGNVIKPVLARGDIQLIGATTLDEFHEYIETDRALERRMQPVMVEEPTISQAITIIEQAKVIYEKFHGIQISSDAVHQAIRLSVRYLTDRFLPDKAFDLIDEAATIASVEGKSKVTEKDIAQVLKDKTGIPVTTILKGDQERLEGFKERLMNRVKGQEDAIEAVVDAVTIAQAGLQNEKRPLASFLFLGPTGVGKTELAKAIAEALFDDEAAMIRFDMSEYKQKEDVTKLIGNRATRIKGQLTEGVKQKPYCVLLLDEIEKAHSEVMDLFLQVLDDGRLTDSSGRLISFKNTIVIMTTNIGAKKIINKWELKGNFKDLTDRDRKQFEKSMDSELQNEFRPEFLNRIENKLIFNLLERDVIEKIAEKNLSEIADRMKRQNLTLSYEPSLIQYLSDVGTDVKNGARPLERLMKRKVLAPISVKSLQLDKSKQGYNVHLWVEGRAPDGNHRQEQRQIHMEIEGERDNFFS

SEQ ID NO: 7216 - protein, 755 aa, Shewanella oneidensis MR-1
MLNKDLEVTLNLAFQQAREARHEYMTVEHLLLALIDNPAAQEALIACGANLDKLRDEVASFIQQTTPIIADMDDDKETQPTLGFQRVLQRAVFHVQSSGRNEVTGANVLVAIFSEQESQAVYLLRRSDISRLDVVNFISHGFSKNEDSDAHQDQERSEEQAEASEERSMLSQFATNLNQLAKQGVIDPLIGRDQEIERAIQTLCRRRKNNPLLVGEAGVGKTAIAEGLAYRIVNHQVPEVMAQATVYSLDLGSLLAGTKYRGDFEKRFKNLLKELSADKHAILFIDEIHTIIGAGAASGGVMDASNLLKPLLSSGNLRCMGSTTFQEYQSIFEKDRALARRFQKVDINEPSVAETTKILMGLKSKYEEYHGVRYTQAAINSAAVLSAKHINDRHLPDKAIDVIDEAGARMAMLPQSKRKKTIGQAEIETIVAKIARIPEKSVSATDKDLLRNLERNLKMVVFGQDKAIETLSSAIRLSRSGLGTDKKPVGSFLFAGPTGVGKTEVTNQLANCLGMKLVRFDMSEYMESHTVSRLIGAPPGYVGYDQGGLLTDAVIKNPHCVVLLDEIEKAHPDVYNLLLQVMDHGTLTDNNGRKADFRHVTLVMTTNAGVQETIRKSIGFTQQDHTQDALSEINRVFSPEFRNRLDSIIWFNHLDMTIIAKVVDKFLVELQAQLDAKHVVLEVSDEARTLLAQKGYDKSMGARPMARVVTELIKRPLADELLFGELEHGGIAHVDAKDGEIVIHAERNEKTTSKA

SEQ ID NO: 7217 - protein, 824 aa, Brucella melitensis 16M
MPSFSPSLERALHQALTIANERHHEYATLEHLLLALIDDQDAGAVMRACNVDLDYLKHIVTDYIDRELDNLITGYDEDSKPTAAFQRVIQRAVIHVQSSNRDEVTGANVLVAIFAERESHAAYFLQEQQMTRYDAVNYISHGISKRPQGSEPRTPRGVESASEERTGIEQEEAPKKKQDALSAYCINLNEKAKAGRIDPLIGRDSEINRTIQVLCRRSKNNPLYVGDPGVGKTAIAEGLAKRIVEGQVPDALADATIFSLDMGTLLAGTRYRGDFEERLKQVVKELEEFPGAVLFIDEIHTVIGAGATSGGAMDASNLLKPALSSGAIRCIGSTTYKEYRQFFEKDRALVRRFQKIDVNEPSIPDTIEIMKGLKPYFEDFHKVKYTVDAIKSAVELSARYISDRKLPDKAIDVIDETGASQMLLPENKRKKTIGVKEIEATIATMARIPPKSVSKDDEEVLSHLEAELKRVVYGQDLAIDALSASIKLARAGLREPDKPIGSYLFSGPTGVGKTEVAKQLASSLGVELLRFDMSEYMERHTVSRLIGAPPGYVGFDQGGLLTDGVDQHPHCVLLLDEIEKAHPDLFNILLQVMDHGALTDHNGKKIDFRNVILIMTTNAGASDMAKAAIGFGSTRREGDDMEAINRLFTPEFRNRLDAIIPFGPLPVPVIHQVVQKFVLQLEAQLAERGVTFELTDAAIAWLADKGYDERMGARPLARVIQEHIKKPLADEVLFGKLKHGGTVRVDVTTKEDGNTDLMLESIAEKPVKPKKDIPPEKKLPQRRKAAPKKAEKEKVLAGKDEPAPKPTTKATPIKSSVPKVPRKK

SEQ ID NO: 7218 - protein, 822 aa, Mesorhizobium loti
MPAFSQGLEKALHQALTLANERHHEYATLEHLLLALIDDTEAAAVMRACNVDLDELKHTVLTYIDTELDNLVTGYDEDSKPTAGFQRVIQRAVIHVQSSGREEVSGANVLVAIFAERESHAAYFLQEQQMTRYDAVNYISHGIAKRPGASETRSPRGADDEQGGQNGAEPQEEGGKKKQQQDALTAYCVNLNNKAKAGKIDPLIGRESEINRTIQVLCRRSKNNPLYVGDPGVGKTAIAEGLAKRIVEGDVPEVLHNATIFALDMGTLLAGTRYRGDFEERLKQVVKELEDYPGAVLFIDEIHTVIGAGATSGGAMDASNLLKPALSSGAIRCIGSTTYKEFRQFFEKDRALVRRFQKIDVNEPTIEDAIEIMKGLKPYFEEFHKVRYTSEAIKASVELSARYINDRKLPDKAIDVIDETGASQMLVPEAKRKKTIGIKEIEATIATMARIPPKTVSADDEKVLQGLDIELKRVVYGQDTAITALTSAIKLARAGLREPEKPIGSYLFSGPTGVGKTEVAKQLAASLGVELIRFDMSEYMERHTVSRLIGAPPGYVGFDQGGLLTDGVDQHPHCVLLLDEVEKAHPDLFNILLQVMDHGKLTDHNGKQIDFRNVILIMTTNAGASDAQRAAIGFGSTKREGDDVEAINRLFTPEFRNRLDAIIPFGSLPVPVIHQVVQKFVMQLEAQLSERGVTFDLSPDAIAWLADKGYDERMGARPLGRVIQEHIKKPLADEVLFGKLKKGGTVRVTVEKKETGETGLKLESLADEAPVKPKKEEPEDAPKPPKAVAKKPAAKKVVAQKPEPKGKDGGKRSLVPQLPRKG

SEQ ID NO: 7219 - protein, 838 aa, Sinorhizobium meliloti
MPTFSPSLEKALHQALTFANERHHEYATLEHLLLALIDDADAAAVMGACNVNLDTLRKTVTDYVDNELSNLVTGYDEDSKPTAGFQRVIQRAVIHVQSSGREEVTGANVLVAIFAERESHAAYFLQEQEMTRYDAVNFISHGIGKRPGSSEARPVRGAEDQDSEQKASRESEEAGPKKQQDALTAYCVNLNEKAKSGKIDPLIGRHAEVNRTIQVLCRRSKNNPLYVGDPGVGKTAIAEGLAKRIIEKKVPEALQDATIFALDMGTLLAGTRYRGDFEERLKQVVKELEDYPGAVLFIDEIHTVIGAGATSGGAMDASNLLKPALSSGAIRCIGSTTYKEYRQFFEKDRALVRRFQKIDVNEPTIADTIEIMKGLKPYFEDYHQLKYTNDAIKAAVELSARYINDRKLPDKAIDVIDESGAAQMLLPVSKRRKLITEREIEATVATMARIPPKTVSKDDEAVLANLEQELRSVVYGQDLAIEALASSIKLARAGLREPNKPIGCYVFSGPTGVGKTEVAKQLATSLGVELLRFDMSEYMERHTVSRLIGAPPGYVGFDQGGLLTDGVDQHPHCVLLLDEIEKAHPDLFNILLQVMDHGSLTDHNGKKIDFRNVILIMTTNAGASDMARAAIGFGSSKRTGEDVEALNRLFTPEFRNRLDSVIPFNSLPTPVIHKVVQKFVMQLETQLAERNVTFDLAPDAIAWLAERGYDEKMGARPLARVIQENIKKPLADEILFGKLKKGGVVKVTIGNKEDGTKGLMLEAVPETAPIKPKAEVSRPAGKGAKPKKAAEKESVAAAEDGAKAKSKKTTAKSSNKSGGSSGAAPLRGRTVPKVPRKK

SEQ ID NO: 7220 - protein, 857 aa, Escherichia coli
MRLDRLTNKFQLALADAQSLALGHDNQFIEPLHLMSALLNQEGGSVSPLLTSAGINAGQLRTDINQALNRLPQVEGTGGDVQPSQDLVRVLNLCDNVAQKRGDNFISSELFVLAALESRGTVADILKAAGATTANITQAIEQMRGGESVNDQGAEDQRQALKKYTIDLTERAEQGKLDPVIGRDEEIRRTIQVLQRRTKNNPVLIGEPGVGKTAIVEGLAQRIINGEVPEGLKGRRVLALDMGALVAGAKYRGEFEERLKGVLNDLAKQEGNVILFIDELHTMVGAGKADGAMDAGNMLKPALARGELHCVGATTLDEYRQYIEKDAALERRFQKVFVAEPSVEDTIAILRGLKERYELHHHVQITDPAIVAAATLSHRYIADRQLPDKAIDLIDEAASSIRMQIDSKPEELDRLDRRIIQLKLEQQALMKESDEASKKRLDMLNEELSDKERQYSELEEEWKAEKASLSGTQTIKAELEQAKIAIEQARRVGDLARMSELQYGKIPELEKQLEAATQLEGKTMRLLRNKVTDAEIAEVLARWTGIPVSRMMESEREKLLRMEQELHHRVIGQNEAVDAVSNAIRRSRAGLADPNRPIGSFLFLGPTGVGKTELCKALANFMFDSDEAMVRIDMSEFMEKHSVSRLVGAPPGYVGYEEGGYLTEAVRRRPYSVILLDEVEKAHPDVFNILLQVLDDGRLTDGQGRTVDFRNTVVIMTSNLGSDLIQERFGELDYAHMKELVLGVVSHNFRPEFINRIDEVVVFHPLGEQHIASIAQIQLKRLYKRLEERGYEIHISDEALKLLSENGYDPVYGARPLKRAIQQQIENPLAQQILSGELVPGKVIRLEVNEDRIVAVQ

SEQ ID NO: 7221 - protein, 594 aa, Escherichia coli
MRLDRLTNKFQLALADAQSLALGHDNQFIEPLHLMSALLNQEGGSVSPLLTSAGINAGQLRTDINQALNRLPQVEGTGGDVQPSQDLVRVLNLCDKLAQKRGDNFISSELFVLAALESRGTLADILKAAGATTANITQAIEQMRGGESVNDQGAEDQRQALKKYTIDLTERAEQGKLDPVIGRDEEIRRTIQVLQRRTKNNPVLIGEPGVGKTAIVEGLAQRIINGEVPEGLKGRRVLALDMGALVAGAKYRGEFEERLKGVLNDLAKQEGNVILFIDELHTMVGAGKADGAMDAGNMLKPALARGELHCVGATTLDEYRQYIEKDAALERRFQKVFVAEPSVEDTIAILRGLKERYELHHHVQITDPAIVAAATLSHRYIADRQLPDKAIDLIDEAASSIRMQIDSKPEELDRLDRRIIQLKLEQQALMKESDEASKKRLDMLNEELSDKERQYSELEEEWKAEKASLSGTQTIKAELEQAKIAIEQARRVGDLARMSELQYGKIPELEKQLEAATQLEGKTMRLLRNKVTDAEIAEVLARWTGIPVSRMMESEREKLLRMEQELHHRVIGQNEAVDAVSNAIRRSRAGLADP

SEQ ID NO: 7222 - protein, 195 aa, Escherichia coli
HMQALKKYTIDLTERAEQGKLDPVIGRDEEIRRTIQVLQRRTKNNPVLIGEPGVGKTAIVEGLAQRIINGEVPEGLKGRRVLALDMGALVAGAKYRGEFEERLKGVLNDLAKQEGNVILFIDELHTMVGAGKADGAMDAGNMLKPALARGELHCVGATTLDEYRQYIEKDAALERRFQKVFVAEPSVEDTIAILR

SEQ ID NO: 7223 - protein, 771 aa, Rhodobacter sphaeroides
MPSFSTTLEQAIHGALALANARRHELATLEHLLLALIDEPDASRVMKACSVDLDELRKTLVDFIDDDLSTLVTSVEGSEAVPTAAFQRVIQRAAIHVQSSGRTEVTGANVLVAIFAERESNAAYFLQEQDMTRYDAVNFIAHGVAKDPSYGEPRPVTGAEEHHETPKAEAGEAKESALSKYCVDLNVKARKGDVDPLIGREHEVERCIQVLCRRRKNNPLLVGDPGVGKTAIAEGLARKIVNGETPDILARATIFSLDMGALLAGTRYRGDFEERLKAVVKEMEDHPDAILFIDEIHTVIGAGATSGGAMDASNLLKPALQGGKLRCMGSTTYKEYRQHFEKDRALSRRFQKIDVNEPSVEDTVKILMGLKPYFEEHHDLRYTQDAIRTAVELSARYIHDRKLPDKAIDVIDEAGAAQHLLADSKRRKTIGPREIEAVVAKIARIPPKSVSKDDAEVLRDLEKTLKRVVFGQDRAIEALSSAIKLARAGLREPEKPIGNYLFAGPTGVGKTEVAKQLASILGVELLRFDMSEYMEKHAVSRLIGAPPGYVGFDQGGMLTDGVDQHPHCVLLLDEIEKAHPDVYNILLQVMDHGKLTDHNGRSVDFRNVILIMTSNAGAAELAKSAIGFGRDRREGEDTAAIERTFTPEFRNRLDAVISFAPLGKEIILQVVEKFVLQLEAQLMDRGVHIELSPEAAAWLGDKGYDDKMGARPLGRVIQENIKKPLAEELLFGRLVKGGVVKVGVKDDTIDLQIEEPKPRLTGSKPPLLTAD

SEQ ID NO: 7224 - protein, 794 aa, Rhodopseudomonas palustris
MPTFSQSLEQSLHRALAIANERHHQYATLEHLLLSLVDDSDAAAVMRACSVDLDKLRTSLVNYLETEFENLVTDGSEDAKPTAGFQRVIQRAVIHVQSSGREEVTGANVLVAIFAERESHAAYFLQEQDMTRYDAVNYISHGIAKRPGVSEARPVRGVDEETETKGGDDSKKKGDALETYCVNLNKKARDGKIDPVIGRNAEISRAIQVLCRRQKNNPLFVGEAGVGKTAIAEGLAKRIVDGEVPEVLSAATVFSLDMGTLLAGTRYRGDFEERLKQVLKELEAHPNAILFIDEIHTVIGAGATSGGAMDASNLLKPALASGTIRCMGSTTYKEYRQHFEKDRALVRRFQKIDVNEPTVEDAIAILKGLKPYFEDYHKLKYTNEAIESAVQLSSRYIHDRKLPDKAIDVIDESGAAQMLLSENKRKKTIGIKEIEATVATMARIPPKSVSKDDAEVLKHLEQTLKRVVFGQDKAIEALSASIKLARAGLREPEKPIGCYLFSGPTGVGKTEVAKQLASTLGVELLRFDMSEYMERHTVSRLIGAPPGYVGFDQGGLLTDGVDQHPHCVVLLDEIEKAHPDLYNVLLQIMDHGRLTDHNGKQVNFRNVILIMTTNAGAADLARQAFGFTRNKREGDDHEAINRQFAPEFRNRLDAIVSFAHLNADVIGMVVEKFVLQLEAQLADRDVTIELSEPAKAWLVQHGYDEQMGARPMARVIQEHIKKPLADEVLFGKLKGGGHVKVVLVKDDAVAGVELEKIGFEFLDGPVTPKPENLPGKKRGGSARKAKVKDQVEKA

SEQ ID NO: 7225 - protein, 804 aa, Rhodospirillum rubrum
MAVRHQPQIAARPGRGRNRFKKGAGMLSRNLEQTLHRALALASQRRHEYATLEHLLLALVDDQDAVSVLKACSVDVEKLRKQLAEFVEHELTGLVVAAPEGDPKPTAGFQRVVQRAAIHVQSSGREQVTGANILVALFSERESHAVYFLQMQDMTRLDAVNYISHGIAKAPGHGQARAPRGADEETKSEETATVKKGREALDAYCVNLNEKAAEGKIDPLIGRDQEVERTIQILCRRNKNNPLLVGDPGVGKTAIVEGLARRIVHKEVPEVLHNATIFSLDMGALLAGTRYRGDFEERLKAVVGELEAYEGAVLFIDEIHTVIGAGATSGGSMDASNLLKPALAQGLLRCVGSTTYKEFRNHFEKDRALVRRFQKIDVNEPSVEDTVKILRGIKSYYEDHHKVRYTNDAVRAAVELSNKYINDRKLPDKAIDVIDEVGAARMLLPESRRRKTVTVRDIEEIVAKIARIPPKSVSRDDQAVLKSLERDLKTMVFGQDQAIEALASAIKLARAGLREPTKPIGNYLFSGPTGVGKTEVARQLARILGIELVRFDMSEYMERHSVSRLIGAPPGYVGFDQGGLLTDAVDQQPHCVLLLDEIEKAHPDLFNILLQVMDHGKLTDHNGKHVDFRNVILIMTTNAGAQMLAKNAMGFGRETRSGDDTEEIERSFSPEFRNRLDAIIPFANLAAETVGMVVDKFVMELEAQLADRNVTIELTDKARSWLAEKGYDRRMGARPLARIIQETIKKPLAEELLFGKLTKGGRVKVGVKDGKPDFAFFDLPPKDLLEKEGERGDNDESPTEEVAD

SEQ ID NO: 7226 - protein, 248 aa, Chloroflexus aurantiacus
DGEILLLNGGRRVSFQQSIVIFTTNVGAKEMVDFLDRRTIGFRTPHKDVEATGREIYQIGFEALQKVFQPEWINRLDEIIAFRPLSAETLSHVFDRMIAECNQQYLRYAIQLRVTPEAKEYLLNKGFDSRFGARPLRQRILKDIESPLSDLLASGGIPAGSLVELRYTGIDQHGQALEFYYTEAPELIERAEELRQRDLQRIAVGQSDGPQPPSISLTHERSNAAEGGIFTTRGPRVTPRRDPHFGDK

SEQ ID NO: 7227 - protein, 771 aa, Ralstonia metallidurans
MRDGGSMIAQELEVSLHMAFVEARQARHEFITVEHLLLALLDNPTAAEVLRACAANIEDLRTSLKNFIADNTPVVPGTDEVDTQPTLGFQRVIQRAIMHVQSTSNGKKEVTGANVLVAIFGEKDSHAVYYLQQQGVTRLDVVNFISHGIRKDQAEPAKHGDGNAEGEGGDGKESPLEQYTQNLNTLAKAGKIDPLIGRESEVERVVQVLCRRRKNNPLLTGEAGVGKTAIAEGLAWRITKGEVPDILEKAVVYSLDMGALLAGTKYRGDFEQRLKGVLKSLKDNPNAILFIDEIHTLIGAGAASGGTLDASNLLKPALSSGQLKCIGATTFTEYRGIFEKDAALSRRFQKIDVVEPSVDQTVQILRGLKSRFEEHHGVKYAASALTAAAELSARFITDRHLPDKAIDVIDEAGAAQRILPKSKQKKTIGKAEIEDIVSRIARIPPQSVNQDDRSKLQTLERDLKSVVFGQDPAIEALASAIKMSRAGLGKTDKPIGSFLFSGPTGVGKTEVAKQLAFIMGIELLRFDMSEYMERHAVSRLIGAPPGYVGFDQGGLLTEAVTKKPHCVLLLDEIEKAHPDIFNILLQVMDHGSLTDNNGRRADFRNVIIIMTTNAGAETMNRATIGFTTAREQGDEMADIKRMFTPEFRNRLDAMISFRSLDEEIILRVVDKFLMQLEEQLHEKKVDASFSEKLRKYLAKKGFDPLMGARPMQRLIQDMIRKALADELLFGKLVSGGKVAVDLDDDDQIKLTFSEADPEPPEAPESEQRAEV

SEQ ID NO: 7228 - protein, 82 aa, Ralstonia metallidurans
MRIDKLTTRFQEALAEAQSLALGNDNQYIEPQHLLRALLAQDDGAARTLLSRAGVNVGGLQSALDAAIHRLPQVQGTNEVQV

SEQ ID NO: 7229 - protein, 769 aa, Neisseria meningitidis MC58
MLAPELEQILQQLYREARKAHYEFISLEHLLLVLIEEDASVHNVLKLCGADLKVVSEQLAASVAENTPLIPEHLLDTVETRPTLGFQRVMQRAMVHTQSAGKAAVEPLDVLVALMSETDSHTVYFLKLQSVTRFEVLRCIAHGSPDEDEDEDEDEDDGNYSSDGMDDDNGNRTKPGKNPLSAYTVNLNAEVKAGRIDPLIGRKHEMERLVQILCRRRKNNPLLVGEAGVGKTALAEGLAHQIVNGGIPDALKDAEVYALDMGSLLAGTKYRGDFEARVKSVLKQLEKIPHAILFIDEIHTIIGAGSTSGGTMDASNLLKPALAKGSLRCIGATTYDEYRTIFDKDHALSRRFQKIDVVEPTVSETVQILRGLKPMFEAFHQVRYTQGALEAAAELSARYINERFLPDKAIDVMDEAGAEQRILPKSKQKKVIGKAQIETVIAKVARIPEKTVSHDDKQVLQFLGRDLKNMVYGQENAIDALVAAVKMSRSGLALPDKPIGSFLFSGPTGVGKTEVAKQLAYSMGVPLQRFDMSEYMERHAVSRLIGAPPGYVGFEQGGLLTEAINKQPHCVLLLDEIEKAHPDIFNVLLQVMDAGKLTDNNGKSADFRNVILIMTTNAGAESLSRPSLGFTAKRERGDEMQAINKLFTPEFRNRLDAIIPFAPLSEPVITKVVDKFLLQLEHRLLDKKVEAEFTSALHKYLAEKGFDPQMGARPMHRLIQEKIRKPLADELLFGKLSDGGFVRIDWDAAKEEAVLKFKKSKVKIKTASA

SEQ ID NO: 7230 - protein, 759 aa, Neisseria meningitidis Z2491
MLSPELEHILQLLYREARNARYEFISLEHLLLVLIEEDAAVPNVLKLCGADLKVLSEQLAASVAENTPQIPDHLLDTVETQPTLGFQRVIQRAMVHTQSAGKAAVEPLDILVAMMSESESHAVYFLKLQSITRFEVLRCIAHGSPDDEDGNDSDGLGREGEEAEQKTGSLSDYTVNLNAEVKAGRIDPLIGRKHEMERLVQILCRRRKNNPLLVGEAGVGKTALAEGLAHQIVKGDIPDALKDAEVYALDMGSLLAGTKYRGDFEARVKSVLKQLEKIPHAILFIDEIHTIIGAGSTSGGTMDASNLLKPALAKGALRCIGATTYDEYRTIFDKDHALSRRFQKIDVVEPTVSETVQILRGLKPMFEGFHQVRYTQGALEAAAELSARYINERFLPDKAIDVMDEAGAAQRILPKSKQKKVIGKAQIETVIAKVARIPEKTVSHDDKQVLQFLGRDLKNMVYGQENAIYALVAAVKMSRSGLGLPDKPIGSFLFSGPTGVGKTEVAKQLAYSMGVPLQRFDMSEYMERHAVSRLIGAPPGYVGFEQGGLLTEAVNKQPHCVLLLDEIEKAHPDIFNVLLQVMDAGKLTDNNGKSADFRNVILIMTTNAGAESLSRPSLGFTAKRERGDEMQAINKLFTPEFRNRLDAIIPFAPLSEPIIVKVVDKFLLQLEHRLLDKKVEAEFTPALRKYLAEKGFDPQMGARPMNRLIQEKIRKPLADELLFGKLVDGGFVRIDWDAAKEEAVLKFKKSKVKPETETV

SEQ ID NO: 7231 - protein, 747 aa, Deinococcus radiodurans
MTNRFDDRARLVFHYAREEGNRLGHAMVGPEHLLLGLMREGGSAAQILGEFGATLDSLRRKVEDIIGRGEGSRLNDAPSITPRARRVMELSGAEARALGSQTTSTQHILLGIIREGDGVAFRILQDLTKDVETIRWRILAEDSGEGGKAAKPVPTPFLDEYGRDLTKWAREGKLDPVIGRSEEIRRVTQILTRRTKNNPVLIGDPGVGKTAIVEGLALAIHEQRTPPSLHGVRLISLDLSGVVAGTKYRGEFEERLRQIIEELRTAKVMAFIDELHTLVGAGGAEGTLDAANILKPALSRGEIQVIGATTTGEYHRYIEKDAALERRFQPVIVLEPSPAETLQILRGLKPKYEEHHGVQIPDSALELAVRIGERSLPGRNFPDKAIDLIDEAASRVRLNMSVGLPVAENESGEPMVTREDMESVINSMGGIYSEETGAALIDLEEQLNDQVYGQPDAVKALTSAMRRARVGLGGRTRVSASFLFVGPSGVGKTHLAKALARTLFGSERALIRVDMSEFQEGHSISKLIGSPPGYVGFEQGGRLTEAVRRQPFSVILLDEIEKAHPDIYNTFLQVLDDGRLTDGQGRTVDFRRTVIIMTSNTGFNVNPTVGFSPVTPDSNAPLRNIFTPEFLDRLDDVIRFKSLGEDELVRVAQQLLGEMREELASRELNVTFDPAIAAWVVGKLKARSPKHAVGSSRQLRTLLREELEDPLALYLIGSDARDLRVVLGENSIDFEQVERSAPPQILA

SEQ ID NO: 7232 - protein, 741 aa, Deinococcus radiodurans
MLSEHLQAALQRAADLAQAAGHEYITQEHLLLALLGDPEAKDALNALGADLNALREALTEQLAELDILDDPDPDFTLGVHRVVQGAVLQLHASGKGKEQADGARVLVELLEEDDSPARAALEAQGVTRLDLLNYLSHGVAKAPGHSRERRVAGVDGELTAEGAPAEENPLEAYAQNLTEAAKNGEFDPVIGRGAELERVVHILARRGKNNPVLVGEPGVGKTALAEGLAQRVADGKAPGFLRGASVYALDLGALLAGTRYRGDFEGRLKAVLAALDGQNSVLFIDELHTLVGAGATEGGSVDAANLLKPALARGKLRVMGATTPAELRLLEKDRALWRRFQTVDVPEPSEADAVQILQGLAPKYAAHHGVTYTPPALEAAVRLSARYLRDRFLPDKAIDVLDEAGAARSSTGQGGEIDVPDIESTVARMARVPVGAVKAEEVQSLATLEADLNRRVYGQEPAVSAVSSAVKLARAGLRNPQKPQGSFLFAGPTGVGKTELARALAERLGVELIRFDMSEYQEPHTVARLIGAPPGYVGFDQGGLLTDAVAKNPHAVLLLDEIEKAHPDVYNIFLQLMDHGTLTDHAGKKVDGRGLILIFTTNAGAADASRPALGFSREGRAGEQAEAVKRTFTPEFRNRLDAVIYFAPLSRTVMTSVVDKFLRELGEQLTERGVTLTVTPAARARLAELGYDPLLGARPLARVIEDKLGRPLADELLFGRLKDGGAVKVGVQGGEFSFAVS

SEQ ID NO: 7233 - protein, 750 aa, Clostridium acetobutylicum
MKLDEIVNEIITAAYSEAKFDMHKYFTPEHILYASLFYNDGINIIKNTGGSVEGLKKQLEKYFMKNVEKLESGDPTQTVGVENIINQAANHVLTSGKDYVTIGDIYVAIYDDNASFGSYYLKQQGITRLKLLNYITHGISAVNDSDEDDIEPLPENEYLFDDYHEDEVCAIDKYTEDITEKAKNGLIDPLIGREDILKKTLQVLCRRRKNNPIHVGEPGVGKTAITEGLATLIAEDKVPTVLKGSKIYTLNMGTMVAGTKYRGDFEERIKNVLNEISKCEKPIVYIDEIHTIIGAGAVSGGTVDAANILKPYFTDGKIKFIGSTTYDEYKKIFDKDRALSRRFQKIDVGEPTINETYDILMGIKTRYEQFHNVHYTNASLKAAAALSAKCINDRFLPDKAIDVIDECGAFAEMNRKDTEKVYINVKDVENVISSISGIPVKDLSKTQIEKLKNLKKNLKSKIFGQDKALESIVQSIKRSSAGFNDENKPVASFLFVGPTGVGKTEISKQLAEALNIKLIRFDMSEYQEKHTVARLIGSPPGYVGYEEGGLLTDAVRKNPYCILLLDEIEKAHSDILNVLLQVMDYATLTDNSGKKADFRNIILIMTSNAGASEVGKNKVGFGNRVVGEDNIDKEVSKIFSPEFRNRLDDIIIFNKMDEDMAIRVAKRSLDEFQQKLNKKHIKIKVTDECYKWIASKGLNSNYGAREILRVIQEKIKPYFIDEVLFGNLTKGGETLIDVKDNNIKFESIDK

SEQ ID NO: 7234 - protein, 758 aa, Escherichia coli O157:H7 EDL933
MLNQELELSLNMAFARAREHRHEFMTVEHLLLALLSNPSAREALEACSVDLVALRQELEAFIEQTTPVLPASEEERDTQPTLSFQRVLQRAVFHVQSSGRNEVTGANVLVAIFSEQESQAAYLLRKHEVSRLDVVNFISHGTRKDEPTQSSDPGSQPNSEEQAGGEERMENFTTNLNQLARVGGIDPLIGREKELERAIQVLCRRRKNNPLLVGESGVGKTAIAEGLAWRIVQGDVPEVMADCTIYSLDIGSLLAGTKYRGDFEKRFKALLKQLEQDTNSILFIDEIHTIIGAGAASGGQVDAANLIKPLLSSGKIRVIGSTTYQEFSNIFEKDRALARRFQKIDITEPSIEETVQIINGLKPKYEAHHDVRYTAKAVRAAVELAVKYINDRHLPDKAIDVIDEAGARARLMPVSKRKKTVNVADIESVVARIARIPEKSVSQSDRDTLKNLGDRLKMLVFGQDKAIEALTEAIKMARAGLGHEHKPVGSFLFAGPTGVGKTEVTVQLSKALGIELLRFDMSEYMERHTVSRLIGAPPGYVGFDQGGLLTDAVIKHPHAVLLLDEIEKAHPDVFNILLQVMDNGTLTDNNGRKADFRNVVLVMTTNAGVRETERKSIGLIHQDNSTDAMEEIKKIFTPEFRNRLDNIIWFDHLSTDVIHQVVDKFIVELQVQLDQKGVSLEVSQEARNWLAEKGYDRAMGARPMARVIQDNLKKPLANELLFGSLVDGGQVTVALDKEKNELTYGFQSAQKHKAEAAH

SEQ ID NO: 7235 - protein, 777 aa, Xylella fastidiosa Dixon
MENPRSCLILCVTVVGVTHMFSKDLEQTIGQCYKRTREACHEFMTVEHLLLSLLDNPLAHAVLKACGADVTRLKRDLEQAIEVSITRLDADDGRDTQPTLGFQRVLQRAVYHVQSSGKKEVTGANVLVAIFGEKDSHAVYFLNQQDISRLDIVNYLSHGITRMGEESDIGQAAENEAKGESEANKGDALAEYAINLNEHARNGRIDPLVGRKDEIERTIQVLCRRRKNNPLYVGEAGVGKTAIAEGLAKRIVDRSVPEVLADAVIYSLDLGALVAGTKYRGDFEKRLKGVLSALRKTPNVVLFIDEIHTIIGAGSASGGTMDASNLIKPALASGELRCIGSTTFQEYRGIFEKDRALARRFQKIDIVEPTAGEAFEILQGLKPKYEAHHGVTYADDALRAAVDLSVKHIGDRLLPDKAIDVIDEAGARQRLLPEKERKELIDIEEIETIVTKMARVPAKQVSVSDKDILKHLERNLKMVIFGQEPAIEMLSSAIKLARSGLGNPDKPIGNFLLAGPTGVGKTEVTKQLAHHLGIELVRFDMSECMEPHSVSRLIGAPPGYVGFDQGGLLTEKIVKTPHCVLLLDEVEKAHIDVFNILLQVMDRGVLTDTNGREASFKNVILVMTTNAGASQSSRRTIGFTKQDHTSDAMEVICRSFSPEFRNRLDAIVQFQPLGFSHILRVVDKFIIELEMLLQEKRVVLSATPIARDWLAQHGFDPLMGARPMARVIQEKIKRPLADELLFGKLLNGGRVGIDVRDNELIVETYSEPELLFPATVE

SEQ ID NO: 7236 - protein, 777 aa, Xylella fastidiosa Ann-1
MENPRSCLILCVTVVGVTHMFSKDLEQTIGQCYKRTREACHEFMTVEHLLLSLLDNPLAHAVLKACGADVTRLKRDLEQAIEVSITRLDADDGRDTQPTLGFQRVLQRAVYHVQSSGKKEVTGANVLVAIFGEKDSHAVYFLNQQDISRLDIVNYLSHGITRMGEESDIGQAAENEAKGESEANKGDALAEYAINLNEHARNGRIDPLVGRKDEIERTIQVLCRRRKNNPLYVGEAGVGKTAIAEGLAKRIVDRSVPEVLADAVIYSLDLGALVAGTKYRGDFEKRLKGVLSVLRKTPNVVLFIDEIHTIIGAGSASGGTMDASNLIKPALASGELRCIGSTTFQEYRGIFEKDRALARRFQKIDIVEPTAGEAFEILQGLKPKYEAHHGVTYADDALRAAVDLSVKHIGDRLLPDKAIDVIDEAGARQRLLPEKERKELIDIEEIETIVTKMARVPAKQVSVSDKDVLKHLERNLKMVIFGQEPAIEMLSSAIKLARSGLGNPDKPIGNFLLAGPTGVGKTEVTKQLAHHLGIELVRFDMSEYMEPHSVSRLIGAPPGYVGFDQGGLLTEKIVKTPHCVLLLDEVEKAHMDVFNILLQVMDRGVLTDTNGREASFKNVILVMTTNAGASQSSRRTIGFTKQDHTSDAMEVICRSFSPEFRNRLDAIVQFQPLGFSHILRVVDKFIIELEMLLQEKRVVLSATPIARDWLAQHGFDPLMGARPMARVIQEKIKRPLADELLFGKLLNGGRVGIDVRDNELIVETYSEPELLFPATVE

SEQ ID NO: 7237 - protein, 563 aa, Magnetococcus sp. MC-1
MERVGLYRGYLMISKHLETSLNKALQLAHARRHQFATLEHLLLALLDNPEVVDILIPCGCDMQQLNMELAEHLEQHIPLSADAAPSIADITPTIAFQRVIQRAVQQVQSSGRDMVTGAYVLVAMFNEKDAHAVYFLAKQNINKLDVQSMIAHGGESEATGAGEHGHAHEGSAAGAGNKEKDDPLAAYTVNLNIRAQEGKIDPLIGRENEIRRTLQILCRRRKNNPLYVGDAGVGKTHLAEGLALKIVNGEVPEILADAEVFSLDMGSLLAGTKYRGDFESRLKNVLRALKERPKSVLFIDEIHTVIGAGATSGSTMDASNLLKPMLQNGELRCIGSTTFEEYRTIFEQDRALARRFQKVDVLEPSLEETIKILKGLKIRFEDHHGVRFTNQALQTAAELSARHINDRKHPDSAIDVIDEAGAASQLLPLSKRKKSIGVKEIEQVVALMARIPTRSVSKDDRQVLRNLDKNLRLSLFGQDGAIDKTCEAIKLNRSGLGNPEKPIGSFLFAGPTGVGKTELARLLAAEMGVELIRFDMSEYMERHAVSRLIGAPPGYVGLSRVDC

SEQ ID NO: 7238 - protein, 308 aa, Magnetococcus sp. MC-1
SCISVSFCSFFVFLLPVYPRPCIRSWQCFVLVLGVVSDPYPGACFGPRVVTDCPLLLLMGCLSRYILSIWASSVSRLIGPPQLCGFEQVVLLTDAWTFNPHSVLLLDEIEKAHRDVLNILLQVMDHGKLTDNNGRQADFRNVVLIMTTNAGASDLERASVGFVTQTHVGDDMKAINQTFAPEFRNRLDAIIPFVQLNRETILRVVDKFLVRLETQLEEKGVALFVDDSARHLLAKKGYDKKHGARPMERAIQQELRKPLSDELLFGKLVHGGAVHVSAVEAANELAILVEDSHEVEKAEKTSEETSEA

SEQ ID NO: 7239 - protein, 809 aa, Treponema pallidum
MKIIISASVQIILDQAFDLARKRRHEYITAEHVLFSALAHPAALEIINLCSADIALIHSNLSEFLKTQVPVDLSHTPSQSLGFQHLLKRAVLYCEANKKSALEVGDLLVSLLQAETNYASYYMRMSGMSTARLIEVIARVNGIRHGDKNVSMGSNAQERYSESDDVGESAGHGPPLDGTEGDGNTADVHVHYEHCAHKRTDADTHRYTVLEKYTVNLTERARRGELAPLIGRTQEIERTIQILCRRQKNNPVHVGEAGVGKTAITEGLAQRIVRCDVPEALEGVEIFSLDMTSLLAGTKFRGDFEERLKRLAEELEKKTQAILFIDEIHTVVGTGSGGSGGLDASNLLKPLLSSGKIRCIGSTTYEEYTKHFRKDQALARRFQKIDIEEPSEEETLRILEGIRTLYEDFHAVHYSDEALAAAVRLSVQYIQGRHLPDKAIDIIDEAGACAKLSRGKHGTEGVCSVIGESDIDEIVAKIAKIPKQRVSASEIEKLRNFERSISEKIFGQGEAIDLVTRTLKRARVGLRVKHKPIANLLFVGATGVGKTELARTLAQELGIVLHRFDMSEYQEKHTVSRLIGSPPGYVGFEEGGLLTDAVRKQPHAVLLLDEIEKAHPDIFNVLLQVMDYATLTDNQGRKADFRNVILIMTSNAGARNMGVSLIGFHKGQVGTAVIDEAVERIFSPEFRNRLDAVIRFDALSLETMERIARKELALVCEQLQKKHIRFDITDDALALLAERSHSGGSGARNVARLVEQEVANVLADLMLFGGVAEGDALRCTVKDRHAQCNFLRIECVQSSYSGSIQDALG

SEQ ID NO: 7240 - protein, 756 aa, Pseudomonas putida KT2440
MLNRELEVTLNLAFKEARSKRHEFMTVEHLLLALLDNEAAATVLRACGANLDKLKHDLQEFIDSTTPLIPVNDEDRETQPTLGFQRVLQRAVFHVQSSGKREVTGANVLVAIFSEQESQAVFLLKQQSVARIDVVNYIAHGISKVPGHGAQSESEQDMQDDEGGETSSSSNPLDAYASNLNELARAGRIDPLVGREQEVERVAQILARRRKNNPLLVGEAGVGKTAIAEGLAKRIVDGQVPDLLAQSVVYSLDLGALLAGTKYRGDFEKRFKALLGELRKRPQAILFIDEIHTIIGAGAASGGVMDASNLLKPLLSSGEIRCIGSTTFQEFRGIFEKDRALARRFQKVDVSEPSVEDTVGILRGLKGRFESHHNIEYSDEALRAAAELASRYINDRHMPDKAIDVIDEAGAYQRLQPEASRVKRIDVPQVEDIVAKIARIPPKHVTSSDKELLRNLERDLKLTVFGQDQAIDSLATAIKLSRAGLKSPDKPVGSFLFAGPTGVGKTEAARQLAKALGVELVRFDMSEYMERHTVSRLIGAPPGYVGFDQGGLLTEAITKQPHCVLLLDEIEKAHPEVFNLLLQVMDHGTLTDNNGRKADFRNVILIMTTNAGAETAARASIGFTHQDHASDAMEVIRKSFTPEFRNRLDTIIQFGRLSTETIKSIVDKFLIELQAQLEDKRVLLEVSDEARGWLAVSGYDVQMGARPMARLIQDKIKRPLAEEILFGELAEHGGVVHVDLRDGELVFDFETTAEVA

SEQ ID NO: 7241 - protein, 758 aa, Xylella fastidiosa 9a5c
MFSKDLEQTIGQCYKRTREACHEFMTVEHLLLSLLDNPLAHAVLKACGADVARLKRDLEQAIEVSITRLDADDGRDTQPTLGFQRVLQRAVYHVQSSGKKEVTGANVLVAIFGEKDSHAVYFLNQQDISRLDIVNYLSHGITRMGDESDIGQAAENEAKGDSEANKGDALAEYAINLNEHARNGRIDPLVGRKDEIERTIQVLCRRRKNNPLYVGEAGVGKTAIAEGLAKRIVDRSVPEVLADAVIYSLDLGALVAGTKYRGDFEKRLKGVLSALRKTPNAVLFIDEIHTIIGAGSASGGTMDASNLIKPALASGELRCIGSTTFQEYRGIFEKDRALARRFQKIDIVEPTAGEAFEILQGLKPKYEAHHGVTYADDALRAAVDLSVKHIGDRLLPDKAIDVIDEAGARQRLLPEKERKELIDIEEIETIVTKMARVPAKQVSVSDKDVLKHLERNLKMVIFGQEPAIEMLSSAIKLARSGLGNPDKPIGNFLLAGPTGVGKTEVTKQLAHHLGIELVRFDMSEYMEPHSVSRLIGAPPGYVGFDQGGLLTEKIVKTPHCVLLLDEVEKAHMDVFNILLQVMDRGVLTDTNGREASFKNVILVMTTNAGASQSSRRTIGFTKQDHTSDAMEVICRSFSPEFRNRLDAIVQFQPLGFSHILRVVDKFIIELEMLLQEKRVVLSATPIARDWLAQHGFDPLMGARPMARVIQEKIKRPLADELLFGKLLNGGRVGIDVRDNELIVETYSEPERLFPATVE

SEQ ID NO: 7242 - protein, 758 aa, Xylella fastidiosa Temecula1
MFSKDLEQTIGQCYKRTREACHEFMTVEHLLLSLLDNPLAHAVLKACGADVTRLKRDLEQAIEVSITRLDADDGRDTQPTLGFQRVLQRAVYHVQSSGKKEVTGANVLVAIFGEKDSHAVYFLNQQDISRLDIVNYLSHGITRMGEESDIGQAAENEAKGESEANKGDALAEYAINLNEHARNGRIDPLVGRKDEIERTIQVLCRRRKNNPLYVGEAGVGKTAIAEGLAKRIVDRSVPEVLADAVIYSLDLGALVAGTKYRGDFEKRLKGVLSALRKTPNVVLFIDEIHTIIGAGSASGGTMDASNLIKPALASGELRCIGSTTFQEYRGIFEKDRALARRFQKIDIVEPTAGEAFEILQGLKPKYEAHHGVTYADDALRAAVDLSVKHIGDRLLPDKAIDVIDEAGARQRLLPEKERKELIDIEEIETIVTKMARVPAKQVSVSDKDVLKHLERNLKMVIFGQEPAIEMLSSAIKLARSGLGNPDKPIGNFLLAGPTGVGKTEVTKQLAHHLGIELVRFDMSEYMEPHSVSRLIGAPPGYVGFDQGGLLTEKIVKTPHCVLLLDEVEKAHMDVFNILLQVMDRGVLTDTNGREASFKNVILVMTTNAGASQSSRRTIGFTKQDHTSDAMEVICRSFSPEFRNRLDAIVQFQPLGFSHILRVVDKFIIELEMLLQEKRVVLSATPIARDWLAQHGFDPLMGARPMARVIQEKIKRPLADELLFGKLLNGGRVGIDVRDNELIVETYSEPELLFPATVE

SEQ ID NO: 7243 - protein, 760 aa, Yersinia pestis KIM
MPMLNQELELSLNMAFARAREHRHEFMTVEHLLLALLSNPAAREALEACTVDLVALRQELEAFIEQTTPTLPVSEEERDTQPTLSFQRVLQRAVFHVQSSGRNEVSGANVLVAIFSEQESQAAYLLRKHDVSRLDVVNFISHGARKDEPSQTPNVDNSPSEEQASGEDRMENFTTNLNQLARVGGIDPLIGRDKELERTIQVLCRRRKNNPLLVGESGVGKTAIAEGLAWRIVQGDVPDVISECTLYSLDIGSLLAGTKYRGDFEKRFKALLKQLENDKDSILFIDEIHTIIGAGAASGGQVDAANLIKPLLSSGKIRVIGSTTYQEFSNIFEKDRALARRFQKIDIIEPTPEETVQIINGLKPKYEAHHDVRYTAKAIRAAVELSVKYINDRHLPDKAIDVIDEAGARSRLMPVNKRKKTVNVSDIESVVARIARIPEKTVSASDRDVLRNLSDRLNMLVFGQDKAIEALSEAIKMSRAGLGHERQPVGSFLFAGPTGVGKTEVTVQLAKALDIELLRFDMSEYMERHTVSRLIGAPPGYVGYDQGGLLTDSVIKHPHAVLLLDEIEKAHPDVFNLLLQVMDNGTLTDNNGRKADFRNVILVMTTNAGVRETQRTSIGFKQQDSSTDALEEIKKIFTPEFRNRLDNIIWFNHLSPAVIQQVVDKFIVELQAQLDAKGVSLEVSDEARDWLSEKGYDKAMGARPMTRVIQENLKKPLANELLFGSLVDGGSVTVNLDKEKQQLAYEFQSAQKRKTEGAVH

SEQ ID NO: 7244 - protein, 765 aa, Magnetospirillum magnetotacticum
MLSRNLEQSLHRALSQASERRHEYATLEHLLLALTDDQDAVAVLRACNVDIDKLKRDLGEFIDTNLSELVSPRGTDPKPTAGFQRVVQRAAIHVQSSGREEVTGANVIVALFSERESHAVYFLQNQDMTRLDAVNYISHGVAKAPGRGQSRTVHGADEDANPDKVVKKGQEALNAYCVNLNKKAAQGKIDPLIGRDEEIDRTIQILCRRSKNNPLYVGDPGVGKTAIAEGLARRIVNGEVPDVLKNATIFALDMGALLAGTRYRGDFEERLKAVVTELENYDGAVMFIDEIHTVIGAGATSGGSMDASNLLKPALASGSLRCIGSTTYKEFRNHFEKDRALVRRFQKIDVAEPSIPDAIKILNGIKTYYESHHKVRYTAEAIKAAVELSAKYITDRKLPDKAIDVIDEVGASRMLLPESKRRKTVTVKDIEDIVAKIARIPPKSVSTNDVEALRNLERDLKTLVFGQDKAIEALASAIKLARAGLREPEKPIGCYLFSGPTGVGKTEVARQLAKIMGIELTRFDMSEYMERHSVSRLIGAPPGYVGFDQGGLLTDAIDQHPHSVLLLDEIEKAHPDLFNILLQVMDHGRLTDHNGKTVDFRNVILIMTTNAGAADLAKSAIGFGRESREGDDTDAINRMFSPEFRNRLDSTIAFASLTPEIVAQVVDKFVMHLETQLGDRDVTIELTDEARAWLSKKGYDRSFGARPLARVIQEHIKKPLAEELLFGRLSKGGIVRIRVGEDNKLAFEFLATIHKTADKIPELVE

SEQ ID NO: 7245 - protein, 445 aa, Magnetospirillum magnetotacticum
MPGPEEESSSDRPSGDDGEARPKKKADALEAYCVNLNKKARDGKIDPLIGRHSEVERTIQVLCRRQKNNPLLVGDPGVGKTAIAEGLARKIIQNEVPEVLADATVFSLDMGTLLAGTRYRGDFEERLKQVMKEIEAHPNAIMFIDEIHTVIGAGATSGGAMDASNLLKPALASGALRCIGSTTYKEYRQYFEKDRALVRRFQKIDVNEPSIPDTIEILKGLKPYFEEFHKLKYTTDAVKAAVELSARYINDRKLPDKAIDVIDETGASQMLVPEARRKRTIGVKEIETTIATMARIPPKTVSKDDAVVLKNLTENLKRVVYGQTNAIEALTSAIKLARAGLRDPDKPIGSYLFAGPTGVGKTEAAKQLAASLGVEMLRFDMSEYMERHTVSRLIGAPPGYVGFDQGGLLTDGIDQHPHCVLLLDEIEKAHPDLFNILLQVMDHES

SEQ ID NO: 7246 - protein, 332 aa, Magnetospirillum magnetotacticum
MRASNGPCPGQKSAWPRRGGSDAGMGCGSRLRPCIRPGARREGAHRSGPDPLVLRKRNTRSALPAALKKRRCPGGADPAGQRIDHAVPRQRADNGSIRGKDKRMNFEKYTERARGFVQAAQNLAVREGNPQLAPGHLLKVLLDDPEGLCAGLIDRAGGQSRVAHAQIEQWLAKQPKVSGNSAQPQATRELVRLFDTAEQAAEKAGDSYVTVERLLLAFAVEKESEAGRILTAAGVTAASLNGAINALRKGRTADNASAENAYDALKKYARDLTEAAREGKLDPVIGRDEEIRRTIQVLSRRTKNNPVLIGEPGVGKTAIVEGLALRIVNGDV

SEQ ID NO: 7247 - protein, 382 aa, Magnetospirillum magnetotacticum
TYGTRWSPAPPTRPLRARGPSPDNDRGRRCGWRDSGSCPLAKTCRGRFATMRASNGPCPGQKSAWPRRGGSDAGMGCGSRLRPCIRPGARREGAHRSGPDPLVLRKRNTRSALPAALKKRRCPGGADPAGQRIDHAVPRQRADNGSIRGKDKRMNFEKYTERARGFVQAAQNLAVREGNPQLAPGHLLKVLLDDPEGLCAGLIDRAGGQSRVAHAQIEQWLAKQPKVSGNSAQPQATRELVRLFDTAEQAAEKAGDSYVTVERLLLAFAVEKESEAGRILTAAGVTAASLNGAINALRKGRTADNASAENAYDALKKYARDLTEAAREGKLDPVIGRDEEIRRTIQVLSRRTKNNPVLIGEPGVGKTAIVEGLALRIVNGDV

SEQ ID NO: 7248 - protein, 123 aa, Magnetospirillum magnetotacticum
MEVVRASFRPEFLNRLDEILLFHRLGRGDMAGIVDIQLKRLRALLADRKIELSLDGGAMEWLAEKGYDPAYGARPLKRVIQRALQNPLAGLILEGLVKDGDSVSVTAGEGGLLMNGRFTGNEV

SEQ ID NO: 7249 - protein, 746 aa, Leptospira interrogans serovar lai str. 56601
MILTEEMERTLRKAWEEAKKRRNEFITLEHILLALTYDSVAKEVLEACGADIERLRKDLIDYLESELESFPESSGEVDPIYTIGVQHVLQLAEFHVQSTRNKKMDGGDVLAALFREDQSNAVYFLGSQDISRLDIVRYISHGIRKDSKKNPGKEMAGEEGEKISDPLRAFCVDLTAKAKEGKLDPMVGREDELDRTIHILCRRRKNNPIFVGEAGVGKTSIVEGLAQRVVDGKVPEPLKNLKVYSLDMGLLLAGTKFRGEFEERLKNVVAQITAQEDHVLFIDEIHTIIGAGAVSGGSLDASNLLKPALSSGELRCIGTTTYKEFKTIFEKDHALSRRFQKVEVGEPSISETIEILKGLLEKYESFHKVKYSSSAVEQAAELSARYILDRKLPDKAIDLLDEAGARVRLRESGKKTVTVREIEDLVSKIAKVPSVTVKADDREKLKNLDEELKAKIYGQDSAIDQLVQSIRLSRSGLSEPGKPVGSFLFAGPTGVGKTELTRKLAEILGVELIRFDMSEYMEKHTVSRLIGSPPGYVGFEQGGQLTDAVYRNPHCVLLLDEIEKAHEDIYNILLQIMDHATLTDNNGRKSDFRQVILVMTTNTGARERSTNPVGFANDLLEDRSLKAIEKQFSPEFRNRLTAVIEFSSLNQENVTKVVAKQLALLQERLNSKQIELEFNEDVLVYIADKAYTPEFGARPVQRWIDTHISKRISEEILFGVLKSGGKAKLISGKEGIEMEFSSGKKN

SEQ ID NO: 7250 - protein, 760 aa, Xanthomonas campestris pv. campestris str. ATCC 33913
MFSKDLEQTIGQCYKRAREARHEFMTVEHLLLSLLDNPSAQAVLKACGADQVRLHTDLEQAIEASVSRLAEDDGRDTQPTLGFQRVLQRAVYHVQSSGKKEVTGANVLVAIFGEKDSHAVYFLNQQDITRLDIVNYLSHGIAKLGEDGEQPSASDGEPKSDAGEGEGKGDALAEYATNLNDHARNGKIDPLVGRADEIERTIQVLCRRRKNNPLYVGEAGVGKTAIAEGLAKRIVDADVPEVLADAVIFSLDLGALVAGTKYRGDFEKRLKGVLTALKKVPNAVLFIDEIHTIIGAGSASGGTMDASNLIKPALASGELRCIGSTTFQEYRGIFEKDRALARRFQKIDIVEPTVGETFEILQGLKPKYEAHHGVTYADDALQAAVDLSVKHIGDRLLPDKAIDVIDEAGARQRLLPEGQRKELIDIQEIETIVAKMARIPAKQVSATDKDVLQHLERNLKMVIFGQNPAIETLAGSIKLARSGLANPEKPIGNFLFAGPTGVGKTEVTKQLALQLGIELVRFDMSEYMEAHSISRLIGAPPGYVGFDQGGLLTEKIVKTPHCVLLLDEVEKAHPDIFNILLQVMDRGILTDTNGREANFKNVILVMTTNAGATQASRRSIGFTKQDHSTDAMESIRRGFTPEFRNRLDAIVQFQPLGFDHILRVVDKFIIELEMLLQEKHVSLSATPTARDWLAQHGFDPLMGARPMSRVIQEKIKRPLADELLFGKLVEGGRVNIDVKDGELVVEAHPEPERLLPATVD

SEQ ID NO: 7251 - protein, 760 aa, Xanthomonas axonopodis pv. citri str. 306
MFSKDLEQTIGQCYKRAREARHEFMTVEHLLLSLLDNPSAQAVLKACGADQVRLHNDLEQAIEASVSRLAEDDGRDTQPTLGFQRVLQRAVYHVQSSGKKEVTGANVLVAIFGEKDSHAVYFLNQQDITRLDIVNYLSHGIAKLGEDGEQPSAPDGESKSEGGEGEAKGDALAEFASNLNEQARNGKIDPLVGRSDEIERTIQVLCRRRKNNPLYVGEAGVGKTAIAEGLAKRIVDNDVPEVLADAVIYSLDLGALVAGTKYRGDFEKRLKGVLAALKKVPNAVLFIDEIHTIIGAGSASGGTMDASNLIKPALSSGELRCIGSTTFQEYRGIFEKDRALARRFQKIDIVEPTVGETFEILQGLKPKYEAHHGVTYADDALQAAVDLSVKHIGDRLLPDKAIDVIDEAGARQRLLPEGTRKELIDIEEIETIVAKMARIPAKQVSATDKDVLQHLERNLKMVIFGQNPAIETLAGSIKLARSGLANPEKPIGNFLFAGPTGVGKTEVTKQLALQLGIELVRFDMSEYMEAHSISRLIGAPPGYVGFDQGGLLTEKIVKTPHCVLLLDEVEKAHPDIFNILLQVMDRGILTDTNGREANFKNVILVMTTNAGATQASRRSIGFTKQDHSTDAMESIRRGFTPEFRNRLDAIVQFQPLAFDHILRVVDKFIIELEMLLQEKHVSLSATPTARDWLAQHGFDPLMGARPMSRVIQEKIKRPLADELLFGKLVDGGRVNIDVKDGELVVEAHPEPERLLPATVD

SEQ ID NO: 7252 - protein, 776 aa, Caulobacter crescentus CB15
MPSFSRPLEESLHRAVAYANQRKHEYATLEHLLLSLTDDEDAAGVMRACDVDLAALKKSLSNYLDVELTSLVVDDEEDAKPTAGFQRVIQRAVIHVQSSGREEVTGANVLVAIFSERESHAAYFLQEQDMTRYDAVNFIAHGIAKKAGASEPKSVKGASTGSNATEEDGDKSTTKTGGEALEAYCVDLNEKARQGKVDPLIGRANEVERAIQILCRRTKNNPLLVGDPGVGKTAIAEGLARKIVTHQVPEVLEGATIYSLDMGALLAGTRYRGDFEERLKQVVKELENHPNAVLFIDEIHTVIGAGATSGGAMDASNLLKPALASGTLRCMGSTTYKEFRQHFEKDRALVRRFQKIDVNEPTVEDTIKILKGLKTYYEDFHKLKYTADALKVAVELSAKYITDRKLPDKAIDVIDEAGASQMLLPESRRKKTIGVKEIESVVAKIARIPPKSVSKSDTEALKELESDLKRAVFGQDEALSQLAAAMKLARAGLREPNKPIGSYLFSGPTGVGKTEAAKQLAQTLGIEMLRFDMSEYMERHTVSRLIGAPPGYVGFDQGGQLTDAVDQHPHAVVLLDEIEKAHGDVYNILLQVMDNGTLTDSNGKKVDFRNVVLIMTTNAGASDAQRNSIGFGRSKVEGEEEAALKRLFTPEFRNRLDAVVAFKPLSADIIRQVVQKFVMQLEAQLADRNITIELSDDAADWLAKNGFDELYGARPLARVIQEHIKKPLADDILFGRLVRGGHVKVVLKDSKIDFEIDSSTAPKAGKTDETEPAMAE

SEQ ID NO: 7253 - protein, 709 aa, Campylobacter jejuni subsp. jejuni NCTC 11168
MKYQENLQKYLDNAKNLSLINHHEFVTCEHVLFALLKLSTDFKDIFEEFSDGDLELLETELKNYISQNNQVIKQEIEPTISVVLDEILLSSKNKNNEIKIIDFLEKLIQDSRSYSSYLLKKHNINLNKIQELQNHENIQNLNNHTSDLTLLAQNGKIDPLIGRKFELERMMQILSRRKKNNPILVGEAGVGKTAIVEGLALAIAEKKVPKNLQNAKIFSLDMASILAGTKYRGDFEKRIKEILSELEKIPNAILFIDEIHTIVGAGSTGESHTDFSNLLKPALSNGTLKCIGATTFMEYKNTFDKNKPLSRRFAKINVDEPSQEESLQILKGLKNKYEEFHHIKLNDEILQYAVIWGKKFFNDKFLPDSAIDLIDELGASFALNPRAKKNANLKDLENVLAKMTHHHKMFEFDQNKALMNLKTNLKAKIFGQDEVIDSLVSSLKQSFAGFKNSNTPRGVFLFTGSSGVGKTELCKALAEFLGLNLERFDMSEYAEKHAISKLIGSPAGYIGFEEGGLLSNAIRKNPFSLVLFDEIEKAHPDLSNTFLQIFDNAELTDNSGLKVDFKNTIIIMTSNLGLKESNELGFLSKNEEKSNRAIKDFFAPEFINRIDKILHFNDLNDAILVKIIEKELDEISKNLNNIKLSVDDKAKIYLAKKAYNKEFGVRLLKRIISEEIGEKISDEILFGKLKKGGIAKIKLGKNEKLEFIF

SEQ ID NO: 7254 - protein, 655 aa, Corynebacterium glutamicum ATCC 13032
MNSRGLPHTTNHYKKEPPTVPFHDFTDPDSDPRQNAPANPTAQPPSAPTSHSSQQGLPPGAIMIPFPGQPQQQSAPNDETRFIDLNERHKDDEPALFRDDVIDQTLAILISKNKPNALLVGPAGTGKSRIAEDIARRLANDDVSIPDQLVGHRILDVSIAELVAGAGVVGQLEERILDLIKYATDPSNKVIIFIDEIHQIAGDQSSHSGSQAKVAQILKPYLARGDLRVIGATTTQEARDFDHDPALKRRFSRVNVDEFDRDQTLTILHAARDGYLKHFNNAVTVSDDVLGYVYTYSQQFNPGNTAQPDAALTLFDKALASLTMEKQRLINNHVIAPSLKFPVSERHIHNTARKLAFGSQVPASINTDDARDKLETLFGQDHIIEPVLTAIKREQLGIFPRTKPLSWVFAGSSGVGKTEMARILSRAINGGDPIIINGPEYISPESITGLIGSSDGYIGSNSKRAKPLDPLISNPRQVIVLDEFEKSHPHFQQLFMAALDTGTMAMANGTTLNFSQAIIIATTNAARDKIGRDSFGFDSDNSGVLGSAQAATDPRAQERLKSLMSKDFPVELLNRFQNIFAFNRIDAGTYREILDNLYQRRRDAVLLSHPHYAAQIPADIDSDTLDQLVETTFISDFGARPAARTIEDHIASLLM

SEQ ID NO: 7255 - protein, 595 aa, Corynebacterium glutamicum ATCC 13032
MTQVVAGTLVGESINREIDEDKYPYLSSYAAPVAVPVREIIGREEEVNKIMAALMRPEISNVMLVGPAGSGKTTLVQQALVKDPERNYIEVDVAKMVADLSTPAQMAARIKGVFEDAIAYRKHEGHELVLFVDEFHQIVQLSNAAVEAIKPILAMSGVLGVRVIAATTLEEFHEHIRPNQALTERLQEIRLTPTDQKTTVAILRGMADRYGVSDQFYDDHVFEQIYSTTERFMPSSVQPRKSIRVLDAMVGWHRLSGKPMDMDLLGDVLHDAIGVDIAFKVDGTSIKDKLDEKVMAQSLATTVVARRLQLVVADLHDKSRPLSNFLFTGPTGVGKTELVKQLARVLFGDDTGRLIRFDMSEFALESSLDLFRSELTRRVADQGNAIVLLDEVEKADRAIARLLLQVLDDGRLSDDYNREVSFLNTYIVMTTNAGSEIFETISNYATDDTGDGRAIKDFVKNIHTSIKNKGFPPELLGRVDEIVPFQPLSETTQDRIISKKLQDVATEVYERHGVKLHCSQKVMEFLLVDQVEESAESGGARGAVRSLQREVVTEVATFINTYPEVRDIYVDVDGQMRNKTNRVSTARVVIKRVEG

SEQ ID NO: 7256 - protein, 763 aa, Shigella flexneri 2a str. 301
MGEVPMLNQELELSLNMAFARAREHRHEFMTVEHLLLALLSNPSAREALEACSVDLVALRQELEAFIEQTTPVLPASEEERDTQPTLSFQRVLQRAVFHVQSSGRNEVTGANVLVAIFSEQESQAAYLLRKHEVSRLDVVNFISHGTRKDEPTQSSDPGSQPNSEEQAGGEERMENFTTNLNQLARVGGIDPLIGREKELERAIQVLCRRRKNNPLLVGESGVGKTAIAEGLAWRIVQGDVPEVMADCTIYSLDIGSLLAGTKYRGDFEKRFKALLKQLEQDTNSILFIDEIHTIIGAGAASGGQVDAANLIKPLLSSGKIRVIGSTTYQEFSNIFEKDRALARRSQKIDITEPSIEETVQIINGLKPKYEAHHDVRYTAKAVRAAVELAVKYINDRHLPDKAIDVIDEAGARARLMPVSKRKKTVNVADIESVVARIARIPEKSVSQSDRDTLKKLSDRLKMLVFGQDKAIEALTEAIKMARAGLGHEHKPVGSFLFAGPTGVGKTEVTVQLSKALGIELLRFDMSEYMERHTVSRLIGAPPGYVGFDQGGLLTDAVIKHPHAVLLLDEIEKAHPDVFNILLQVMDNGTLTDNNGRKADFRNVVLVMTTNAGVRETERKSIGLIHQDNSTDAMEEIKKIFTPEFRNRLDNIIWFDHLSTDVIHQVVDKFIVELQVQLDQKGVSLEVSQEARNWLAEKGYDRAMGARPMARVIQDNLKKPLANELLFGSLVDGGQVTVALDKEKNELTYGFQSAQKHKAEAAH

SEQ ID NO: 7257 - protein, 758 aa, Shigella flexneri 2a str. 2457T
MLNQELELSLNMAFARAREHRHEFMTVEHLLLALLSNPSAREALEACSVDLVALRQELEAFIEQTTPVLPASEEERDTQPTLSFQRVLQRAVFHVQSSGRNEVTGANVLVAIFSEQESQAAYLLRKHEVSRLDVVNFISHGTRKDEPTQSSDPGSQPNSEEQAGGEERMENFTTNLNQLARVGGIDPLIGREKELERAIQVLCRRRKNNPLLVGESGVGKTAIAEGLAWRIVQGDVPEVMADCTIYSLDIGSLLAGTKYRGDFEKRFKALLKQLEQDTNSILFIDEIHTIIGAGAASGGQVDAANLIKPLLSSGKIRVIGSTTYQEFSNIFEKDRALARRFQKIDITEPSIEETVQIINGLKPKYEAHHDVRYTAKAVRAAVELAVKYINDRHLPDKAIDVIDEAGARARLMPVSKRKKTVNVADIESVVARIARIPEKSVSQSDRDTLKKLSDRLKMLVFGQDKAIEALTEAIKMARAGLGHEHKPVGSFLFAGPTGVGKTEVTVQLSKALGIELLRFDMSEYMERHTVSRLIGAPPGYVGFDQGGLLTDAVIKHPHAVLLLDEIEKAHPDVFNILLQVMDNGTLTDNNGRKADFRNVVLVMTTNAGVRETERKSIGLIHQDNSTDAMEEIKKIFTPEFRNRLDNIIWFDHLSTDVIHQVVDKFIVELQVQLDQKGVSLEVSQEARNWLAEKGYDRAMGARPMARVIQDNLKKPLANELLFGSLVDGGQVTVALDKEKNELTYGFQSAQKHKAEAAH

SEQ ID NO: 7258 - protein, 776 aa, Clostridium thermocellum ATCC 27405
MMRLDDVANKILIAAYNEAKHQKHEFFTPEHILYASLFFDEGRDIIENCGGKVEDIKKDLLEFFRNNMPIVENHEPIESLGINSVMQATAYQCIAAGREYIRIGDIIVALYGEKESFASYILQKNGIKKLDVLKYISHGVSLVPKNMETSLKSLETDTYLEAYQYADDWEYDYEYEDIDEDEDIDEESSSKSNFLEHFTIDLTEKARKGKIDPLIGREDILERTIQVLSRRLKNNPIHVGDPGVGKTAITEGLARLIVEDKVPKSLKGSKIYYLDMGSMLAGTKYRGDFEERIKKVLNEIQNQPKAIVYIDEIHTIVGAGAVSDGAMDASNIIKPFLTQGTLRFIGSTTYEEYKKYFEKDRALSRRFQKIDVPEPSIDDTFKILKGLKDRYEEYHKVKYTDSALRLAAELSAKYIQDRHLPDKAIDVIDETGAYVRLHAKDEDKVITIKNKDIERTVSAIARIPIQSVSRDEISKLKNLDVKLKSTIFGQDKAIDTVVQAIKRSRAGFNENEKPVASLLFVGPTGVGKTELAKQLSLHLGIPFIRFDMSEYQEKHTVSRLIGAPPGYVGYEEGGLLTDAIRKTPHCVLLLDEIEKAHPDIYNVLLQVMDYAVLTDNNGKKADFRNVILIMTSNAGAREVGRTLIGFDSRNVDRSAMTKEVERIFSPEFRNRLDDIVVFNHINEEMALLITKKAINQFKEKLKTKNIKLKVTERCCKWIAQKGLSSIYGAREILRYVQDKIKTYFVDEVLFGELSKGGTAIIDVVDGEIKISKKTQR

SEQ ID NO: 7259 - protein, 757 aa, Pseudomonas syringae pv. syringae B728a
MLNRELEVTLNLAFKEARSKRHEFMTVEHLLLALLDNEAAATVLRACGANLDKLKHDLQEFIDSTTPLIPVHDEDRETQPTLGFQRVLQRAVFHVQSSGKREVTGANVLVAIFSEQESQAVFLLKQQSVARIDVVNYIAHGISKVPGHGEHSSEGEQDMQDDEGGEASSSGNPLDAYASNLNELARQGRIDPLVGRESEVERVAQILARRRKNNPLLVGEAGVGKTAIAEGLAKRIVDNQVPDLLANSVVYSLDLGALLAGTKYRGDFEKRFKALLNELRKRPQAILFIDEIHTIIGAGAASGGVMDASNLLKPLLSSGEIRCIGSTTFQEFRGIFEKDRALARRFQKVDVSEPSVEDTIGILRGLKSRFEQHHSIEYSDEALRAAAELASRYINDRHMPDKAIDVIDEAGAYQRLQPVEKRAKRIDVPEVEDIVAKIARIPPKHVNSSDKELLRNLERDLKLTVFGQDAAIDSLSTAIKLSRAGLKSPDKPVGSFLFAGPTGVGKTEAARQLAKALGVELIRFDMSEYMERHTVSRLIGAPPGYVGFDQGGLLTEAITRQPHCVLLLDEIEKAHPEVFNLLLQVMDHGTLTDNNGRKADFRNVIVIMTTNAGAESAARASIGFTHQDHSSDAMEVIKKSFTPEFRNRLDTIIQFGRLSHEVIKSVVDKFLTELQAQLEDKRVLLEVSEAARSWLAQGGYDAAMGARPMARLIQDKIKRPLAEEILFGELSEHGGVVHIDIKDGEITFDFETTAEMA

SEQ ID NO: 7260 - protein, 64 aa, Pseudomonas syringae pv. syringae B728a
MTLSPEALDKLIAVGYDPVYGARPLKRAIQRWIENPLAQMILSGSFMPGTTITGKVVDDEITFV

SEQ ID NO: 7261 - protein, 756 aa, Pseudomonas fluorescens PfO-1
MLNRELEVTLNLAFKEARSKRHEFMTVEHLLLALLDNEAAATVLRACGANLDKLKHDLQEFIDSTTPLIPVHDEDRETQPTLGFQRVLQRAVFHVQSSGKREVTGANVLVAIFSEQESQAVFLLKQQSVARIDVVNYIAHGISKVPGHGDHSEGEQDMQDDEGGESSSSGNPLDAYASNLNELARQGRIDPLVGRETEVERVAQILARRRKNNPLLVGEAGVGKTAIAEGLAKRIVDNQVPDLLANSVVYSLDLGALLAGTKYRGDFEKRFKALLNELKKRPQAILFIDEIHTIIGAGAASGGVMDASNLLKPLLSSGDIRCIGSTTFQEFRGIFEKDRALARRFQKVDVVEPSVEDTIGILRGLKGRFEQHHNIEYSDESLRAAAELASRYINDRHMPDKAIDVIDEAGAYQRLQPVEKRVKRIEVPEVEDIVAKIARIPPKHVTSSDKELLRNLERDLKLTVFGQDAAIDSLSTAIKLSRAGLKSPDKPVGSFLFAGPTGVGKTEAARQLAKALGIELVRFDMSEYMERHTVSRLIGAPPGYVGFDQGGLLTEAITKQPHCVLLLDEIEKAHPEVFNLLLQVMDHGTLTDNNGRKADFRNVIVIMTTNAGAETAARASIGFTHQDHSSDAMEVIKKSFTPEFRNRLDTIIQFGRLSHEVIKSVVDKFLTELQAQLEDKRVLLEVTDAARSWLAAGGYDSAMGARPMARLIQDKIKRPLAEEILFGELAEHGGVVHIDIKDGELTFDFETTAEMA

SEQ ID NO: 7262 - protein, 796 aa, Desulfovibrio desulfuricans G20
  unsure (1)..(796): unsure at all Xaa locations
MPVPGPKVFRSGAAWKRCNMIGKRLEAVLSVAVSEVKARNHEYLTLEHVLYAMTLEPQGIYILEGCGADAENLRKRLEIFFDSHLESLPEETPTEVVQTMGVQRVLQRAVMQMQSSGKNAVELGDVLAAMFEEEDSYALYFLRAQGVARLDVLEFISHGMGDWSDGEPEPAAQTADGGERQGRASALDQFTVNLTARARDGLIDPLIGRSAELERTVQVLARRRKNNPLFVGDPGVGKTAIAEGLALRIADGDVPESFADAEIFALDMGTLLAGTKYRGDFEARLKAVIKDLSAIPEAILFIDEIHTIVGAGATSGGSMDASNILKPVLASGGIRCIGSTTYEEYRNHFEKDRALSRRFQKIDVQEPSQDECLEILKGLRPYYEEFHEVRYTQPALKAAVELSSRYLQDRFLPDKAIDVIDEAGAVYKLGAHGRKRNTITVSDVERVISRMAQIPAQRVSVSDRGRLERLEEDLHSVVFGQQAAVDSVTKAILRSRAGLSSPERPTGSFLFYGPTGVGKTELAKQLAATLGVSFIRFDMSEYMEKHAVARLIGAPPGYVGFDQGGLLTEAVRKTPHAVVLLDEIEKAHPDMFNILLQVMDYAKLTDNTGRKADFRNVILIMTSNAGAQEMAAKTIGFGDSAGQDMAAKGLKAVEKLFSPEFRNRLDALVPFSNLSREVMLKIVEKFISELQXXXXXXXXXXXXXXXXXRQMKDRRVTIHLSDKARERLAERGYDSAFGARPMGRIIRTGIEDVLAREVLFGRLQKGGTVRIGVRKPAAHGADDDLGLTFRFETSAL

SEQ ID NO: 7263 - protein, 758 aa, Pseudomonas aeruginosa PAO1
MLNRELEVTLNLAFKEARAKRHEFMTVEHLLLALLDNEAAATVLRACGANLDKLRRDLQEFIDSTTPLIPQHDDERETQPTLGFQRVLQRAVFHVQSSGKREVTGANVLVAIFSEQESQAVFLLKQQSIARIDVVNYIAHGISKVPGHAEHPQDGEQDMQDEEGGESATSNHPLDAYASNLNELARQGRIDPLVGREHEVERVAQILARRRKNNPLLVGEAGVGKTAIAEGLAKRIVDGQVPDLLADSVVYSLDLGALLAGTKYRGDFEKRFKALLNELRKRPHAVLFIDEIHTIIGAGAASGGVMDASNLLKPVLSSGEIRCIGSTTFQEFRGIFEKDRALARRFQKVDVTEPSVEDTYGILKGLKGRFEQHHHIEYSDEALRAAAELAARYINDRHMPDKAIDVIDEAGAYQRLQPEEKRVKRIEVAQVEDIVAKIARIPPKHVTTSDKELLRNLERDLKLTVFGQDDAIESLSTAIKLSRAGLKAPDKPVGSFLFAGPTGVGKTEVARQLAKALGVELVRFDMSEYMERHTVSRLIGAPPGYVGFDQGGLLTEAITKTPHCVLLLDEIEKAHPEVFNLLLQVMDHGTLTDNNGRKADFRNIILIMTTNAGAEVAARASIGFNQQDHTTDAMEVIKKSFTPEFRNRLDTIIQFGRLSTETIKSVVDKFLTELQAQLEDKRVQLEVSDAARGWLAEKGYDVQMGARPMARLIQDKIKRPLAEEILFGELAEHGGLVHVDLKGDELAFEFEITAAEPA

SEQ ID NO: 7264 - protein, 627 aa, Pseudomonas aeruginosa PAO1
MALGAICCGHDTRCERLSMPGTALFEKPRWLRDLLRFLPLKSQFVLSGNIRDLQACEVVPGTVTAQSFNQTLCDALLDAGYAQVLAWDPLAGFRVLGRPGSEAGATPQVLLDLGLTPVDGAAPAGIDLLGATLQRLVNRSGEPIALIVDFASRLAVRNDALSAAEHQLFTQALVLSHQARSRPAGEQRKPFFNSVLWVVEKEGDLPDWLLVDNPRLRHIPVSKPDQPARRALAPALLRGLGGAGVAEEALQQAAATFVENTEGLLLLDLNAIVQLARVEGLAMERIADAVRRYKVGVTEDPWLKIDRQRIRQADEIVRRRVKGQQHAVTHMLDIVKRAMTGVGASRKGNRPRGVAFLAGPTGVGKTELAKTVTSLLFGDESAYIRFDMSEFSAEHADQRLIGAPPGYVGYDVGGELTNAIREKPFSVVLFDEIEKAHPRILDKFLQILDDGVLTSGRGDRVYFSEALIVFTSNLGIYRQGENGERVANVLPGEPFEAVQGKVHGEIERYFKLVLNRPEILNRIGENIIVFDFIRADVAEQIFTQMVNGTFADLREQRLVIELAEAPRQALHDLCLGDLSNGGRGIRNQLEARLLNPLSRALFDQDAQPGERFLISALDADGLTLERR

SEQ ID NO: 7265 - protein, 371 aa, Pseudomonas aeruginosa PAO1
MPFLSDMLDQSRRQQDEEQALARENLAEASLLQAHLSHRSALRSRFRFDPAAVMDCLRAEVLGQDPALQAVEDMLKVVRADIADPRRPLFSALFLGPTGVGKTEIVRALARALHGDAEGFCRVDMNTLSQEHYAAALTGAPPGYVGAKEGTTLLEQDKLDGSPGRPGIVLFDELEKASPEVVHALLNVLDNGLLRVASGERTYHFRNTLVFMTSNLCAHEIQRYDERRQRLPWRLLPVGGERRRRDIDGMVRARLLKTFSPEFVNRLDSVVTFNWIERDVVARLVELEVQRLNRRLEKHRCRLEATPEVLAKIARAGFDRQFGARALRRSVRHHLEVPLAEHLLDHHQPGDGNCTTYLASLEHERVRFVRR

SEQ ID NO: 7266 - protein, 758 aa, Yersinia pestis CO92
MLNQELELSLNMAFARAREHRHEFMTVEHLLLALLSNPAAREALEACTVDLVALRQELEAFIEQTTPTLPVSEEERDTQPTLSFQRVLQRAVFHVQSSGRNEVSGANVLVAIFSEQESQAAYLLRKHDVSRLDVVNFISHGARKDEPSQTPNVDNSPSEEQASGEDRMENFTTNLNQLARVGGIDPLIGRDKELERTIQVLCRRRKNNPLLVGESGVGKTAIAEGLAWRIVQGDVPDVISECTLYSLDIGSLLAGTKYRGDFEKRFKALLKQLENDKDSILFIDEIHTIIGAGAASGGQVDAANLIKPLLSSGKIRVIGSTTYQEFSNIFEKDRALARRFQKIDIIEPTPEETVQIINGLKPKYEAHHDVRYTAKAIRAAVELSVKYINDRHLPDKAIDVIDEAGARSRLMPVNKRKKTVNVSDIESVVARIARIPEKTVSASDRDVLRNLSDRLNMLVFGQDKAIEALSEAIKMSRAGLGHERQPVGSFLFAGPTGVGKTEVTVQLAKALDIELLRFDMSEYMERHTVSRLIGAPPGYVGYDQGGLLTDSVIKHPHAVLLLDEIEKAHPDVFNLLLQVMDNGTLTDNNGRKADFRNVILVMTTNAGVRETQRTSIGFKQQDSSTDALEEIKKIFTPEFRNRLDNIIWFNHLSPAVIQQVVDKFIVELQAQLDAKGVSLEVSDEARDWLSEKGYDKAMGARPMTRVIQENLKKPLANELLFGSLVDGGSVTVNLDKEKQQLAYEFQSAQKRKTEGAVH

SEQ ID NO: 7267 - protein, 548 aa, Vibrio vulnificus CMCP6
MLRRKLFWRAKPDLNALRYELDVFIDQTTPFIPDNDETRETQPTLSFQRVLQRAVFHVQSSGRSEVTGANVLVAIFSEQESHAAYLLKKNDISRLDIVNYISHGITKASGASDDSSSSSDSFGSDASSEENSSEERLESFATNLNQVAKDGHIDPLIGRDKELERTIQVLCRRRKNNPLLVGEAGVGKTAIAEGLAWRIVEGSVPDVIKDSVIYSLDIGSLLAGTKYRGDFEKRFKTILKQLEKEKDAILFIDEIHTIIGAGAASGGQVDAANLIKPLLSGGKLRCIGSTTYQEYSNIFEKERALSRRFQKIDVVEPSLDDTTKILMGLKSKYEAHHDVRYTNKALRAAVELSAKYINERHLPDKAIDVIDEAGARSRLTPASRRKKTVGVADIEAMVAKMARIPEKSVSSSDKDILKSLDDKMKMLVFGQDAAIDVLCEAIKLSRAGLGAENKPVGSFLFAGPTGVGKTEVTVQLSKLLGIELLRFDMSEYGERHSVSRLIGAPPGYVGYDQRWFAHRCGDQTSSCPLCCWMKSKKRTQISSTYCCR

SEQ ID NO: 7268 - protein, 173 aa, Vibrio vulnificus CMCP6
MDNGTLTDNNGRKADFRNVILVMTTNAGVAETEKKSIGLIQQDHSHDAMAEIKKVFTPEFRNRLDNIIWFNSLDEAIIHQVVDKFIVELQVQLDARGVSLEVSEDARHWLANKGYDKAMGARPMSRVIQDKLKKPLANELLFGSLIDGGTVKVTLEKDDLKFEYLTTREEAVH

SEQ ID NO: 7269 - protein, 757 aa, Pseudomonas syringae pv. tomato str. DC3000
MLNRELEVTLNLAFKEARSKRHEFMTVEHLLLALLDNEAAATVLRACGANLDKLKHDLQEFIDSTTPLIPVHDEDRETQPTLGFQRVLQRAVFHVQSSGKREVTGANVLVAIFSEQESQAVFLLKQQSVARIDVVNYIAHGISKVPGHGEHSSEGEQDMQDDEGGEASSSGNPLDAYASNLNELARQGRIDPLVGRESEVERVAQILARRRKNNPLLVGEAGVGKTAIAEGLAKRIVDNQVPDLLANSVVYSLDLGALLAGTKYRGDFEKRFKALLNELRKRPQAILFIDEIHTIIGAGAASGGVMDASNLLKPMLSSGEIRCIGSTTFQEFRGIFEKDRALARRFQKVDVSEPSVEDTIGILRGLKSRFEQHHSIEYSDEALRAAAELASRYINDRHMPDKAIDVIDEAGAYQRLQPVEKRVKRIDVPQVEDIVAKIARIPPKHVNSSDKELLRNLERDLKLTVFGQDAAIDSLSTAIKLSRAGLKSPDKPVGSFLFAGPTGVGKTEAARQLAKALGVELIRFDMSEYMERHTVSRLIGAPPGYVGFDQGGLLTEAITRQPHCVLLLDEIEKAHPEVFNLLLQVMDHGTLTDNTGRKADFRNVIVIMTTNAGAESAARASIGFTHQDHSSDAMEVIKKSFTPEFRNRLDTIIQFGRLSHEVIKSVVDKFLTELQAQLEDKRVLLEVSEAARSWLAQGGYDAAMGARPMARLIQDKIKRPLAEEILFGELSEHGGVVHIDIRDGEITFDFETTAEMA

SEQ ID NO: 7270 - protein, 756 aa, Vibrio parahaemolyticus RIMD 2210633
MLNKELESSLNGAFARARDKRHEFMTVEHLLLALLENDAAKEALLACKADLDALRNELDIFIDQTTPLIPESDETRETQPTLSFQRVLQRAVFHVQSSGRNEVTGANVLVAIFSEQESHAAYLLKKNDISRLDIVNFISHGITKASGAGEDPSSSDSFSSDSVEETGSDERLESFATNLNQVAKAGNIDPLIGRDKELERTIQVLCRRRKNNPLLVGEAGVGKTAIAEGLAWRIVEGQVPEVIQNSVIYSLDIGSLLAGTKYRGDFEKRFKSILKQLEKEEDAILFIDEIHTIIGAGAASGGQVDAANLIKPLLSSGKLRCIGSTTYQEYSNIFEKERALSRRFQKIDVVEPSLDDTTKILMGLKPKYEAHHEVRYTNKALRAAVELSAKYINERHLPDKAIDVIDEAGARSRLAPASRRKKTVGVADIEAMVAKMARIPEKSVSSSDKDILKNLDGKMKMLVFGQDNAIDALSEAIKLSRAGLGVDNKPVGSFLFAGPTGVGKTEVTVQLSKLLGIELLRFDMSEYGERHSVSRLIGAPPGYVGYDQGGLLTDAVIKHPHSVVLLDEIEKAHPDIFNLLLQVMDNGTLTDNNGRKADFRNVILVMTTNAGVAETEKKSIGLIQQDHSHDAMAEIKKVFTPEFRNRLDNIIWFNSLDESVIHQVVDKFIVELQVQLDARGVSMEVSQDARHWLAHKGYDKAMGARPMGRVIQEQLKKPLANELLFGSLVDGGTVKVSLVNDALEFEYLSEKEAAMH

SEQ ID NO: 7271 - protein, 802 aa, Bradyrhizobium japonicum USDA 110
MPTFSQSLEQSLHRALAIANERHHQYATLEHLLLSLIDDSDAAAVMRACSVDLDKLRTSLVNYLETEFENLVTDGADDAKPTGGFQRVIQRAVIHVQSSGREEVTGANVLIAIFAERESHAAYFLQEQDMTRYDAVNYISHGIAKRPGVSEARPVRGVDEETETKGSDDAKKKGEALETYCVNLNKKARDGKIDPVIGRNSEINRAIQVLCRRQKNNPLFVGEAGVGKTAIAEGLAKRIVDSEVPEVLAAATVFSLDMGTLLAGTRYRGDFEERLKQVLKELEAHPNAILFIDEIHTVIGAGATSGGAMDASNLLKPALASGTIRCMGSTTYKEYRQHFEKDRALVRRFQKIDINEPTVEDAIAILKGLKPYFEDYHRLKYTNEAIEAAVQLSSRYIHDRKLPDKAIDVIDESGAAQMLVAENKRKKTIGIKEIETTIASMARIPPKSVSKDDAEVLKHLEQTLKRTVFGQDKAIESLAASIKLARAGLREPEKPIGCYLFSGPTGVGKTEVAKQLAASLGVELLRFDMSEYMERHTVSRLIGAPPGYVGFDQGGLLTDGVDQHPHCVVLLDEIEKAHPDLYNVLLQIMDHGRLTDHNGKQVNFRNVILIMTTNAGASDLAKQAFGFTRSKREGDDHDAINRQFAPEFRNRLDAIVSFSHLSVEVIGTVVEKFVLQLEAQLGDRDVTIELSEPAKAWLVQHGYDEQMGARPMARVIQEHIKKPLADEVLFGKLKSGGHVRVVLVKDEADETKEKIGFEFVEGPVTPKQEKLPGARKRPPGKPKPGGPGGSKGPTSKGPLVKA

SEQ ID NO: 7272 - protein, 802 aa, Bradyrhizobium japonicum USDA 110
MPTFSQSLEQSLHRALAIANERHHQYATLEHLLLSLIDDSDAAAVMRACSVDLDKLRTSLVNYLETEFENLVTDGADDAKPTAGFQRVIQRAVIHVQSSGREEVTGANVLIAIFAERESHAAYFLQEQDMTRYDAVNYISHGIAKRPGVSEARPVRGVDEETETKGSDDAKKKGEALETYCVNLNKKARDGKIDPVIGRNSEINRAIQVLCRRQKNNPLFVGEAGVGKTAIAEGLAKRIVDSEVPEVLAAATVFSLDMGTLLAGTRYRGDFEERLKQVLKELEAHPNAILFIDEIHTVIGAGATSGGAMDASNLLKPALASGTIRCMGSTTYKEYRQHFEKDRALVRRFQKIDINEPTVEDAIAILKGLKPYFEDYHRLKYTNEAIEAAVQLSSRYIHDRKLPDKAIDVIDESGAAQMLVAENKRKKTIGIKEIETTIASMARIPPKSVSKDDAEVLKHLEQTLKRTVFGQDKAIESLAASIKLARAGLREPEKPIGCYLFSGPTGVGKTEVAKQLAASLGVELLRFDMSEYMERHTVSRLIGAPPGYVGFDQGGLLTDGVDQHPHCVVLLDEIEKAHPDLYNVLLQIMDHGRLTDHNGKQVNFRNVILIMTTNAGASDLAKQAFGFTRSKREGDDHEAINRQFAPEFRNRLDAIVSFSHLSVEVIGTVVEKFVLQLEAQLGDRDVTIELSEPAKAWLVQHGYDEQMGARPMARVIQEHIKKPLADEVLFGKLKSGGHVRVVLVKDEADETKEKIGFEFVEGPVTPKQEKLPGARKRPPGKPKPGGPGGSKGPTSKGPLVKA

SEQ ID NO: 7273 - protein, 753 aa, Coxiella burnetii RSA 493
MFSKALEKTLNRAFSQAREKRHEFITVEHLLLALLDNPEAGRVLSACGANLERLRAGLGIFIDETTPHIPLNVERDIQPTLSFQRVLQRAIYDVQCNGTPEVTGTNILTAIFSEPESQAVYFLSQENISRIDIINYTTQGITKPRQEARFLSDSQQLPEASGMQETTVDENLIELYATNLNAKARSGRVDPLIGRQEELLRCIQTLCRRTKNNPLLVGDAGVGKTAIVEGLAQLIVQNRVPKPLAHATIYALDLGILLAGTKYRGDFEKRFKSVLKALSREPGAVIFIDEIHNLIGAGSATGGTMDASNLIKPLLTTGELRCMGATTYEEFRNFFSKDHALLRRFQRIDVKEPSVTDTVKILQGLRSRYENYHQIRYTPDALKRAVELSARYISDRQLPDKAIDVIDEAGAFEQLQSDEERKTLITVKEIESIVAKMARIPIHTITQSDKELLIDLPKQLKRVVFGQSQAVESLCNAIKLSRAGLNNADKPVGSFLLAGPTGVGKTEVTRQLAQALGIELIRFDMSEYMERHAVSRLIGAPPGYVGFDQGGLLTEIIRKQPHAVLLLDEIEKAHPDIFNILLQVMDYGYLTDNTGRKADFRHVIIVMTTNAGAEQLERGAIGFAVQDMEQENLGAIKHYFSPEFRNRLDAVIQFKYLDTTTILKIVDKFTRELRDQLKEKGIRLTISSDAKQWLAERGYNEKMGARPMARLIQEKLKVPIANQLLFSELNEGDEIIVNRANGDLVVQRKQIVV

SEQ ID NO: 7274 - protein, 762 aa, Ralstonia solanacearum
MIAQELEVSLHMAFVEARQARHEFITVEHLLLALLDNPTAAEVLRACAANIEDLRTHLKNFIADNTPVVPGTDEVDTQPTLGFQRVIQRAIMHVQSTSNGKKEVTGANVLVAIFGEKDSHAVYYLQQQGVTRLDVVNFISHGIRKDQAEPAKHGDSNPEGEAGDGKESPLEQFTQNLNALAKAGKIDPLIGREQEVERVVQVLCRRRKNNPLLVGEAGVGKTAIAEGLAWRITKGEVPDILARSVVYSLDMGALLAGTKYRGDFEQRLKGVLKSLKDNPNAILFIDEIHTLIGAGAASGGTLDASNLLKPALSSGALKCIGATTFTEYRGIFEKDAALSRRFQKIDVVEPSIDQTVQILRGLKSRFEEHHGVKYAASALTAAAELSARFITDRHLPDKAIDVIDEAGAAQRILPKSKQKKTIGKGEIEDIVSRIARVPPQSVSQDDRSKLQTLERDLKSVVFGQDPAIDALASAIKMSRAGLGKTDKPIGSFLFSGPTGVGKTEVAKQLAFILGIELIRFDMSEYMERHAVSRLIGAPPGYVGFDQGGLLTEAITKKPHCVLLLDEIEKAHPDIFNILLQVMDHGSLTDNNGRKADFRNVIIVMTTNAGAETMNKATIGFTTTREQGDEMADIKRMFTPEFRNRLDATISFRSLDEDIILRVVDKFLMQLEEQLHEKKVDAVFTEKLRRFLAKKGFDPLMGARPMQRLIQDMIRKALADELLFGKLVNGGKVAVDLDDADAVKLEFSENEAPPAPAQEEAEA

SEQ ID NO: 7275 - protein, 909 aa, Azotobacter vinelandii
MSDISRVSLFGKLDPLLFSTLEKATAFCRQRGNPYVELAHWLFQQWQESEGDLRLAARHFELDGERLERDLQAALDRLPRGAGAVSDLSGHIDDAVERAWVYGSLKFGAARIRGAHLLIGLLRTAALRHLLFGISREFERILPDVLGERLDSILAGSSEEVVVSAAAAGAPSPAADRALEQYGVNLSERARTGEIDPVTGRDGEIRQMVDVLLRRRQNNPLLTGEAGVGKTAVVEGLALRIAAGEVPPPLREVELYLLDIGLLQAGASVKGEFERRLRQLIDEVRASPRPIVLFIDEIHTLMGAGGNAGTGDAANLLKPMLARGELRTIGATTWAEYKRHIEKDPALTRRFQVVQIHEPDEERALAMIRGLAGKLAHHHGVLLLDEALRAAVSLSHRYIPARQLPDKAVSLLDTACARVAVSQHALPPELEDCRRRIETLRVERGIVEHECAIGAGDASRLDELATRLAGEEAECERLMARWRDEQELAARIFDLRARLGGGAATPAEEEVRRPLLAELYTVLAELEARQQDEPLILPAVDTHAVAAVVADWTGIPVGRHAQGRGRRRAQPGRHPGGAGDRPAPRPGGDRPADPDRPRAARRSGQAGRRVPARRPFGGGQDRDRAGAGRGVVRRRAEPDRHQHERVPGGAHRQHPERGAARLRRLRRGRRADRGGAPASLQRGAAGRGGEGPPGRARDLLPGVRQGLDGGRRGPPHRLQEHPDHPHLQRRQRPADAPLPGPAADSRPRGAGRRAARAAAPGVPGGAARAPVGGALLPAVGRDAGAHRPPATGADRPPPARQPRHRFPLRAGGGATGRRALHRGRVGRAHGRRHPHPYGAATHQPRTAAARRRRGAADAHPAGRGAGRIRLPLRERADAGRRAKRTGLKAWIVTSRYTACWARTCCCFAP

SEQ ID NO: 7276 - protein, 756 aa, Azotobacter vinelandii
MLNRELEVTLNLAFKEARAKRHEFMTVEHLLLALLDNEAAAAVLRACGANIDKLRHDLQEFIDSTTPLIPQHDEERETQPTLGFQRVLQRAVFHVQSSGKREVTGANVLVAIFSEQESQAVFLLKQQSVARIDVVNYIAHGISKVPGHGDHPDGEHEMQDEEGGDASASGHPLEAYASNLNELARQGRIDPLVGREFEVERVAQILARRRKNNPLLVGEAGVGKTAIAEGLAKRIVDNQVPDLLTHSVVYSLDLGALLAGTKYRGDFEKRFKALLNELRKKPHAILFIDEIHTIIGAGAASGGVMDASNLLKPLLSSGEIRCIGSTTFQEFRGIFEKDRALARRFQKVDVIEPSVEDTVGILRGLKPRFEQHHGIEYSDEALRAAAELSFRYINDRHMPDKAIDVIDEAGAFQRLQPEDRRAKLIDVAQVEDIVAKIARIPPKHVSTSDKELLRNLERDLKLTVFGQDAAIDSLATAIKLSRAGLKSPDKPVGSFLFAGPTGVGKTEAARQLAKALGVELVRFDMSEYMERHTVSRLIGAPPGYVGFDQGGLLTEAITKQPHCVLLLDEIEKAHPEVFNLLLQVMDHGTLTDNNGRKADFRSVIIIMTTNAGAETAARASIGFTLQDHSSDAMEVIKKSFTPEFRNRLDTIIQFGRLSHEVIKNIVDKFLTELQAQLEDKHVQLDVSERARGWLAEHGYDAQMGARPMARLIQDRIKRPLAEEILFGELAEHGGVVHIDLEGEELSFDFETAAEVA

SEQ ID NO: 7277 - protein, 327 aa, Azotobacter vinelandii
MLKDEAAAVLNLADTLAARVIGQRHGLEAIARRIRTARARLDDPGKPVGVFLLAGPSGVGKTETALALAEALYGGEQNLIVINMSEFQEAHTVSTLKGAPPGYVGYGEGGVLTEAVRRRPYSVVLLDEVEKAHPDVHEIFFQVFDKGWMEDGEGRRIDFKNTLIILTSNVGSDLLMRLCQDPQRIPDPEALAGALREPLRRVFPAALLGRLSVVPYYPLSDEMLARIVRLQLERIGRRLRDNHGIDFHYAQAAVQLVGARCTEVESGGRMVDAILTHTVLPHISRELLLRAGGEAPLTRIQLDAEQGEFVYRFESGQTPADAQRGRD

SEQ ID NO: 7278 - protein, 883 aa, Glycine max
  unsure (1)..(883): unsure at all Xaa locations
MARVLVQSTGMPGLLSGQRHGKHKGSGKSKRSVKMMSTLRMTALRMWSFSGLRTLNPMDSLSRPRHTFPLXXTTSRRARAKRCVPKAMFERFTDKAIKVIMLAQEEARRLGHNFVGTEQILLGLIGEGTGIAAKVLKSMGINLKDARVEVEKIIGRGSGFVAVEIPFTPRAKRVLEFSLEEARQLGHNYIGSEHLLLGLLREGEGVAARVLENLGADPNNIRAQVIRMVGEGADSVGATVGPGSGNNNKMPTLVEXGKNLTKLAEEGEDDGAMVTEVDIQHIMQILGRRTKNNPCLIGEPGVGKTAIAEGLAQRIANGDVPETIEGKKVITLDMGLLVAGTKYRGEFEERLKKLMEEIKQSDEIILFIDEVHTLIGAGAAEGAIDAANILKPALARGELQCIGATTLDEYRKHIEKDPALERRFQPVKVPEPTVDETIQILKGLRERYEIHHKLRYTDEALVAAAQLSYQYISDRFLPDKAIDLIDEAGSRVRLQHAQLPEEARELDKEVRQIIKEKEEAVRNQDFEKAGELRDREMDLKAQISTLVEKGKEMSKAETEAGDEGPIVTEADIQHIVSSWTGIPVEKVSTDESDRLLKMEETLHKRVIGQDEAVKAISRAIRRARVGLKXRLDIRGFMERHTVSKLIGSPPGYVGYTEGGQLTEAVRRRPYTVVLFDEIEKAHPDVFNMMLQILEDGRLTDSKGRTVDFKNTLLIMTSNVGSSVIEKGGRKIGFDLDYDEKDSSYNRIKSLVTEELKQYFRPEFLNRLDEMIVFRQLTKLEVKEIADIMLKEVFDRLKAKEIDLSVTERFRERVVDEGYNPSYGARPLRRAIMRLLEDSMAEKMLAREIKEGDSVIVDADSDGNVIVLNGSSGAPDSLEEALPV

SEQ ID NO: 7279 - protein, 953 aa, Glycine max
  unsure (1)..(953): unsure at all Xaa locations
MVRNNSTFQPLLTHRSLPLEPCSTTTTSSVSATSYPPLFTRPYSSLSFLVSQRKGFTLTSLSPIRTNKKRRRASLRVSAVFERFTERAIKAIVLSQREAKALGSELVYTQHLLLGLIAEEDRSSDGFLASGVTVEKAREVVRSVWLRNGSARAGSGAARAGVDDDGSKASATQVPFSVNAKRVFEAAFEYSKSLGHKFVGPEHITVGLVKVDDGSVSRVLYRLGTNGSQLASVAFSRLQKEIAKDGREPNVISKGVPNKSISRKGSDAGASATREESALSQFCVDLTARASEGRIDPVVGREVEVQRIIQILCRKTKSNPILLGEAGVGKTAIAEGMALRIAKADVAPFLLTKRVMSLDIALLMAGAKERGELEERVTKLVKDIIKSGDVILFIDEVHILVQAGTIGRGNKGSGLDIANLLKPALGRGQFQCIASTTLDEYRLYFEKDTALARRFQPVWVDEPSEDDAIKILMGLREKYEAHHKCRYTAEAIKAAVDLSARYIVDRYLPDKAIDLIDEAGSRACIEAFKKKKEHETGILSKCPADYWQEIKDVKSMHEXXENKLKYYGASSIDDTNELILDSYLSSTTTDNEPIEVGPEDIAAVASLWSGIPVQKLTADQRILLLDLENQLRKRVIGQEEAVAAISRAVKRSRVGLKDPDRPIAAMLFCGPTGVGKTELAKSLAACYFGSXEAAMVRLDMSEYMERHTVSKLIGSPPGYVGYGEGGVLTEAIRRKPFTLLLLDEIEKAHPDIFNILLQILEDGQLTDSQGRRVSFKNALVVMTSNVGSSAIAKGRHNSIGFLIPDDXXTTSYNGLKSMVIEELRSYFRPELLNRIDEVVVFQPLEKSQLLQILDLLLQDMKKRVLSLGVHVKVSEAVKNLVCQQGYNPTYGARPLRRAITSLIEDPLSEAFLYGECKQGDTVLIDLDANGNPFVTNQLDQIVXTYLTDTRSCL

SEQ ID NO: 7280 - protein, 544 aa, Glycine max
  unsure (1)..(544): unsure at all Xaa locations
NSARGGLRERYELHHGVKISDSALVSAAVLADRYITERFLPDKAIDLVDEAAAKLKMEITSKPTELDEIDRAILKLEMEKLSLKNDTDKASKERLSKLENDLSLLKQKQKELTEQWDSEKVFMTRIRSIKEEIDRVNLEMEAAERDYDLNRAAELKYGTLMSLQRQLEEAEKNLSDFRNSGQSLLXRRGHYLDITEIVSKWTGIPLSNLQQTEREKLVLLEQVLHKRVVGQDTAVKSVADAIRRSRAGLSDPNRPIASFMFMGPTGVGKTELAKALAGYLFNTENALVRIDMSEYMEKHAVSRLVGAPPGYVGYEEGGQLTEVVRRRPYSVVLFDEIEKAHHDVFNILLQLLDDRRITDSQGRTVSFTNCVVIMTSNIGSHYILDTLRSTQDDKTAVYDQMKRQVVELARQTFHPEFMNRIDEYIVFQPLDSEQISKIVELQMERVKNRLKQKKIDLHYTEKAVKLLGVLGFDPNFGARPVKRVIQQLVENEIAMGVLRGDFKEEDSIIVDADVTLSGKERSPLNKLLIKKLDSPDADAMVVND

SEQ ID NO: 7281 - protein, 534 aa, Glycine max
ADKMKSFLVAEFMQCIGATTLDEYRKHIEKDPALERRFQPVKVPEPTVDETIQILKGLRERYEIHHKLRYTDDALVAAAQLSHQYISDRFLPDKAIDLIDEAGSRVRLQHAQLPEEARELDKEVRQIVKEKEEFVRNQDFEKAGELRDREMDLKAQISALIEKGKEMSKAESEARDEGPMVTEVDIQHIVSSWTGIPVEKVSTDESDRLLKMEETLHKRVIGQDEAVKAISRAIRRARVGLKNPNRPIASFIFSGPTGVEKSELAKALAAYYCGSEEAMIRLDMSEFMERHTVSKLIGSPPGYVGYTEGGQLTEAVRRRPYTVVLFDEIEKAHPDVFNMMLQILEDGRLTDSKGRTVDFKNTLLIMTSNVGSSVIEKGGRKIGFDLDYDEKDSSYNRIKSLVTEELKQYFRPEFLNRLDEMIVFRQLTKLEVKEIADIMLKEVFDRLKAKEIDLSVTERFRERVVDEGYNPSYGARPLRRAIMRLLEDSMAEKMLAREIKEGDSVIVDADSDGNVIVLNGSSGAPDSLEEALPV

SEQ ID NO: 7282 - protein, 695 aa, Glycine max
  unsure (1)..(695): unsure at all Xaa locations
MARVLAQSINVPGLLAEHRHGQQKESGKLKRSTKMMSALRTNGLRMSGFSGLRTFNPLDTMLRPGIDFHSKVSIATSSRRARATRCVPKAMFERFTEKAIKVIMLAQEEARRLGHNFVGTEQILLGLIGEGTGIAAKVLKSMGINLKDARVEVEKIIGRGSGFVAVEIPFTPRAKRVLELSLEEARQLGHNYIGSEHLLLGLLREGEGVAARVLENLGADPTNIRTQVIRMVGESADSVTATVGSGSSGNKMPTLEEYGTNLTKLAEEGKLDPVVGRQPQIERVTQILGRRTKNNPCLIGEPGVGKTAIAEGLAQRIANGDVPETIEGKKVITLDMGLLVAGTKYRGEFEERLKKLMEEIKQSDEIILFIDEVHTLIGAGAAEGAIDAANILKPALARGELQCIGATTLDEYRKHIEKDPALERRFQPVKVPEPTVDETIQILKGLRERYEIHHKLRYTDEALVAAAQLSYQYISDRFLPDKAIDLIDEAGSRVRLQHAQLPEEARELDKEVRQIIKEKEEAVRNQDFXKAGELRDREMDLKAQISTLVEKGKEMSKAETEAGDEGPIVTEADIQHIVSSWTGIPVEKVSTDESDRLLKMEETLHKRVIGQDEAVKAISRAIRRARVGLKNPNRPIASFIFSGPTGGKSELAKALAAYYFGSEXAMIRLDMSEXMERHTVTSIXLNLFTFTVIVE

SEQ ID NO: 7283 - protein, 630 aa, Glycine max
  unsure (1)..(630): unsure at all Xaa locations
MARVLAHSINGPGLLAEPRPGPPKGSGKLKRSPQMMSALPTNGLRMAGFSRLRTFNPLDTMLRPGIDFHSKVSIATSSRRARATRCVPKAMFERFTEKAIKVIMLAQEEARRLGHNFVGTEQILLGLIGEGTGIAAKVLKSMGINXLKDARVEVEKIIGRGSGFVAVEIPFTPRAKRVLELSLEEARQLGHNYIGSEHLLLGLLREGEGVAARVLENLGADPTNIRTQVIRMVGESADSVTATVGSGSSGNKMPTLEEYGTHXLTKLAEEGKLDPVVGRQPQIERVTQILGRRTKNNPCLIGEPGVGKTAIAEGLAQRIANGDVPETIEGKKVITLDMGLLVAGTKYRGEFEERLKKLMEEIKQSDEIILFIDEVHTLIGAGAAEGAIDAANILKPALARGELQCIGATTLDEYRKHIEKDPALERRFQPVKVPEPTVDETIQILKGLRERYEIHHKLRYTDEALVAAAQLSYQYISDRFLPDKAIDLIDEAGSRVRLQHAQLPEEARELDKEVRQIIKEKEEAVRNQDFEKAGELRDREMDLKAQISTLVEKGKEMSKAESEAGDASPVVTEADIQHIVSSWTGIPVEKVSTDESDRLLKMEETLHKRVIGQDEAVKAISRAIRRARVX

SEQ ID NO: 7284 - protein, 622 aa, Glycine max
  unsure (1)..(622): unsure at all Xaa locations
MARVLVQSTGMPGLLSGQRHGKHKGSGKSKRSVKMMSTLRMPALRMSSFSGLRTLNPMDSLSRPRHTFPLXXTTSRRERAKRCVPKAMFERFTEKAIKVIMLAQEEARRLGHNFVGTEQILLGLIGEGTGIAAKVLKSMGINLKDARVEVEKIIGRGSGFVAVEIPFTPRAKRVLEFSLEEARQLGHNYIGSEHLLLGLLREGEGVAARVLENLGADPNNIRAQVIRMVGEGADSVGATVGPGSSNNNKMPTLEEYGTNLTKLAEEGKLDPVVGRQQQIERVTQILGRRTKNNPCLIGEPGVGKTAIAEGLAQRIANGDVPETIEGKKVITLDMGLLVAGTKYRGEFEERLKKLMEEIKQSDEIILFIDEVHTLIGAGAAEGAIDAANILKPALARGELQCIGATTLDEYRKHIEKDPALERRFQPVKVPEPTVNETIQILKGLRERYEIHHKLHYTDDALVAAAQLSHQYISDRFLPDKAIDLIDEAGSRVRLQHAQLPEEARELDKEVRQIVKEKEESVRNQDFEKAGELRDKEMDLKAQISALIEKGKEMSKAESEAGDEGPMVTEVDIQHIVSSWTGIPVEKVSTDESDRLLKMEETLHKRVIGQDEAVKAISRAIRX

SEQ ID NO: 7285 - protein, 313 aa, Glycine max
  unsure (1)..(313): unsure at all Xaa locations
XKDLTAMAKAGKLDPVIGRDDEIRRCIQILSRRTKNNPVLIGEPGVGKTAISEGLAQRIVHGDVPQALMNRRLISLDMGALIAGAKYRGEFEDRLKAVLKEVTESDGQTILFIDEIHTVVGAGATNGAMDAGNLLKPMLGRGELRCIGATTLDEYRKYIEKDPALERRFQQVYVDQPTVEDTISILRGLRERYELHHGVRISDSALVEAAILSDRYISGRFLPDKAIDLVDEAAAKLKMEITSKPTALDEINRSVLKLEMERLSLMNDTDKASTDRLDRLEAELSLFKEKQAELTEQWEHEQAGMTRIQSIKX

SEQ ID NO: 7286 - protein, 317 aa, Glycine max
  unsure (1)..(317): unsure at all Xaa locations
XQGRPEHDVTHALKRAFQXDRMGPQTANGGIARCGXFGATGGGKPEMVKALAEYXFGSEEAMIRLDMSEFMERHTVSKLIGSPPGYVGYTEGGQLTEAVRRRPYTVVLFDEIEKAHPDVFNMMLQILEDGRLTDSKGRTVDFKNTLLIMTSNVGSSVIEKGGRKIGFDLDYDEKDSSYNRIKSLVTEELKQYFRPEFLNRLDEMIVFRQLTKLEVKEIADIMLKEVFDRLKVKDIELQVTERFRDRVVEEGYNPSYGARPLRRAIMRLLEDSMAEKMLAREIKEGDSVIVDVDSDGNVIVLNGSSGAPESLPETLPV

SEQ ID NO: 7287 - protein, 173 aa, Glycine max
PPGYVGHEEGGQLTEQVRRRPYSVILFDEVEKAHVAVFNTLLQVLDDGRLTDGQGRTVDFRNTVIIMTSNLGAEHLLAGMVGKNSMKVARDLVMQEVRRHFRPELLNRLDEIVIFDPLSHEQLRKVARLQMNDVAVRLAERSIALAVTDAALDMILSLSYDPVYGARPIMRWI

SEQ ID NO: 7288 - protein, 359 aa, Glycine max
  unsure (1)..(359): unsure at all Xaa locations
DPRVRRRTPTLTKSVFAAVTASRTSRSRSHSARRLFPAIPRASENSLSRSQIIDXXTNVASAKFLSRSFTRTFHATNPSLRSAASSQVAQTDFTDMAWEGIVGAVDAARVSKQQIVESEHLMKALLEQKDGLARRIFTKAGLDNTSVLQATEDFIAKQPKVTGDTSGPVVGSHFSSLLDNSRKYKKEMGDEYVSVEHLLLAFHSDKRFGQQLFKNLQLSEKALKDAVQAVRGSQRVTDQNPEGKYEALDKYGNDLTELARRGKLDPVIGRDDEIRRCIQILSRRTKNNPVIIGEPGVGKTAIAEGLAQRIVRGDVPEPLMNRKYRGDFEERLKAVLKEVTASNGQIILFIDEIHTVVGX

SEQ ID NO: 7289 - protein, 170 aa, Glycine max
LARGELRCIGATTLDEYREHVEKDKAFERRFQQVLVNEPSVPDTVSILRGVKERYEAHHGVQIMDSALVAAAKLADRYIKGRFMPDKAIDIIDEACANVRVQLDSQPEAIDELERRQLQLQVEATALAKEKDELSKQRLQKVQEELNKIQDELSPLVLRHEAEKARVNEI

SEQ ID NO: 7290 - protein, 230 aa, Glycine max
  unsure (1)..(230): unsure at all Xaa locations
XXIGRRTPYAVILFDDIDKAHADAFNVFLHILDDGRVTDSQSRTVCFTNTRFIMTSDVGSHDIWSTDDDTTPKELAHESIKHRVMDAARSIFRPEYMNRDDEYIVFPPVRREQISSIVRLQLERVQKRIADRKMKIQVTDAAVQLLGSLGYDPNYGARPVKRVIQQNVENELAKGILRGEFKEEDAILIDTELTAFTNGQLPQQKLVFKKLAADSESTPQGTLEPFPQAP

SEQ ID NO: 7291 - protein, 171 aa, Glycine max
  unsure (1)..(171): unsure at all Xaa locations
DEVHTLIGAGAAEGAIDAANILKPALARGELQCIGATTLDEYRKHIEKDPALERRFQPVKVPEPTVDETIQILKGLRERYEIHHKLRYTDDALVAAAQLSHQYIXGSRVRLQHAQLPEEARELDKEVRQIVKEKEEFVRNQDFEKAGELRDREMDLKAQISALIEKGKEMS

SEQ ID NO: 7292 - protein, 147 aa, Glycine max
  unsure (1)..(147): unsure at all Xaa locations
XYTEGGQLTEAVRRRPYTVVLFDEIEKAHPDVFNMMLQILEDGRLTDSKGRTVDFKNTLLIMTSNVGSSVIEKGGRKIGFDLDYDEKDSSYNRIKSLVTEELKQYFRPEFLNRLDEMIVFRQLTKLEVKEIADIMLKEVFERLKVKR

SEQ ID NO: 7293 - protein, 227 aa, Glycine max
  unsure (1)..(227): unsure at all Xaa locations
XARVLXNLAADPNNNRAQVIRMVGEGADSVGATVGPGSSNNNKMPTLEEYGANLTKLAEEGKLDPVMGRQPQIERVTQILGRRTKNNPCLIGEPGVGKTAIAEGLAQRIANGDVPETIEGKKVITLDMGLLVAGTKYRGEQGKRREETGEEKQSSLEEIFKHRAEAQQKAMSSIEGAKERYERAKPSKASKERNIQANKRAEEERRKAESGRELERRTREVEGREWN

SEQ ID NO: 7294 - protein, 80 aa, Glycine max
IILFIDEIHTVVGAGATSGAMDAGNLLKPMLGRGELRCIGATTLNEYRKYIEKDPALERRFQQVFCSQPSVEDTISILRG

SEQ ID NO: 7295 - protein, 179 aa, Glycine max
  unsure (1)..(179): unsure at all Xaa locations
XLXXLERRELQLDVEATALEQEKDEASKVRLQLVREELTKLREQLKPLRMQHDAEKGRVDELRSLKNKIESLRTKAALAERDKNLALAADLKYGAIPELEKKIAQMEAALEEKNKLLSEVVGPEKIAEIVARWTGIPVSKLTQTEKERLLKLSDQLHRRVVGQSEAVDAVAEAVLRSRX

SEQ ID NO: 7296 - protein, 157 aa, Glycine max
  unsure (1)..(157): unsure at all Xaa locations
XRWSGATALEXYRGYVHKDLALKRRFQQVYVPDPSVASPLSTLGGLTERYXGRHGVRTLLRALVVAGQLYSRYISGRHLPGKAVGLVHKACAHVRVLLNSHPEAIDSLERKSRQLEVELHALEKEKGTASKACLVXEVRKEPNXLRVKLQPLDXEVH

SEQ ID NO: 7297 - protein, 205 aa, Glycine max
  unsure (1)..(205): unsure at all Xaa locations
XKGRTVDFTNTVIIMTSNIGAEHLLKGIDQKTGRHGPRRQXDKVMVEVKKHFRPEFLNRLDDIVVFAPLSSSELGNIVRLQLVKLSDRLKDRDVSVKLTDAAAQFILSQAYDPYYGARPLRRYLEKHIVTQLSRMLISGELQNNALVTIDVAAAGAGAAAXQRADVQGAAAGAQVAPRLGRVVGFRGRRRHGHDAGQDYQRRQAX

SEQ ID NO: 7298 - protein, 222 aa, Glycine max
  unsure (1)..(222): unsure at all Xaa locations
XRSVLFSATLAGYLQCIEATTMDEYRKHIEKDPALERRFQPDETIQIXTFCSLFCSFYLFYSFMLEIRQVSFFLLIFMLLEILQISDRFLPDKAIDLIDEAGSRVRLQHAQLPEEARELDKEVRQIVKEKEEFVRNQDFEKAGELRDREMDLKAQISALIEKGKEMSKAESEAGDEGPMVTEVDIQHIVSSWTGIPVEKVSTDESDRLLKMEETLHKRVIGQ

SEQ ID NO: 7299 - protein, 79 aa, Glycine max
  unsure (1)..(79): unsure at all Xaa locations
CIGATTLDEYRKHIEKDPALERRFQPVKVPEPTVDETIQILKGLRERYEIHHKLRYTDEALVAAAQLSYQYISDRFLPX

SEQ ID NO: 7300 - protein, 163 aa, Glycine max
  unsure (1)..(163): unsure at all Xaa locations
XTEKDRCLSANLLPYVEGIILLDMCGDMDGHSGLQLIDTPTGYSASYVGGXLLEAVRRHTYTVXRICDIDNAHPAVFNMKLQILEEGRLSDSLRXSEDFTNTLLIMTSNAGGRVHEKRGRIIXFDLDYDEKDSMLYRIMSXVTDELKPHCMPESLNRENDMIV

SEQ ID NO: 7301 - protein, 147 aa, Glycine max
  unsure (1)..(147): unsure at all Xaa locations
XLEPEEARELDKEVRQIVKEKEESVRNQDFEKAGELRDKEMDLKAQISALIEKGKEMSKAEXEAGDEGPMVTEVDIQHIVSSWTGIPVEKVSTDESDRLLKMEETLHKRVIGQDEAVKAISRAIRRARVGLKNPNRAVGRWIFAGPA

SEQ ID NO: 7302 - protein, 92 aa, Glycine max
  unsure (1)..(92): unsure at all Xaa locations
XKDARXRKTGIRLXRERHTVFKLIGSPSGCVFYTEGGQLTNTILRXSYTDVLLDEIEKAHPDVFNMIAXILXDGRLTDSMVRTFYFKNTLLI

SEQ ID NO: 7303 - protein, 187 aa, Glycine max
  unsure (1)..(187): unsure at all Xaa locations
MNPDKFTHKTNEALVSAHEIATSNGHAQFTPLHLASSLISDKDGIFSQALSNAAGEESARAAERVINNALKKLPSQSPLPDEVPASNALVKAIRRAQTLQKKRGDTHLAVDQLILGLLEDSQIAELLNEAGVAASKVKSEVERLRGREGKEVESATGXDSTFQALKTYGRDLVEQAGXLDPCIGRDE

SEQ ID NO: 7304 - protein, 92 aa, Glycine max
  unsure (1)..(92): unsure at all Xaa locations
LNCRKEKPKMSLLNEERXNRTLWLLHIAATDESDRLLKMEETLHKRVIGQDEAVKAISRAIRRARVGLKNPNRPIASFIFSGPTGVGKSELX

SEQ ID NO: 7305 - protein, 126 aa, Glycine max
  unsure (1)..(126): unsure at all Xaa locations
XHASEFLNRLDEMIVFRQLTKLEVKEIADIMLKEVFDRLKVKDIELQVTERFRDRVVEEGYNPSYGARPLRRAIMRLLEDSMAEKMLAREIKEGDSVIVDVDSDGNVIVLNGSSGAPESLPETLPV

SEQ ID NO: 7306 - protein, 71 aa, Glycine max
  unsure (1)..(71): unsure at all Xaa locations
XISRAMRRASVGLKNPNRPIASLMFPGPTGVANSELAKALAVYYFGSEEAMIRVDMSEFMKRHTGSTLTGS

SEQ ID NO: 7307 - protein, 124 aa, Glycine max
  unsure (1)..(124): unsure at all Xaa locations
XCFRREQISSIVRLQLERVQKRIADRKMKIQVTDAAVQLLGSLGYDPNYGARPVKRVIQQNVENELAKGILRGEFKEEDAIIIDTELTAFTNGQLPQQKLVFKKLAADSESTPQDTLEPFPQAP

SEQ ID NO: 7308 - protein, 114 aa, Glycine max
  unsure (1)..(114): unsure at all Xaa locations
XTIRPELLNRLDDIVVFETLGRKELRQIVLLQFDSVINRLKKAQISVNVTTAALDVILDESYEPQYGARPIKRYIEKHVVTDLSKLIISGQLHAKTQVEITEVNGKLTFVHFLK

SEQ ID NO: 7309 - protein, 120 aa, Glycine max
  unsure (1)..(120): unsure at all Xaa locations
XYTEGGQLTEAVLRLPYTVVXFDEMDKARPVVFNMMLQILEEGRLTHTLGTTVDYKTTLRIPTSIAESRVIERGGLTIGFDLVSDANANMYDRLPSLPTDELYQYSLPESXNGKVEMNAX

SEQ ID NO: 7310 - protein, 106 aa, Glycine max
  unsure (1)..(106): unsure at all Xaa locations
XGELSEIERVTQILXRQTKNNPCLIGEPGVGKTAIAEGLAQQTGYGEEPVTMEGXKVYAFNIHLIDAGLKVFCRYRXRMVVSGLKSSLATLKXLMEFVPLDAFFKX

SEQ ID NO: 7311 - protein, 151 aa, Glycine max
  unsure (1)..(151): unsure at all Xaa locations
XXTKGATTLKKNKKFMVLYPALQNLXQSQKGAAPTNNKTIQILKGLTKHSXIHHKLRYTXYALLAAAHLSHQYIRNRFYSQQAIYXIDKSGSXIRLQHAQLPEEARELYKXFMQIVKDKEXFVLNQYYEKAGXLIDTXIYLNAQISALIQX

SEQ ID NO: 7312 - protein, 98 aa, Glycine max
  unsure (1)..(98): unsure at all Xaa locations
XREXELKAQITAIIDXSKEXXKAETESGDVGPLVTEADIQHIVSSWTGIPVXXKXSSDESDRLLKMEETLHTRIIGQDEAVKAISRAIRRARVGLKNX

SEQ ID NO: 7313 - protein, 441 aa, Glycine max
  unsure (1)..(441): unsure at all Xaa locations
EKELHVSDVLDHRSSSSPTRVTTDLGLGTLYTSTAQDPDTPKLQDQRKHXXQRLSDSVSTDCDDFKSLDRLLNEKVGWQDQAICAISQTLSLCKSGAGKRRGSNGXXADIWLAFLGPDRLGKRKIASVLAETIFGNPESLISVDLGFQDSFYDVLRRKTILDYIAGELSKKPHSVVFLENVDKADVLVQNSLLQALRTGKFSYSHGRVISINNTIFLTTSTLYHLHDSLLLXDCKIFSDERMLEAKRCQMQLLIGQSSSLNKRKPDISDSKEGATSKMQKQDSEASRSFLDLNMPVEDGEEGVNDNDHESESMSENTDAWLSDFFDQIDEKVVFKPFNFNELAEQVLKRIGMLFQRTFGSELQLEIDHEVIAYILAAAWLSDKKNAVEDWIEHVLGKGFVEAQQKYHPAAQYVVKLVNCESIFVEEQAPDVXXLPARINMD

SEQ ID NO: 7314 - protein, 853 aa, Oryza sativa
  unsure (1)..(853): unsure at all Xaa locations
MEGSLVQSAIAPTIYRRSGTARFRVRARATMMRTMPTRTLTLGGFQGLRQTNFLDSRSVIKRDFGSIVASQISRPRGLGSRGVVRAMFERFTEKAIKVIMLAQEEARRLGHNFVGTEQILLGLIGEGTGIAAKVLKSMGINLKDARVEVEKIIGRGSGFVAVEIPFTPRAKRVLELSLEEARQLGHNYIGSEHLLLGLLREGEGVAARVLESLGADPNNIRTQVIRMVGESTEAVGAGVGGGSSGQKMPTLEEYGTNLTKLAEEGKLDPVVGRQDQIERVTQILGRRTKNNPCLIGEPGVGKTAIAEGLAQRISNGDVPETIEGKKVITLDMGLLVAGTKYRGEFEERLKKLMEEIKQNDDIILFIDEVHTLIGAGAAEGAIDAANILKPALARGELQCIGATTLDEYRKHIEKDPALERRDRFLPDKAIDLIDEAGSRVRLRHAQLPDEAKELDKELRQAGELRDREMELKAQITAIIDKSKEMVKAETESGEVGPLVTEADIQHIVSSWTGIPVEKVSSDESDRLLKMEETLHTRIIGQDEAVKAISRAIRRARVGLKNPNRPIASFIFSGPTGVGKSELAKALAAYYFGSEEAMIRLDMSEFMERHTVSKLIGSPPGYVGYTEGGQLTEAVRRRPYTVVLFDEIEKAHPDVFNMMLQILEDGRLTDSKGRTVDFKNTLLIMTSNVGSSVIEKGGRKIGFDLDYDEKDTSYNRIKSLVTEELKQYFRPEFLNRLDEMIVFRQLTKLEVKEIADIMLKEVFDRLKAKDIDLQVTEKFRDRVVDEGYNPSYGARPLRRAIMRLLEDSLAEKMLAGEVKEGDSAIVDVDSEGKVIVLNGGSGVPEPLAPALSVX

SEQ ID NO: 7315 - protein, 787 aa, Oryza sativa
  unsure (1)..(787): unsure at all Xaa locations
MERTLLNPPPRRGARVVARMGFDMFTDKAIKAIMMAQEEARRLGHHAAGSEQLLLGVIGEGTGIGAKVLRGAGLSLKAARAEVEKMAGRGPGMVPMEIKFTPAAKNVLQASQEEAHQLGHNYVGSEHLLLGLLREHGAALVVLKNFQADPSNIRSEGKLDPVVGRQNQVDRVVQILGRRTKNNPCLIGEPGVGKTAIAEGLAQRIAAGNVPETIDGKTVITLDMGLLVAGTKYRGEFEERLKKLMDEVKQNGEIILFLDEVHTLVGAGAAEGAIDAANILKPALARGELQPVKVPEPTVDETIGILKGLRERYEIHHKVQYTDESLIAAARLSYQYISDRFLPDKAIDLVDEAGSLVRLRNAQLPDEAKELEKKLKKIMAEKSEAIRSQDFEKAGALRGEEVELKSEIMSLVDKSKEMSKAAVDSGESPGPTVTEADVQHIVSSWTGVPVEKVTVDESSRLLAMESSLHRRIVGQDEAVTAISRAIRRARVGLRDPRRPIASFIFAGPTGVGKSELAKALAAYYYGSPEAMVRLDMSEFMEKHTVAKLVGSPPGYVGYAEGGQLTEAIRRRPYAVVLFDKVEKAHPDVFNMMLQILDDGRLTDSKGRTVDFKNSLIIMTSNVGSGVIEKGGRQLGFAGDGSGDGGYGVIKNMVEEEMKRYFRPEFLNRLDEMIVFRQLTKLEVKEIAGIMLAEVTGRIGGKGIGLQVTERFKELVVEQGFDPSYGARPLRRAIMRLLEDTLTDKMLAGEICAGDSVIVDADGDGNVVVVGRRSAGLPDLKSPAFTVX

SEQ ID NO: 7316 - protein, 864 aa, Oryza sativa
  unsure (1)..(864): unsure at all Xaa locations
XSARGRAVKAVVLSQREAKGLGEGAVAPRHLLLGLIAEDRSAGGFLSSGCIPGRPRVDEGGIXRQDLTPGAPSPSGSGLEMDIPFSGSCKRVFEVAVEFSRNMGCSFISPEHLALALFTLDDPTTNSLLRSLGADPSQLASVALTRLQAELAKDGREPAGASSFKVPKKSPAGGSAFSKSLNSKKEKGALDQFCLDLTTQASGGFIDPIIGREEEIERVVQIICRRTKNNPILLGEAGVGKTAIAEGLALRIAHGDVPSRLDAKRIMSLDVGLLIAGAKERGELESRVTSLIREVREAGDVILFIDEVHNLIGSGTVGKGKGAGLDIGNLLKPPLARGELQCIAATTLDEHRMHFEKDKALARRFQPVLVEEPSQDDAVKILLGLREKYETYHKCKFTLEAINAAVYLSARYIPDRQLPDKAIDLIDEAGSRARMESFNRKKEGQSSILLKSPDEYWQEIRAAQNMHEVVSSNQMKYSPRQENGSAAIKAPSEDMNELTSELQVEEPIVVGTEEIARVASLWSGIPVQQLTADDRKLLVGLDGELRKRVIGQDDAVMAISRAVKRSRVGLNDPDRPIATLLFCGPTGVGKTELTKALAASYFGSESAMLRLDMSEYMERHTVSKLIGSPPGYIGYGETGTLTEAVRRKPFTVVLLDEIEKAHPDIFNILLQIFEDGHLSDSQGRRVSFKNTLIVMTSNIGSTSISKGRRSMGFXXTEDTESSSYVAMKSLVMEELKAFFRPELLNRIDEMVVFRPLEKTQMLAILDIILQEVKGRLLALGIGLEVSDAMKDLICEEGYDKSYGARPLRRAVTHLIEDVISEAILFGEYKPGDTILMDIDAAGKPCXXSHLNEKVVQLSDPTRTF

SEQ ID NO: 7317 - protein, 491 aa, Oryza sativa
  unsure (1)..(491): unsure at all Xaa locations
PTRPPTRTQTRERTLLHLLLSRXSATNDTDKASRDRLSRIEAELSLLKEKQKDLTEQWEREKSVMTKIQSIKEEIDRVNVEIQQAEREYDLNRAAELKYGSLNALQRQLQTTEKELDEYQSSGKSMLREEVTQDDIAEIVSRWTGIPVSKLKQSDREKLLYLEEELHKRVVGQDPAVKAVSEAIQRSRAGLSDPNRPIASFMFMGPTGVGKTELAKALAAFMFNTEEAVVRIDMSEYMEKHSVSRLIGAPPGYVGYEEGGQLTEAVRRRPYSIILFDEIEKAHGDVFNVFLQILDDGRVTDSQGRKVSFTNSIIIMTPIVGSQLIPXTSQGGSTDSAYENIKKRVMDAARSVFXRPEFMNRIDEYIVFKPLEREQINSIVKLQLARVQKRIADRKIKLEVSPGAVEFLGSLGYDPNYGARPVKRVIQQYVENELAKGILRGDFKDEDSILVDTQVTVPSNGQLPQQKLVFHKMSEESAPAAAEDEKFLPAV

SEQ ID NO: 7318 - protein, 549 aa, Oryza sativa
  unsure (1)..(549): unsure at all Xaa locations
RGRVRCLGATTHDEYHRYMVRDAAFERRFQKVHVAEPSVDDTVAILRRLKPSYQDHHXVDIQDAALVAAAKLSGRYIPGERPLRRAXITNQLCSRCVLLSEALPGQGDRPGRRGVXXTARLLMDRRKKKQAQAAVAPXGRKRRPRPHRTGTTHAGARHRIDVARRRDTXPRLMRMRTCKWTGIPVASLGEDERKKLLELPQLLHRRVIGQDEAVGAVAEAVVRSRSGLGNPNQPSGSFLFLGPTGVSKTELAKALAEQLFGNAKLLVRIDMSEYVNASSVTRLIGSAPGYVGYDKGGQLTELVRCRPYSVVLFDEVEKADAAVFNVFLQILDDGRLTDGQGRTVDFTNTIIIMTSNLGAQHLADAAAADATAAAAKQRVLADVQRHFRPELISRLTEMVVFRPLSGEQLRKVARLQLRGMAARLAEKGIGLDVANAALDVVLARSSDQVRAYGARPIKRCLEKDVMTRISKMVVQEEADDDCYVTVEADQGKEELVFTVDKQADAEENDAAAAXVFVVGGGEEEEAEAAGEVSRXVIDDDEXXIQSXSY

SEQ ID NO: 7319 - protein, 636 aa, Oryza sativa
  unsure (1)..(636): unsure at all Xaa locations
MAEASYHKSKGGQDIFRISGGSSAAAAAATAXXAAKGTLDAFGRDLTAEAANADPVVGREEEIDRVVCILSRKSKNSAVLVGAAGVGKTAIAEGLAQRIARGEVSGVLEGARVVELNVAAMISGTSYRGTFEERMTGVIAEAEAEADAAAGKVVLFVDEIHMLLGAGRYHRYMVRDAAFERRFQKVHVAEPSVDDTVAILRRLKPSYQDHXRVDIQDAALVAAAKLSGRYIXXAIDLVDEACATARLLMDRRKKKQAQAAVAPKDENVGPDHIAQWTGIPVASLGEDERKKLLELPQLLHRRVIGQDEAVGAVAEAVVRSRSGLGNPNQPSGSFLFLGPTGVSKTELAKALAEQLFGNAKLLVRIDMSEYVNASSVTRLIGSAPGTNGYDKGGQLTELVRCRPYSVVLFDEVEKADAAVFNVFLQILDDGRLTDGQGRTVDFTNTIIIMTSNLGAQHLADAAAADASHKDDATEAAAAEQRVLADVQRHFRPELISRLTEMVVFRPLSGEQLRKVARLQLRGMAARLAEKGIGLDVANAALDVVLARSSDQVRAYGARPIKRCLEKDVMTRISKMVVQEEADDDCYVTVEADQGKEELXVHRRQAGKKRTTRRRRRLRRRRRGRRGSGGRRRGISS

SEQ ID NO: 7320 - protein, 417 aa, Oryza sativa
  unsure (1)..(417): unsure at all Xaa locations
XPGLQEFGTRVNEAIVGPDHVAQVVSRWSGIPVTTLDQEEKEKLIHLADRLHERVVGQDEAVKLVAQAVLRSRAGLEQPGQPIGSFLFLGSTGVGKTELAKALAEQLFDSEKMLIRFDMSEFVGSGSVLRLIGAPPSYHGHQDGGQLTEKVRTLPYSVILFDEVEKADPSVFNVFLQLLDDGMLTDGKGRTVDFKNTIIIMTSNLGAEHLTEGVTGERTMEAARDLVMKQVQKYFRPELLNRLSEIVIFEPLSHDNLKEVVKIQMKSVVTSVAHKGVSLLASDDALDVILSESYNPMYGARPVRRWVQKNVMTKLSEMLITGDAGQGSTISIDATDDKKGLNFQVLKEEVVVPPKGQSRSFKATRIAMTMCSRSPPYQRGRKVIISIXEQPAKXLGCPFWVIHIILVNCNMVVSPLA

SEQ ID NO: 7321 - protein, 602 aa, Oryza sativa
  unsure (1)..(602): unsure at all Xaa locations
XLNRRGGVATWDLAGXSKRGAAAFTNLAAPPTLDAFGRDLTAEAANADPVVGREEEIDRVVCILSRKSKNSAVLVGAAGVGKTAIAEGLAQRIARGEVSGVLEGARVVELNVAAMISGTSYRGTFEERMTGVIAEXGGGGRRGRREXXVLGRVRCLGATTHDEYHRYMVRDAAFERRFQKDAALVAAAKLSGRYIPARHFPDKAIDLVDEACATARLLMDRRKKKQAQAAVAPKDENVGPDHIAQVRRTPARATAXDVARRRDTXXALLHRRVIGQDEAVGAVAEAVVRSRSGLGNPNQPSGSFLFLGPTGVSKTELAKALAEQLFGNAKLLVRIDMSEYVNASSVTRLIGSAPGTNGYDKGGQLTELVRCRPYSVVLFDEVEKADAAVFNVFLQILDDGRLTDGQGRTVDFTNTIIIMTSNLGAQHLADAAAADASHKDDATEAAAAEQRVLADVQRHFRPELISRLTEMVVFRPLSGEQLRKVARLQLRGMAARLAEKGIGLDVANAALDVVLARSSDQVRAYGARPIKRCLEKDVMTRISKMVVQEEADDDCYVTVEADQGKEELXVHRRQAGKKRTTRRRRRLRRRRRGRRGSGGRRR

SEQ ID NO: 7322 - protein, 270 aa, Oryza sativa
MEITSKPIELDEVDREIIRLEMEKLSLKNDTDKASKQRLSKLEADLESLKQKQKNLSEHWEYEKSLMTRIRSIKEETDRVNLGTGAAEREYDLNRAAELKYGTLLSLQKQLEEAENKLMEFQQSGKSMLREEVTDVDIAEIVSKWTGIPVSNLQQSEKEKLLLLEDVLHKRVIGQDIAVKSVANAIRRSRAGLSDPNRPIASLMFMGPTGVGKTELGKTLAEFLFNTENALIRIDMSEYMEKHAVSRLVGAPPGYIGYGEGGQLTEAVRR

SEQ ID NO: 7323 - protein, 309 aa, Oryza sativa
  unsure (1)..(309): unsure at all Xaa locations
ESALALFCLDLTMRASGGLIDPVIGRKXDEIERVVQIICRRTKNNPILLGEAGVGKTAIAEGLAHKIANGDVPIFLVGKRILSLDVALLMAGAKERGELEARVTSLIREVRKAGDVILFIDEVHTLIGSGIAGRGSKGAGLDIANLLKPALARGELQCIASTTLDEHRLHFDKDKALARRFQPVLVNEPSQEDAVKILLGLREKYETYHKCKYTLESINAAVYLSARYIADRHLPDKAIDLIDEAGSRARMESFKRKKEEQCSILSKSPDEYWQEIRAVQNMHEVVIEDXQYSICCCKDFFFVDMLIDF

SEQ ID NO: 7324 - protein, 257 aa, Oryza sativa
  unsure (1)..(257): unsure at all Xaa locations
VRLDMSEYMERHAVSKLIGSPPGYMGFGEGGTLTEAVRRKPFTVVLLDEIEKAHPDIFNILLQIFEDGHLTDSQGRRVSFKNTLIVMTSNVGSTSISNGKRSIGFQTQTDTEEKSYAAMKSLVMEELKAFFRPELLNRIDGVVVFHPXLRKLXMLAILNIMLQEVKGRILALGIGLEVSDSMKDLISQHGYDKSYGARPLRRAVTQLVEDVISEAILSGQFKPGDTIMVDTDATGKPCLXXRLNDQTVQLSDPTPTL

SEQ ID NO: 7325 - protein, 330 aa, Oryza sativa
  unsure (1)..(330): unsure at all Xaa locations
MSRATAVSRLARAARAAAAARRHHAGGRDPLRALASLAGDASASAGAEAVPPHAGGEITPGEFTEMAWEGVVGAVDAARMSKQQVVEAEHLMKALLEQKDGLARRIFSKAGIDNTSVLQATDEFISRQPKVVGDTSGPIIGSSFVSILDNARKHKKEYADEFVSVEHILRAFTEDKRFGQQLFRDLKIGENELKEAISAVRGSQRVTDQNPEGKYQALEKYGIDMTELARRGKLDPVIGRDDEVRRCIQILCRRTKNNPVIIGEPGVGKTAIAEGLAQRIVRGDVPEPLQNRKLISLDMGALLAGAKFQGQFEERLKAVLKEITASNGQX

SEQ ID NO: 7326 - protein, 181 aa, Oryza sativa
  unsure (1)..(181): unsure at all Xaa locations
GSPPGYVGYAEGGQLTEAIRGRPYAVVLFDEVEKAHPDVFNMMLQILDDGRLTDSKGRTVDFKNSLIIMTSNVGSGVIEKGGRQLGFAGDGSXXDGGYGVIKNMVEEEMKRYFRPEFLNRLDEMIVFRQLTKLEVKEIAGIMLAEVTGRIGGKGIGLQVTERFKELVVEQAFDPSYGARQT

SEQ ID NO: 7327 - protein, 274 aa, Oryza sativa
MSRATAVSRLARAARAAAAARRHHAGGRDPLRALASSQITPGEFTEMAWEGVVGAVDAARMSKQQVVEAEHLMKALLEQKDGLARRIFSKAGIDNTSVLQATDEFISRQPKVVGDTSGPIIGSSFVSILDNARKHKKEYADEFVSVEHILRAFTEDKRFGQQLFRDLKIGENELKEAISASLRGDSANGNDPEGKYQALEKYGIDMTELARRGKLDPVIGRDDEVRRCIQILCRRTKNNPVIIGEPGVGKTAIAEGLAQRIVRGDVPEPLQNRK

SEQ ID NO: 7328 - protein, 199 aa, Oryza sativa
  unsure (1)..(199): unsure at all Xaa locations
XVGKTAIAEGLAHKIANGDVPIFLVGKRILSLDVALLMAGAKERGELEARVTSLIREVRKAGDVILFIDEVHTLIGSGIAGRGSKGAGLDIANLLKPALARGELQEDAVKILLGLREKYETYHKCKYTLESINAAVYLSARYIADRHLPDKAIDLIDEAGSRARMESFKRKKEEQCSILSKSPDEYWQEIRAVQNMHEV

SEQ ID NO: 7329 - protein, 195 aa, Oryza sativa
LQLLDDGRITDSQGRTVSFTNCVIIMTSNIGSPLILDTLRNTSDSKEAVYEIMKKQVIDMARQSFRPEFLNRIDEYIVFQPLDTTEINRIVEIQLNRVKNRLRQQKIHLQYTPEAVEHLGSLGFDPNYGARPVKRVIQQMVENEIALSVLKGDFKEDDTVLVDVSSVAIAKGLAPQKKLVLQRLENANLELVAND

SEQ ID NO: 7330 - protein, 256 aa, Oryza sativa
  unsure (1)..(256): unsure at all Xaa locations
XLQSQSPISRRRRXRPRTLSVXCAASNGRITQQEFTEMAWQSIVSSPEVAKESKHQIVETEHLMXSLLXEQRNGLARRIFSKVGVDNTRLLDATEKFIQRQPKVXWGEDPGSMLGRDLEALIQRARDFKKEYGDSFVSVEHLVLGFAEDKRFGRQLFKDFQITVQSLKTAIESIRGKQNVIDQDPEGKYEALDKYGKDLTAMARQGKLDPVIGRDDEIRRCIQILSRRTKXNPVLIGEPGXGKTAIAEGLSQRIXX

SEQ ID NO: 7331 - protein, 89 aa, Oryza sativa
  unsure (1)..(89): unsure at all Xaa locations
XGXGFQQVYVDQPSVEDTISILRGLRERYELHHGVRISDSALVAAALLSDRYISGRFLPDKAIDLVDESAAQLKMEITSKPTALDEIDR

SEQ ID NO: 7332 - protein, 175 aa, Oryza sativa
  unsure (1)..(175): unsure at all Xaa locations
XACRSTLRXMTSXIGSKVIEKGGGGLGFDFADDQAESQYNRIRSLVNEELKNYFRPEFLNRLDEIIVFRQLNKGEVQEISEILLRDVFARLVEKEISLQVTDKFKERIVEEGFNPAYGARPLRRAIMRLLEDVLAEEILSGRLKEGSQALVDIGEDNQVVVIPGETRELIAPGVE

SEQ ID NO: 7333 - protein, 132 aa, Oryza sativa
  unsure (1)..(132): unsure at all Xaa locations
EELKAFFRPELLNRIDEVVVFHPLEKTQMLAILNIMLQEVKGRILALGIGLEVSDSMKDLISQHGYDKSYGARPLRRAVTQLVEDVISEAILSGQFKPGDTIMVDTDATGKPCLXXRLNDQTVQLSDPTPTL

SEQ ID NO: 7334 - protein, 110 aa, Oryza sativa
  unsure (1)..(110): unsure at all Xaa locations
XKAISRAIRRALVGLNIPNRPIASYIYHGPSGACYIRVRKXALADYSFGSXWARIGLQMSVFIGRLTXSTLLGSPSGYVVYTEGXALLTYAFRRQPYIVVFXKGIEKAHX

SEQ ID NO: 7335 - protein, 83 aa, Oryza sativa
  unsure (1)..(83): unsure at all Xaa locations
XQHGRLTDGQGRXTVDFRNTVIIMTSNXGAEHLLAGMVGKNSMKVARDLVMQEVRRHFRPEXLNRLDEIVXIFDPCPRDSGSR

SEQ ID NO: 7336 - protein, 85 aa, Triticum aestivum
  unsure (1)..(85): unsure at all Xaa locations
XPRVREDAVKILLGLREKYGAYHKCKFTLEAINAAVYLSARYIPDRQLSDKAIDLIDESCSRARIESFQMKKEDSFSFFLKEPDE

SEQ ID NO: 7337 - protein, 331 aa, Zea mays
  unsure (1)..(331): unsure at all Xaa locations
XQQQGVTRLDVMNFISHGDREDERRPAKSADSNAESEDANAQKETPVAQFTQNLNQMAKDGRIDPLIGREPEVERVVQVLCRRRKNNPLLVGEAGVGKTAIAEGLAYRITRGEVPDILANAQVYSLDMGALLAGTKYRGDFEQRLKTVLKELKERPHAILFIDEIHTLXXRGAASGGTLDASNLLKPALSSGTLKCIGATTFTEYRGIFEKDAALSRRFQKVDVTEPTVEQTVAILRGLKSRFEEHHGVKYSSGALSAAAELSARFITDRHLPDKAIDGIDEAGAAQRILPKSKQKKTIGKSEIEEIISKIARVPAQSVSQDDRSKLQACX

SEQ ID NO: 7338 - protein, 269 aa, Zea mays
  unsure (1)..(269): unsure at all Xaa locations
XKALAAYYFGSEEAMIRLDMSEFMERHTVSKLIGSPPGYVGYTEGGQLTEAVRRRPYTVVLFDEIEKAHPDVFNMMLQILEDGRLTDSKGRTVDFKNTLLIMTSNVGSSVIEKGGRKIGFDLDYDEKDTSYNRIKSLTEELKQYFRPEFLNRLDEMIVFRQLTKLEVKEIADIMLKEVFDRLKAKEINLQVTEKFRDRVVDEGYNPSYGARPLRRAIMRLLEDSLAEKMLAGEVKEGDSAIVDVDSDGKVIVLNGGSGVAEPLEPALST

SEQ ID NO: 7339 - protein, 230 aa, Zea mays
  unsure (1)..(230): unsure at all Xaa locations
XGTPGVGKTELTKALAASYFGSESAMIRLDMSEYMERHAVSKLIGSPPGYMGFGEGGTLTEAVRRTPFTVVLLDEIEKAHPDIFNILLQVFEDGHLTDSQGRRVSFKNTLIVMTSNVGSTSISSGRSIGFSTQRDTEETTYAAMKSLVMEELKAFFRPELLNRLDEVVVFHPLEKTQMMAILNLILQEVKSRLLALGIGLEVSESMKILISQQGYDRSYGARPLRRAVTQ

SEQ ID NO: 7340 - protein, 184 aa, Zea mays
  unsure (1)..(184): unsure at all Xaa locations
LFKDFQITVKTLKSAIESIRGKQNVIDQDPEGKYEALEKYGKDLTAVARQGKLDPVIGRDDEIRRCIQILSRRTKNNPVLIGEPGVGKTAIAEGLAQRIVQGDVPQALTNRRLIALDMGALIAGAKYRGEFVDRLKGVHTEVTDSDGQTVLFIDEIHTVXEAQSTNGAMDAGNLLKPMLWRGEL

SEQ ID NO: 7341 - protein, 250 aa, Zea mays
  unsure (1)..(250): unsure at all Xaa locations
MGFLAFWSVSPVRSAAGQQTLVTWTGLLVAGTKYRGEFEVRLKKLMEEIKQNEDIILFIDXVHTLIGAGAAEGVIDAANILKPAFCNFPKICIGATTLDEYRKHIEKDPALERRFQPVKVPEPTMDETIQILRGLRERYELHHKLRYTDDALIAAAQLSYQYISDRFLPDKAIDLIDEAGSRVRLRHAQLPDEAKELDKELRQISKQKNEAVRGQDFEKMANDEDIHYFVYDNKTDMFKKKKKKKKKKKK

SEQ ID NO: 7342 - protein, 395 aa, Zea mays
  unsure (1)..(395): unsure at all Xaa locations
MAGTLLQSVALGTPFGGRMRTHCWRSHGTRRPASMLAVSLSRPVKMSAFVGLRSVHSFSVTPTVSNSRSAVASYRSSRQTRRSRFVTRAMFERFTEKAIKVIMLAQEEARRLGHNFVGTEQILLGLIGEGTGIAAKVLKSMGINLKDARVEVEKIIGRGNGFVAVEIPFTPRAKRVLELSLEEARQLGHNYIGSEHLLLGLLREGEGVAARVLESLGADPSNIRTQVIRMIGETTEAVGAGVGGGSSGNKMPTLEEYGTNLTKLAEEGKLDPVVGRQPQIERVVQILGRRTKNNPCLIGEPGVGKTAIAEGLAQRISTGDVPETIEGKKVITLDMGLLVAGTKYRGEFEERLKKLMEEIKQSDEIILFIDEVHTLIGAXAAXEGAIDAANILKPX

SEQ ID NO: 7343 - protein, 276 aa, Zea mays
  unsure (1)..(276): unsure at all Xaa locations
XGVGKSELAKALAAYYFGSEEAMIRLDMSEFMERHTVSKLIGSPPGYVGYTEGGQLTEAVRRRPYTVVLFDEIEKAHPDVFNMMLQILEDGRLTDSKGRTVDFKNTLLIMTSNVGSSVIEKGGRKIGFDLDYDELRDREMELKAQITAXLLTRARKXLKQRLNLVXVGPLVTEADIQHIVSSWTGIPVEKVSSDESDRLLKMEETLHTRIIGQDEAVKAISRAIRRARVGLKNPNRPIASFIFSGPTGVGKSELAKALAAYYFGSKEAMIRLDMSE

SEQ ID NO: 7344 - protein, 164 aa, Zea mays
  unsure (1)..(164): unsure at all Xaa locations
XEFPARXXTRPAEVAAGKVILXIDEMHMLLGAGACKGVSMDGANLLKPALARGRIRCVGATTFDEYRKHIERDAAFERLFQKVIVEEPTTQATIAILQGLKQRYEEHHGLKIQDAAIVAAAQLADRYITGRQFPDKAIDLIDEACSTVRLKIDSQKRPVTTLDQ

SEQ ID NO: 7345 - protein, 136 aa, Zea mays
  unsure (1)..(136): unsure at all Xaa locations
XACLQGKLDPVVGRQDQIERVTQILGRRTKNNPCLIGEPGVGKTAIAEGLAQRISNGDVPETIEGKKVITLDMGLLVAGTKYRGEFEERLKKLMEEIKQNEDIILFIDEVHTLIGAGAAEGAIDAANILKPALARX

SEQ ID NO: 7346 - protein, 330 aa, Zea mays
  unsure (1)..(330): unsure at all Xaa locations
MAAAPPLSADVLSFLTSAPAAPTPVVAAAWGAARAGPVRGKAALRTTRGGRGGVLAPLNSARVGRRPRRTPLSVRCNATSRDGRITQQEFTEMAWQAIVSSPEVAKESKHQIVETEHLMKSLLEQRNGLARRIFSKAGVDNTRLLDATEKFIQRQPKVLGEEPGSMLGRDLEALIQRARDFKKEYGDSYVSVEHLVLGFAEDKRFGKQLFKDFQITVKTLKSAIRHEGGKQNVIDQDPEGKYEALDKYGKDLTAMARQGKLDPVIGRDDEIRRCIQILSRRTKNNPVLIGEPGVGKTAIAEGLAQRIVQGDVPQALTNRRVIILPPGLFX

SEQ ID NO: 7347 - protein, 207 aa, Zea mays
  unsure (1)..(207): unsure at all Xaa locations
XQALINEVQSSPTPIVLFVDEIHTLVGAGGQQGTGDAANLLKPALARGQLRTIGATTWAEYKKYIEKDPALTRRFQTVQVQEPDEAKAILMLRSTVSALEKHHQVLLLDEAVSAAVKLSHRYIPARQLPDKAVAILDTACARVAVSQGAQPAALEDCLHRLAALEIEAEIIERESKVGLGDAARSQAVAAQRATLETERDALQACKX

SEQ ID NO: 7348 - protein, 184 aa, Zea mays
  unsure (1)..(184): unsure at all Xaa locations
LQXCIGAINGLRPRGLFFLIMCIGATTLDEYRKHIEKDPALERRFQPVKVPEPTMDETIQILRGLRERYELHHKLRYTDDALIAAAQLSYQYISDRFLPDKAIDLIDEAGSRVRLRHAQLPDEAKELDKELRQISKQKNEAVRGQDFEKVLESVANGLTMRISITLFMTIKLICSRFRSNARAS

SEQ ID NO: 7349 - protein, 165 aa, Zea mays
  unsure (1)..(165): unsure at all Xaa locations
CIGATTLDEYRKHIEKDPALERRFQPVKVPEPTMDETIQILRGLRERYELHHKLRYTDDALIAAAQLSYQYISDRFLPDKAIDLIDEAGSRVRLRHAQLPDEAKELDKELRQISKQKNEAVRGQDFEKVYCCLAQRXQSRSAPTSLATKKKKVDMVNTKHYVVSF

SEQ ID NO: 7350 - protein, 227 aa, Zea mays
  unsure (1)..(227): unsure at all Xaa locations
MNPDNFTHKTNEAIVGAHEIAVEAGHAQLTPLHLAAVLAADKGGILRQAITGASGGDGAAGDSFERVLNNSLKKLPSQSPPPDSVPASTALIKVIRRAQSAQKKRGDSHLAVDQLLLGLLEDSQISDCLKEAGVSAARVRAELEKLRGGEGRRVESASGDTNFQALKTYGXRDLVEQAGKLDPVIGRDEEIRRVVRXLSRRTKNNPVLIGEPGVGKXXVVEGLAQRX

SEQ ID NO: 7351 - protein, 151 aa, Zea mays
  unsure (1)..(151): unsure at all Xaa locations
XAGELRDREMELKAQITALIDKSKELSKAEEESGETGPMVNEEDIQHIVSSWTGIPVEKVSSDESDKLLKMEETLHKRVIGQDEAVVAISRSIRRARVGLKNPNRPIASFIFAGPTGVGKSELAKALAAYYFGSEEAMIRLDMSEFMERHT

SEQ ID NO: 7352 - protein, 131 aa, Zea mays
  unsure (1)..(131): unsure at all Xaa locations
XLLTCISTTTLEEDSXRTVRKDLTLERRYQHEFVGEPTVPDTVSILRGLTEKYEGHHGVRIQDRALVDTAHISGRYIMDRHLPDKAINLVDEACTNARVQLDSLSEEIDILERKRIQLEVELHALDKEKDX

SEQ ID NO: 7353 - protein, 152 aa, Zea mays
  unsure (1)..(152): unsure at all Xaa locations
XHNLISINMSECQEAHTVSTLKGAPPGYVGYGEXGVLTETVRRRPYSVVLLDQIEKAHPDVLELFLQVFDKGWMEDGQGLHIDFRNTIIILTSNVGTQLSSPMCADPEMMPDPEALSTALRQPLLEVFPPALLGRLLVVPYYPLSDAMLAGI

SEQ ID NO: 7354 - protein, 187 aa, Zea mays
  unsure (1)..(187): unsure at all Xaa locations
XWSSPRWRXALELVDPPGCRTRLRHAQVPEEARELEKELRQITKEKNEAVRGQDFEKAGTLRDREIELRAEVSAIQAKGKEMSKAESETGEEGPMVTESDIQHIVSSWTGIPVEKVSTDESDRLLKMEETLHKRIIGQDEAVKAISRAIRRARVGLKNPNRPIASFIFSGPTGVGKSELAKALAAYX

SEQ ID NO: 7355 - protein, 130 aa, Zea mays
  unsure (1)..(130): unsure at all Xaa locations
XFRSGIPGPTHASTHASAHASAHASAHAXXLDEYGTNVTKLAQEGKLHPVVGRQPHSERVVHILGRRTKNRPCLIGEPDVGKTAIAEGLAQRISTGDVPDTVQGKKVITLDMGLLVAGTKYPGEFEERLX

SEQ ID NO: 7356 - protein, 208 aa, Zea mays
  unsure (1)..(208): unsure at all Xaa locations
XPEICFLSLWLFLSLLXQCIASTTLDEHRLHFEKDKALARRFQPVLVNEPSQEDAVKILLGLREKYETYHKCKYTLEGINAAVYLSARYIPDRHLPDKAIDLIDEAGSRARMESFKRKKEEQCSILSKSPDEYWQEIRAVQSTHEVVMQCSNDKDDGVNIEVIGDNKIASPSMPPTSVDDRPILVGSEEIARVTSLWSGIPVQKLTAX

SEQ ID NO: 7357 - protein, 150 aa, Zea mays
EHKRRVMDAARSVFRPEFMNRVDEYIVFKPLEREQINSIVKLQLARVQKRIADRKIKLDVSPGAIEFLGSLGYDPNYGARPVKRVIQQYVENELAKGILRGDFKDEDSIFVDTQVTVPSNGQLPLRKLVFQKVGEQSKPAAEGEKFLPAV

SEQ ID NO: 7358 - protein, 120 aa, Zea mays
  unsure (1)..(120): unsure at all Xaa locations
XXFYSHIERMVRXLCGLFRFFPFLIGEPGXGKTVIAEGLAQRISTRDVPETIKGKKAITLNMGLFGAGTKYRGEFEERLKKLMAEIKQSDEKILFIDEAHTLIGAXTAEGAIKAPNISKX

SEQ ID NO: 7359 - protein, 154 aa, Zea mays
TLDEHRLHFEKDKALARRFQPVLVNEPSQEDAVKILLGLREKYETYHKCKYTLEGINAAVYLSARYIPDRHLPDKAIDLIDEAGSRARMESFKRKKEEQCSILSKSPDEYWQEIRAVQSTHEVVMQCSNDKDDGVNIEVIGDNKIASPSMPPTS

SEQ ID NO: 7360 - protein, 133 aa, Zea mays
PYSEALKRVQGELAKDGREPVGLSSFKVRERSAAGAGKSAIVKYSNKNALAQFCVDLTMRASGGLIDPVIGRKEEIERVVQIICRRTKNNPILLGEAGVGKTAIAEGLALKIANGDVPIFLVVRSILSIQGYR

SEQ ID NO: 7361 - protein, 99 aa, Zea mays
MAESQWGYLLSKYVRGLPRELAKKSALAQFCVDLTMRASGGLIDPVIGRKEEIERVVQIICRRTKNNPILLGEAGVGKTAIAEGLALKIANGDVPIFLV

SEQ ID NO: 7362 - protein, 173 aa, Zea mays
IRLEVMQEVRRHFRPELLNRLDEIVIFDPLSHEQLRKVARLQMKDVAVRLAERGIALAVTDAALDIILSLSYDPVYGARPIRRWIEKRVVTQLSKMLIQEEIDENCTVYIDAAPGKDELVYRVDRSGGLVNAETGMKSDILIQVPNSSTRSDAAQAVKKMRIMEEDEDGMDEE

SEQ ID NO: 7363 - protein, 176 aa, Zea mays
MKVARDLVMQEVRRHFRPELLNRLDEIVIFDPLSHEQLRKVARLQMKDVAVRLAERGIALAVTDAALDIILSLSYDPVYGARPIRRWIEKRVVTQLSKMLIQEEIDENCTVYIDAAPGKDELVYRVDRSGGLVNAETGMKSDILIQVPPSSTRSDAAQAVKKIRIMEEDEAGMDEE

SEQ ID NO: 7364 - protein, 90 aa, Zea mays
  unsure (1)..(90): unsure at all Xaa locations
XRFQRSLEPLGEQGKLDPVVGRQDQIERVTQILGRRTKNNPCLIGEPGVGKTAIAEGLAQRIANWDVPETIEGKKSILYDLFIVWYGLAR

SEQ ID NO: 7365 - protein, 158 aa, Zea mays
KKNVEMMLSLSSSEGKLDPVVGRQDQIERVTQILGRRTKNNPCLIGEPGVGKTAIAEGLAQRIANWDVPETIEGKKSVLWDLFVGSMDEDDDSPASGSGRHKKKLRLIMGLHDGSAKVQTGTSLNTLGSLGYEIDHGWRQRIAVCHSKLGDQPKRSHG

SEQ ID NO: 7366 - protein, 166 aa, Zea mays
PSHLATTKIRSFLLHFEKDKALARRFQPVLVNEPSQEDAVKILLGLREKYETYHKCKYTLEGINAAVYLSARYIPDRYLPDKAIDLIDEAGSRAQMESFKRKKEEQCSILSMSPHVYWQEIRVVQSTHEVVMQFVHGRTVATCKCFIYWWMFIFHCTSHFRRWLTD

SEQ ID NO: 7367 - protein, 101 aa, Zea mays
  unsure (1)..(101): unsure at all Xaa locations
CYHYLLLQKISAFGKLDPVVGRQDQIERVTQILGRRTKNNPCLIGEPGVGKTAIAEGLAQRIANWDVPETIEGKKSIVVQLWFMEDAHHWRXKKKKKKKKX

SEQ ID NO: 7368 - protein, 177 aa, Zea mays
  unsure (1)..(177): unsure at all Xaa locations
MKVARDLVMQEVRRHFRPXELLNRLDEIVIFDPLSHEQLRKVARLQMKDVAVRLAERGIALAVTDAALDIILSLSYDPVYGARPIRRWIEKRVVTQLSKMLIQEEIDENCTVYIDAAPGKHELVYRVDRSGGLVNAETGMKSDILIQVPTSSTRSDAAQAVKKMRIMEEDKFGMDKE

SEQ ID NO: 7369 - protein, 96 aa, Zea mays
  unsure (1)..(96): unsure at all Xaa locations
XREGGXLTEQVRRPYNVILFDEVERAHVAMFNTLLXVLNNDRLMDGQGRTMDFRNTVIIMTTNLGAWHLLAGMVGNNSMKVARDLVMQEXIRRIFX

SEQ ID NO: 7370 - protein, 108 aa, Zea mays
  unsure (1)..(108): unsure at all Xaa locations
XSSEFGSRRIATVELGKLYPVVGGTSXTDRVDQVSGGQPRTNPGWIEEPVVGKPAIAEGLCXGIFTGECPETIEGKKVLPLDMGLLVAGTKYRGEFQKRIKNLVGEKX

SEQ ID NO: 7371 - protein, 79 aa, Zea mays
  unsure (1)..(79): unsure at all Xaa locations
LIALDMGALIAGAKYRGEFEDRLKAVLKEVTDSDGQTVLFIDEIHTVVGAGNYAGYLDTNSLRSPLRKQGDITKNRVGX

SEQ ID NO: 7372 - protein, 119 aa, Zea mays
  unsure (1)..(119): unsure at all Xaa locations
XSSEGGLLTDADGQPXYTLVVLGEIEKAXHPDVFNMMLDSLGDGRLTDRKVRTVDFINTLLIMTSNVRSSVIENGARXIGFHHCSDENDSEFSRIMSLHMDEMKHCLRPEVLNRLDEMX

SEQ ID NO: 7373 - protein, 114 aa, Zea mays
  unsure (1)..(114): unsure at all Xaa locations
XRPRRPEQVRRXRSVIHFDEVEKAHVAMFNTLLXVLNDGRLMDGQDRTVDFRNTMVIMTSNLGAXHLLAGMVGKNSMKVARDLVMXEVVNDLNPSCHHRKERYFVFAFPAKGQL

SEQ ID NO: 7374 - protein, 125 aa, Zea mays
  unsure (1)..(125): unsure at all Xaa locations
XKKKKKNKPSEFIISLQFIYNEILCGVQGRRVSFKNTLIVMTSNVGSTSISKGRXXSIGFLKEDTESGSYFAMKSLVMEELKAFFRPELLNRIDEMVVFRPLEKTQMLAILDIILKEVKGRLLAL

SEQ ID NO: 7375 - protein, 73 aa, Zea mays
DNQKMFNTKLIALDMGALIAGAKYRGEFEDRPKAVLKEVTDSDGQTILFIDEIHKVVGAGNYEGCSDGGSLVN

SEQ ID NO: 7376 - protein, 199 aa, Zea mays
  unsure (1)..(199): unsure at all Xaa locations
VLTIMLQLFDEGRLTDGKGKTIDCKDAIFIMTSNVASDEIAQHALQLRQEALEMSRNRIAENLGDVQISDKITISKNFKENVIRPILKAHFRRDEFLGRINEIVYFLPFCHSELIQLVNKELNFWAKRAKQRHNITLLWDREVADVLVDGYNVHYGARSIKHEVERRVVNQLAAAYEQDLLPGGCTLRITVEDSDKQLX

SEQ ID NO: 7377 - protein, 95 aa, Zea mays
  unsure (1)..(95): unsure at all Xaa locations
XNRAAPVPSKLPSADKATPVLPKSSLSVNKAALVRPKSPAVDKATPLERRFQQVYVDQPSVEDTISILRGLRERYELHHGVRISDSALVAAGVPS

SEQ ID NO: 7378 - protein, 335 aa, Zea mays
  unsure (1)..(335): unsure at all Xaa locations
PEGTPTSELRKSPLGSPVKTDLALGPMDPGATVENDQKENYTEGLTSXXQKAKIAGISDIESFKRLLKVLTQKVSWQSDAASAIAAVVIQCRTGSGKRRNIGTRGDIWLLFVGPDQAGKRKMVNALSELMVNAQPVVVNFGGDSRLSKDGNGLNPGFWGKTSLDRVTEAVRQNPCSVIILEGIDQVDAVVRGKIKRAMETGRLVDSRGREVSLGNVIFVLTTNWLPXRNSGDQSSLLQDEGRMLEVASSNWQLELSIEDKQVKHRADWLCDDARPAKVAKELSGGQGLSLDLNLAVGALDDTDGSRNSSXVPMCNERIPQRAPLSMSAXAAPGSX

SEQ ID NO: 7379 - protein, 64 aa, Zea mays
  unsure (1)..(64): unsure at all Xaa locations
XPEGKYEALDKYGKDLTAMARQGKLDPVIGRDDEIRRXXKTAIAEGLAQRIVQGDVPQALTNRR

SEQ ID NO: 7380 - protein, 104 aa, Zea mays
  unsure (1)..(104): unsure at all Xaa locations
XTGVPKXELTEAQSAYYLHXYEAIMSLLMSQFMERPARLQPIGSPPVYNPRTQVRLLTAAIHTTPYTCSMLDNMEKTHTDHSSTTLNTLEXGRXTDSMGLTRDX

SEQ ID NO: 7381 - protein, 104 aa, Zea mays
  unsure (1)..(104): unsure at all Xaa locations
XSVIPLIVEKAHVAMFNTLLXVLNDGRLMDGQDRTVDFRNTXMVIMTSNLGAXHLLAGMVGKNSMKVARDLVMQEERGHCKRAVSFHCHEDSLNIAGYVNTGGY

SEQ ID NO: 7382 - protein, 792 aa, Novosphingobium aromaticivorans
MPSFAQSLEKTLHTALANASERSHEYATLEHLLLALIDDPDAAQVMQACGVDLGDLGDVVRQYLDQEYQSLKTQEKADPQPTAGFQRVIQRAILHVQSSGKDTVTGANVLVALFSERDSYAVYFLQQQDMSRLDAVSFISHGIGKGGRQVDGRTPKGAEEDVPKQQEEKADAKGQKKETALDQFCVNLNEKALAGKVDPLIGRGPEVDRTIQILCRRSKNNPLYVGDPGVGKTAIAEGLARKIVEGEVPEVLSEAVIYSLDMGSLLAGTRYRGDFEERLKQVVSELEKMPHAILFIDEIHTVIGAGATSGGAMDASNLLKPALSGGTIRCIGSTTYKEFRNHFEKDRALLRRFQKIDVNEPTVEDTIKILKGLRTAFEEHHKVKYTPDAIKTAVELSARYINDRKLPDKAIDVIDEVGAMQMLVPPSKRKKTITAREIEQVIATMARIPPKSVSSDDKKVLEHLERDLKRLVFGQDKAIEVLSSAMKLSRAGLRDPDKPIGSFLFSGPTGVGKTEVARSLAQIMGIPLQRFDMSEYMERHSVSRLIGAPPGYVGFDQGGLLTDAIDQQPHCVLLLDEIEKAHPDLFNILLQVMDNGRLTDHHGKTVDFRNVVLIMTTNAGASDMARQGIGFGDVSKADAGDEAVKKMFTPEFRNRLDAIVPFAYLPPEVVSRVVDKFVLQLELQLADQNVHIQFDADARAWLAKKGYDRLYGARPMARVIQEKVKKPLAEELLFGKLANGGEVHVSLKQEEGQEGALSFELTPAAPKLVNKKKGKKSKAGDTTAEEPNADEA

SEQ ID NO: 7383 - protein, 236 aa, Desulfitobacterium hafniense
EIHTIIGAGAASGGQVDAANLIKPLLSSGKIRVIGSTTYQEFSNIFEKDRALARRFQKIDITEPSVEETVQIINGLKPKYEAHHDVRYTAKAVRAAVELAVKYINDRHLPDKAIDVIDEAGARARLMPVSKRKKTVNVADIESVVARIARIPEKSVSRSDRDTLKNLGDRLKMLVFGQDKAIEALTEAIKMARAGLGHEHKPVGSFLFAGPTGVGKTEVTVQLAKSLGIELLRFDM

SEQ ID NO: 7384 - protein, 240 aa, Desulfitobacterium hafniense
KALYETFRREFINRLDRVVLFNPLDRALMREILHKELGRVLTRRGLRNRDWAVEWEPSAIEFLLDRGFTPDLGARPLRRAIEHYLLAPLARSIVEHRAPQGDQFLFVRSAGDKLEVEFIDPAPAPPVLVPAGDAAPAQGEDDLRDLVYAPSADAGAIARLDARLAALEDTVLGAQWRGEREADYARMAAAGFWESPERHAALDRIERRDRIESALDTAVRLQQRLSRDGGNASFAQSLAQ

SEQ ID NO: 7385 - protein, 758 aa, Escherichia coli
MLNQELELSLNMAFARAREHRHEFMTVEHLLLALLSNPSAREALEACSVDLVALRQELEAFIEQTTPVLPASEEERDTQPTLSFQRVLQRAVFHVQSSGRNEVTGANVLVAIFSEQESQAAYLLRKHEVSRLDVVNFISHGTRKDEPTQSSDPGSQPNSEEQAGGEERLENFTTNLNQLARVGGIDPLIGREKELERAIQVLCRRRKNNPLLVGESGVGKTAIAEGLAWRIVQGDVPEVMADCTIYSLDIGSLLAGTKYRGDFEKRFKALLKQLEQDTNSILFIDEIHTIIGAGAASGGQVDAANLIKPLLSSGKIRVIGSTTYQEFSNIFEKDRALARRFQKIDITEPSIEETVQIINGLKPKYEAHHDVRYTAKAVRAAVELAVKYINDRHLPDKAIDVIDEAGARARLMPVSKRKKTVNVADIESVVARIARIPEKSVSQSDRDTLKNLGDRLKMLVFGQDKAIEALTEAIKMARAGLGHEHKPVGSFLFAGPTGVGKTEVTVQLSKALGIELLRFDMSEYMERHTVSRLIGAPPGYVGFDQGGLLTDAVIKHPHAVLLLDEIEKAHPDVFNILLQVMDNGTLTDNNGRKADFRNVVLVMTTNAGVRETERKSIGLIHQDNSTDAMEEIKKIFTPEFRNRLDNIIWFDHLSTDVIHQVVDKFIVELQVQLDQKGVSLEVSQEARNWLAEKGYDRAMGARPMARVIQDNLKKPLANELLFGSLVDGGQVTVALDKEKNELTYGFQSAQKHKAEAAH

SEQ ID NO: 7386 - protein, 758 aa, Escherichia coli
MLNQELELSLNMAFARAREHRHEFMTVEHLLLALLSNPSAREALEACSVDLVALRQELEAFIEQTTPVLPASEEERDTQPTLSFQRVLQRAVFHVQSSGRNEVTGANVLVAIFSEQESQAAYLLRKHEVSRLDVVNFISHGTRKDEPTQSSDPGSQPNSEEQAGGEERMENFTTNLNQLARVGGIDPLIGREKELERAIQVLCRRRKNNPLLVGESGVGKTAIAEGLAWRIVQGDVPEVMADCTIYSLDIGSLLAGTKYRGDFEKRFKALLKQLEQDTNSILFIDEIHTIIGAGAASGGQVDAANLIKPLLSSGKIRVIGSTTYQEFSNIFEKDRALARRFQKIDITEPSIEETVQIINGLKPKYEGHHDVRYTAKAVRAAVELAVKYINDRHLPDKAIDVIDEAGARARVMPVSKRKKTVNVADIESVVARIARIPEKSVSQSDRDTLKNLGDRLKMLVFGQDKAIEALTEAIKMARAGLGHEHKPVGSFLFAGPTGVGKTEVTVQLSKALGIELLRFDMSEYMERHTVSRVIGAPPGYVGFDQGGLLTDAVIKHPHAVLLLDEIEKAHPDVFNILLQVMDNGTLTDNNGRKADFRNVVLVMTTNAGVRETERKSIGLIHQDNSTDAMEEIKKIFTPEFRNRLDNIIWFDHLSTDVIHQVVDKFIVELQVQLDQKGVSLEVSQEARNWLAEKGYDRAMGARPMARVIQDNLKKPLANELLFGSLVDGGQVTVALDKEKNELTYGFQSAQKHKAEAAH

SEQ ID NO: 7387 - protein, 148 aa, Escherichia coli
  unsure (1)..(148): unsure at all Xaa locations
XRLDRLTNKFQLALADAQSLALGHDNQFIEPLHLXSALLNQEGGSVSPLLTSAGINAGQLRTDINQALNRLPQVEGTGGDVQPSQDLVRVLNLCDKLAQKRGDNFISSELFVLAALESRGTLADILKAAGATTANITQAIEQXRGGES

SEQ ID NO: 7388 - protein, 105 aa, Escherichia coli
FINRIDEVVVFHPLGEQHIASIAQIQLKRLYKRLEERGYEIHISDEALKLLSENGYDPVYGARPLKRAIQQQIENPLAQQILSGELVPGKVIRLEVNEDRIVAVQ

SEQ ID NO: 7389 - protein, 756 aa, Vibrio cholerae
MLNKELESSLNGAFARARDKRHEFMTVEHLLLALLENDAAREALLACQADIDVLRRELDTFIDQTTPLIPKNDETRETQPTLSFQRVLQRAVFHVQSSGRSEVTGANVLVAIFSEQESHAAYLLKKNDISRLDIVNFISHGITKASNHSEDSSSDSFGSSDTSEEVSADERLESFATNLNQLAKQGQIDPLIGRDKELERTIQVLCRRRKNNPLLVGEAGVGKTAIAEGLAWRIVEGNVPEVIQRSVIYSLDIGSLLAGTKYRGDFEKRFKSILKQLEKEKDAILFIDEIHTIIGAGAASGGQVDAANLIKPLLSSGKLRCIGSTTYQEYSNIFEKERALSRRFQKIDIVEPSLDDTTKILMGLKTKYEAHHDVRYTNKALRAAVELSAKYINERHLPDKAIDVIDEAGARARLMPASRRKKTVGVAEIESMVAKMARIPEKSVSSSDKDILKNLDQKMKMLVFGQDAAIDVLTEAIKLTRAGLGAEHKPVGSFLFAGPTGVGKTEVTLQLSKLLGIELLRFDMSEYGERHSVSRLIGAPPGYVGYDQGGLLTDAVIKHPHSVVLLDEIEKAHPDIFNLLLQVMDNGTLTDNNGRKADFRNVILVMTTNAGVAETVKKSIGLIQQDNSHDAMSEIKKVFTPEFRNRLDHIIWFNSLDERVIHQVVDKFIVELQAQLDARGVSLEVSEDARHWLAVKGYDREMGARPMGRVIQEQLKKPLANELLFGSLVDGGTVKVTLSDDRLAFEYFGTREEVVH

SEQ ID NO: 7390 - protein, 741 aa, Helicobacter pylori 26695
MAKFNQDLNEVLNQALNLALDLNHALCTTEHVLLVILEHESGEKIIGTLERDDYDKLKQILKDYLLQYVPLKSDPAKMPARSFVLLRMLKRMYASCFESVGVEELLILMLDHPDCYASKLMDSFGIARLYSNPALLDLDNHGIPNDINDNEEAPKNTPLKKYAKNLSALAQDNALDPVIGREEEILRVIEILGRRKKNNPLLIGEAGVGKTSIAEALALKIAQKEVPEFLQEYEVYSLDLALMVAGAKYRGDFEKRLKKTLKEIQQNGRIILFIDEIHTLLGTGSSNAGSLDAANILKPVLTDGSLKCLGATTFEEYRSVFEKDKAFNRRFSVIKVEEPSKEACYLILKKIAPLYEEHHQVRYDESVFKACVDLTSDYMHDKFLPDKAIELLDEVGSRKKISPKKGKKIGVDDVKETLALKLKIPKMRLSSDKKALLRNLEKSLKNKIFAQAEAISLVSNAIKIQHCGLSAKNKPVGSFLFVGPSGVGKTELAKELALNLNLHFERFDMSEYKEAHSVAKLIGSPSGYVGFEQGGLLVNAIKKHPHCLLLLDEIEKAHSNVYDLLLQVMDNATLSDNLGNQASFKHVILIMTSNVGSKDKDTLGFFSAKNTKYDKAVKELLTPELRSRIDAIVPFNALSLEDFERIVSVELDKLKALALEQDITLKFHKEVVKFIAQKSYQTTLGAREIKKIIHNEIKTKLSDILLLQSFKKPCKIACLLEKNQLVLKEIKRAQKVKENDF

SEQ ID NO: 7391 - protein, 742 aa, Helicobacter pylori J99
MDKFNKDLNEVLSHALDLALDFNHVLCTTEHVLLAILEHGIGIRIFNTLEEDGYHKMEQILKDYLQQYIPLKNDPTKIPDRSPVLARVFKKMYASYLDSVGVEELLIFILEYDDCYASKLLDSFGITRSYFKSALLDFDNPNDINDNDINNEEAPKSTPLKKYTKNLSALAQNNALDPVIGREEEILRVIEILGRRKKNNPLLIGEAGVGKTSIAEALALKIAQKEVPEFLQEYEVYSLDLALMVAGAKYRGDFEKRLKKTLKEIQQNGRIILFIDEIHTLLGAGSSNAGSLDAANILKPVLTDGSLKCLGATTFEEYRSVFEKDKAFNRRFSIVNVEEPSKEACYLILKNIAPLYEEHHQVRYNESVFKACVDLTSYYMHDKFLPDKAIELLDEVGSRKKINPKKGKKISVDDVQETLALKLKIPKMRLNSDKKALLRNLEKSLKNKIFAQTEAINLVSNAIKIQHCGLSAKNKPVGSFLFVGPSGVGKTELAKELALNLNLHFERFDMSEYKEAHSVAKLIGSPSGYVGFEQGGLLVNAIKKHPHCLLLLDEIEKAHPNVYDLLLQVMDNATLSDNLGNKASFKHVILIMTSNVGSKDKDTLGFFSTKNAKYDRAVKELLTPELRSRIDAIVPFNALSLEDFERIVSVELDKLKALALEQGVILKFHKEVVKCIAQKSYQTTLGAREIKKIIHNEIKTQLSDILLLQSFKKPCKIACLLEKNQLVLKEIKRAQKVKENDF

SEQ ID NO: 7392 - protein, 758 aa, Salmonella enterica subsp. enterica serovar Typhi
MLNQELELSLNMAFARAREHRHEFMTVEHLLLALLSNPSAREALEACSVDLVALRQELEAFIEQTTPVLPASEEERDTQPTLSFQRVLQRAVFHVQSSGRSEVTGANVLVAIFSEQESQAAYLLRKHEVSRLDIVNFISHGTRKDEPSQSSDLGNQPAGDEQAGGEERMENFTTNLNQLARVGGIDPLIGREKELERAIQVLCRRRKNNPLLVGESGVGKTAIAEGLAWRIVQGDVPEVMADCTIYSLDIGSLLAGTKYRGDFEKRFKALLKQLEQDTNSILFIDEIHTIIGAGAASGGQVDAANLIKPLLSSGKIRVIGSTTYQEFSNIFEKDRALARRFQKIDITEPSVEETVQIINGLKPKYEAHHDVRYTAKAVRAAVELAVKYINDRHLPDKAIDVIDEVGARARLMPVSKRKKTVNVADIESVVARIARIPEKSVSQSDRDTLKNLGDRLKMLVFGQDNAIEALTEAIKMSRAGLGHEHKPVGSFLFAGPTGVGKTEVTVQLSKALGIELLRFDMSEYMERHTVSRLIGAPPGYVGFDQGGLLTDAVIKHPHAVLLLDEIEKAHPDVFNLLLQVMDNGTLTDNNGRKADFRNVVLVMTTNAGVRETERKSIGLIHQDNSTDAMGEIKKVFTPEFRNRLDNIIWFDHLSGEVIHQVVDKFIVELQAQLDQKGVSLEVSQEARDWLAEKGYDRAMGARPMARVIQDNLKKPLANELLFGSLVDGGQVTVALDKEKNALTYDFQSAQKHKPEAAH

SEQ ID NO: 7393 - protein, 756 aa, Nitrosomonas europaea
MIAQELEVSLHMAFVESRQKRHEFITVEHLLLALLDNPSAAKVLVACTVDIEDLRKSLQDHIARHTPVVEGSEDVDTQPTLGFQRVIQRAILHVQSSGKKEVTGANVLVAIFGEKDSHAVYFLQQRGVTRLDVVNYISHKIGKAAQSSESEKNEENADGEQQDSGSTLENYTVNLNSQAIANRIDPLIGREKEVERVIQTLCRRRKNNPLLVGEAGVGKTAIAEGLARRITENRVPDVLANHQVYALDMGALLAGTKYRGDFEQRLKVVLKQLTDNPKAILFIDEIHTLIGAGAASGGTLDASNLLKPALSSGRLKCIGATTYNEYRGVFEKDHALSRRFQKIDVSEPDIGETVEILRGLKSRYEKHHNVKYTEVALTAAAELSARFINDRHLPDKAIDVIDEAGAAQRILPKSRQRKIIGRQEIEQVIAGIARIPPQNVSSDDRNKLKTLDRDLKAIVFGQDAAIDALTSAIKMARSGLGNTCKPIGSFLFSGPTGVGKTEVARQLAYTLGIPLHRFDMSEYMERHAVSRLIGAPPGYVGFDQGGLLTETIIKQPHAVLLFDEIEKAHPDIFNVMLQIMDYGTLTDNSGRKADFRNVIIVMTTNAGADVLTRTSIGFTEHTKSGDEMVEIKRLFTPEFRNRLDAIISFTSLTEDIILRVVDKFLIELETQLQEKKVDVTFTDNLRKYLARHGFDPLMGARPMARLIQDIIRRALADELLFGHLANGGKVTVDIDEDGKARLTFEDKENIASPAIS

SEQ ID NO: 7394 - protein, 272 aa, Pisum sativum
FVRQLNTYGFRKVDPDRWEFANEGFLAGQRILLRTIKRRRNVAQSPSMQRESGGACIELGEFGLEGEIERLRRDRSVLVAEIVKLRQQQNNSRDQISAMEARLLITEKKHQQMMAFLARALSNQSFIQQLANNKELKGVEMKRKRRLPASSSLENLQNDSVTMMTVPIESVVDYSSREQQEGLTAIESEIETLLSAYDNESRSEIKDPSANESNLSDWEELLNQKLVGGNPEDEVLIGDFSQIDAPVEDLVEKNDDWTVDLQNLVDEMDFEP

SEQ ID NO: 7395 - protein, 539 aa, Schizosaccharomyces pombe
MPSSNGSSDFVRKLFNMLEEPEYRHILRWSDSGDSFIVLDTNEFTKTILPRHFKHSNFASFVRQLNKYDFHKVRHEEGAPSIYGEGAWEFRHDDFQLHHKDLLDNIKRKAPSKRNLANENTAPVIENLKQQVDSILDFQKLLDRNLSGLATSYQTILLKMFELKRGIESRDLLMSSIISYLCDLEGSTQRQANPGAMFVPSHPLQELLNAYQALAKGQVATTSPQQIPNQIQQASAATTASSKMTVDTNLGTAQPSLYNTPSSDYELANQEKPADSMASAASLNTPLSSNDHSLNPHAHGSYPMYEKFQPIQHPNPGSFTTHLDSNASMAKSFSQISNDSLAKASSVATSMSQMGAAVPTTGLWKRQPRILLVEDDELSRRMTIKFLTSFDCQVDVAVDGIGAVNKANAGGFDLILMDFILPNLDGLSVTCLIRQYDHNTPILAITSNISMNDAVTYFNHGVTDLLVKPFTKLTLLQLLKKQLLNLLQADNSINMSDVPSTKEAKDDKAPVTFYLENDAPMYPQQMLQDPIQADLQHPH

SEQ ID NO: 7396 - protein, 833 aa, Saccharomyces cerevisiae; identical to SEQ ID NO: 423

SEQ ID NO: 7397 - protein, 833 aa, Saccharomyces cerevisiae
MNNAANTGTTNESNVSDAPRIEPLPSLNDDDIEKILQPNDIFTTDRTDASTTSSTAIEDIINPSLDPQSAASPVPSSSFFHDSRKPSTSTHLVRRGTPLGIYQTNLYGHNSRENTNPNSTLLSSKLLAHPPVPYGQNPDLLQHAVYRAQPSSGTTNAQPRQTTRRYQSHKSRPAFVNKLWSMLNDDSNTKLIQWAEDGKSFIVTNREEFVHQILPKYFKHSNFASFVRQLNMYGWHKVQDVKSGSIQSSSDDKWQFENENFIRGREDLLEKIIRQKGSSNNHNSPSGNGNPANGSNIPLDNAAGSNNSNNNISSSNSFFNNGHLLQGKTLRLMNEANLGDKNDVTAILGELEQIKYNQIAISKDLLRINKDNELLWQENMMARERHRTQQQALEKMFRFLTSIVPHLDPKMIMDGLGDPKVNNEKLNSANNIGLNRDNTGTIDELKSNDSFINDDRNSFTNATTNARNNMSPNNDDNSIDTASTNTTNRKKNIDENIKNNNDIINDIIFNTNLANNLSNYNSNNNAGSPIRPYKQRYLLKNRANSSTSSENPSLTPFDIESNNDRKISEIPFDDEEEEETDFRPFTSRDPNNQTSENTFDPNRFTMLSDDDLKKDSHTNDNKHNESDLFWDNVHRNIDEQDARLQNLENMVHILSPGYPNKSFNNKTSSTNTNSNMESAVNVNSPGFNLQDYLTGESNSPNSVHSVPSNGSGSTPLPMPNDNDTEHASTSVNQGENGSGLTPFLTVDDHTLNDNNTSEGSTRVSPDIKFSATENTKVSDNLPSFNDHSYSTQADTAPENAKKRFVEEIPEPAIVEIQDPTEYNDHRLPKRAKK

SEQ ID NO: 7398 - protein, 622 aa, Saccharomyces cerevisiae
MSFSTINSNVNKTTGDSNNNTTENSSTADLLGMDLLQSGPRLMNTMQPNNSSDMLHINNKTNNVQQPAGNTNISSANAGAKAPANEFVRKLFRILENNEYPDIVTWTENGKSFVVLDTGKFTTHILPNHFKHSNFASFVRQLNKYDFHKVKRSPEERQRCKYGEQSWEFQHPEFRVHYGKGLDNIKRKIPAQRKVLLDESQKALLHFNSEGTNPNNPSGSLLNESTTELLLSNTVSKDAFGNLRRRVDKLQKELDMSKMESYATKVELQKLNSKYNTVIESLITFKTINENLLNNFNTLCSTLANNGIEVPIFGDNGNRNPTGNTNPATTTAIQSNNNTNNASPATSTVSLQLPNLPDQNSLTPNAQNNTVTLRKGFHVLLVEDDAVSIQLCSKFLRKYGCTVQVVSDGLSAISTLEKYRYDLVLMDIVMPNLDGATATSIVRSFDNETPIIAMTGNIMNQDLITYLQHGMNDILAKPFTRDDLHSILIRYLKDRIPLCEQQLPPRNSSPQTHSNTNTANSNPNTINEQSLAMLPQDNPSTTTPVTPGASISSAQHVQQGQQEQQHQIFHAQQQQQHHNAIANARSDVAIPNLEHEINTVPHSSMGSTPQLPQSTLQENQLS

SEQ ID NO: 7399 - protein, 237 aa, Neurospora crassa
MATATESAPRNHLADKPENSMGGRNLSIITPTIQMSAPPGDPMDITSSNSNSSSNSNSSSINNNNATMAAPSNSDSLPPPKSPVEDTLNAQAAPNGRPQLSSANDQLSPDNIIMPAPAAAAPAVHQPKIVQTAFIHKLYNMLEDKSIQHLISWSPTSESFVMQPSQEFSKASSQYFKHTNISSFVRQLNMYGFHKGKESPDVAGYQQSLTWSKSERCLPPWSSRRYHLGVQAWQRQL

SEQ ID NO: 7400 - protein, 636 aa, Podospora anserina
MLEDPSYNSVVRWSPEGDSFVVLEKFTKTILPKHFKHSNFASFVRQLNKYDFHKVRHNEESGEAPYGRDAWEFKHPEFRADRKDQLDNIRRKAPAPRKPPPTEDAFPASQQIVVLSESLNATNVQIQTLQEQYLELDRTNRLLVAEVLSLQKMLRAQSQASNELISHLNNMEDRRRNSRHSAQSSHSSHSGTNYHQGTLGLLPDGTDEPAPELRRAREILNGVSPDSQADRELERLSMAYHQNGSPAESAGSSVMFTHAGPQTSMNVVHDPFSDPRHLVYPVGQTQGIDPFHADHIHNIPYSRPLSNPNVMTEAPSQISPPPGKEQNGSLWRGKKPQILLVEDDKTCARIGSKFLTNMDCSVETARDGLEAVEKINTDADRFDLVFMDIIMPNLDGVSATAMIRMVTPQIPIIAMTSNIRQEDIQTYFQFAKPFTRDGMVRILKKHLTRMLKDPQSAGVLNDPNDPTSAGNGGGGQQTAGGPGPPTGGYANANMAASMQAAINQAAQVQVKYEQTPIPSPSTTASWHSPGTTMQQVQHQQVQQQQQHASPRLDQGGYMNAVGSGQGVGGMVLTPGGSQRGPGPGQQQQQQYAGYMQAGPGPVTRLPEMGGMGGGAGDDRPEKRQRLYGPGQGGYVG

SEQ ID NO: 7401 - protein, 295 aa, Encephalitozoon cuniculi
MMSMRLATGSEFVVKLFQILEEPENYPYISWMPDGRSFVISDQQGFSEFVLEKHFRHKNWSSFVRQLNKYDFYKVRRDGERTGCIEAMWEYRNKHFQRGKHELLSKIRRKKAPSEGCGAGGTNPKQIESGIVYQSHVLDTVRSISKYLQTVVEDINEIKKYIYHERMRIALKTSVLFVREGVPGSEWVYGALKIPNYSLTVVEESADVGSIMRWRYDVVVLYANSPRCITAVSRIRDEDEEVPIVLVVDEGFKSEYANILGIRATEALLMPFDPSELVDAINRHGSQRSPEGVHG

SEQ ID NO: 7402 - protein, 358 aa, Saccharomyces cerevisiae [sequence omitted]

SEQ ID NO: 7403 - protein, 340 aa, Mus musculus [sequence omitted]

SEQ ID NO: 7404 - protein, 340 aa, Mus musculus
MGEMEQLRQEAEQLKKQIADARKACADITLAELVSGLEVVGRVQMRTRRTLRGHLAKIYAMHWATDSKLLVSASQDGKLIVWDTYTTNKVHAIPLRSSWVMTCAYAPSGNFVACGGLDNMCSIYNLKSREGNVKVSRELSAHTGYLSCCRFLDDNNIVTSSGDTTCALWDIETGQQKTVFVGHTGDCMSLAVSPDYKLFISGACDASAKLWDVREGTCRQTFTGHESDINAICFFPNGEAICTGSDDASCRLFDLRADQELTAYSQESIICGITSVAFSLSGRLLFAGYDDFNCNVWDSLKCERVGILSGHDNRVSCLGVTADGMAVATGSWDSFLKIWN

SEQ ID NO: 7405 - protein, 296 aa, Mus musculus
MRTRRTLRGHLAKIYAMHWATDSKLLVSASQDGKLIVWDTYTTNKVHAIPLRSSWVMTCAYAPSGNFVACGGLDNMCSIYNLKSREGNVKVSRELSAHTGYLSCCRFLDDNNIVTSSGDTTCALWDIETGQQKTVFVGHTGDCMSLAVSPDYKLFISGACDASAKLWDVREGTCRQTFTGHESDINAICFFPNGEAICTGSDDASCRLFDLRADQELTAYSQESIICGITSVAFSLSGRLLFAGYDDFNCNVWDSLKCERVGILSGHDNRVSCLGVTADGMAVATGSWDSFLKIWN

SEQ ID NO: 7406 - protein, 340 aa, Mus musculus
MSELEQLRQEAEQLRNQIRDARKACGDSTLTQITAGLDPVGRIQMRTRRTLRGHLAKIYAMHWGTDSRLLVSASQDGKLIIWDSYTTNKVHAIPLRSSWVMTCAYAPSGNFVACGGLDNICSIYSLKTREGNVRVSRELPGHTGYLSCCRFLDDNQIITSSGDTTCALWDIETGQQTVGFAGHSGDVMSLSLAPDGRTFVSGACDASIKLWDVRDSMCRQTFIGHESDINAVAFFPNGYAFTTGSDDATCRLFDLRADQELLMYSHDNIICGITSVAFSRSGRLLLAGYDDFNCNIWDAMKGDRAGVLAGHDNRVSCLGVTDDGMAVATGSWDSFLKIWN

SEQ ID NO: 7407 - protein, 340 aa, Mus musculus
MSELEQLRQEAEQLRNQIRDARKACGDSTLTQITAGLDPVGRIQMRTRRTLRGHLAKIYAMHWGTDSRLLVSASQDGKLIIWDSYTTNKVHAIPLRSSWVMTCAYGPSGNFVACGGLDNICSIYSLKTREGNVRVSRELPGHTGYLSCCRFLDDNQIITSSGDTTCALWDIETGQQTVGFAGHSGDVMSLSLAPDGRTFVSGACDASIKLWDVRDSMCRQTFIGHESDINAVAFFPNGYAFTTGSDDSTCRLFDLRADQELLMYSHDNIICGITSVAFSRSGRLLLAGYDDFNCNIWDAMKGDRAGVLAGHDNRVSCLGVTDDGMAVATGSWDSFLKIWN

SEQ ID NO: 7408 - protein, 340 aa, Mus musculus
MSELEQLRQEAEQLRNQIQDARKACNDATLVQITSNMDSVGRIQMRTRRTLRGHLAKIYAMHWGYDSRLLVSASQDGKLIIWDSYTTNKMHAIPLRSSWVMTCAYAPSGNYVACGGLDNICSIYNLKTREGNVRVSRELPGHTGYLSCCRFLDDGQIITSSGDTTCALWDIETGQQTTTFTGHSGDVMSLSLSPDLKTFVSGACDASSKLWDIRDGMCRQSFTGHISDINAVSFFPSGYAFATGSDDATCRLFDLRADQELLLYSHDNIICGITSVAFSKSGRLLLAGYDDFNCSVWDALKGGRSGVLAGHDNRVSCLGVTDDGMAVATGSWDSFLRIWN

SEQ ID NO: 7409 - protein, 340 aa, Mus musculus
MSELEQLRQEAEQLRNQIQDARKACNDATLVQITSNMDSVGRIQMRTRRTLRGHLAKIYAMHWGYDSRLLVSASQDGKLIIWDSYTTNKMHAIPLRSSWVMTCAYAPSGNYVACGGLDNICSIYNLKTREGDVRVSRELAGHTGYLSCCRFLDDGQIITSSGDTTCALWDIETGQQTTTFTGHSGDVMSLSLSPDLKTFVSGACDASSKLWDIRDGMCRQSFTGHISDINAVSFFPSGYAFATGSDDATCRLFDLRADQELLLYSHDNIICGITSVAFSKSGRLLLAGYDDFNCSVWDALKGGRSGVLAGHDNRVSCLGVTDDGMAVATGSWDSFLRIWN

SEQ ID NO: 7410 - protein, 340 aa, Mus musculus
MSELEQLRQEAEQLRNQIQDARKACNDATLVQITSNMDSVGRIQMRTRRTLRGHLAKIYAMHWGYDSRLLVSASQDGKLIIWDSYTTNKMHAIPLRSSWVMTCAYAPSGNYVACGGLDNICSIYNLKTREGNVRVSRELPGHTGYLSCCRFLDDGQIITSSGDTTCALWDIETGQQTTTFTGHSGDVMSLSLSPDLKTFVSGACDASSKLWDIRDGMCRQSFTGHISDINAVSFFPSVYAFATGSDDATCRLFDLRADQELLLYSHDNIICGITSVAFSKSGRLLLAGYDDFNCSVWDALKGGRSGVLAGHDNRVSCLGVTDDGMAVATGSWDSFLRIWN

SEQ ID NO: 7411 - protein, 395 aa, Mus musculus
MCDQTFLVNVFGSCDKCFKQRALRPVFKKSQQLNYCSTCAEIMATDGLHENETLASLKSEAESLKGKLEEERAKLHDVELHQVAERVEALGQFVMKTRRTLKGHGNKVLCMDWCKDKRRIVSSSQDGKVIVWDSFTTNKEHAVTMPCTWVMACAYAPSGCAIACGGLDNKCSVYPLTFDKNENMAAKKKSVAMHTNYLSACSFTNSDMQILTASGDGTCALWDVESGQLLQSFHGHGADVLCLDLAPSETGNTFVSGGCDKKAMVWDMRSGQCVQAFETHESDVNSVRYYPSGDAFASGSDDATCRLYDLRADREVAIYSKESIIFGASSVDFSLSGRLLFAGYNDYTINVWDVLKGSRVSILFGHENRVSTLRVSPDGTAFCSGSWDHTLRVWA

SEQ ID NO: 7412 - protein, 221 aa, Mus musculus
MCSIYNLKSREGNVKVSRELSAHTGYLSCCRFLDDNNIVTSSGDTTCALWDIETGQQKTVFVGHTGDCMSLAVSPDYKLFISGACDASAKLWDVREGTCRQTFTGHESDINAICFFPNGEAICTGSDDASCRLFDLRADQELTAYSQESIICGITSVAFSLSGRLLFAGYDDFNCNVWDSLKCERVGILSGHDNRVSCLGVTADGMAVATGSWDSFLKIWN

SEQ ID NO: 7413 - protein, 204 aa, Mus musculus
SQDGKVIVWDSFTTNKEHAVTMPCTWVMACAYAPSGCAIACGGLDNKCSVYPLTFDKNENMAAKKKSVAMHTNYLSACSFTNSDMQILTASGDGTCALWDVESGQLLQSFHGHGADVLCLDLAPSETGNTFVSGGCDKKAMVWDMRSGQCVQAFETHESDVNSVRYYPSGDAFASGSDDATCRLYDLRADREVAIYSKESIIFG

SEQ ID NO: 7414 - protein, 340 aa, Rattus norvegicus
MSELDQLRQEAEQLKNQIRDARKACADATLSQITNNIDPVGRIQMRTRRTLRGHLAKIYAMHWGTDSRLLVSASQDGKLIIWDSYTTNKVHAIPLRSSWVMTCAYAPSGNYVACGGLDNICSIYNLKTREGNVRVSRELAGHTGYLSCCRFLDDNQIVTSSGDTTCALWDIETGQQTTTFTGHTGDVMSLSLAPDTRLFVSGACDASAKLWDVREGMCRQTFTGHESDINAICFFPNGNAFATGSDDATCRLFDLRADQELMTYSHDNIICGITSVSFSKSGRLLLAGYDDFNCNVWDALKADRAGDLAGHDNRVSCLGVTDDGMAVATGSWDSFLKIWN

SEQ ID NO: 7415 - protein, 340 aa, Rattus norvegicus
MSELDQLRQEAEQLKNQIRDARKACADATLSQITNNIDPVGRIQMRTRRTLRGHLAKIYAMHWGTDSRLLVSASQDGKLIIWDSYTTNKVHAIPLRSSWVMTCAYAPSGNYVACGGLDNICSIYNLKTREGNVRVSRELAGHTGYLSCCRFLDDNQIVTSSGDTTCALWDIETGQQTTTFTGHTGDVMSLSLAPDTRLFVSGACDASVKLWDVREGMCRQTFTGHESDINAICFFPNGNAFATGSDDATCRLFDLRADQELMTYSHDNIICGITSVPFSKSGRLLLGGYDDFNCNVWDALNADRAGVLAGHDNRVSCLGVTDDGMAVATGSWDSFLKIWN

SEQ ID NO: 7416 - protein, 340 aa, Rattus norvegicus
MGEMEQLKQEAEQLKKQIADARKACADITLAELVSGLEVVGRVQMRTRRTLRGHLAKIYAMHWATDSKLLVSASQDGKLIVWDTYTTNKVHAIPLRSSWVMTCAYAPSGNFVACGGLDNMCSIYSLKSREGNVKVSRELSAHTGYLSCCRFLDDNNIVTSSGDTTCALWDIETGQQKTVFVGHTGDCMSLAVSPDYKLFISGACDASAKLWDVREGTCRQTFTGHESDINAICFFPNGEAICTGSDDASCRLFDLRADQELTAYSHESIICGITSVAFSLSGRLLFAGYDDFNCNVWDSLKCERVGVLSGHDNRVSCLGVTADGMAVATGSWDSFLKIWN

SEQ ID NO: 7417 - protein, 340 aa, Rattus norvegicus
MSELEQLRQEAEQLRNQIRDARKACGDSTLTQITDGLDPVGRIQMRTRRTLRGHLAKIYDMHWGTDSRLLVSAAQDGKLIIWDSYTTNKVHVIPLRSSWVKTCAYAPSGNFVACGGLDNNCSIYSLKTREGNVRVSKKLPGHTGYLSCCRFLDDNQIITSSGDTTCALWDIETGQQTVDFAGHSGDVMSLSLAPDGRTFVSGACDASIKLWDVRESMCRQTFIGHESDINAVVFFPNGYAFTTGSDDATCRLFDLRADQELLMYSHDNIICGITSVAFSRSGRLLLAGYDDFNCNIWDAMKGDRAGVLAGHDNRVSCLGVTDDGMAVATGSWDSFLKIWN

SEQ ID NO: 7418 - protein, 353 aa, Rattus norvegicus
MATDGLHENETLASLKSEAESLKGKLEEERAKLHDVELHQVAERVEALGQFVMKTRRTLKGHGNKVLCMDWCKDKRRIVSSSQDGKVIVWDSFTTNKEHAVTMPCTWVMACAYAPSGCAIACGGLDNKCSVYPLTFDKNENMAAKKKSVAMHTNYLSACSFTNSDMQILTASGDGTCALWDVESGQLLQSFHGHGADVLCLDLAPSETGNTFVSGGCDKKAMVWDMRSGQCVQAFETHESDVNSVRYYPSGDAFASGSDDATCRLYDLRADREVAIYSKESIIFGASSVDFSLSGRLLFAGYNDYTINVWDVLKGSRVSILFGHENRVSTLRVSPDGTAFCSGSWDHTLRVWA

SEQ ID NO: 7419 - protein, 225 aa, Rattus norvegicus
TDSRLLVSASQDGKLIIWDSYTTNKVHAIPLRSSWVMTCAYAPSGNFVACGGLDNICSIYSLKTREGNVRVSRELPGHTGYLSCCRFLDDNQIITSSGDTTCALWDIETGQQTVGFAGHSGDVMSLSLAPDGRTFVSGACDASIKLWDVRDSMCRQTFIGHESDINAVAFFPNGYAFTTGSDDATCRLFDLRADQELLMYSHDNIICGITSVAFSRSGRLLLAGY

SEQ ID NO: 7420 - protein, 359 aa, Magnaporthe grisea
MDSQRSNEVSPEAMQARIQQARREAETLKDRIKRKKDELADTTLRTVAQQAHEPIPKNQLMKAKRTLKGHLAKIYAMHWSTDRRHLVSASQDGKLIIWDAYTTNKVHAIPLRSSWVMTCAYAPSGNYVACGGLDNICSIYNLNQNRDGPTRVARELSGHAGYLSCCRFINDRSILTSSGDMTCMKWDIETGTKVIEFADHLGDVMSISLDPTNQNTFISGACDSFAKLWDIRAGKAVQTFAGHESDINAIQFFPDGHSFVTGSDDATCRLFDIRADRELNVYGSESILCGITSVATSVSGRLLFAGYDDFECKVWDITRGDKVGSLVGHENRVSCLGVSNDGMSLCTGSWDSLLKIWAY

SEQ ID NO: 7421 - protein, 352 aa, Aspergillus nidulans
MADMSGEQMQAKITAARREAEGLKDKIRRRKDDLADTTLRDVAQNQTDALPRIGMKPRRTLKGHLAKIYAMHWSTDRRHLVSASQDGKLIIWDAYTTNKVHAIPLRSSWVMTCAYAPSGNYVACGGLDNICSIYNLSSREGPTRVARELSGHSGYLSCCRFINDRRIITSSGDMTCMLWDIESGSKVTEFADHFGDVMSISINPTNQNIFVSGACDAFAKLWDIRTGKAVQTFAGHESDINAIQFFPDGNAFGTGSDDTTCRLFDIRADRSLNTYQSDQILCGITSVGFSVSGRLLFAGYDDFECKVWDVLRGDKVGSLSGHENRVSCLGVSNDGISLCTGSWDSLLKVWAW

SEQ ID NO: 7422 - protein, 352 aa, Cryptococcus neoformans var. grubii
MQDIQDKIAAARREADGLKDKLRAARDQTADTSLRAMATDTPPLPRITLKARRTLKGHLAKIYALHWAADTRHIVSASQDGKLIVWDAYTTNKVHAIPLRSSWVMTAAYAPSGNLVACGGLDNVCSIYSLRGAGPGAPGAPGGQVKVARELSAHSGYLSCCRFINDRQIVTSSGDMTCMLWDIEQGTRTMEFNDHTGDVMCISLAPNANLFVSGACDATAKVWDIRTGKAVQTFTGHESDINAVQFFPNGDAFATGSDDASCKLFDLRADRELNSYAHDNILCGITSVAFSISGRVLFAGYDDYNCNVWDTLKGERIGVLAGHENRVSCMGVSGDGVALCTGSWDSLLKVWS

SEQ ID NO: 7423 - protein, 340 aa, Anopheles gambiae str. PEST
MNELEALRQEAETLKNAIRDARKAACDTSLVQATNNLEPIGRIQMRTRRTLRGHLAKIYAMHWGSDSRNLVSASQDGKLIVWDSHTTNKVHAIPLRSSWVMTCAYAPSGNFVACGGLDNICSIYNLKTREGNVRVSRELPGHTGYLSCCRFLDDNQIVTSSGDMSCGLWDIETGQQCTSFLGHTGDVMALSLSPQCRVFVSGACDASAKLWDIREGQCKQTFPGHESDINAVTFFPNGHAFATGSDDATCRLFDIRADQELAMYSHDNIICGITSVAFSKSGRLLLAGYDDFNCNVWDTLKAERAGILAGHDNRVSCLGVTENGMAVATGSWDSFLRVWN

SEQ ID NO: 7424 - protein, 340 aa, Anopheles gambiae str. PEST
MNELEALRQEAETLKNAIRDARKAACDTSLVQATNNLEPIGRIQMRTRRTLRGHLAKIYAMHWGSDSRNLVSASQDGKLIVWDSHTTNKVHAIPLRSSWVMTCAYAPSGNFVACGGLDNICSIYNLKTREGNVRVSRELPGHTGYLSCCRFLDDNQIVTSSGDMSCGLWDIETGQQCTSFLGHTGDVMALSLSPQCRVFVSGACDASAKLWDIREGQCKQTFPGHESDINAVTFFPNGHAFATGSDDATCRLFDIRADQELAMYSHDNIICGITSVAFSKSGRLLLAGYDDFNCNVWDTMKAERAGILAGHDNRVSCLGVTENGMAVATGSWDSFLRVWN

SEQ ID NO: 7425 - protein, 346 aa, Anopheles gambiae str. PEST
STTGDSMNEIEALRQEAETLKNAIRDARKAVCDTSILQATAQLEAVGRIQLRTRRTLRGHLAKIYAMHWGNDSRYLVSASQDGKLIVWDSHTTNKVHAIPLRSSWVMTCAYAPSGNYVACGGLDNICSIYNLKTREGNVRIARELGGHTGYLSCCRFLDDNQIVTSSGDMSCALWDIETGQQTTSFQGHTGDVMALSLAPQGKTFVSGACDAKAKLWDIREGQCKQTFPGHESDINAVAFFPNGFAFATGSDDATCRLFDIRADQELAMYSHDNIICGITSVAFSKSGRLLLAGYDDFNCNVWDTMKAERAGILAGHDNRVSCLGVTENGMAVATGSWDSFLRVWN

SEQ ID NO: 7426 - protein, 361 aa, Anopheles gambiae str. PEST
NIETVPCMMAEVLTSLQHSDKVSALIKEAECLKSKLEEERQKLNDVTLSSLAERLEMISYLNIKPRRVLKGHQAKVLCSNWSPDKRHIVSSSQDGKLIIWDAFTTNKEHAVTMPTTWIMGCSYAPSGNLVACGGLDNKVTVYPITLEEDISSRKKTVGTHTSYMSCCIFPNSDQQILTGSGDSTCALWDVESGQLLQSFHGHTGDVMSIDLAPNETGNTFVSGSCDKMAFIWDMRSGHVVQSFEGHQSDINSVKFHPSGDAISTGSDDSTCRLFDMRADKEVAVFCKDSIIFGVNCVDFSVSGRLLFAGYNDYTVNVWDTLKAQRVCLLYGHENKVSCLQVSPDGTALSTGSWDYTLRIWA

SEQ ID NO: 7427 - protein, 351 aa, Anopheles gambiae str. PEST
FCSIMAPKDDPEVAALKKEITDMIAKFQEEQKKVADCKLFDKCADLGDVPKVRITTKKFLKGHINKVNSVHFAGDSRHCVTGSLDGKLIIWDTWTGNKVQVIPLRSAWVMSVAYADSGNFVACGGMDNMCTVYDLNNRDAQGNAKIVRELMGYEGFLSSCRFLDDTHILTGSGDMKICVWDLQVGKKTSEFDAHAGDVVSISMSPDKNTYVTGSVDRTCKLWDVRENTPKQTFFGHEADVNSVCYHPSGFGFATGSEDKTARLFDFRSDQQIGHYEPPNQSSGFTSCALSLSGRYILCGSDDNNIHIWDTMKGSHNGTLSGHENRITSICMAPNGMALASCSWDQHVRIWV

SEQ ID NO: 7428 - protein, 301 aa, Giardia lamblia ATCC 50803
MVVEPPTLIECFKGSSKPVRTCSFEAESRQLSSAGDDRTIMIWNLTPPIRAFKFVGHNDTVVGSAYCPTQSLLATASFDKSVRLWTPNIHGNSIFRKVHTARIRDVSFSIDGRTIVTCSDDKSIKLFDTTNVQFRVCLSGHTNWVYSARLSPDGRLIASVSDDLSLRIWDTRTLSCVQAITNDNGLSLNPRVIRWSPDGTTVATGCTQDVQLWDVRSSTLLQHYSCHTNQVTCLDFHPNGKYMISTGSDGTARILDLVQGRSLYTVRGHEGGVNCISFCPDGSVFATGGDDGRVMLFELGV

SEQ ID NO: 7429 - protein, 971 aa, Streptomyces lincolnensis
MPRGEIPLDPDGGPLFEFAARLRKLREQAGSPTYRDLARDAHYSIASLSSAAAGRQLPSLAVTLAYVRVCGGDEREWKLIWQRTADACTSACTGQGTSAETGPEDRRSGGAKPPYVGLAAFGEADAGVFFGREKLTGTLVEHLKEKRLLVLFGASGSGKSSVLRAGVLPAFPGVSSLVFTPAPHPLEECAVRLAARAGADPGQVRDGLTAEPPTFHRLVRRILAREQEAGSTADELLVVVDQFEEVFTVCRDPRERERFLAALLHAAQAPDSRTRVAIAVRSDFYTHCTRLPGLVDVLPHAHHPVGPMTVEELRAAIVKPAARSRLTVESALLTSLTADAHGRPGALPLLSHALLETWSRRRGNALTLAGYRAAGGFEGALAQTAEAFHHALGDSGRQAARRLFLRLVALGEGTEDTKRRVPRQELDDGPDTEFVLEQATRARLLTVDGDHVEIAHEALIRCWPRLGDWLEEDRDQERLRRALTEATTLWESLDHDPDILYRGVRLAAAKDLPRQALTTRERAFLDAGESAARQTQRREGRRLRRLRRLVGALVVLLVCAVAAAGFAVQAQSTITRQRNEAVILRAADEAVRLSPSNPSLAVPIALAAYRQAPQSRTRDALLSTLSIASTDPRPTGYTPAVTADGRTLAMADQSEIVLWDLSDPRQLRRLGAIDTREFALNGIEFTPHGDTLVGVGSDHVLRLWDVRDPRRPTLLCKRPTGHTEAVYSLALRHDGRLAATSGYDDVLHLWDITDPARPRRLDSLVGHTANVKPVAFSPDGRTLASGSDDRTIRVWDVTDPRHATPVAVLKGHRHFVDALAYSPDGRTLLSGSDDHTAKLWDISDLPRHRRLSDLVRHADIVAGVAFASHGRTAVTVGVDGGVNVWDVTDPARPAPLAHLTNPRGTVKEVRHLAAHGLFLTVTAHRSVQIWHTELDRALTDVCDRFHGTLTRAQWSRHFPRVDYSPPCPHRT

SEQ ID NO: 7430 - protein, 489 aa, Bradyrhizobium japonicum USDA 110
MGALLPRGQASRPRTRHGRSPQNDRRQEARDVTGRHLAMVQRPGKMARWVLCCECLRRPMDLTLRLATALLTASLLLPLRPAQAQLAGHGGPVRAIAVSSDGKTVLSGSFDTAAIRWSLATESAEQVLRFHSGAVNAAAFLGDGRMATAGADGQIAIWTAGGLQPDQVLEGHTGPIVGLVVSPDTSKLASASWDHTVRISSLSDGGTRVLQGHSQSVNGVAFAPDGKSLVSVGYDLTVRIWPLAGGSPEIVVMPAPLNAVAISPDGEIVTGAADGKLRMMTADGKENGEVMAGARPIVALAISQDGALIATGAIDGTVAIVDRKARSVMRTLAGLGAPVWSVAFLPDGATLLTGGADGKIRRWNALTGAAIGSNVLGTPADPLAAYVGDHGAEMFRACVACHTLSENEVQRAGPTLAGLFGRKIASLPGYRFTDALKAMDIVWTPETVSKLFEIGPNAYTPGTKMPEQRIGSAEDRRALTDFLARATSK

SEQ ID NO: 7431 - protein, 436 aa, Kluyveromyces lactis
MEVDSAEYAIRPQELIVHDYHYPNMNSAGTVEDKIRTAKTECKQLYDQINRIKGKIQDTQLMNLSHGVNSLHELNLQPVRTLKGHNNKISDVKWSQDSASVLSSSQDGFIIIWDPFTGLKKSAIPLLSQWVLSSAISPSGNLVASAGLDNHCSVYRVSRDNRIQQNVISIFKGHTCYISATEFLDERTILTASGDMTCAMWDIPKSKRVTEFIDHLGDVLTMDLPPANTGRYGHNFITGGSDGYAYLWDVRQPNSAQSFFISDSDVSAIKFFNNGESFMAGSDDGSARLFDLRSDCQISTYSFSDGLLQQHQLQQQHHPHPHSHAYSRIQKNRYGSSSSSTSSYPIVKTPQSLNFKESCIEDQGVISIDFSSSGRLMYACYADYGCAVWDIIKGEMIGKVDGHRNRINAVKTSPDGMAVVSSSWDMTLKVWTPVHQ

SEQ ID NO: 7432 - protein, 359 aa, Sporothrix schenckii
MDSQRQSDVSPEAMQARIQQARREAETLKDRIKRKKDELADTTLRAVAQQAHEPISRNQMMKPKRTLKGHLAKIYAMHWSTDRRHLVSASQDGKLIIWDAYTTNKVHAIPLRSSWVMTCAYAPSGNYVACGGLDNICSIYNLNQNRDGPTRVARELSGHAGYLSCCRFINDRSILTSSGDMTCMKWDIETGTRVVEFADHLGDVMSISLNPTNQNTFISGACDAFAKLWDIRAGKAVQTFAGHESDINAIQFFPDGHSFVTGSDDATCRLFDIRADRELNVYGSESILCGITSVATSVSGRLLFAGYDDFECKVWDVTRGEKVGSLVGHENRVSCLGVSNDGISLCTGSWDSSLKIWAY

SEQ ID NO: 7433 - protein, 318 aa, Chlamydomonas reinhardtii
MAETLTLRATLKGHTNWVTAIATPLDPSSNTLLSASRDKSVLVWELERSESNYGYARKALRGHSHFVQDVVISSDGQFCLTGSWDGTLRLWDLNTGTTTRRFVGHTKDVLSVAFSVDNRQIVSGSRDKTIKLWNTLGECKYTIGEPEGHTEWVSCVRFSPMTTNPIIVSGGWDKMVKVWNLTNCKLKNNLVGHHGYVNTVTVSPDGSLCASGGKDGIAMLWDLAEGKRLYSLDAGDVIHCLCFSPNRYWLCAATQSSIKIWDLESKSIVDDLRPEFNITSKKAQVPYCVSLAWSADGSTLYSGYTDGQIRVWAVGHSL

SEQ ID NO: 7434 - protein, 356 aa, Fugu rubripes
MIWNLASKARAFRFVGHQDIITGVHFSPSGNLVATSSKDRTVRLWKPSIKGESKVIKAHTAAVRSVAFSHDGQRLATASDDKSVKVWSVPRHCFLYSLNQHTNWVCCARFSPDARLIASCGDDRTVRLWDTSSKHCINCFTDYGGSATSVDFNPSGTCIASSGSDSSLRIWDLRTNKLIQHYQGSNFMITGSSDSTVKILDLLEGRLMYTLHGHKGPVFTVAFSRGGDLFASGGADAQVLMWRTNFDTKPYLSVLQQHSHRATVDPPPHTGAGFRGSPEEQQQEDLSSYPPCLDTTLQHIVRQLDILTQTVSVLEERLTLTEDKLKECLQHQSQIIKEIGQPGPRRRTANEGHLSG

SEQ ID NO: 7435 - protein, 377 aa, Physcomitrella patens
MSVADSVRERYEVSKAEVQSLREQLHEKRASLLDTDGGPFIPADFVVVISFVFMVCVRTLQGHTGKIYSLDWAYRETSRIVSASQDGRLIVWNAISSQKTYSLKLACAWVKAAAISPGGNTVACGGLDNVCSIFNLSSVPDKEGNLPVSGTLAGHTGYLSSCKYMPTQEKHIVTSSGDHTCRFWDVETQCCIAVFGGDILTGHTGDVMSVSVSSSSPHVFISGSCDKSAKLWDVRTPARAQRTFYGHEGDVNTVNFLSEGRHFGTGSDDGSCRLFDIGTGHELQQYWDKQALARGPVNVTSVAFSRSGRLLFAGYSNGNCYVWDTLLAKVVANLGGGRDDGHTNRVSCLGLAADGDALCTGSYDATLKVWSCAGKKS

SEQ ID NO: 7436 - protein, 721 aa, Myxococcus xanthus
MLGVGSATGSCAGRRGLCRGHAPGDESGMRLRSWWWVLVLLTVSCAGRRSSSEDLGGRDARSELFRARGDAAIETKQWALAAGYFASARHTEDSPTARWGQVWAEKRASSLEWAKQFEGSVLALAFSPDGRLLASGGYDAVVRVWDVAAGAQVAELKGHEAELHAVAFSPDGRWLAAAGRPGALWLWDWKQGRRVALLSGHTDVVRGLAFSPDGEWLASGGLDRTVRVWRIRDGAEVLRFTHDDIVIAVAFSPDGGRLVSSSMDRTARVWELTARRELHRLTGHGDKVESCAFSADGERVMTASADRAIRFWDARTGALLDVQRNTGALSAVAIDAGFQQLVQAGWEGRVQRVDVRGGGEVLERLDAHRTFVMAVALSPDGRTFASGGMDGVLKVWSRPEVPPDVLLRELPAWPEVLTSVGPDAFVSGGEDGLRSWSVSAGGELHSRLEAPDAVGAVAVSADRRLLAVGTLKGEVRVRDVRSGNQLMVIPAARESIRALAFSPDGALLAAGVAQDVVLWAVPSATQVARLTGHTGKAWALAFDATGQRLASGAADHTVRIWDVARGTVIRVLEAGDRVRAVTFLASGELLTAGMRQPIRLWSPDDGRVLTSMDSLTVGVLSLAMAPQGAFVASGGVGGEMKVWRLPDGALMGEVPGLQGFVSAVTFSSDGAWLAAAASDRTFHLLGFDAFALPPPVEPDLTRILRRHGLAWDDLRGAFTLH

SEQ ID NO: 7437 - protein, 377 aa, Arabidopsis thaliana
MSVSELKERHAVATETVNNLRDQLRQRRLQLLDTDVARYSAAQGRTRVSFGATDLVCCRTLQGHTGKVYSLDWTPERNRIVSASQDGRLIVWNALTSQKTHAIKLPCAWVMTCAFSPNGQSVACGGLDSVCSIFSLSSTADKDGTVPVSRMLTGHRGYVSCCQYVPNEDAHLITSSGDQTCILWDVTTGLKTSVFGGEFQSGHTADVLSVSISGSNPNWFISGSCDSTARLWDTRAASRAVRTFHGHEGDVNTVKFFPDGYRFGTGSDDGTCRLYDIRTGHQLQVYQPHGDGENGPVTSIAFSVSGRLLFAGYASNNTCYVWDTLLGEVVLDLGLQQDSHRNRISCLGLSADGSALCTGSWDSNLKIWAFGGHRRVI

SEQ ID NO: 7438 - protein, 327 aa, Brassica napus
MAEGLVLKGTMRAHTDMVTAIATPIDNSDTIVSASRDKSIIVWKLTKDDKSYGVRQRRLTGHSHFVEDVVLSSDGQFALSGSWDGELRLWDLAAGVSTRRFVGHTKDVLSVAFSLDNRQIVSASRDRTIKLWNTLGECKYTISEGGEGHRDWVSCVRFSPNTLQPTIVSASCDKTVKVWNLSNCKLRSTLAGHTGYVSTVAVSPDGSLCASGGKDGVVLLWDLAEGKKLYSLEANSVIHALCFTPNRYWLCAATEQGIKIWDLESKTVVEDLKVDLKAEAEKSDGSGTAATKRKVIYCTSLNWSADGSTLFSGYTDGVIRVWGIGRY

SEQ ID NO: 7439 - protein, 583 aa, Penicillium marneffei
MYNAHRGMVPAPNNRLTELLEQLRQEFESQSRSTGEFEHQLTGQIQEMEMIRQKVYQLEQAQIKIKAEYENEIRVLRHELESRGVQTVPSHVGGPTHAGPSQAPPALGHGTNNLFGGIMANQGGSGPGLAPPPPQEQQPPQHGLQQPAPAAQQGPPQPPQSSYGGYQPSAGVNGYGPPPPPTASPGPGKGRGRAPPGPATPQQTHQLNYPAPGASPQIPRPTPTGQLVRERPGNTLANWNPDDLPASQKREGPDWYAVFNPEVQRVLDVELVHHLVHDSVVCCVRFSRDGKYVATGCNRSAQIFDVATGQNVATLQDESVDKDGDLYIRSVCFSPDGKYLATGAEDKQIRVWDIATRSIKHVFTGHEQDIYSLDFAGNGRYIASGSGDKTVRLWDVLEGKLVYTLSIEDGVTTVAMSPDGHYVAAGSLDKSVRVWDTTTGYLVERLENPDGHKDSVYSVAFAPNGRDLVSGSLDKTIKMWELTAPRGMLPGTGVKGGKCVRTFEGHKDFVLSVCLTPDGHWVMSGSKDRGVQFWDPNTGSAQMMLQGHKNSVISVAPSPTNNLFATGSGDMRARIWRYVEFPE

SEQ ID NO: 7440 - protein, 377 aa, Glycine max
MSVTELKERHLAATETVNSLRERLKERRLSLLDTDIAGYARSQGRSPVTFGPTDLVCCRTLQGHAGKVYSLDWTSEKNRIVSASQDGRLIVWNALTSQKTHAIKLPCAWVMTCAFSPTGQSVACGGLDSVCSIFNLNSPTDRDGNLPVSRMLSGHKGYVSSCQYVPDEDTHLITGSGDQTCVLWDITTGLKTSVFGGEFQSGHTADVLSISINGSNSRMFVSGSCDATARLWDTRVASRAVRTFHGHEGDVNAVKFFPDGNRFGTGSDDGTCRLFDIRTGHQLQVYYQQHSDNEIAPVTSIAFSASGRLLFAGYTNGDCYVWDTLLAKVVLNIGSLQDSHEDRISCLGLSADGSALCTGSWDTNLKIWAFGGHRRTT

SEQ ID NO: 7441 - protein, 377 aa, Glycine max
MSVTELKERHSAATDTVNNLRHRLKQKRLSLLDTDISGYARSQGRTPVTFGPTDLVCCRTLQGHTGKVYSLDWTSEKSQIVSASQDGRLIVWNALTRQKIHAIKLPCAWVMTCAFSPTGQSVACGGLDSVCSLFNLNSPTDRDGNLAVSRMLSGHKGYVSSCQYVPDEDTHLITGSGDQTCVLWDITTGLRTSVFGGEFQSGHTADVLSISINGSNSRMFVSGSCDSTARLWDTRVASRAVRTFHGHEGDVNAVKFFPDGNRFGTGSDDGTCRLFDIRTGHQLQVYYQQHSDNEIPPVTSIAFSASGRLLFAGYTNGDCYVWDTLLAKVVLNIGSLQDSHEDRISCLGLSADGSALCTGSWDTNLKIWAFGGHRRTT

SEQ ID NO: 7442 - protein, 379 aa, Glycine max
  unsure (1)..(379): unsure at all Xaa locations
MFVTDLKGRHCXSSTDNVNNLRHRLKQKRLSLLDTDVSGYARSPGRTPVTFGPTDLVCCRTLQGHTGKVYSLDWTSEKSQIVSASQDGRLIVWNALTRQKIHAIKLPCAWVMTCAFSPTGQSVACGGLDSVCSIFNLNSPTDKDGNLPVSRMLSGHKGYVSSCQYVPDEDTHLITGSGDQTCVLWDITTGLKTSIFGGEFQSGHTADVLSISINGSNSRMFVSGSCDATARVWDTRVASASXVRTFHGQDGQCKHFMVLREVLIQSTGLDDGTCRLFDIRTGHQLQVYYQQHSDNDITPVTSIAFDASGRLLFAGYTNGDCYVWDTLLAKVVLNIGSLQDSHEDRISCLGLSADGSALCTGSWDTNLKIWAFGGHRRTT

SEQ ID NO: 7443 - protein, 295 aa, Glycine max
  unsure (1)..(295): unsure at all Xaa locations
XFGSRRLIVWNALTRQKIHAIKLPCAWVMTCAFSPTGQSVACGGLDSVCSIFNLNSPTDKDGNLPVSRMLSGHKGYVSSCQYVPDEDTHLITGSGDQTCVLWDITTGLKTSIFGGEFQSGHTADVLSISINGSNSRMFVSGSCDATARLWDTRVASRAVRTFHGHEGDVNAVKFFPDGNRFGTGSDDGTCRLFDIRTGHQLQVYYQQHSDNDITPVTSIAFFASGRLLFAGYTNGDCYVWDTLLAKVVLNIGSLQDSHEDRISCLGLSADGSALCTGSWDTNLKIWAFGGHRRTT

SEQ ID NO: 7444 - protein, 172 aa, Glycine max
SSQLRRPPPTNMFVSGSCDTTVRLWDIRIASRAVRTYHGHEDDVNSVKFFPDGHRFGTGSDDGTCRLFDMRTGHQLQVYSREPDRNSNELPTVTSIAFSISGRLLFAGYSNGDCYVWDTLLAEVVLNLGNLQNSHDGRISCLGMSSDGSALCTGSWDKNLKIWAFSGHRKIV

SEQ ID NO: 7445 - protein, 204 aa, Glycine max
  unsure (1)..(204): unsure at all Xaa locations
MSVTELKERHSAATDTVNNLRHRLKQKRLSLLDTDVSGYARSQGRTPVTFGPTDLVCCRTLQGHTGKVYSLDWTSEKSQIVSASQDGRLIVWNALTRQKIHAIKLPCAWVMTCAFSPTGQSVACGGLDSVCSIFNLNSPTDKDGNLPVSPMLSGHKGYVSSCQYVPDEDTHLITGSGDQTCVXWDITTGLKTSIFGGEFQSGHT

SEQ ID NO: 7446 - protein, 183 aa, Glycine max
  unsure (1)..(183): unsure at all Xaa locations
MSVTELKERHSAATDTVNNLRHRLKQKRLSLLDTDISGYARSQGRTPVTFGPTDLVCCRTLQGHTGKVYSLDWTSEKSQIVSASQDGRLIVWNALTRQKIHAIKLPCAWVMTCAFSPTGQSVACGGLDSVCSIFNLNSPTDKDGNLPVSRMLSGHKGYVSSWQYVPDEDTHLITGSGDQTCVX

SEQ ID NO: 7447 - protein, 144 aa, Glycine max
  unsure (1)..(144): unsure at all Xaa locations
XHASRRAVRTFHGHEGDVNAVKFFPDGNRFGTGSDDGTCRLFDIRTGHQLQVYYQQHSDNEIPPVTSIAFSASGRLLFAGYTNGDCYVWDTLLAKVVLNIGSLQDSHEDRISCLGLSADGSALCTGSWDTNLKIWAFGGHRRTT

SEQ ID NO: 7448 - protein, 155 aa, Glycine max
MSVTELKERHLAATETVNSLRERLKERRLSLLDTDIAGYARSQGRSPVTFGPTDLVCCRTLQGHAGKVYSLDWTSEKNRIVSASQDGRLIVWNALTSQKTHAIKLPCAWVMTCAFSPTGQSVACGGLDSVCSLFYLNSPTDRENNKRADVGVSLT

SEQ ID NO: 7449 - protein, 129 aa, Glycine max
MSVTELKERHSAATDTVNNLRHRLKQKRLSLLDTDVSGYARSQGRTPVTFGPTDLVCCRTLQGHTGKVYSLDWTSEKSQIVSASQDGRLIVWNALTRQKIHAIKLPCAWVMTCAFSPTGQSVACGGLDS

SEQ ID NO: 7450 - protein, 77 aa, Glycine max
  unsure (1)..(77): unsure at all Xaa locations
MSVTELKERHLAATETINSLRERLKERRLSLLDTDIAGYARSQGRAPVTFGPTDLVWCRALQGHTGKVYSMDWTSEX

SEQ ID NO: 7451 - protein, 325 aa, Medicago sativa
MAEGLVLRGTMRAHTDVVTAIATPIDNSDMIVTASRDKSIILWHLTKEDKTYGVPRRRLTGHSHFVQDVVLSSDGQFALSGSWDGELRLWDLNAGTSARRFVGHTKDVLSVAFSIDNRQIVSASRDRTIKLWNTLGECKYTIQDGDAHSDWVSCVRFSPSTPQPTIVSASWDRTVKVWNLTNCKLRNTLAGHSGYVNTVAVSPDGSLCASGGKDGVILLWDLAEGKRLYSLDAGSIIHALCFSPNRYWLCAATESSIKIWDLESKSIVEDLKVDLKTEADAAIGGDTTTKKKVIYCTSLNWSADGSTLFSGYTDGVVRVWGIGRY

SEQ ID NO: 7452 - protein, 377 aa, Pisum sativum
MSVAELKERHIAATETVNNLRERLKQRRLSLLDTDIAGYARSQGRAPVTFGPTDILCCRTLQGHTGKVYSLDWTSEKNRIVSASQDGRLIVWNALTSQKTHAIKLPCAWVMTCAFSPTGQSVACGGLDSVCSIFNLNSPTDRDGNLNVSRMLSGHKGYVSSCQYVPGEDTHLITGSGDQTCVLWDITTGLRTSVFGGEFQSGHTADVLSISINGSNSKLFVSGSCDATARLWDTRVASRAVRTFHGHEGDVNSVKFFPDGNRFGTGSEDGTCRLFDIRTGHQLQVYNQQHQDNEMAHVTSIAFSISGRLLIAGYTNGDCYVWDTLLAKVVLNLGSLQNSHEGRITCLGMSADGSALCTGSWDTNLKIWAFGGHRKVI

SEQ ID NO: 7453 - protein, 377 aa, Pisum sativum
MSVADVKERHIAATETVNNLRERLKQRRLSLLDTDIAGYARSQGRAPVTLGPTDILCCRTLQGHTGKVYSLDWTSEKNRIVSASQDGRLIVWNALTSQKTHAIKLPCAWVMTCAFSPTGQSVACGGLDSVCSIFNLNSPTDRDGNLNVSRMLSGHKGYVSSCQYVPGEDTHLITGSGDQTCVLWDITTGLRTSVFGGEFQSGHTADVLSISINGSNSKLFVSGSCDATARLWDTRVASRAVRTFHGHEGDVNPVKFFPDGNRFGTGSEDGTCRLFDIRTGHQLQVYNQQHQDNEMAHVTSIAFSISGRLLIAGYTNGDCYVWDTLLAKVVLNLGSLQNSHEGRITCLGMSADGSALCTGSWDTNLKIWAFGGHRKVI

SEQ ID NO: 7454 - protein, 377 aa, Pisum sativum
MSVADVKERHIAATETVNNLRERLSRDRLSLLDTDIAGYARSQGRAPVTFGPTDILCCRTLQGHTGKVYSLDWTSEKNRIVSASQDGRLIVWNALTSQKTHAIKLPCAWVMTCAFSPTGQSVACGGLDSVCSIFNLNSPLDRDGNLNVSRMLSGHKGYVSSCQYVPGEDTHLITGSGDQTCVLWDITTGLRTSVFLGEFQSGHTADVLSISINGSNSKLFVSGSCDATARLWDTRVASRAVRTFHGHEGDVNSVKFFPDGNRFGTGSEDGTCRLFDIRTGHQLQVYNQQHQDNEMAHVTSIAFSISGRLLIAGYTNGDCYVWDTLLAKVVLNLGSLQNSHEGRITCLGMSADGSALCTGSWDTNLKIWAFGGHRKVI

SEQ ID NO: 7455 - protein, 326 aa, Lycopersicon esculentum
MSQESLVLRGTMKAHTDWVTAIATPIDNSDMIVTSSRDKSIIVWSLTKDGSQYGVPRRRLTGHGHFVEDVVLSSDGMFALSGSWDGELRLWDLQAGTTARRFVGHTKDVLSVAFSVDNRQIVSASRDKTIKLWNTLGECKYTIQEQDSHSDWVSCVRFSPNNLQPTIVSGSWDRTVKIWNLTNCKLRSTLAGHSGYVNTVAVSPDGSLCASGGKDGVILLWDLAEGKKLYSLDAGSIIHTFCFSPNRYWLCAATESSIKIWDLESKSIVVDLKVDLKQESEMFGTAATDSKTKVIYCTSLSWSADGSTLFSGYTDGLIRVWGIGRY

SEQ ID NO: 7456 - protein, 326 aa, Lycopersicon esculentum
MAQESLVLRGTMKAHTDWVTAIATPIDNSDMIVTSSRDKSIIVWSLTKDGAQYGVPRRRLTGHGHFVQDVVLSSDGMFALSGSWDGELRLWDLQAGTTARRFVGHTKDVLSVAFSVDNRQIVSASRDKSIKLWNTLGECKYTIQDGHSHSDWVSCVRFSPNTLQPTIVSGSWDRTVKIWNLTNCKLRSTLAGHSGYVNTVAVSPDGSLCASGGKDGVILLWDLAEGKKLYSLDAGSIIHTLCFSPNRYWLCAATESSIKIWDLESKSIVVDLKVDLKHESEMANESGTAPKTKVIYCTSLSWSADGSTLFSGYTDGLIRVWGIGRY

SEQ ID NO: 7457 - protein, 377 aa, Nicotiana plumbaginifolia
  unsure (1)..(377): unsure at all Xaa locations
MSVTELKERHMAATQTVNDLREKLKQKRLQLLDTDVSGYARSQGKTPVTFGPTDLVCCRILQGHTGKVYSLDWTPEKNRIVSASQDGRLIVWNALTSQKTHAIKLPCAWVMTCAFSPSGHSVACGGLDSVCSIFNLNSPIDKDGNHPVSRMLSGHKGYVSSCQYVPDEDTHLITSSGDQTCVLWDITTGLRTSVFGGEFQFGHTADVQSVSISSSNPRLFVSGSCDTTARLWDTRVASRAQRTFYCHEGDVNTVKFFPDGNRFGTGSEDGTCRLFDIRTGHQLQVYYQPHGDGDIPHVTSMAFSISGRLLFVRYSNGDCYVWDTLLAKVVLNLGAVQNSHEGXISCLGLSADGXXLCTGSWDTNLKIWAFGGHRSVI

SEQ ID NO: 7458 - protein, 377 aa, Nicotiana tabacum
MSVTELKERHMAATQTVNDLREKLKQKRLQLLDTDVSGYARSQGKTPVTFGPTDLVCCRILQGHTGKVYSLDWTPEKNRIVSASQDGRLIVWNALTSQKTHAIKLPCAWVMTCAFSPSGQSVACGGLDSVCSIFNLNSPIDKDGNHPVSRMLSGHKGYVSSCQYVPDEDTHLITSSGDQTCVLWDITTGLRTSVFGGEFQSGHTADVQSVSISSSNPRLFVSGSCDTTARLWDTRVASRAQRTFYGHEGDVNTVKFFPDGNRFGTGSEDGTCRLFDIRTEHQLQVYYQPHGDGDIPHVTSMAFSISGRLLFVGYSNGDCYVWDTLLAKVVLNLGGVQNSHEGRISCLGLSADGSALCTGSWDTNLKIWAFGGHRSVI

SEQ ID NO: 7459 - protein, 377 aa, Nicotiana tabacum
MSVKELKERHMAATQTVNDLREKLKQKRLQLLDTDVSGYARSQGKTPVIFGPTDLVCCRILQGHTGKVYSLDWTPEKNRIVSASQDGRLIVWNALTSQKTHAIKLPCAWVMTCAFSPSGQSVACGGLDSVCSIFNLNSPIDKDGNHPVSRMLSGHKGYVSSCQYVPDEDTHVITSSGDQTCVLWDITTGLRTSVFGGEFQSGHTADVQSVSISSSNPRLFVSGSCDSTARLWDTRVASRAQRTFYGHEGDVNTVKFFPDGNRFGTGSDDGTCRLFDIRTGHQLQVYYQPHGDGDIPHVTSMAFSISGRLLFVGYSNGDCYVWDTLLAKVVLNLGAVQNSHEGRISCLGLSADGSALCTGSWDTNLKIWAFGGHRSVI

SEQ ID NO: 7460 - protein, 377 aa, Nicotiana tabacum
MSVTELKERHMAATQTVNDLREKLKQKRLQLLDTDVSGYARSQGKTPVTFGPTDLVCCRILQGHTGKVYSLDWTPEKNRIVSASQDGRLIVWNALTSQKTHAIKLPCAWVMTCAFSPSGQSVACGGLDSVCSIFNLNSPIDKDGNHPVSRMLSGHKGYVSSCQYVPDEDTHLITSSGDQTCVLWDITTGLRTSVFGGEFQSGHTADVQSVSISSSNPRLFVSGSCDTTAGLWDTRVASRAQRTFYGHEGDVNTVKFSPDGNRFGTGSEDGTCRLFDIRTGHQLQVYYQPHGDGDIPHVTSMAFSISGRLLFVGYSNGDCYVWDTLLAKVVLNLGGVQNSHEGRISCLGLSADGSALCTGSWDTNLKIWAFGGHRSVI

SEQ ID NO: 7461 - protein, 375 aa, Nicotiana tabacum
MSVTELKERHMAATQTVSDLREKLKQKRLQLLDTDVSGYARSQGKTPVTFGPTDLVCCRILQGHTGKVYSLDWTPEKNRIVSASQDGRLIVWNALTSQKTHAIKLPCAWVMTCAFSPSGQSVACGGLDSVCSIYNLNSPIDKDGNHPVSRMLSGHKGYVSSCQYVPDEDTHLITSSGDQTCVLWDITTGLRTSVFGGEFQSGHTADVQSVSISSSNPRLFVSGSCDTTARLWDNRVASRAQRTFYGHEGDVNTVKFFPDGNRFGTGSEDGTCRLFDIRTGHQLQVYYQPHGDGDIPHVTSMAFSISGRLLFVGYSNGDCYVWDTLLAKVVLNLGGVQNSHEGRISCLGLSADGSALCTGSWDTNLKIWAFGGTEV

SEQ ID NO: 7462 - protein, 240 aa, Nicotiana tabacum
VACGGLDSVCSIFNLNSPIDKDGNHPVSRMLSGHKGYVSSCQYVPDEDTHLITSSGDQTCVLWDITTGLRTSVFGGEFQSGHTADVQSVSISSSNPRLFVSGSCDTTARLWDNRVASRAQRTFYGHEGDVNTVKFFPDGNRFGTGSEDGTCRLFDIRTGHQLQVYYQPHGDGDIPHVTSMAFSISGRLLFVGYSNGDCYVWDTLLAKVVLNLGGVQNSHEGRISCLGLSADGSAICTGTW

SEQ ID NO: 7463 - protein, 377 aa, Solanum tuberosum
MSVAELKERHMAATQTVNDLREKLKQKRLQLLDTDVSGYAKTQGKTPVTFGPTDLVCCRILQGHTGKVYSLDWTPEKNRIVSASQDGRLIVWNALTSQKTHAIKLPCAWVMTCAFSPSGQSVACGGLDSACSIFNLNSPIDKDGIHPVSRMLSGHKGYVSSCQYVPDEDTHLITSSGDQTCVLWDITTGLRTSVFGGEFQSGHTADVSSVSISSSNPKLFVSGSCDTTARLWDTRVASRAQRTFHGHESDVTTVKFFPDGNRFGTGSDDGSCRLFDIRTGHQLQVYNQPHGDGDIPHVTSIAFSISGRLLFVGYSNGDCYVWDTLLAKVVLNLGSVQNSHEGRISCLGLSADGSALCTGSWDTNLKIWAFGGHRSVI

SEQ ID NO: 7464 - protein, 377 aa, Solanum tuberosum
MSVAELKERHMAATQTVNDLREKLKQKRLQLLDTDVSGYAKRQGKSPVTFGPTDLVCCRILQGHTGKVYSLDWTPEKNRIVSASQDGRLIVWNALTSQKTHAIKLPCAWVMTCAFSPSGQSVACGGLDSACSIFNLNSPIDKDGIHPVSRMLSGHKGYVSSCQYVPDEDTHLITSSGDQTCVLWDITTGLRTSVFGGEFQSGHTADVLSVSISSSNPKLFVSGSCDTTARLWDTRVASRAQRTFHGHESDVNTVKFFPDGNRFGTGSDDGSCRLFDIRTGHQLQVYNQPHGDGDIPHVTSMAFSISGRLLFVGYSNGDCYVWDTLLAKVVLNLGSVQNSHEGRISCLGLSADGSALCTGSWDTNLKIWAFGGHRSVV

SEQ ID NO: 7465 - protein, 340 aa, Sitobion avenae
MNELDSLRQEAETLKNAIRDARKAACDTSLSQATTSMEPVGRIQMRTRRTLRGHLAKIYAMHWGSDSRNLVSASQDGKLIVWDSYTTNKVHAIPLRSSWVMTCAYAPSGSFVACGGLDNICSIYSLKTREGNVRVSRELPGHTGYLSCCRFLDDNQIVTSSGDMSCALWDIETGQQCSSFIGHTGDVMSLSMSPDMRTFVSGACDASAKLWDVRDGTCKQTFPGHESDINAVTFFPNGYAFATGSDDATCRLFDIRSDQELAMYSHDNIICGITSVSFSKSGRLLLAGYDDFNCNVWDSMKAERAGILAGHDNRVSCLGVTEDGMAVATGSWDSFLRIWN

SEQ ID NO: 7466 - protein, 347 aa, Dictyostelium discoideum
MSSDISEKIQQARRDAESMKEQIRANRDVMNDTTLKTFTRDLPGLPKMEGKIKVRRNLKGHLAKIYAMHWAEDNVHLVSASQDGKLLVWDGLTTNKVHAIPLRSSWVMTCAYSPTANFVACGGLDNICSIYNLRSREQPIRVCRELNSHTGYLSCCRFLNDRQIVTSSGDMTCILWDVENGTKITEFSDHNGDVMSVSVSPDKNYFISGACDATAKLWDLRSGKCVQTFTGHEADINAVQYFPNGLSFGTGSDDASCRLFDIRADRELMQYTHDNILCGITSVGFSFSGRFLFAGYDDFTCNVWDTLKGERVLSLTGHGNRVSCLGVPTDGMALCTGSWDSLLKIWA

SEQ ID NO: 7467 - protein, 380 aa, Avena fatua
MASVAELKERHAAATASVNSLRERLRQRRQTLLDTDVEKYSKAQGRTAVSFNQTDLVCCRTLQGHSGKVYSLDWTPEKNWIVSASQDGRLIVWNALTSQKTHAIKLHCPWVITCAFAPNGQSVACGGLNSACSIFNLNSQVDRNGNMPVSKLLTGPKGYVLSCQYVPDQETRMITGSGDPTCVLWDVTTGQRISIFGGEFPSGHTADVLSLSINSLNTNMFVSGSCDTTVRLWDLRIASRAVRTYHGHEGDINSVKFFPDGHRFGTGSDDGTCRLFDMRIRHQLQVYSREPDRNDNELPSVTSIAFSISGRLLFAGYSNGDCYAWDTLLAEVVLNLGTLQNSHEGRISCLGLSSDGSALCTGSWDKNLKIWAFSGHRKIV

SEQ ID NO: 7468 - protein, 380 aa, Oryza sativa
MASVAELKEKHAAATASVNSLRERLRQRRQMLLDTDVERYSRTQGRTPVSFNPTDLVCCRTLQGHSGKVYSLDWTPEKNWIVSASQDGRLIVWNALTSQKTHAIKLHCPWVMTCAFAPNGQSVACGGLDSACSIFNLNSQADRDGNIPVSRILTGHKGYVSSCQYVPDQETRLITSSGDQTCVLWDVTTGQRISIFGGEFPSGHTADVLSLSINSSNSNMFVSGSCDATVRLWDIRIASRAVRTYHGHEGDINSVKFFPDGQRFGTGSDDGTCRLFDVRTGHQLQVYSREPDRNDNELPTVTSIAFSISGRLLFAGYSNGDCYVWDTLLAEVVLNLGNLQNSHEGRISCLGLSSDGSALCTGSWDKNLKIWAFSGHRKIV

SEQ ID NO: 7469 - protein, 380 aa, Oryza sativa
MASVAELKEKHAAATASVNSLRERLRQRRQMLLDTDVERYSRTQGRTPVSFNPTDLVCCRTLQGHSGKVYSLDWTPEKNWIVSASQDGRLIVWNALTSQKTHAIKLHCPWVMTCAFAPNGQSVACGGLDSACSIFNLNSQADRDGNIPVSRILTGHKGYVSSCQYVPDQETRLITSSGDQTCVLWDVTTGQRISIFGGEFPSGHTADVLSLSINSSNSNMFVSGSCDATVRLWDIRIASRAVRPYHGHEGDINSVKFFPDGQRFGTGSDDGTCRLFDVRTGHQLQVYSREPDRNDNELPTVTSIAFSISGRLLFAGYSNGDCYVWDTLLAEVVLNLGNLQNSHEGRISCLGLSSDGSALCTGSWDKNLKIWAFSGHRKIV

SEQ ID NO: 7470 - protein, 353 aa, Tamias striatus
MATDGLHENETLASLKSEAESLKGKLEEERAKLHDVELHQVAERVEALGQFVMKTRRTLKGHGNKVLCMDWCKDKRRIVSSSQDGKVIVWDSFTTNKEHAVTMPCTWVMACAYAPSGCAIACGGLDNKCSVYPLTFDKNENMAAKKKSVAMHTNYLSACSFTNSDMQILTASGDGTCALWDVESGQLLQSFHGHGADVLCLDLAPSETGNTFVSGGCDKKAMVWDMRSGQCVQAFETHESDINSVRYYPSGDAFASGSDDATCRLYDLRADREVAIYSKESIIFGASSVDFSLSGRLLFAGYNDYTINVWDVLKGSRVSILFGHENRVSTLRVSPDGTAFCSGSWDHTLRVWA

SEQ ID NO: 7471 - protein, 380 aa, Triticum aestivum
MASVAELKEKHAAATASVNSLRERLRQRRQTLLDTDVEKYSKAQGRTAVSFNPTDLVCCRTLQGHSGKVYSLDWTPEKNWIVSASQDGRLIVWNALTSQKTHAIKLHCPWVMECAFAPNGQSVACGGLDSACSIFNLSSQADRDGNMPVSRVLTGHKGYASSCQYVPDQETRLITGSGDQTCVLWDVTTGQRISIFGSEFPSGHTADVLSLSINSLNANMFISGSCDTTVRLWDLRITSRAVRTYHGHEGDINSVKFFPDGQRFGTGSDDGTCRLFDMRTGHQLQVYNREPDRNDNELPIVTSVAFSISGRLLFAGYSNGDCYVWDTLLAEMVLNLGTLQNSHEGRISCLGLSSDGSALCTGSWDKNLKIWAFSGHRKIV

SEQ ID NO: 7472 - protein, 123 aa, Triticum aestivum
MASVAELKEKHAAATASVNSLRERLRQRRQTLLDTDVEKYSKAQGRTAVSFNPTDLVCCRPLQGHSGKVYSLDWTPEKNWIVSASQDGRLIVWNALTSQKTHAIKLHCPWVMTCASAPNGQSV

SEQ ID NO: 7473 - protein, 118 aa, Triticum aestivum
  unsure (1)..(118): unsure at all Xaa locations
XYARGQSEVPARLLAEMVLNLGTLPNAREGRXKLPWAVIRSVCIVYSKLRLLFEDSNGDCYVWDTLLAEVVLNLGTLQNFHEGRISCLGLSSDGSALCTGSWDKNLKIWAFSGHRKIV

SEQ ID NO: 7474 - protein, 347 aa, Pneumocystis carinii
MTIKDLQDKISAACKEAEYLKEKIKKKKDELADTNLRSMAQTLDVIERLSIRVRYTLKGHLAKIYAMHWSTDQKHLVSASQDGKLIVWDAYTTRKTHAIPLRSSWVMTCAYAPSGNFVSCGGLDNVCTIYDISSKDGHAKIARELMAHTGYLSCCRFLSDEQILTSSGDMSCILWDINTGSKIQEFLDHLGDVMSLSIHPTNPNLFVSGACDAFAKIWDIRIGKSVQTFAGHESDINAVQYFPNGNAFATGSDDASCRLFDVRADRELNQYSAANIMCGITSISFSNSGRLLFAGYDDFNCNVWDVLRGNRVGILQGHDNRVSCVGVSKDGRSLATGSWDSLLKIWA

SEQ ID NO: 7475 - protein, 344 aa, Phytophthora infestans
MGDAAELKKKCESLKETIEKTREAKSDGGFQSANASSGAKAILAPPKCRRLLKGHFGKIYAMQWGGDSSSLVSASQDGKLIVWNAQTTNKIQAIPLRSSWVMTCAFEQKQRNMVACGGLDNLCSIFHLSQAQVMRATKELAAHDGYLSCCRFVDEANIVTSSGDSNCILWDVESGEVKTTFREHSGDVMSVSINPHNPSMFISGSCDSTAKVWDIRTGKTTHTFQGHESDINSVDFFPSGNALGTGSDDSSCRLFDLRAYGELNNFSNDKILCGITSVSFSKSGRFLFAGYDDYNCYCWDVLSTSGAHIYQLAGHENRVSCLGVNPAGQALCTGSWDTLLKIWA

SEQ ID NO: 7476 - protein, 317 aa, Schizosaccharomyces pombe
MILDGILVQFLKMDSGSRVNVNIQGTRVLKNKLGKIPDIDISTDGKYLLSASTNDVLLVWDLHTSNKVAFFEAPSVWIMTCAFSPSTKSIAAGGLNNFCVVYDTSVPDADPVELVGHAGFVSCCKYVDDGHLLTGSGDKTCMFWDIEQAKAISVLKGHEMDIVSLDFLPSNPNLFVTGGCDKLAKLWDLRAAYCCATFPGNTSDINSISFFPSNADFVTGAEDGIARCFDIRASAEIFQYSSPSSSPINSVLFSKSGKLLFIAKDKTCEVWDSISSKTITSLTGHENRISSLALTSDGTMLATGSWDECVRLWSSSG

SEQ ID NO: 7477 - protein, 305 aa, Schizosaccharomyces pombe
MDSGSRVNVNIQGTRVLKNKLGKIPDIDISTDGKYLLSASTNDVLLVWDLHTSNKVAFFEAPSVWIMTCAFSPSTKSIAAGGLNNFCVVYDTSVPDADPVELVGHAGFVSCCKYVDDGHLLTGSGDKTCMFWDIEQAKAISVLKGHEMDIVSLDFLPSNPNLFVTGGCDKLAKLWDLRAAYCCATFPGNTSDINSISFFPSNADFVTGAEDGIARCFDIRASAEIFQYSSPSSSPINSVLFSKSGKLLFIAKDKTCEVWDSISSKTITSLTGHENRISSLALTSDGTMLATGSWDECVRLWSSSG

SEQ ID NO: 7478 - protein, 423 aa, Saccharomyces cerevisiae
MAAHQMDSITYSNNVTQQYIQPQSLQDISAVEDEIQNKIEAARQESKQLHAQINKAKHKIQDASLFQMANKVTSLTKNKINLKPNIVLKGHNNKISDFRWSRDSKRILSASQDGFMLIWDSASGLKQNAIPLDSQWVLSCAISPSSTLVASAGLNNNCTIYRVSKENRVAQNVASIFKGHTCYISDIEFTDNAHILTASGDMTCALWDIPKAKRVREYSDHLGDVLALAIPEEPNSENSSNTFASCGSDGYTYIWDSRSPSAVQSFYVNDSDINALRFFKDGMSIVAGSDNGAINMYDLRSDCSIATFSLFRGYEERTPTPTYMAANMEYNTAQSPQTLKSTSSSYLDNQGVVSLDFSASGRLMYSCYTDIGCVVWDVLKGEIVGKLEGHGGRVTGVRSSPDGLAVCTGSWDSTMKIWSPGYQ

SEQ ID NO: 7479 - protein, 423 aa, Saccharomyces cerevisiae
MAAHQMDSITYSNNVTQQYIQPQSLQDISAVEEEIQNKIEAARQESKQLHAQINKAKHKIQDASLFQMANKVTSLTKNKINLKPNIVLKGHNNKISDFRWSRDSKRILSASQDGFMLIWDSASGLKQNAIPLDSQWVLSCAISPSSTLVASAGLNNNCTIYRVSKENRVAQNVASIFKGHTCYISDIEFTDNAHILTASGDMTCALWDIPKAKRVREYSDHLGDVLALAIPEEPNLENSSNTFASCGSDGYTYIWDSRSPSAVQSFYVNDSDINALRFFKDGMSIVAGSDNGAINMYDLRSDCSIATFSLFRGYEERTPTPTYMAANMEYNTAQSPQTLKSTSSSYLDNQGVVSLDFSASGRLMYSCYTDIGCVVWDVLKGEIVGKLEGHGGRVTGVRSSPDGLAVCTGSWDSTMKIWSPGYQ

SEQ ID NO: 7480 - protein, 647 aa, Yarrowia lipolytica
MSFPQQVIAPGQRLNELLEAIKQEFDSVTNEASVYRLHKDEFDVKVNQQTSDLGQIRQSVYELEMAHRKMKERYEEEIMRLKSELEARGGPAANPAHSQQQQQQQQQQQQQQQQNQQAQDQQARAAQQQAAQQQALAQQQAAQQQALAQQQAQAQQQAQAQAHHMGGVPPSQGQPPSLLRPSSNVFSGIMSGQPGTSSLAPPQGQPGQPQPGQPQPGQPQPYSGYVGANGYTSSPHNGPPVISAMASPNSKKRQVSTPVPGKASPQVAPQEMQQQQQQQGPPQQQQPPQQQQQSPEEMGNYLGDMDIERVPPELKKQKADWFVVYNQRAPRLLDVDIVQSLDHNSVVCCVRFSADGKYIATGCNRSAQIFDVQTGQLICRLQDDSVDREGDLYIRSVCFSPDGKYLATGAEDKQIRVWDIKSQSIRHVFTGHEQDIYSLDFSRNGRHIASGSGDRTVRMWDIESGQCTLTLSIEDGVTTVAISPDGKFVAAGSLDKSVRIWDTSTGFLVERLEAPDGHKDSVYSVAFTPNGMDLVSGSLDKTIKLWELQAPRGIQANQRGGVCVKTLCGHKDFVLSVASTLDGQWILSGSKDRGVQFWDPRTGQVQLMLQGHRNSVISVAPSPMGGLFATGSGDCKARIWRYFPVNR

SEQ ID NO: 7481 - protein, 359 aa, Cryphonectria parasitica
MDSQRPNDVSPEAMQARIQQARREAEGLKDRIKRKKDELADTSLRDVAHRSHEAIPRNQLMKTKRTLKGHLAKIYAMHWSTDRRHLVSASQDGKLIIWDAYTTNKVHAIPLRSSWVMTCAYAPSGNYVACGGLDNICSIYNLNQNRDGPTRVARELSGHAGYLSCCRFINDRSILTSSGDMTCMKWDIETGTKQIEFADHLGDVMSISLNPTNQNTFISGACDAFAKLWDIRAGKAVQTFAGHESDINAIQFFPDGHSFVTGSDDATCRLFDIRADRELNVYGSESILCGITSVATSVSGRLLFAGYDDFECKVWDVTRGEKVGSLVGHENRVSCLGVSNDGISLCTGSWDSLLKIWAY

SEQ ID NO: 7482 - protein, 358 aa, Neurospora crassa
MDSRSSDVSPEAMQARIQQARREAENLKDRIRLKKEGLADTSLYEVAQQAHEPLPKNNMMKTKKTLKGHLAKIYAMHWSTDRRHLVSASQDGKLIIWDAYTTNKVHAIPLRSSWVMTCAYAPSGNFVACGGLDNICSIYNLNSNRDGPTRVYRELSGHAGYLSCCRFINDRSILTSSGDMTCMKWDIETGTKVVEFADHLGDVMSISLNPTNQNTFVSGACDSFAKLWDIRAGKAVQTFAGHESDINAIQFFPDGHSFVTGSDDATCRLFDIRADRELNCYRSESILCGITSVATSVSGRLLFAGYDDFECKVWDLTRAEKVGSLVGHENRVSCLGVSNDGISLCTGSWDSLLKVWAY

SEQ ID NO: 7483 - protein, 349 aa, Ustilago maydis
MSAPAADLQERIAAARREADGLKEKIRAKKDQMADTSLRAMANDIEPLPRIVMKPRRTLKGHLAKIYAMHWASDKRHLVSASQDGKLIVWDAYTTNKVHAIPLRSSWVMTCAYAPSGNSVACGGLDNICSIYSLRGRDPHNIKVGRELSAHTGYLSCCRFLNDQQILTSSGDMSCILWDIDSGTRISEFNDHTGDVMSISLSSNPNVFVSGACDAVAKVWDIRSGKAVQTFAGHESDINAVQFFPNGDAFATGSDDASCRLFDLRADRELNTYTHDNILCGITSVGFSVSGRILFAGYDDYTCNVWDTLKGERVGVLAAHENRVSCLGVSADGMALCTGSWDSRLLIWA

SEQ ID NO: 7484 - protein, 359 aa, Fusarium oxysporum
MNSQGNSDVSPEAMQSRIQQARREAETLKDRIKRKKDDLADTTLRAVAQQAHEPIPKNQLMKAKRTLKGHLAKIYAMHWSTDRRHLVSASQDGKLIIWDAYTTNKVHAIPLRSSWVMTCAYAPSGNFVACGGLDNICSIYNLNQQRDGPTRVARELSGHAGYLSCCRFINDRSILTSSGDMTCMKWDIETGQKVTEFADHLGDVMSISLNPTNQNTFISGACDAFAKLWDIRAGKAVQTFAGHESDINAIQFFPDGHSFVTGSDDATCRLFDIRADRELNLYGSESILCGITSVATSVSGRLLFAGYDDFECKVWDITRGEKVGSLVGHENRVSCLGVSNDGTSLCTGSWDSLLKIWAY

SEQ ID NO: 7485 - protein, 316 aa, Crithidia fasciculata
MNYGGSLKATAGEVTSLACPQQAGSYIKVVSTSRDGTAISWKANPDRHSAEDNYGIPDHRMEGHSGFVSCVSLAHATDYALTASWDHAIRMWDLRTGQSQRKFLKHTKDVLAVAFSPDDRLIVSAGRDNVIRVWNVAGECMHEFLRDGHEDWVSSICFSPSLDLPIVVSGSWDNTIKVWNVNEGKCVHTLRGHKNYVSTVTVSPDGSLCASGGKDGSALLWDLSNGEQQFSIPVESPINQIAFSPNRFWMCVATEKSLSVYDLETKEVIADLSVGSSKPSECISVAWSADGNTLYSGHKDNQFRAWDFKNLISDAE

SEQ ID NO: 7486 - protein, 312 aa, Leishmania mexicana amazonensis
MNYEGHLKGHRGWVTSLACPQQAGSYIKVVSTSRDGTAISWKANPDRHSVDSDYGLPSHRLEGHTGFVSCVSLAHATDYALTASWDRSIRMWDLRNGQCQRKFLKHTKDVLAVAFSPDDRLIVSAGRDNVIRVWNVAGECMHEFLRDSHEDWVSSICFSPSLEHPIVVSGSWDNTIKVWNVNGGKCERTLKGHSNYVSTVTVSPDGSLCASGGKDGAALLWDLSTGEQLFKINVESPINQIAFSPNRFWMCVATERSLSVYDLESKAVIAELTPDGAKPSECISIAWSADGNTLYSGHKDNLIRVWSISDAE

SEQ ID NO: 7487 - protein, 312 aa, Leishmania braziliensis
MNYEGHLKGHRGWVTSLACPQQAGSYIKVVSTSRDGTAISWKANPDRHSVDSDYGLPSHRLEGHTGFVSCVSLAHATDYALTASWDRSIRMWDLRNGQCQRKFLKHTKDVLAVASSPDDRLIVSAGRDNVIRVWNVAGECMHEFLRDSHEDWVSSICFSPSLEHPIVVSGSWDNTIKVWNVNGGKCERTLKGHSNYVSTVTVSPDGSLCASGGKDGAALLWDLSTGEQLFKINVESPINQIAFSPNRFWMCVATERSLSVYDLESKAVIAELTPDGAKPSECISIAWSADGNTLYSGHKDNLIRVWSISDAE

SEQ ID NO: 7488 - protein, 312 aa, Leishmania donovani
MNYEGHLRGHRGWVTSLACPEQAESYIKVVSTSRDGTAIAWKANADRHSVDSDYGLPSHRLEGHTGFVSCVSLAHATDYALTASWDRSIRMWDLRNGQSQRKFLKHTKDVLAVAFSPDDRLIVSAGRDNVVRVWNVAGDCMHEFLRDGHKDWVSSICFSPSLEHPIVVSGSWDNTIKVWNVNGGKCERTLKGHSNYVSTVTVSPDGSLCASGGKDGVALLWDLSTGEQLFKINVESPINQIAFSPNRFWMCVATEKSLSVYDLESKTVIAELTPDGAKPSECISIAWSADGNTLYSGHKDNLIRVWSISDAE

SEQ ID NO: 7489 - protein, 276 aa, Leishmania donovani
MNYEGHLKGHRGWVTSLACPQQAGSYIKVVSTSRDGTAISWKANPDRHSVDSDYGLPSHRLEGHTGFVSCVSLAHATDYALTASWDRSIRMWDLRNGQCQRKFLKHTKDVLAVAFSPDDRLIVSAGRDNVIRVWNVAGECMHEFLRDGHEDWVSSICFSPSLEHPIVVSGSWDNTIKVWNVNGGKCERTLKGHSNYVSTVTVSPDGSLCASGGKDGAALLWDLSTGEQLFKINVESPINQIAFSPNRFWMCVATERSLSVYDLESKAEFQHTGGRY

SEQ ID NO: 7490 - protein, 312 aa, Leishmania major
MNYEGHLKGHRGWVTSLACPQQAGSYIKVVSTSRDGTVISWKANPDRHSVDSDYGLPNHRLEGHTGFVSCVSLAHATDYALTASWDRSIRMWDLRNGQCQRKFLKHTKDVLAVAFSPDDRLIVSAGRDNVIRVWNVAGECMHEFLRDGHEDWVSSICFSPSLEHPIVVSGSWDNTIKVWNVNGGKCERTLKGHSNYVSTVTVSPDGSLCASGGKDGAALLWDLSTGEQLFKINVESPINQIGFSPNRFWMCVATERSLSVYDLESKAVIAELTPDGAKPSECISIAWSADGNTLYSGHKDNLIRVWSISDAE

SEQ ID NO: 7491 - protein, 312 aa, Leishmania major
MNYEGHLKGHRGWVTSLACPQQAGSYIKVVLTSRDGTAISWKANPDRHSVDSDYGLPSHRLEGHTGFVSCVSLAHATDYALTASWDRSIRMWDLRNGQCQRKFLKHTKDVLAVAFSPDDRLIVSAGRDNVIRVWNVAGECMHEFLRDSHEDWVSSICFSPSLEHPIVVSGSWDNTIKVWNVNGGKCERTLKGHSNYVSTVTVSPDGSLCASGGKDGAALLWDLSTGEQLFKINVESPINQIAFSPNRFWMCVATERSLSVYDLESKAVIAELTPDGAKPSECISIAWSADGNTLYSGHKDNLIRVWSISDAE

SEQ ID NO: 7492 - protein, 312 aa, Leishmania infantum
MNYEGHLKGHRGWVTSLACPQQAGSYIKVVSTSRDGTAISWKANPDRHSVDSDYGLPSHRLEGHTGFVSCVSLAHATDYALTASWDRSIRMWDLRNGQCQRKFLKHTKDVLAVAFSPDDRLIVSAGRDNVIRVWNVAGECMHEFLRDGHEDWVSSICFSPSLEHPIVVSGSWDNTIKVWNVNGGKCERTLKGHSNYVSTVTVSPDGSLCASGGKDGAALLWDLSTGEQLFKINVESPINQIAFSPNRFWMCVATERSLSVYDLESKAVIAELTPDGAKPSECISIAWSADGNTLYSGHKDNLIRVWSISDAE

SEQ ID NO: 7493 - protein, 312 aa, Leishmania panamensis
MNYEGHLKGHRGWVTSLACPQQAGSYIKVVSTSRDGTAISWKSNPDRHSVDSDYGLPNHRLEGHTGFVSCVSLAHATDYALTASWDRSIRMWDLRNGQSQRKFLKHTKDVLAVAFSPDDRLIVSAGRDNVIRVWNVAGECMHEFLRDGHEDWVSSICFSPSLEHPIVVSGSWDNTIKVWNVNEGKCERTLKGHSNYVSTVTVSPDGSLCASGGKDGAALLWDLSTGEQLFRINVESAINQIAFSPNRFWMCVAAEKSLSVYDLESKAVIAELTPDGTKPSECISIAWSADGNRLYSGHKDNLIRVWSISDAE

SEQ ID NO: 7494 - protein, 317 aa, Trypanosoma vivax
MAVVYEGHSRGHRGWVTSLVCPQCEQTGINVVSASRDKTLISWSDNPNRHAEENDYCIPERRLEGHSAFVSDVALSNNGSFAVSASWDRSMRLWNLQNGQCQYKFLGHTRDVLSVAFSPDNRQIVSGSRDRTLRVWNVKGECMHTLNGAHSDWVSCVRFSPATDKPLIVSGGWDNLVKVWDPAGGVSRVVSELKGHTNYVTSVTVSPDGSLCASSDCDGVARLWDLAKGDSLFEMSAGAPINQICFSPNRYWMCAATDECIRIFDLENKDVIVELTPEAHGSKPPQCQSIAWSADGSTLYSGHADNVIRIWTVSLKA

SEQ ID NO: 7495 - protein, 602 aa, Plasmodium vivax
MKNASLDAEEGTGGNESGNGSGGGNQIDTVGEHEREAKMLKKSLCLSKNMFVGNDILTPFNYSLLAYATNINDRIAKIEQDEDKAIKDLKEISTLAIAGGNTTKSHEEMYKENELKLRKQNLRENVIKKLTSIKVNINMKELDEYSSVKKLYLKKIEKDDSQRGKERKKKKKKSSIISSIVNDDTVTHDDIGHDLNYMNESLITNQMGEAGKNNNEKNSILPFINQPRNEVHSGPIIKKSDDSVLSSDALKNIKTLDIYKKIKKPKWHFPYKLYRVILGHSGWVNCVDVDISNEWFATGANDRLIKIWDLATCKLKLTLTGHINSIRDIKISKKNPYLFSCGEDNRVKCWDLEYNKVIRDYHGHLSGVYCLSLHPSLDILMSGGRDAVVRVWDIRTKSSIFVLSGHTGTVMSLCSQSVEPQVVSGSQDKMIRLWDLNNGKCRIALTHHKKSIRSLSIHPFEYSFCSCGTDNVKVWCGADAEFDRNITGFNSIINCSLIKQDSYFSDSSILILGSNNGQLHFYDWSSGYKFDTLSNKVVPGTVECENSTLAMAFDKSESRLITTHGDKSIKVAQKKGEIWRENEDATPENFPIKWNPYESFKF

SEQ ID NO: 7496 - protein, 556 aa, Encephalitozoon cuniculi
MSENIRESISAKTLSKDQMETSYVSLKTWIEDSLDLFKNDLLPLLYPLFIHIYFDLIQQNKTDEAKEFFEKYRGDHYNKSEEIKQFESIYTVQHIHENNFAYTFKNSKYHLSMGRYAFDLLINFLEERNLTYILKILNQHLDIKVYVGPKSEERPQGIETSVVDAEIDLTTFLVSRECEDAILGDEQYRYDHLETYVLQLRKQREMKPKDSVYKPNASQIHAEIEKLKDLCKRVAVNKNNLPSICCYTIHNTYEGLTAAEISNDLKLMACGFKDSYVEVYSLTNESLKKLKSSSELAKSDIKTLNEEKFEEVGSSYKLVGHSGPVYGLKFFSSNKFLVSSSQDCTVCLWSLDLLCLLAVYKAHAFPVWCVDVAPNDYFFASGAGDRQAIVWSVMTSKPERLIISSLSDVTAVKFHPNSSYLFTGSSDHRVRMHDISTASVVRIFCGHTDTVTCMDVSHCGKFLASGSKDRTVLLWDIQSSKLLGKYVGHENTVFSVSFCFYGSVLASCGADNSVRLWDRTDHKGGCLGTYYTKNTPLLCVKFGYRNIISCTGPFIS

SEQ ID NO: 7497 - protein, 371 aa, Geodia cydonium
MAEENGSLSPESEAGSEEESLLKLKKDARDLRENLRLRRSRNVGPEAFATLQKEEDVPITSPVINLKVRKTLKGHRGRILHFDWSPDKYHVVTAGQDGQLFIWNGMTAQKEMVIQSSKWVCACSFSPSTTLLACAGTSCDCQVFQLDVGRVSTDSQLPRLTVPKKTLSAHQKYITNCLFFGSDQQILTAGADKRCAMWDMEYHEPVKTFEGHTSDILGLALNPKDPFTVFATASCDRSACIWDSRSGQCVMRFEGHEGDVNSVRFFPTGEAIGTACNDGTIRLFDLRADQEIKFYTKTGIIFGCSALDFSKSGRILFGGYNDYAIRVWDVIKGTHMAMWLNHTDRVSNVALSPDGTALGSSSWDGTLKIWA

SEQ ID NO: 7498 - protein, 340 aa, Caenorhabditis elegans
MSELDQLRQEAEQLKSQIREARKSANDTTLATVASNLEPIGRIQMRTRRTLRGHLAKIYAMHWASDSRNLVSASQDGKLIVWDSYTTNKVHAIPLRSSWVMTCAYAPSGSFVACGGLDNICSIYSLKTREGNVRVSRELPGHTGYLSCCRFLDDNQIVTSSGDMTCALWDIETGQQCTAFTGHTGDVMSLSLSPDFRTFISGACDASAKLWDIRDGMCKQTFPGHESDINAVAFFPSGNRFATGSDDATCRLFDIRADQELAMYSHDNIICGITSVAFSKSGRLLFAGYDDFNCNVWDSMRQERAGVLAGHDNRVSCLGVTEDGMAVCTGSWDSFLKIWN

SEQ ID NO: 7499 - protein, 340 aa, Caenorhabditis elegans
MSELDQLRQEAEQLKSQIREARKSANDTTLATVASNLEPIGRIQMRTRRTLRGHLAKIYAMHWASDSRNLVSASQDGKLIVWDSYTTNKVHAIPLRSSWVMTCAYAPSGSFVACGGLDNICSIYSLKTREGNVRVSRELPGHTGYLSCCRFLDDNQIVTSSGDMTCALWDIETGQQCTAFTGHTGDVMSLSLSPDFRTFISGACDASAKLWDIRDGMCKQTFPGHESDINAVAFFPSGNAFATGSDDATCRLFDIRADQELAMYSHDNIICGITSVAFSKSGRLLFAGYDDFNCNVWDSMRQERAGVLAGHDNRVSCLGVTEDGMAVCTGSWDSFLKIWN

SEQ ID NO: 7500 - protein, 356 aa, Caenorhabditis elegans
MPENSQPTTTEKGSEYLEQLANEAEELRKKLDQERHKLNDIPIQQAAERLDVMGALGVKQRRILKGHVGKVLCMDWSLDKRHIVSSSQDGKVIVWDGFTTNKEHALTMPTTWVMACAFSPSSQMIACGGLDNKCSVVPLSFEDDIIQKKRQVATHTSYMSCCTFLRSDNLILTGSGDSTCAIWDVESGQLIQNFHGHTGDVFAIDVPKCDTGNTFISAGADKHSLVWDIRSGQCVQSFEGHEADINTVRFHPNGDAFATGSDDATCRLFDLRADRQVCVYEKESILFPVNGVDFSLSGRILFAGYGDYRVGVWDSLKCARHSVLYGHENRISCLRTSPDGTAVCSASWDCTIRIWA

SEQ ID NO: 7501 - protein, 480 aa, Brugia malayi
MEQIAVPGSEQGTLSESLTTPQHFEAPETPQQKALLNLVFRSMKRTHDLFYHDYGTLPELNSEADSLWRAVKLKSEYGSVMEEVSEAKRKKEEELLKLPINSSVVGSSGNAFSEKDSSDLTTSSRSDDNTMRAVLPARAPVMIKPKWHAPWKLYRVISGHTGWVRCVDVEPGNEWFATGGADRIVKVCNNFAPGKLRLSLTGHVSAVRCCKVSRRHPFLFTGGEDKQVITYRDFQVKCWDLEYNKVIRHYHGHLSAVQDLTIHPTIDILITCARDATARVWDMRTKAQVHCLSGHTNTVATVISQEVDPQVITGSHDSTIRLWDLAAGRSICTLTHHKKSIRALTLHPSLFMFASGSADNIKEWKCPEGIFIQNLSGHNAIINSLACNEDGVLISGGDNGSLNFWDWKSGFCFQREQTKAQPGSIDSEAGIFAVTYDQSGSRLITAEADKTIKMYKEDENATEDTHPILWRPEILRRKAY

SEQ ID NO: 7502 - protein, 341 aa, Lymnaea stagnalis
MSNDLEALRQETEQLKNQIREARKAAGDTTLAQACSGVEAVGRIQMRTRRTLRGHLAKIYAMHWASDSRNLVSASQDGKLIVWDGYTTNKVHAIPLRSSWVMTCAYAPSGNFVACGGLDNICSIYSLKTREGNVRVSRELPGHTGYLSCCRFIDDNSIVTSSGDMSCALWDIETGQQTTSFTGHTGDVMSLSTSPDFRTFVSGACDASAKLWDVRDGMCKQTFSGHESDINAITYFPNGHAFATGSDDATCRLFDIRADQEIGMYSHDNIICGITSVAFSKSGRLLLGRYDDFNCNVWDVLKQETHGVLAGHDNRVSCLGVTEDGSAVATGSWDSFLKIWN

SEQ ID NO: 7503 - protein, 341 aa, Loligo forbesi
MTSELEALRQETEQLKNQIREARKAAADTTLAMATANVEPVGRIQMRTRRTLRGHLAKIYAMHWASDSRNLVSASQDGKLIVWDGYTTNKVHAIPLRSSWVMTCAYAPSGNYVACGGLDNICSIYSLKTREGNVRVSRELPGHTGYLSCCRFIDDNQIVTSSGDMTCALWNIETGNQITSFGGHTGDVMSLSLAPDMRTFVSGACDASAKLFDIRDGICKQTFTGHESDINAITYFPNGFAFATGSDDATCRLFDIRADQEIGMYSHDNIICGITSVAFSKSGRLLLGGYDDFNCNVWDVLKQERAGVLAGHDNRVSCLGVTEDGMAVATGSWDSFLKIWN

SEQ ID NO: 7504 - protein, 340 aa, Homarus americanus
MNDLDSLRQEAERLKNTIRDARKNALDTTLVQATAGMDPIGRIQMRTRRTLRGHLAKIYAMHWGSDSRNLVSASQDGKLIVWDSYTTNKVHAIPLRSSWVMTCAYAPSGSYVACGGLDNICSIYSLKTREGNVRVSRELPGHTGYLSCCRFVDDNQIVTSSGDMTCALWDIETGQQCTQFTGHTGDVMSLSLSPNMRTFTSGACDASAKLWDIRDGMCRQTFPGHESDINAVTFFPNGHAFATGSDDATCRLFDIRADQELAMYSHDNIICGITSVAFSKSGKLLLAGYDDFNCNVWDSMRTERAGVLAGHDNRVSCLGVTEDGMAVATGSWDSFLKIWN

SEQ ID NO: 7505 - protein, 186 aa, Homarus americanus
  unsure (1)..(186): unsure at all Xaa locations
XGKLMVWDAMTTNKLFAIPLRSSWVMTCAYSPTGNYVACGGVDNICSVYSLRAKEDPIKVTRELNAHTGYLSCCRFINESEIITSSGDMSLILWDIETVQQCTQFADHTGDVMSLALSPENRATFVSGACDATAKVWDKRAKGKSQQTFTGHDSDINAVTYFPDGNAFATGSDDASGRLFDLPADQ

SEQ ID NO: 7506 - protein, 340 aa, Drosophila melanogaster
MNELDSLRQEAESLKNAIRDARKAACDTSLLQAATSLEPIGRIQMRTRRTLRGHLAKIYAMHWGNDSRNLVSASQDGKLIVWDSHTTNKVHAIPLRSSWVMTCAYAPSGSYVACGGLDNMCSIYNLKTREGNVRVSRELPGHGGYLSCCRFLDDNQIVTSSGDMSCGLWDIETGLQVTSFLGHTGDVMALSLAPQCKTFVSGACDASAKLWDIREGVCKQTFPGHESDINAVTFFPNGQAFATGSDDATCRLFDIRADQELAMYSHDNIICGITSVAFSKSGRLLLAGYDDFNCNVWDTMKAERSGILAGHDNRVSCLGVTENGMAVATGSWDSFLRVWN

SEQ ID NO: 7507 - protein, 358 aa, Drosophila melanogaster
MSEAAVPASNANANATEKMASLVREAENLKTKLEEERQKLNDVNLSNIAERLEQIAYVNIKPRKVLKGHQAKVLCTDWSPDKRHIISSSQDGRLIIWDAFTTNKEHAVTMPTTWIMACAYAPSGNFVACGGLDNKVTVYPITSDEEMAAKKRTVGTHTSYMSCCIYPNSDQQILTGSGDSTCALWDVESGQLLQSFHGHSGDVMAIDLAPNETGNTFVSGSCDRMAFIWDMRSGHVVQSFEGHQSDVNSVKFHPCGDAIATGSDDSSCRLYDMRADREVAVFAKESIIFGVNSVDFSVSGRLLFAGYNDYTVNLWDTLKSERVCLLYGHENKVSCVQVSPDGTALSTGSWDYTIRVWA

SEQ ID NO: 7508 - protein, 346 aa, Drosophila melanogaster
MPKIDPETQKLYDEINGMIQKFKDDQKSKADCTLADKCGDMGDVPKIRFSSKKILKGHINKVNSVHFAGDSRHCVTGSLDGKLIIWDTWTANKVQIIPLRSAWVMTVAFSPSGNFVACGGMDNQCTVYDVNNRDASGVAKMVKELMGYEGFLSSCRFLDDGHLITGSGDMKICHWDLEKGVKTMDFNGHAGDIAGLSLSPDMKTYITGSVDKTAKLWDVREEGHKQMFFGHDMDVSSVCYHPSGFGFASASEDQTARMYDLRADQQIAQYEPPQKNTGFTSCALSTSGRYLMCGGIEGNVHSWDTMKQRHTGTLSGHENRITCISLCPNGMCLASTSWDQQVRLWL

SEQ ID NO: 7509 - protein, 346 aa, Drosophila melanogaster [sequence omitted]

SEQ ID NO: 7510 - protein, 346 aa, Drosophila melanogaster
MPKIDPETQKLYDEINGMIQKFKDDQKSKADCTLADKCGDMGDVPKIRFSSKKILKGHINKVNSVHFAGDSRHCVTGSLDGKLIIWDTWTANKVQIIPLRSAWVMTVAFSPSGNFEACGGMDNQCTVYDVNNRDAPGVAKMVKELMGYEGFLSSCRFLDDGHLITGSGDMKICHWDLEKGVKTMDFNGHAGDIAGLSLSPDMKTYITGSVDKTAKLWDVREEGHKQMFFGHDMDVSSVCYHPSGFGFASCSEDQTARMYDLRADQQIAQYEPPQKNTGFTSCALSTSGRYLMCGGIEGNVHSWDTMKQRHTGTLSGHENRITCISLCPNGMCLASTSWDQQVRLWL

SEQ ID NO: 7511 - protein, 615 aa, Plasmodium yoelii yoelii
MRKFFGLEKSKAKDDDKINEVEKNEEKEHEDEKSEEKEHEDETEYGGEEDLKKHICLSKNMFMGNDILTPFNYNLLAYDQNINNRIIINDEDDDYENSNKIKDLKAISALAIPDEENTKSYESRYKENELKARRSNLRENVLKKLTSIKMNINIREMDEYSSVKNLYIKKMETSDIQKGNEKNMKKKKKKKSSIINSIINDDPITHEDISLNMNDMNVNPLSNYKSENGNIMDDKNSSILPFNNNQHKNEIFNEPIIKKSDESILSSNALSNIKTLDIYKKIKKPKWHYPYKLYRVILGHSGWVNCVDVDISNEWFATGANDRLIKIWDLATCKLKLTLTGHINSVRDIKISKRNPYLFSCGEDNRVKCWDLEYNKVIRDYHGHLSGVYCLSLHPSLDILMSGGRDAVVRVWDIRTKNSIFVLSGHTGTIMSLSSQSVEPQVISGSQDKMIRLWDLNNGKCRIALTHHKKSIRSLSIHPFEYSFCSCAPDNVKVWCGADAEFDRNITGFNSIINCSLIKQDSYFSDSSILILGSNNGQLHFYDWSSGYKYDTLSNKVVPGTVDCENSTLAMAFDKSESRLITTHGDKSIKIWKENEDATPENFPIKWNPYDNFKF

SEQ ID NO: 7512 - protein, 499 aa, Plasmodium yoelii yoelii
MSILCTISGQTPEEPVVSKTGYIFEKRLIEKHIKNYGICPISGEILTLEDLYPIKNEKYVKPRPITATSIPGLLSIFQTEWDSMISEMFNLRTHVNDVRNQLSHSLYQYDAATRVIAKLLKEKNNYQEEINNLRNQILQLKNGNDILNDLEIGINEDLLNEMQNIAKELLMNRKKRKVENVNSPNEWKKITATNEFNIHSSIIPGVTCLTIDVNKLKYNYDDDHKNHNFFSGGKDGNIYYVSLNNNKIISKLQGHLKKVNSIISHPSNSICISGSNDKTIRIWKGDPDTNEYVTSHIITKHKDKINSLSLHPLENYFISSSNDSIWILHDMETGKTIKTCKSSPSPFKNLSIHPDGMMFGIGSEDSNIYIYDIKSQEYKASLTGHTKSIESISFSENGYYLASISKDNTLKLWDLRKATTFQTIELENTPKHITFDYSGKYLSLSVGNDIQIFNFETKNQASLITTLSSHTDIVTQTCFGSRTSYLLSSSMDKTVKLWS

SEQ ID NO: 7513 - protein, 346 aa, Calliphora vicina
MPKVDPETQKLYDEINGLIKKFQDDHKAKADCTMQEKCGDMSDIPKIRLSSKKILKGHINKVNSVHFAGDSRHCVTGSLDGKLIIWDTWTANKVQVIPLRSAWVMTVAFSPSGNFVACGGMDNQCTVYDVNNRDASGVAKMTRELLGYEGFLSSCRFLDDTHLITGSGDMKICHWDLEKGVKTMDFNGHAGDIAGLSLSPDMNTYITGSVDKTAKLWDVREETHKQMFFGHEMDVNSVCYHPSGNGFASASEDQTARLYDIRADQQIALYEPPQKNTGFTSCALSTSGRYLLCSGIEGNIHSFDTMKVCHNGMLQGHENRITCISLSPNGMCLASTSWDQQVRLWL

SEQ ID NO: 7514 - protein, 285 aa, Halocynthia roretzi
AKIYAMHWGTDSRNLVSASQDGKLIVWDSYTTNKVHAIPLRSSWVMTCAYAPSGSFVACGGLDNICSIYSLKTREGNVKVSRELPGHTGYLSCCRFLDDSRIVTSSGDMSCALWIIETGQQTTAYIGHTGDVMSLSVSEDKNTFISGACDASAKLWDIRDGMCCQTFIGHESDINAVSFFPNNMAFGTGSDDATCRLFDIRADQELIVYQHDNIICGITSVSFSKSGRLLLAGYDDFNCNVWDSMKGDRAGVLAGHDNRVSCLGITSDGMAVATGSWDSFLKVWN

SEQ ID NO: 7515 - protein, 340 aa, Danio rerio
MSELDQLRQEAEQLKNQIRDARKACADATLSQITANIDPVGRIQMRTRRTLRGHLAKIYAMHWGTDSRLLVSASQDGKLIIWDSYTTNKVHAIPLRSSWVMTCAYAPSGNYVACGGLDNICSIYSLKTREGNVRVSRELAGHTGYLSCCRFLDDNQIVTSSGDTTCALWDIETGQQTTTFAGHTGDVMSLSLAPDTRLFVSGACDASAKLWDIREGMCRQTFTGHESDINAICFFPNGNAFATGSDDATCRLFDLRADQELMVYSHDNIICGITSVAFSKSGRLLLAGYDDFNCNVWDTLKADRAGVLAGHDNRVSCLGVTDDGMAVATGSWDSFLKIWN

SEQ ID NO: 7516 - protein, 340 aa, Oryzias latipes
MSELDQLRQEAEQLKNQIRDARKACADATLSQITANIDPVGRIQMRTRRTLRGHLAKIYAMHWGTDSRLLVSASQDGKLIIWDSYTTNKVHAIPLRSSWVMTCAYAPSGNYVACGGLDNICSIYNLKTREGNVRVSRELAGHTGYLSCCRFLDDNQIVTSSGDTSCALWDIETGQQTTTFAGHTGDVMSLSLAPDTRLFVSGACDASAKLWDIREGMCRQTFTGHESDINAICFFPNGNAFATGSDDATCRLFDLRADQELMIYSHDNIICGITSVAFSKSGRLLLAGYDDFNCNVWDTLKADRAGVLAGHDNRVSCLGVTDDGMAVATGSWDSFLKIWN

SEQ ID NO: 7517 - protein, 342 aa, Oryzias latipes
MAAEKAEMDALKKECDALRTQIEAARKAANDGSMSAAAGGVASVGRVQLKLRKNLKGHLAKIYAMHWSADSRSMVSASQDGKLLVWDTFTGNKLVAVPLKSAWVMSVDFAPSGNLVASGGLDNICTVYNIKAASPKTLRELDAHTGYLSCCRFLSDSEILTASGDTTCCLWDLETGKQKIIFTNHIGDCMSLALSPDMNYFISGACDSLAKLWDVREGACKQTFSGHTSDINAIAFFPSGNAVITGSDDCSCKMYDLRADQEVLDYTDSSLNAGVTSLALSNSGRLIFAGYDDFNCHIWDSLKGEKVGVLSGHDNRVSCTGVPEDGMGVCTGSWDSFLKLWN

SEQ ID NO: 7518 - protein, 340 aa, Ambystoma tigrinum
MSELEQLRQEAEQLKNQIRDARKVCADATLAQITANIDPVGRIQMRTRRTLRGHLAKIYAMHWGTDSRLLVSASQDGKLIIWDSYTTNKVHAIPLRSSWVMTCAYAPSGNYVACGGLDNICSIYNLKTREGNVRVSRELAGHTGYLSCCRFIDDNQIITSSGDTTCALWDIETGQQTTTFAGHTGDVMSLSLAPDSRCFVSGACDASAKLWDVREGMCRQTFTGHESDINAICFFPNGNAFATGSDDATCRLFDLRADQELMVYSHDNIICGITSVAFSKSGRLLLAGYDDFNCNVWDTLKADRAGVLAGHDNRVSCLGVTDDGMAVATGSWDSFLKIWN

SEQ ID NO: 7519 - protein, 340 aa, Ambystoma tigrinum
MGGMEQLRQEAEQLKKQIAEARKVCADTTLAQITAGMEVVGRIQMRTRRTLRGHLAKIYAMHWSNDSRLLVSASQDGKLIVWDTYSTNKVHAIPLRSSWVMTCSYAPSGNFVACGGLDNMCSIYNLKTREGNVKVSRELAAHTGYLSCCRFLDDNQIVTSSGDTTCALWDIETGTQKTVFMGHTGDCMSLAVSPDFRIFVSGACDATAKLWDIREGTCRQTFTGHESDINAICFFPNGEAVCTGSDDATCRLFDLRADQELTVYSHESIICGITSVAFSRSGRLLLAGYDDFNCNMWDSMKGERVGVLSGHDNRVSCLGVTTDGMAAATGSWDSFLKIWN

SEQ ID NO: 7520 - protein, 353 aa, Ambystoma tigrinum
MATEGLHENETLTSLKNEADSLKGKLEEERAKLHDVELHQVADRVESLGQFVMKTRRTLKGHGNKVLCMDWCKDKRRIVSSSQDGKVIVWDAFTTNKEHAVTMPCTWVMACAYAPSGCAIACGGLDNKCSVYPLTFDKNENMASKKKSVAMHTNYLSACSFTNSDMQILTASGDGTCALWDVESGQLLQSFHGHGADVLCLDLAPSETGNTFVSGGCDKKAMVWDMRSGQCIQSFETHESDINSVRYYPSGDAFASGSDDATCRLFDLRADREVAIYTKESIIFGASSVDFSLSGRLLFAGYNDYTINVWDVLKGTRVSILFGHENRVSTLRVSPDGTAFCSGSWDHTLRIWA

SEQ ID NO: 7521 - protein, 340 aa, Xenopus laevis
MSELDQLRQEAEQLKNQIRDARKACADATLAQITANIDPVGRIQMRTRRTLRGHLAKIYAMHWGTDSRLLVSASQDGKLIIWDSYTTNKVHAIPLRSSWVMTCAYAPSGNYVACGGLDNICPIYNLKTREGNVRVSRELAGHTGYLSCCRFLDDNQIITSSGDTTCALWDIETGQQTTTFTGHTGDVMSLSLAPDSRCFVSGACDASAKLWDVREGMCRQTFTGHESDINAICFFPNGNAFATGSDDATCRLFDLRADQELMVYSHDNIICGITSVAFSKSGRLLLAGYDDFNCNVWDTLKADRAGVLAGHDNRVSCLGVTDDGMAVATGSWDSFLKIWN

SEQ ID NO: 7522 - protein, 410 aa, Gallus gallus
MVLSQRQRDELNRAIADYLRSNGYEEAYSVFKKEAELDVNEELDKKYAGLLEKKWTSVIRLQKKVMELESKLNEAKEEFTSGGPLGQKRDPKEWIPRPPEKYALSGHRSPVTRVIFHPVFSVMVSASEDATIKVWDYETGDFERTLKGHTDSVQDISFDHTGKLLASCSADMTIKLWDFQGFECIRTMHGHDHNVSSVAIMPNGDHIVSASRDKTIKMWEVQTGYCVKTFTGHREWVRMVRPNQDGTLIASCSNDQTVRVWVVATKECKAELREHEHVVECISWAPESSYSTISEATGSETKKSGKPGPFLLSGSRDKTIKMWDISTGMCLMTLVGHDNWVRGVLFHSGGKFILSCADDKTLRVWDFKNKRCMKTLNAHEHFVTSLDFHKTAPYVVTGSVDQTVKVWECR

SEQ ID NO: 7523 - protein, 309 aa, Macaca fascicularis
MITNNIDPVGRIQMRTRRTLRGHLAKIYAMHWGTDSRLLVSASQDGKLIIWDSYTANKVHAIPLRSSWVMTCAYAPSGNYVACGGLDNICSIYNLKTREGNVRVSRELAGHTGYLSCCRFLDDNQIVTSSGDTTCALWDIETGQQTTTFTGHTGDVMSLSLAPDTRLFVSGACDASAKLWDVREGMCRQTFTGHESDINAICFFPNGNAFATGSDDATCRLFDLRADQELMTYSHDNIICGITSVSFSKSGRLLLAGYDDFNCNVWDALKADRAGVLAGHDNRVSCLGVTDDGMAVATGSWDSFLKIWN

SEQ ID NO: 7524 - protein, 296 aa, Macaca fascicularis
MRTRRTLRGHLAKIYAMHWGTDSRLLVSASQDGKLIIWDSYTTNKVHAIPLRSSWVMTCAYAPSGNYVACGGLDNICSIYNLKTREGNVRVSRELAGHTGYLSCCRFLDDNQIVTSSGDTTCALWDIETGQQTTTFTGHTGDVMSLSLAPDTRLFVSGACDASAKLWDVREGMCRQTFTGHESDINAICFFPNGNAFATGSDDATCRLFDLRADQELMTYSHDNIICGITSVSFSKSGRLLLAGYDDFNCNVWDALKADRAGVLAGHDNRVSCLGVTDDGMAVATGSWDSFLKIWN

SEQ ID NO: 7525 - protein, 276 aa, Macaca fascicularis
MITNNIDPVGRIQMRTRRTLRGHLAKIYAMHWGTDSRLLVSASQDGKLIIWDSYTTNKVHAIPLRSSWVMTCAYAPSGNYVACGGLDNICSIYNLKTREGNVRVSRELAGHTGYLSCCRFLDDNQIVTSSGDTTCALWDIETGQQTTTFTGHTGDVMSLSLAPDTRLFVSGACDASAKLWDVREGMCRQTFTGHESDINAICFFPNGNAFATGSDDATCRLFDLRADQELMTYSHDNIICGITSVSFSKSGRLLLAGYDDFNCNVWDALKADTRKK

SEQ ID NO: 7526 - protein, 340 aa, Homo sapiens [sequence omitted]

SEQ ID NO: 7527 - protein, 340 aa, Homo sapiens [sequence omitted]

SEQ ID NO: 7528 - protein, 340 aa, Homo sapiens
  unsure (1)..(340): unsure at all Xaa locations
MSELEQLRQEAEQLRNQIRDARKACGDSTLTQITAGLDPVGRIQMRTRRTLRGHLAKIYAMHWGTDSRLLVSASQDGKLIIWDSYTTNKVHAIPLRSSWVMTCAYAXSGNFVACGGLDNICSIYSLKTREGNVRVSRELPGHTGYLSCCRFLDDNQIITSSGDTTCALWDIETGQQTVGFAGHSGDVMSLSLAPNGRTFVSGACDASIKLWDVRDSMCRQTFIGHESDINAVAFFPNGYAFTTGSDDATCRLFDLRADQELLMYSHDNIICGITSVAFSRSGRLLLAGYDDFNCNIWDAMKGDRAGVLAGHDNRVSCLGVTDDGMAVATGSWDSFLKIWN

SEQ ID NO: 7529 - protein, 340 aa, Homo sapiens
MSELEQLRQEAEQLRNQIQDARKACNDATLVQITSNMDSVGRIQMRTRRTLRGHLAKIYAMHWGYDSRLLVSASQDGKLIIWDSYTTNKMHAIPLRSSWVMTCAYAPSGNYVACGGLDNICSIYNLKTREGNVRVSRELPGHTGYLSCCRFLDDSQIVTSSGDTTCALWDIETAQQTTTFTGHSGDVMSLSLSPDMRTFVSGACDASSKLWDIRDGMCRQSFTGHVSDINAVSFFPNGYAFATGSDDATCRLFDLRADQELLLYSHDNIICGITSVAFSKSGRLLLAGYDDFNCNVWDTLKGDRAGVLAGHDNRVSCLGVTDDGMAVATGSWDSFLRIWN

SEQ ID NO: 7530 - protein, 353 aa, Homo sapiens
MATEGLHENETLASLKSEAESLKGKLEEERAKLHDVELHQVAERVEALGQFVMKTRRTLKGHGNKVLCMDWCKDKRRIVSSSQDGKVIVWDSFTTNKEHAVTMPCTWVMACAYAPSGCAIACGGLDNKCSVYPLTFDKNENMAAKKKSVAMHTNYLSACSFTNSDMQILTASGDGTCALWDVESGQLLQSFHGHGADVLCLDLAPSETGNTFVSGGCDKKAMVWDMRSGQCVQAFETHESDINSVRYYPSGDAFASGSDDATCRLYDLRADREVAIYSKESIIFGASSVDFSLSGRLLFAGYNDYTINVWDVLKGSRVSILFGHENRVSTLRVSPDGTAFCSGSWDHTLRVWA

SEQ ID NO: 7531 - protein, 395 aa, Homo sapiens
MCDQTFLVNVFGSCDKCFKQRALRPVFKKSQQLSYCSTCAEIMATEGLHENETLASLKSEAESLKGKLEEERAKLHDVELHQVAERVEALGQFVMKTRRTLKGHGNKVLCMDWCKDKRRIVSSSQDGKVIVWDSFTTNKEHAVTMPCTWVMACAYAPSGCAIACGGLDNKCSVYPLTFDKNENMAAKKKSVAMHTNYLSACSFTNSDMQILTASGDGTCALWDVESGQLLQSFHGHGADVLCLDLAPSETGNTFVSGGCDKKAMVWDMRSGQCVQAFETHESDINSVRYYPSGDAFASGSDDATCRLYDLRADREVAIYSKESIIFGASSVDFSLSGRLLFAGYNDYTINVWDVLKGSRVSILFGHENRVSTLRVSPDGTAFCSGSWDHTLRVWA

SEQ ID NO: 7532 - protein, 247 aa, Homo sapiens
PLRSSWVMTCAYAPSGNYVACGGLDNICSIYNLKTREGNVRVSRELAGHTGYLSCCRFLDDNQIVTSSGDTTCALWDIETGQQTTTFTGHTGDVMSLSLAPDTRLFVSGACDASAKLWDVREGMCRQTFTGHESDINAICFFPNGNAFATGSDDATCRLFDLRADQELMTYSHDNIICGITSVSFSKSGRLLLAGYDDFNCNVWDALKADRAGVLAGHDNRVSCLGVTDDGMAVATGSWDSFLKIWN

SEQ ID NO: 7533 - protein, 297 aa, Homo sapiens
MGEMEQLRQEAEQLKKQIADARKACADVTLAELVSGLEVVGRVQMRTRRTLRGHLAKIYAMHWATDSKLLVSASQDGKLIVWDSYTTNKVHAIPLRSSWVMTCAYAPSGNFVACGGLDNMCSIYNLKSREGNVKVSRELSAHTGYLSCCRFLDDNNIVTSSGDTTCALWDIETGQQKTVFVGHTGDCMSLAVSPDFNLFISGACDASAKLWDVREGTCRQTFTGHESDINAICFFSLSGRLLFAGYDDFNCNVWDSMKSERVGILSGHDNRVSCLGVTADGMAVATGSWDSFLKIWN

SEQ ID NO: 7534 - protein, 207 aa, Homo sapiens
RVSRELAGHTGYLSCCRFLDDNQIVTSSGDTTCALWDIETGQQTTTFTGHTGDVMSLSLAPDTRLFVSGACDASAKLWDVREGMCRQTFTGHESDINAICFFPNGNAFATGSDDATCRLFDLRADQELMTYSHDNIICGITSVSFSKSGRLLLAGYDDFNCNVWDALKADRAGVLAGHDNRVSCLGVTDDGMAVATGSWDSFLKIWN

SEQ ID NO: 7535 - protein, 283 aa, Homo sapiens
MATEGLHENETLASLKSEAESLKGKLEEERAKLHDVELHQVAERVEALGQFVMKTRRTLKGHGNKVLCMDWCKDKRRIVSSSQDGKVIVWDSFTTNKILTASGDGTCALWDVESGQLLQSFHGHGADVLCLDLAPSETGNTFVSGGCDKKAMVWDMRSGQCVQAFETHESDINSVRYYPSGDAFASGSDDATCRLYDLRADREVAIYSKESIIFGASSVDFSLSGRLLFAGYNDYTINVWDVLKGSRVSILFGHENRVSTLRVSPDGTAFCSGSWDHTLRVWA

SEQ ID NO: 7536 - protein, 340 aa, Canis familiaris
MGEMEQLRQEAEQLKKQIADARKACADTTLAELVSGLEVVGRVQMRTRRTLRGHLAKIYAMHWATDSKLLVSASQDGKLIVWDTYTTNKVHAIPLRSSWVMTCAYAPSGNFVACGGLDNMCSIYSLKSREGNVKVSRELSAHTGYLSCCRFLDDNNIVTSSGDTTCALWDIETGQQKTVFVGHTGDCMSLAVSPDFKLFISGACDASAKLWDVREGTCRQTFTGHESDINAICFFPNGEAICTGSDDASCRLFDLRADQELTAYSDESIICGITSVAFSLSGRLLFAGYDDFNCNIWDSMKGERVGILSGHDNRVSCLGVTADGMAVATGSWDSFLKVWN

SEQ ID NO: 7537 - protein, 410 aa, Sus scrofa
MVLSQRQRDELNRAIADYLRSNGYEEAYSVFKKEAELDMNEELDKKYAGLLEKKWTSVIRLQKKVMELESKLNEAKEEFTSGGPLGQKRDPKEWIPRPPEKYALSGHRSPVTRVIFHPVFSVMVSASEDATIKVWDYETGDFERTLKGHTDSVQDISFDHSGKLLASCSADMTIKLWDFQGFECIRTMHGHDHNVSSVAIMPNGDHIVSAARDKTIKMWEVQTGYCVKTFTGHREWVRMVRPNQDGTLIASCSNDQTVRVWVVATKECKAELREHEHVVECISWAPESSYSSISEATGSETKKSGKPGPFLLSGSRDKTIKMWDVSTGMCLMTLVGHDNWVRGVLFHSGGKFILSCADDKTLRVWDYKNKRCMKTLNAHEHFVTSLDFHKTAPYVVTGSVDQTVKVWECR

SEQ ID NO: 7538 - protein, 1073 aa, Cytophaga hutchinsonii
MKQRTFVLLFFILTLSSYAQTLKLETVIQKGHSASVKAVAVSPDGKILATGSRDKSVKLWDQQSGMEIRSLIGHDHTVNGLAFSPDGKLLATSSADGTARVWDILTGKEIFTSPKNSKYITDVAFNPDGKSFAYAGYPDSASIYAIPSGKLIKRLEVNADQGSGYGISLKYSNDGKWLAIGEDNKTANVYRTSDWHLAYTFKPAEGWCGGCGTYVEFSRDNKSLFKIAHNDKLSQYDLQTGSLIKTFGEPVDYLRGITLTKDGQHVIAASDSMLYNYTITSKTVVAYKLYLSETVNDIALSLDEKEILVASDNMTAWALEAASGKVIRTYQGALQEQDKGGLNYNADNYWEYNIARYLRLKNELLLTKDDNNFITGKTGVNAIQWNISTGAPNKLYEGHTKAVISMDQSADGSILATADGAGEVFLWNTKTGALINRIKPHTEPIFDVSLSRDGKYVATGSWDASIEVYDVQTGEVSSDMYLKENSCYSISFTPNGLYLLCGRLDKSLELREPDSKKVVLSFIGHTDVVSSIAFGADPNKALTASWDGTARIWDVTTGMMLQKFKGARGMLHSAIYSTDSKKIITGGDDRIIRIWDIQSGQVLKTLNGHQSEITSLSLSKDGKMLVSYSTDGVVKFWNLESGLEFYEHVHISSREWMARTPQGYFSATEQARADIHFVKGMDVYAPDQFFEYYRPDLIQQIFLNRGSSPTGMQNVENSLQLSPPPLIKLACIPNADGLQATLNIKVMDEGGGLSEIRLAHNGKNMAVALDPKKVVEGKGNSYIYSVPVSLVRGTNQFSGIAVSKGKIESAASLVSVVSDKAPSAAVCHVFAIGIDTYKNPAYTLNYAREDAEAFAESVKRNGANLYQKVIVHGLYDAAATRQNVLDTLKSLEAHIALNDVFIFYYAGHGSMVDQNFYFIPTECTSMYQATANNALSAETIQAGFKNIKALKQIIIMDACQSGGSVEVLAMRGANEEKAFAQLSRGAGIHVMASAGSEQNAKEILELKHGLFTYVLLEALNGKADGAPKDGKITIYELKSYLDDQVPELNSKYSGKIQFPYTFSRGSDFPIVLE

SEQ ID NO: 7539 - protein, 340 aa, Bos taurus
  unsure (1)..(340): unsure at all Xaa locations
XSELDQLRQEAEQLKNQIRDARKACADATLSQITNNIDPVGRIQMRTRRTLRGHLAKIYAMHWGTDSRLLLSASQDGKLIIWDSYTTNKVHAIPLRSSWVMTCAYAPSGNYVACGGLDNICSIYNLKTREGNVRVSRELAGHTGYLSCCRFLDDNQIVTSSGDTTCALWDIETGQQTTTFTGHTGDVMSLSLAPDTRLFVSGACDASAKLWDVREGMCRQTFTGHESDINAICFFPNGNAFATGSDDATCRLFDLRADQELMTYSHDNIICGITSVSFSKSGRLLLAGYDDFNCNVWDALKADRAGVLAGHDNRVSCLGVTDDGMAVATGSWDSFLKIWN

SEQ ID NO: 7540 - protein, 340 aa, Bos taurus
MSELDQLRQEAEQLKNQIRDARKACADATLSQITNNIDPVGRIQMRTRRTLRGHLAKIYAMHWGTDSRLLLSASQDGKLIIWDSYTTNKVHAIPLRSSWVMTCAYAPSGNYVACGGLDNICSIYNLKTREGNVRVSRELAGHTGYLSCCRFLDDNQIVTSSGDTTCALWDIETGQQTTTFTGHTGDVMSLSLAPDTRLFVSGACDASAKLWDVREGMCRQTFTGHESDINAICFFPNGNAFATGSDDATCRLFDLRADQELMTYSHDNIICGITSVSFSKSGRLLLAGYDDFNCNVWDALKADRAGVLAGHDNRVSCLGVTDDGMAVATGSWDSFLKIWN

SEQ ID NO: 7541 - protein, 326 aa, Bos taurus
RNQIRDARKACGDSTLTQITAGLDPVGRIQMRTRRTLRGHLAKIYAMHWGTDSRLLVSASQDGKLIIWDSYTTNKVHAIPLRSSWVMTCAYAPSGNFVACGGLDNICSIYSLKTREGNVRVSRELPGHTGYLSCCRFLDDNQIITSSGDTTCALWDIETGQQTVGFAGHSGDVMSLSLAPDGRTFVSGACDASIKLWDVRDSMCRQTFIGHESDINAVAFFPNGYAFTTGSDDATCRLFDLRADQELLMYSHDNIICGITSVAFSRSGRLLLAGYDDFNCNIWDAMKGDRAGVLAGHDNRVSCLGVTDDGMAVATGSWDSFLKIWN

SEQ ID NO: 7542 - protein, 215 aa, Bos taurus
TCAYAPSGNFVACGGLDNICSIYSLKTREGNVRVSRELPGHTGYLSCCRFLDDNQIITSSGDTTCALWDIETGQQTVGFAGHSGDVMSLSLAPDGRTFVSGACDASIKLWDVRDSMCRQTFIGHESDINAVAFFPNGYAFTTGSDDATCRLFDLRADQELLMYSHDNIICGITSVAFSRSGRLVLAGYDDFNCNIWDAMKGDRAGVLAGHDNRVS

SEQ ID NO: 7543 - protein, 526 aa, Arabidopsis thaliana
MGHGGEGMSLEFTPTWVVAGVCTVIVAISLAVERLLHYFGTVLKKKKQKPLYEALQKVKEELMLLGFISLLLTVFQGLISKFCVKENVLMHMLPCSLDSRREAGASEHKNVTAKEHFQTFLPIVGTTRRLLAEHAAVQVGYCSEKGKVPLLSLEALHHLHIFIFVLAISHVTFCVLTVIFGSTRIHQWKKWEDSIADEKFDPETALRKRRVTHVHNHAFIKEHFLGIGKDSVILGWTQSFLKQFYDSVTKSDYVTLRLGFIMTHCKGNPKLNFHKYMMRALEDDFKQVVGISWYLWIFVVIFLLLNVNGWHTYFWIAFIPFALLLAVGTKLEHVIAQLAHEVAEKHVAIEGDLVVKPSDEHFWFSKPQIVLYLIHFILFQNAFEIAFFFWIWVTYGFDSCIMGQVRYIVPRLVIGVFIQVLCSYSTLPLYAIVSQMGSSFKKAIFEENVQVGLVGWAQKVKQKRDLKAAASNGDEGSSQAGPGPDSGSGSAPAAGPGAGFAGIQLSRVTRNNAGDTNNEITPDHNN

SEQ ID NO: 7544 - protein, 496 aa, Arabidopsis thaliana
MAGGGTTLEYTPTWVVALVCSVIVSISFAVERLIHRAGKHFKNNDQKQLFGALQKIKEELMLVGFISLLLSVGQSKIAKICISKELSEKFLPCTKPAGAEKSLKDSSHFQFSFTGRHLLAGDAPAGDYCSLKGKVPIMSLSALHELHIFIFVLAVAHIIFCLLTIVFGTMKIKQWKKWEDKVLEKDFDTDQSIKKFTHVQEHEFIRSRFLGVGKADASLGWVQSFMKQFLASVNESDYITMRLGFVTTHCKTNPKFNFHKYLMRALNSDFKKVVGISWYLWVFVVLFLLLNIVAWHVYFWLAFIPLILLLAVGTKLEHIITDLAHEVAEKHIAVEGDLVVRPSDDLFWFQSPRLVLFLIHFILFQNSFEIAYFFFILFQFGWDSCIMDHVKFVIPRLVIGVIIQLLCSYSTLPLYALVTQMGSSFKGAIFNEQTQEHLVGWAKMAKRGVKKGATQVGTSHDATSPRPSIQLNSLLGKGSSQQNQNPKEKSEIAHHD

SEQ ID NO: 7545 - protein, 478 aa, Arabidopsis thaliana
MAEARSGSLEYTPTWVVAFICFIIVLLSLLAERGLHHLGKCLKRRQQDALFEALQKLKEELMLLGFISLMLTVSQAAIRHICVPPALVNNMFPCKKPLEEHHAPKSSHSIINNARHLLSTGESPDHCAAKGQVPLVSVEALHQLHIFIFVLAVFHVIFCASTMVLGGARIQQWKHWEDWFKKRPSQKGTTRRGHHAHAHELFSANHEFFEMHAGGFWRRSVVISWVRSFFKQFYGSVTKSEYIALRQAFIMSHCRTNPSFDFHKYMLRTLEIDFKKVVSISWYLWLFVVVFLLLNVGGWNTYFWLSFLPLILLLMVGAKLEYIISSLALDVSEKRSRAEEAVITPSDELFWFHRPGIVLQLIHFILFQNSFEIAFFFWILFTYGIHSCIMEKLGYLIPRLVMGVLVQVLCSYSTLPLYALVTQMGSKFKKGIFDNVVQSTLEGWLEDTRNRGESTSEAHRIEMQPTTPESYNVQSENP

SEQ ID NO: 7546 - protein, 429 aa, Arabidopsis thaliana
MAEARSGSLEYTPTWVVAFICFIIVLLSLLAERGLHHLGKCLKRRQQDALFEALQKLKEELMLLGFISLMLTVSQAAIRHICVPPALGQVPLVSVEALHQLHIFIFVLAVFHVIFCASTMVLGGARIQQWKHWEDWFKKRPSQKGERDSTILFSANHEFFEMHAGGFWRRSVVISWVRSFFKQFYGSVTKSEYIALRQAFIMSHCRTNPSFDFHKYMLRTLEIDFKKVVSISWYLWLFVVVFLLLNVGGWNTYFWLSFLPLILLLMVGAKLEYIISSLALDVSEKRSRAEEAVITPSDELFWFHRPGIVLQLIHFILFQNSFEIAFFFWILFTYGIHSCIMEKLGYLIPRLVMGVLVQVLCSYSTLPLYALVTQMGSKFKKGIFDNVVQSTLEGWLEDTRNRGESTSEAHRIEMQPTTPESYNVQSENP

SEQ ID NO: 7547 - protein, 555 aa, Oryza sativa (indica cultivar-group)
MAGGGGGRALPETPTWAVAVVCAVIVLVSVAMEHGLHKLGHWFHKREKKAMGEALEKIKAELMLLGFISLLLTVAQTPISKICIPESAANIMLPCKAGQDIVKGLKGKKDHRRRLLWYTGEEESHRRSLAGAAGEDYCAQSGKVALMSSGGMHQLHIFIFVLAVFHVTYCVITMALGRLKMKKWKKWELETNSLEYQFANDPSRFRFTHQTSFVKRHLGLSSTPGLRWIVAFFRQFFGSVTKVDYLTMRQGFINAHLSQNSKFDFHKYIKRSLEDDFKVVVGISLPLWFVAILVLFLDIQGFGTLIWISFVPLVILMLVGTKLEMVIMEMAQEIQDRATVIKGAPVVEPSNKYFWFNRPDWVLFFIHLILFQNAFQMAHFVWTLATPGLKKCFHENMGLSIMKVVVGIFIQFLCSYSTFPLYALVTQMGSNMKKTIFEEQTMKALMNWRKTAREKKKLRDADEFLAQMSGDTTPSRGSSPVHLLHKQRVRSEDPPSAPASPGFAGEARDMYPVPVAPVVRPHGFNRTDPDKRRAASSSAIQVDIADSDFSFSVQR

SEQ ID NO: 7548 - protein, 554 aa, Oryza sativa (indica cultivar-group)
MAGGGGGRALPETPTWAVAVVCAVIVLVSVAMEHGLHKLGHWFHKREKKAMGEALGKIKAELMLLGFISLLLTVAQTPISKICIPESAANIMLPCKAGQDIVKGLKGKKDHRRRLLWYTGEEESHRRSLAGAAGEDYCAQSGKVALMSSGGMHQLHIFIFVLAVFHVTYCVITMGLGRLKMKKWKKWESQTNSLEYQFAIDPSRFRFTHQTSFVKRHLGSFSSTPGLRWIVAFFRQFFGSVTKVDYLTMRQGFINAHLSQNSKFDFHKYIKRSLEDDFKVVVGISLPLWFVGILVLFLDIHGLGTLIWISFVPLIIVLLVGTKLEMVIMQMAQEIQDRATVIQGAPVVEPSNKYFWFNRPDWVLFFIHLTLFHNAFQMAHFVWTMATPGLKKCFHENIWLSIVEVIVGISLQVLCSYITFPLYALVTQMGSNMKKTIFEEQTMKALMNWRKKAMEKKKVRDADAFLAQMSVDFATPASSRSASPVHLLQDHRARLDDPPSPITVASPPAPEEDIYPVPAAAAFCQLLDDPPDRRWMASLSADIPDFDFSFSAQR

SEQ ID NO: 7549 - protein, 502 aa, Oryza sativa (japonica cultivar-group)
MARAEAAAALEFTPTWIVAAICSLIVLISLAAERCLHYLGKTLKRKNQKALFEALLKVKEELMLLGFISLLLTVSQGILQKTCVPPKWTNYLLPCRKMEDQSKQRGPSEAHFVAAGVLGHLGRRLLADGGTGADHCQNKGKVPLLSLEALHQLHIFIFVLAITHVIFSALTMLLGGAKIHQWKHWENDIQKDVAQNAPKKVTHVHQFEFIRERFKGIGKDSIILSWLHSFVKQFSGSVTKSDYITMRLGFIQTHCRANPKFDFHRYMVRALEADFKKVVGISWYLWIFVMIFLLLNVNGWHTYFWISFVPLLLLLAVGTKLEHVITQLAHEVAEKHSAIEGDLVVNPSDEHFWFGRPKVILYLIHFILFQNAFEIAFFFWILTTYGFNSCIMDHVPFILTRLIIGAIVQILCSYSTLPIYAIVTQMGSFFKKEIFDEHVQQGLVGWAQKAKKRKGLKESNGAMAGAGSTNGSSQPSSILQMVRRAAASEEGSSNGGDMRTNQ

SEQ ID NO: 7550 - protein, 217 aa, Linum usitatissimum
RIRARYPIIAAHLAPGSESRFDFQKYVNRSLEDDFKVVVGISPILWFFAVLFLLSNTHGWVAYLWLPFIPLIIILVVGTKLQVIITQLGLSIQDRGDVVKGAPVVQPGDDLFWFGRPRLVLFLIHFCLFQNAFQLAFFIWSVYEFGIKTCFHEKTEDIVRASGLVPNRDTSATQTTELSKGKLMMADTCLPTEDLVGMVVTAAHSGKRFFVDSIRYD

SEQ ID NO: 7551 - protein, 498 aa, Oryza sativa
  unsure (1)..(498): unsure at all Xaa locations
GGGEAPAITLEHTPTWIVSAVCFVIVIISLLFERLLHRLGKRLKKSRKKPLYEGLLKVKEELMLLGFISLLLNVFQGLTQKICVKASVMDHLQPCKLDXQRRQDGQDHRALGRRRRXRRLLAGGGAXXSDYCEKKGLVPILSVEAIHQLHIFIFVLAVSHVVLSAVTVLLGIAQTRKWQHWENKIQASDENGMMKERPQMIKHVQEFPFIKNHFKGHGKRWKTFGWLRSFLKQFYGSVTEEDYVTMRLGFIMKHCRGNPKFNFYKYMIRALEDDFKKVVGISWYLWAMLIIFLLLNVQGWYVYIWISAVPFVMLLVVGTKLEHIITELAHQVAEKHTAIEGELVVSPSDELFWFHRPKIVLLLIHIVLFQNAFEIAFFFWLLVTYGFQSCIMGNKGYVIARLVISVISQLKSGYSXLPLFASNLKMGTSFKKVIFDENVVEGLANWAQNARRRNARAARTQNNDSNVGDSPVDESNVGEVQMTSPPTKSVQQGTARLI

SEQ ID NO: 7552 - protein, 437 aa, Oryza sativa
  unsure (1)..(437): unsure at all Xaa locations
RRRRRMEESSITHTPTWVVAVVCFAIVSVSLAAERLLHHLGKFLKHKDQKALYSALERLKEELMLLGFISFVLSLSEGFIVGICVSENAMHLMLPCKKETYQLSEGVKLCKKKGEVPLXLSVEALHQLHIFIFILGLVHVVFCATTILLGGAKIRKWKLWETEIQQEMQQKCVYXLHLGVLHXNQQGEFVSERTKGLWMKLAVVSWIIAFFKQFHDSVSKSDYKALRSAFGLKHFPSHPSFNFYKYLIRALEHDFKRVVGISWYMWLFVILFLLLNINGWHTYFWLAFLPLFLLLVVGAKLEHIITRLAQEAAAVASLSHGTERTPYVKPSKEHFWFGRPEIVLNLIHFILFQNSFEIGFFIWVLVTFGFDSCIMEKKVYAISRLVIGVLIQMICSYVTLPLYAIVTHVGSRNKGERDGSIALLGLALYIARRRRRL

SEQ ID NO: 7553 - protein, 445 aa, Oryza sativa
  unsure (1)..(445): unsure at all Xaa locations
XALTPXTWVVAGVCFIIVAISLAAERLLHRLGKVLKFNGQEALFSALQRVKEELMLLGFISFLLSVFQKFINHICIPESAAHLMLPCITRETSETTEDASKLCKRKGEVPMLSEEALHQLHIFIFVLGIVHVVFCVTTLLLGGAKMKKWEKWEKEIXTRKNQGATKEGQXWMKFIVVRCAISFLKQFYGFLLVRPDYQVLRSAFVQRHYPKXPDFDFHKYMGRALEHDFKEVVGXISWVLWLFVIVFLLLNINGWHTYFWLSFLPLILLLIVGTKLELISTRLAQEAADCPDEATGNPWTKPCKEHFWFSKPRIVXHLIHFILFQNSFEMGFFFWVLATYGFDSCIMENKIYALPRLAIGIIVQVLCSYSTLPLYAIVTHMGGDIKLQAFGETVHVSVHSWATDGSSAAAAAAGPGGDRGDDVGRRAGTRRRHRRRRKAHGRRYX

SEQ ID NO: 7554 - protein, 251 aa, Triticum aestivum
MRLGFIMTHCRGNLKFDFHKYMLRVLESDFKKVVGISWYLWVFVVIFLLLNVNGWHTYFWIAFIPLILLLAVGTKLEHVIAQLAQDVAEKHSAVEGDLIVKPSDDHFWFGRPRIVLFLIHFILFQNAFEIAFFFWILTTYGFNSCIMGQVGFIVPRLVIGLIIQLLCSYSTLPLYAIVTQMGSFYKKEIFNEHVQQGVLGWAQKAKMKKGFKKSNGAAESTSPVGSAGPSAKVEMVRRPAGQGNDAGESIE

SEQ ID NO: 7555 - protein, 492 aa, Zea mays
MAAEGEAAALEFTPTWIVAAVCSLIVLLSLVAERCLHYLGKTLKRKNQKPLFEALLKVKEELMLLGFISLLLTVFQGMIRRTCIPERWTFHMLPCEKPDEKAGEAATMEHFVGTLGRIGRRLLQEGTAGAEQCQKKGKVPLLSLEAIHQLHIFIFVLAITHVIFSVTTMLLGGAQIHQWKQWENGIKKDAPGNGPKVTNVHHHEFIKKRFKGIGKDSIILSWLHSFGKQFYRSVSKSDYTTMRLGFIMTHCPGNPKFDFHRYMVRVLEADFKKVVGISWYLWVFVVIFLLLNVNGWHTYFWIAFLPLILLLAIGTKLEHVIAQLAHDVAEKHTAVEGDVIVKPSDEHFWFGKPRVILYLIHFILFQNAFEIAFFFWILSTYGFDSCIMGQVRFIVPRLVIGVVIQLLCSYSTLPLYAIVTQMGSCYKKEIFNEHVQQGVLGWAQKVKMKKGLKGAASASKDESITNADSAGPSVKIEMAKAGEDVEIVGNTG

SEQ ID NO: 7556 - protein, 492 aa, Zea mays; identical to SEQ ID NO: 7555

SEQ ID NO: 7557 - protein, 494 aa, Zea mays
MAAEGEAAALEFTPTWIVAAVCSLIVLLSLVAERCLHYLGKTLKRKNQKPLFEALLKVKEELMLLGFISLLLTVFQGMIRRTCIPERWTFHMLPCEKPDEKAGEAATMEHFVAVGTLGRIGRRLLQEGTAGAEQCQKKGKVPLLSLEAIHQLHIFIFVLAITHVIFSVTTMLLGGAQIHQWKQWENGIKKDAPGNGPKVTNVHHHEFIKKRFKGIGKDSIMLSWLHSFGKQFYRSVSKSDYTTMRLGFIMTHCPGNPKFDFHRYMVRVLEADFKKVVGISWYLWVFVVIFLLLNVNGWHTYFWIAFLPLILLLAIGTKLEHVIAQLAHDVAEKHTAVEGDVIVKPSDEHFWFGKPRIILYLIHFILFQNAFEIAFFFWILSTYGFDSCIMGQVRFIVPRLVIGVVIQLLCSYSTLPLYAIVTQMGSCYKKEIFNEHVQQGVLGWAQKVKMKKGLKGAASASKDESITNADSAGPSVKIEMAKAGEDVEIVGNTG

SEQ ID NO: 7558 - protein, 496 aa, Zea mays
MSEEATLEDTPTWIVASVCSVIVLISFVFERALHHLGKALERRRKTLYEALLKLKEELMLLGFVSLLLVVSQDLIQKICIDDSLMEHWMPCRGASATASAHYGVSSSSSSSAVGGGRRMLKGGGAAFGHCSSKGKVPLLSLHALEQVHIFIFVLAITQVVLSVATVLLGLLQMRIWMHWENTIQQEGSSAPKMIARVQKIRFIQDRCKGYEKAAWVIIWLRSFFKQFYGSVSNDDYIAMRLGFVMEHFRGHPKFNFYDYMIKALEKDFKRVVSIKWYYWIFVMIFLLLNVTGWHSYFWISLVPLALLLLIGTKLEHIINRLAYEVASKHAAGQGEGGIVVSPSDELFWFRSPRLVLVLIHFILFQNAFEFAYFFWTLAMFGANSCIMDSLGYSVSRIIICVVVQVLCSYSTLPLYAIVSHMGSSFKSAVFVDDVADNLRGWADGARRRVRRSATGVDASCLGTPAAAGRGWEGAAGWRLIAGRPSRPTQQPRSISF

SEQ ID NO: 7559 - protein, 496 aa, Zea mays; identical to SEQ ID NO: 7558

SEQ ID NO: 7560 - protein, 341 aa, Zea mays
MLLESVRIRQWKHWEDEIQKGATDNGPRKVTYVHQSEFIREHSKGIGRDTTMLSWLHSFLKQFYGSVTKSDYTTMRLGFITTHCRSNPKFDFHRYMMRALEADFKKVVGISWYLWIFVVVFMLLNINGWHTYFWISFIPLLLLLAVGTKLEHVITQLAQEVAEKHSAVEGDLVVNPSDDHFWFGRPKIVLYLIHFILFQNAFEIAFFFWILTTYGFNSCIMDHVPFIVPRLVVGAIIQLLCSYSTLPLYAIVTQMGTFFKKEIFDEHVQQSLLGWAQKAKKRKALRNNGNGSNGAAAGSSHPSATARLELMRRAVALEEGSAGGNGSEASAAELHDTGPKL

SEQ ID NO: 7561 - protein, 499 aa, Zea mays
MGKEATLAFTPTWVVAIVCLVIVSISLAAERSLHYLGKYLECKKQKALFSALQRLKEELMLLGFISFVLSLSQGFIVSICIPETSTDFMLPCNRGNSRVAEEGAKICNKKGDVPLLSLEALHQLHIFIFVLGLVHVVFCATTISFSGAKMRKWKHWETEIHREVHEKLQQEKNEGQGSSLSIVVLHREHQDEFVHKRTKGFWMKLAVASWITAFLKQFQDSVSKSDYEALRSAFVVEHYPEKPDIDFHKYMTRAVEYEFKRVVGISWYLWLFVILFLLLNINGWHTYFWLAFLPLFLLLIVGAKLEHIITRLAQEAAISLSNNTEEVPKIKPCKDHFWFHKPELVLHLIHFILFQNSFEISFFFWILVSEGFGSCMMERKPYVISRLVIGVIIEVICSYITLPLYAIVTHMTGQIKLHGFGSRVHESVHGWIGLRKKPFSFWKIPGGDPNADSGREADVTRRVAKERSGSSRSMPMAPADEIVTVDDVAVAAAAVGQGP

SEQ ID NO: 7562 - protein, 499 aa, Zea mays; identical to SEQ ID NO: 7561

SEQ ID NO: 7563 - protein, 498 aa, Zea mays
  unsure (1)..(498): unsure at all Xaa locations
MSEEATLEDTPTWIVASVCSVIVLISFVFERALHHLGKALERRRKTLYEALLKLKEELMLLGFVSLLLVVSQDLIQKICIDDSLMEHWMPCRGASATASAHYGVSSSSSSSAVGGGRRMLKGGGAAFGHCSSKGKVPLLSLHALEQVHIFIFVLAITQVVLSVATVLLGLLQMRIWMHWENTIQQEGSSAPKMIARVQKIRFIQDRCKGYEKAAWVIIWLRSFFKQFYGSVSNDDYIAMRLGFVMEHFRGHPKFNFYDYMIKALEKDFKRVVSIKWYYWIFVMIFLLLNVTGWHSYFWISLVPLALLLLIGTASDWDXKLEHIINRLAYEVASKHAAGQGEGGIVVSPSDELFWFRSPRLVLVLIHFILFQNAFEFAYFFWTLVMACMHACIMHALSVSIRRRVVVVVXVDPIWPLASDDLCGSIPESXSLXRVNCNAGDVRRQLLHHGQSRIQRXRESSYGTERVAVGNRKKXGAAGWRLIAGRPSRPTQQPRSISF

SEQ ID NO: 7564 - protein, 569 aa, Arabidopsis thaliana
MATRCFWCWTTLLFCSQLLTGFARASSAGGAKEKGLSQTPTWAVALVCTFFILVSVLLEKALHRVATWLWEKHKNSLLEALEKIKAELMILGFISLLLTFGEQYILKICIPEKAAASMLPCPAPSTHDQDKTHRRRLAAATTSSRCDEGHEPLIPATGLHQLHILLFFMAAFHILYSFITMMLGRLKIRGWKKWEQETCSHDYEFSIDPSRFRLTHETSFVRQHSSFWTKIPFFFYAGCFLQQFFRSVGRTDYLTLRHGFIAAHLAPGRKFDFQKYIKRSLEDDFKVVVGISPLLWASFVIFLLLNVNGWEALFWASILPVLIILAVSTKLQAILTRMALGITERHAVVQGIPLVHGSDKYFWFNRPQLLLHLLHFALFQNAFQLTYFFWVWYSFGLKSCFHTDFKLVIVKLSLGVGALILCSYITLPLYALVTQMGSNMKKAVFDEQMAKALKKWHMTVKKKKGKARKPPTETLGVSDTVSTSTSSFHASGATLLRSKTTGHSTASYMSNFEDQSMSDLEAEPLSPEPIEGHTLVRVGDQNTEIEYTGDISPGNQFSFVKNVPANDID

SEQ ID NO: 7565 - protein, 593 aa, Arabidopsis thaliana
MGIIDGSLLRRLICLCLWCLLGGGVTVVTAEDEKKVVHKQLNQTPTWAVAAVCTFFIVVSVLLEKLLHKVGKVLWDRHKTALLDALEKIKAELMVLGFISLLLTFGQTYILDICIPSHVARTMLPCPAPNLKKEDDDNGESHRRLLSFEHRFLSGGEASPTKCTKEGYVELISAEALHQLHILIFFLAIFHVLYSFLTMMLGRLKIRGWKHWENETSSHNYEFSTDTSRFRLTHETSFVRAHTSFWTRIPFFFYVGCFFRQFFRSVGRTDYLTLRNGFIAVHLAPGSQFNFQKYIKRSLEDDFKVVVGVSPVLWGSFVLFLLLNIDGFKMMFIGTAIPVIIILAVGTKLQAIMTRMALGITDRHAVVQGMPLVQGNDEYFWFGRPHLILHLMHFALFQNAFQITYFFWIWYSFGSDSCYHPNFKIALVKVAIALGVLCLCSYITLPLYALVTQMGSRMKKSVFDEQTSKALKKWRMAVKKKKGVKATTKRLGGDGSASPTASTVRSTSSVRSLQRYKTTPHSMRYEGLDPETSDLDTDNEALTPPKSPPSFELVVKVEPNKTNTGETSRDTETDSKEFSFVKPAPSNESSQDR

SEQ ID NO: 7566 - protein, 574 aa, Arabidopsis thaliana
MGIIDGSLLRRLICLCLWCLLGGGVTVVTAEDEKKVVHKQLNQTPTWAVAAVCTFFIVVSVLLEKLLHKVGKVLWDRHKTALLDALEKIKAELMVLGFISLLLTFGQTYILDICIPSHVARTMLPCPAPNLKKEDDDNGESHRRLLSFEHRFLSGGEASPTKCTKEGYVELISAEALHQLHILIFFLAIFHVLYSFLTMMLGRLKIRGWKHWENETSSHNYEFSTDTSRFRLTHETSFVRAHTSFWTRIPFFFYVGCFFRQFFRSVGRTDYLTLRNGFIAVHLAPGSQFNFQKYIKRSLEDDFKVVVGVSPVLWGSFVLFLLLNIDGTKLQAIMTRMALGITDRHAVVQGMPLVQGNDEYFWFGRPHLILHLMHFALFQNAFQITYFFWIWYSFGSDSCYHPNFKIALVKVAIALGVLCLCSYITLPLYALVTQMGSRMKKSVFDEQTSKALKKWRMAVKKKKGVKATTKRLGGDGSASPTASTVRSTSSVRSLQRYKTTPHSMRYEGLDPETSDLDTDNEALTPPKSPPSFELVVKVEPNKTNTGETSRDTETDSKEFSFVKPAPSNESSQDR

SEQ ID NO: 7567 - protein, 560 aa, Arabidopsis thaliana
MGIIDGSLLRRLICLCLWCLLGGGVTVVTAEDEKKVVHKQLNQTPTWAVAAVCTFFIVVSVLLEKLLHKVGKVLWDRHKTALLDALEKIKAELMVLGFISLLLTFGQTYILDICIPSHVARTMLPCPAPNLKKEDDDNGESHRRLLSFEHRFLSGGEASPTKCTKEGYVELISAEALHQLHILIFFLAIFHVLYSFLTMMLGRLKIRGWKHWENETSSHNYEFSTDTSRFRLTHETSFVRAHTSFWTRIPFFFYVGCFFRQFFRSVGRTDYLTLRNGFIAVHLAPGSQFNFQKYIKRSLEDDFKVVVGMMFIGTAIPVIIILAVGTKLQAIMTRMALGITDRHAVVQGMPLVQGNDEYFWFGRPHLILHLMHFALFQYSFGSDSCYHPNFKIALVKVAIALGVLCLCSYITLPLYALVTQMGSRMKKSVFDEQTSKALKKWRMAVKKKKGVKATTKRLGGDGSASPTASTVRSTSSVRSLQRYKTTPHSMRYEGLDPETSDLDTDNEALTPPKSPPSFELVVKVEPNKTNTGETSRDTETDSKEFSFVKPAPSNESSQDR

SEQ ID NO: 7568 - protein, 580 aa, Arabidopsis thaliana
MITRSRCRRSLLWFLVFHGGATATGAPSGGKELSQTPTWAVAVVCTFLILISHLLEKGLQRLANVCFLLLLLLFLRVFLFKHSLSETYEFVSSQWLWKKHKNSLLEALEKIKAELMILGFISLLLTFGEPYILKICVPRKAALSMLPCLSEDTVLFQKLAPSSLSRHLLAAGDTSINCKQGSEPLITLKGLHQLHILLFFLAIFHIVYSLITMMLSRLKIRGWKKWEQETLSNDYEFSIDHSRLRLTHETSFVREHTSFWTTTPFFFYVGCFFRQFFVSVERTDYLTLRHGFISAHLAPGRKFNFQRYIKRSLEDDFKLVVGISPVLWASFVIFLLFNVNGWRTLFWASIPPLLIILAVGTKLQAIMATMALEIVETHAVVQGMPLVQGSDRYFWFDCPQLLLHLIHFALFQNAFQITHFFWIWYSFGLKSCFHKDFNLVVSKLFLCLGALILCSYITLPLYALVTQMMKWCVEQMGSHMKKAVFDEQMAKALKKWHKDIKLKKGKARKLPSKTLGVSESFSLSSSSSATTLHRSKTTGHSSNIIYYKQEDEEDEMSDLEAGAEDAIDRIQQQEMQFHNS

SEQ ID NO: 7569 - protein, 501 aa, Arabidopsis thaliana
MAGGGGGSTSGEGPRELDQTPTWAVSTVCGVIILISIVLELMIHKIGEVFTERRKKALYEALQKIKNELMVLGFISLLLTFGQNYIASLCVASRYGHAMSFCGPYDGPSGESKKPKTTEHLERRVLADAAPAQCKKGYVPLISLNALHQVHIFIFFLAVFHVIYSAITMMLGRAKIRGWKVWEEEVINDHEMMNDPSRFRLTHETSFVREHVNPWAKNRFSFYVMCFFRQMLRSVRKSDYLTMRHGFISVHLAPGMKFNFQKYIKRSLEDDFKVVVGISPELWAFVMLFLLFDVHGWYVTAVITMIPPLLTLAIGTKLQAIISDMALEIQERHAVIQGMPLVNVSDRHFWFSRPALVLHIIHFILFQNAFEITYFFWIWYEFGLRSCFHHHFALIIIRVALGVGVQFLCSYITLPLYALVTQMGSTMKRSVFDDQTSKALKNWHKNAKKKSETPGQTQPPLPNLRPKTGGDIESASPANITASVDVKESDQSQSRDLLSGP

SEQ ID NO: 7570 - protein, 467 aa, Arabidopsis thaliana
MAGGGGGGGGEGPRQLDQTPTWAVSTVCGVIILISIILELIIHKVGEVFERKKKKALFEALEKIKNELMVLGFISLLLTFGQNYIASICVPSRYGHAMSFCGPYDGPSEDDRKKLKKTDHAMRILYSVQRRSLADAPPVNCKKDYVALISLNALHQVHIFIFFLAVFHVIYSAITMMLGRAKIRGWKVWEQEVIHEQEMMNDPSRFRLTHETSFVREHVNSWASNKFFFYVMCFFRQILRSVRKSDYLTMRHGFISVHLAPGMKFDFQKYIKRSLEDDFKVVVGIRPELWAFVMLFLLFDVHGWYVTAVITMIPPLLTLAIGTKLQAIISYMALEIQERHAVIQGMPVVNVSDQHFWFEKPDLVLHMIHFVLFQNAFEITYFFWIWYEFGLRSCFHHHFGLIIIRVCLGVGVQFLCSYITLPLYALVTQMGSTMKRSVFDEQTSKALEQWHKKARKKNENLYTIFGK

SEQ ID NO: 7571 - protein, 500 aa, Arabidopsis thaliana
MAGGGGGSTSGEGPRELDQTPTWAVSTVCGVIILISIVLELMIHKIGEVFTERRKKALYEALQKIKNELMVLGFISLLLTFGQNYIASLCVASRYGHAMSFCGPYDGPSGESKKPKTTEHLERRVLADAAPAQCKKGYVPLISLNALHQVHIFIFFLAVFHVIYSAITMMLGRAKIRGWKVWEEEVINDHEMMNDPSRFRLTHETSFVREHVNPWAKNRFSFYVMCFFRQMLRSVRKSDYLTMRHGFISVHLAPGMKFNFQKYIKRSLEDDFKVVVGISPELWAFVMLFLLFDVHGWYVTAVITMIPPLLTLAIGTKLQAIISDMALEIQERHAVIQGMPLVNVSDRHFWFSRPALVLHIIHFILFQNAFEITYFFWIWYEFGLRSCFHHHFALIIIRVALGVGVQFLCSYITLPLYALVTQMGSTMKRSVFDDQTSKALKNWHKNAKKKSETPGQTPPLPNLRPKTGGDIESASPANITASVDVKESDQSQSRDLLSGP

SEQ ID NO: 7572 - protein, 406 aa, Arabidopsis thaliana
HLLAAGDTSINCKQGSEPLITLKGLHQLHILLFFLAIFHIVYSLITMMLSRLKIRGWKKWEQETLSNDYEFSIDHSRLRLTHETSFVREHTSFWTTTPFFFYVGCFFRQFFVSVERTDYLTLRHGFISAHLAPGRKFNFQRYIKRSLEDDFKLVVGISPVLWASFVIFLLFNVNGWRTLFWASIPPLLIILAVGTKLQAIMATMALEIVETHAVVQGMPLVQGSDRYFWFDCPQLLLHLIHFALFQNAFQITHFFWIWYSFGLKSCFHKDFNLVVSKLFLCLGALILCSYITLPLYALVTQMGSHMKKAVFDEQMAKALKKWHKDIKLKKGKARKLPSKTLGVSESFSLSSSSSATTLHRSKTTGHSSNIIYYKQEDEEDEMSDLEAGAEDAIDRIQQQEMQFHNS

SEQ ID NO: 7573 - protein, 443 aa, Arabidopsis thaliana
MAGGGGGGGGEGPRQLDQTPTWAVSTVCGVIILISIILELIIHKVGEVFERKKKKALFEALEKIKNELMVLGFISLLLTFGQNYIASICVPSRYGHAMSFCGPYDGPSEDDRKKLKKTDHAMRILYSVQRRSLADAPPDYVALISLNALHQVHIFIFFLAVFHVIYSAITMMLGRAKIRGWKVWEQEVIHEQEMMNDPSRFRLTHETSFVREHVNSWASNKFFFYVMCFFRQILRSVRKSDYLTMRHGFISVHLAPGMKFDFQKYIKRSLEDDFKVVVGIRPELWAFVMLFLLFDVHGWYVTAVITMIPPLLTLAIGTKLQAIISYMALEIQERHAVIQGMPVVNVSDQHFWFEKPDLVLHMIHFVLFQYEFGLRSCFHHHFGLIIIRVCLGVGVQFLCSYITLPLYALVTQMGSTMKRSVFDEQTSKALEQWHKKARKKNEK

SEQ ID NO: 7574 - protein, 580 aa, Oryza sativa (japonica cultivar-group)
MSGSGGGGGGGAGGDGARALDQTPTWAVAAVCAVIVAASILLEGLLHHLGQWFSKRRKKALFDALEKVKSELMTLGFISLLLSVTGRYISRICIPVGAADTMLPCSLRRSSSEQEVPGGGGHGRRHLSGDPTNFKCAKGMVSLVSADGLHQLHIFVFFLAVFHVAFSAITMSLGRAKTRIWKEWEKETCSLTYEFSYDPSKFRLTHQTSFVRQHASCWSKSTILLYFVSFFRQFFRSVRRTDYLTLRHGFIAAHLSLGTRFNFRKYIKRSLEDDFKTVVGISAPLWASALAIMLFNVHGWHNLFWFSTIPLVVTLAVGTKLQAIIAMMAVEIKERHTVIQGMPVVKLSDEHFWFGKPRLVLHLIHFASFQNAFEITYFFWIWYEFGLRSCFHDNFELIIARVCLGVVVQFMCSYITLPLYALVSQMGSQMKRTIFDEQTAKALKKWHKAAVVKKKQQKGSSHEPGSETPGTETTTTTATATEESQRERDAAAMPVRHLHRYKTIAHVGATGTLSDSDCSDTDTPFASPTRLLIPPTKQRSLDAGRAEVRVDVDSTPTPTPPERHDSFSFPRLPAHNLQQK

SEQ ID NO: 7575 - protein, 555 aa, Oryza sativa (japonica cultivar-group)
MAGGGGGRALPETPTWAVAVVCAVIVLVSVAMEHGLHKLGHWFHKREKKAMGEALEKIKAELMLLGFISLLLTVAQTPISKICIPESAANIMLPCKAGQDIVKGLKGKKDHRRRLLWYTGEEESHRRSLAGAAGEDYCAQSGKVALMSSGGMHQLHIFIFVLAVFHVTYCVITMALGRLKMKKWKKWELETNSLEYQFANDPSRFRFTHQTSFVKRHLGLSSTPGLRWIVAFFRQFFGSVTKVDYLTMRQGFINAHLSQNSKFDFHKYIKRSLEDDFKVVVGISLPLWFVAILVLFLDIQGFGTLIWISFVPLVILMLVGTKLEMVIMEMAQEIQDRATVIKGAPVVEPSNKYFWFNRPDWVLFFIHLILFQNAFQMAHFVWTLATPGLKKCFHENMGLSIMKVVVGIFIQFLCSYSTFPLYALVTQMGSNMKKTIFEEQTMKALMNWRKTAREKKKLRDADEFLAQMSGDTTPSRGSSPVHLLHKQRVRSEDPPSAPASPGFAGEARDMYPVPVAPVVRPHGFNRMDPDKRRAASSSAIQVDIADSDFSFSVQR

SEQ ID NO: 7576 - protein, 583 aa, Oryza sativa (japonica cultivar-group)
MAGGGGGRALPETPTWAVAVVCAVIVLVSVAMEHGLHKLGHWFHKREKKAMGEALEKIKAELMLLGFISLLLTVAQTPISKICIPESAANIMLPCKAGQDIVKGLKGKKDHRRRLLWYTGEEESHRRSLAGAAGEDYCAQSGKVALMSSGGMHQLHIFIFVLAVFHVTYCVITMALGRLKMKKWKKWELETNSLEYQFANDPSRFRFTHQTSFVKRHLGLSSTPGLRWIVAFFRQFFGSVTKVDYLTMRQGFINAHLSQNSKFDFHKYIKRSLEDDFKVVVGISLPLWFVAILVLFLDIQGFGTLIWISFVPLVILMLVGTKLEMVIMEMAQEIQDRATVIKGAPVVEPSNKYFWFNRPDWVLFFIHLILFQNAFQMAHFVWTLATPGLKKCFHENMGLSIMKVVVGIFIQFLCSYSTFPLYALVTQVKPFRQKSLVNALGGLNSNVLNLSVCLQMGSNMKKTIFEEQTMKALMNWRKTAREKKKLRDADEFLAQMSGDTTPSRGSSPVHLLHKQRVRSEDPPSAPASPGFAGEARDMYPVPVAPVVRPHGFNRMDPDKRRAASSSAIQVDIADSDFSFSVQR

SEQ ID NO: 7577 - protein, 580 aa, Oryza sativa
MSGSGGGGGGGAGGDGARALDQTPTWAVAAVCAVIVAASILLEGLLHHLGQWFSKRRKKALFDALEKVKSELMTLGFISLLLSVTGRYISRICIPVGAADTMLPCSLRRSSSEQEVPGGGGHGRRHLSGDPTNFKCAKGMVSLVSADGLHQLHIFVFFLAVFHVAFSAITMSLGRAKTRIWKEWEKETCSLTYEFSYDPSKFRLTHQTSFVRQHASCWSKSTILLYFVSFFRQFFRSVRRTDYLTLRHGFIAAHLSLGTRFNFRKYIKRSLEDDFKTVVGISAPLWASALAIMLFNVHGWHNLFWFSTIPLVVTLAVGTKLQAIIAMMAVEIKERHTVIQGMPVVKLSDEHFWFGKPRLVLHLIHFASFQNAFEITYFFWIWYEFGLRSCFHDNFELIIARVCLGVVVQFMCSYITLPLYALVSQMGSQMKRTIFDEQTAKALKKWHKAAVVKKKQQKGSSHEPGSETPGTETTTTTATATEESQRERDAAAMPVRHLHRYKTIAHVGATGTLSDSDCSDTDTPFASPTRLLIPPTKQRSLDPGRAEVRVDVDSTPTPTPPERHDSFSFPRLPAHNLQSE

SEQ ID NO: 7578 - protein, 561 aa, Oryza sativa
MGGGGGGGGNTRELDQTPTWAVASVCGVIVLISILLEKGLHKIGEFFSHRKKKAMVEALEKVKTELMVLGFISLLLVFGQNYIIKICITEKAADTMLPCRLKASTIHAETGKGGEHGATPAGGEQGATPAGGEHEATPAEHFSLVGVGPPFTAAFSRPHHRLLAEAKMATKCPDGKVSLISINALHQLHIFIFFLAVFHVTYSAITMALGRAKIRGWKEWEKEAAGQDFEDGDDPTKFRFTHETSFVRQHMNVLNKTPASFYISNFFRQFFRSVRRADYCALRHSFVNVHLAPGSKFDFQKYIKRSLEDDFKVIVGISPPLWASALIFLLLNVSGLRTMLWISIMPVVTILSVGTKLQGIICRMAIDITERHAVIQGIPLVQVSDSYFWFSRPTFVLFLIHFTLFQNGFQIIYFLWILYEYGMDSCFNDSKEFVFARLCLGVVVQFLCSYVTLPLYALVSQMGSTMKQSIFDDQTSKALKNWRAGVKKKPAAASSSKHGDAGGDHAAASPHSGSPKGEAGGVALTQRKAGGGEAGGEQQAGGGSGSKKGEEGDYEFVKLEP

SEQ ID NO: 7579 - protein, 434 aa, Oryza sativa
  unsure (1)..(434): unsure at all Xaa locations
GGGGGGGNTRELDQTPTWAVASVCGVIVLISILLEKGLHKIGEFFSHRKKKAMVEALEKVKTELMVLGFISLLLVFGQNYIIKICITEKAADTMLPCRLKASTIHAETGKGXXTATPEGKVSLISINALHQLHIFIFFLAVFHVTYSAITMALGRAKIRGWKEWEKEAAGQDFEFANDPTKFRFTHETSFVRQHMNVLNKTPASFYIVNFFRQFFRSVRRADYCALRHSFVNVHLAPGSKFDFQKYIKRSLEDDFKVIVGISPPLWASALIFLLLNVSGLHTMLWISIMPVVTILSVGTKLQGIICRMAIDITERHAVIQGIPLVQVSDSYFWFSRPTFVLFLIHFTLFQNGFQIIYFLWILVTQSLLTEFLQFCFMKIFSRLIDLVVQFLCSYVTLPLYALVSQMGSTMKQSIFDDQTSKALKNWRAGVKKKX

SEQ ID NO: 7580 - protein, 555 aa, Oryza sativa; identical to SEQ ID NO: 7575

SEQ ID NO: 7581 - protein, 554 aa, Oryza sativa; identical to SEQ ID NO: 7548

SEQ ID NO: 7582 - protein, 515 aa, Zea mays
MGGGGGGGNSRELDQTPTWAVASVCGVIVLISILLEKGLHHVGEFFSHRKKKAMVEALEKVKAELMVLGFISLLLVFGQNYIIKVCISNHAANTMLPCKLEAAAVEGKDGHGKEAAAVVAGKKKVAVAVPGKKKKKAAAAADHLGGVVDWPPPYYAHNARMLAEASMATKCPEGKVPLISINALHQLHIFIFFLAVFHVSYSAITMALGRAKIRAWKEWEKEAAGQDYEFSHDPTRFRFTHETSFVRQHMNVLNKFPASFYISNFFRQFFRSVRQADYCALRHSFVNVHLAPGSKFDFQKYIKRSLEDDFKVIVGISPPLWASALIFLFLNVNGWHTMLWISIMPVVIILSVGTKLQGIICRMAIDITERHAVIQGIPMVQVSDSYFWFARPTFVLFLIHFTLFQNGFQIIYFLWILYEYGMDSCFNDSEEFVFARLCLGVVVQVLCSYVTLPLYALVSQMGSTMKQSIFDEQTSKALKNWRAGAKKKAPTGGSKHGGGGSPTAGGSPTKADGDA

SEQ ID NO: 7583 - protein, 515 aa, Zea mays; identical to SEQ ID NO: 7582

SEQ ID NO: 7584 - protein, 565 aa, Zea mays
MGGDGTRALDQTPTWAVAAVCAVIVAASILLEGFLHHLGQLLNKKRKKALFDALEKVKSELMTLGFISLLLTVTGRYIARICIPEGAANTMLPCRLSGHSVAEEPKGHGRRHLSEDPTNLFSCRKGMVSLVSADGMHQLHIFVFFLAVFHVTFSFFTMSLGRAKTRIWKVWEKETCSPQYNYLNDPSKFRLTHQTSFVRQHASCWSKSTITLYFVSFFRQFFRSVRKTDYFTLRHGFISAHLSPGTRFNFRKYIKRSLEDDFKTVVGISPPLWASALAVMLFNVHGWHNLFWFSAIPLVVILAVGTKLQAIIAMMAIEIAERHTVIQGMPVVKLSDDHFWFGKPRLVLHLIHFASFQNAFEITYFFWIWYEFGLRSCFHDNFEFIIARVCLGAIVQFMCSYITLPLYALVSQMGSEMKRTIFDEQTAKALKKWHKAVVKKKHHKDSSHNSSETPSTDTTGPAGEAGEWQRLHEVPVRHLHRYKTIAHVGGVRSPLSDPDYSDTDDTEPLSLQTRHLIPPAKQRSLDTERAEVRVNVVETAAAPSDVLQDSFSFPRLLPPRHVPDK

SEQ ID NO: 7585 - protein, 565 aa, Zea mays; identical to SEQ ID NO: 7584

SEQ ID NO: 7586 - protein, 361 aa, Zea mays
PRVRARMLAEASMATKCPEGKVPLISINALHQLHIFIFFLAVFHVSYSAITMALGRAKIRAWKEWEKEAAGQDYEFSHDPTRFRFTHETSFVRQHMNVLNKFPASFYISNFFRQFFRSVRQADYCALRHSFVNVHLAPGSKFDFQKYIKRSLEDDFKVIVGISPPLWASALIFLFLNVNGWHTMLWISIMPVVIILSVGTKLQGIICRMAIDITERHAVIQGIPMVQVSDSYFWFARPTFVLFLIHFTLFQNGFQIIYFLWILYEYGMDSCFNDSEEFVFARLCLGVVVQVLCSYVTLPLYALVSQMGSTMKQSIFDEQTSKALKNWRAGAKKKAPTGGSKHGGGGSPTAGGSPTKADGDA

SEQ ID NO: 7587 - protein, 563 aa, Zea mays
MAGGGGGRDLPSTPTWAVALVCAVIVLVSVAMEHGLHKLGHWFHTRQKKAMREALEKIKAELMLMGFISLLLAVGQTPISKICIPAKAGSIMLPCKPPKGAAAAADDDKSDGRRRLLWYPPYPGYDEPGHHRRFLAGAAPDDNYCSDQGKVSLISSAGVHQLHIFIFVLAVFHIVYSVATMALGRLKMRKWKKWESETNSLEYQYANDPSRFRFTHQTSFVKRHLGLSSTPGVRWVVAFFRQFFASVTKVDYLTMRQGFINYHLSPSTKFNFQQYIKRSLEDDFKVVVGISLPLWFVAIFTLLIDIKGFGTLVWISFVPLVILLLVGAKLEVVIMEMAKEIQDKATVIKGAPVVEPSDRFFWFNRPGWVLFLIHLTALPERLPDGAFRLDTAHPRPEEMLPREAGLSIMKVAVGLVLQVLCSYITFPLYALVTQMGSHMKKTIFEEQTAKAVMKWRKTAKDKVRQREAAGFLDVLTSADTTPSHSRATSPSRGNSPVHLLHKYRGRSEEPQSGPASPGRELGDMYPVADQHRLHRLDPERMRPASSTAVNIDIADADFSFSMR

SEQ ID NO: 7588 - protein, 576 aa, Zea mays
MLVASTGTGKGRHMAGGGGGRDLPSTPTWAVALVCAVIVLVSVAMEHGLHKLGHWFHTRQKKAMREALEKIKAELMLMGFISLLLAVGQTPISKICIPAKAGSIMLPCKPPKGAAAADDDDKSDGRRRLLWYPPYPGYDEPGHHRRFLAGAAPDDNYCSDQGKVSLISSAGVHQLHIFIFVLAAFHIVYSVATMALGRLKMRKWKKWESETNSLEYQYANDPSRFRFTHQTSFVKRHLGLSSTPGVRWVVAFFRQFFASVTKVDYLTMRQGFINYHLSPSTKFNFQQYIKRSLEDDFKVVVGISLPLWFVAIFTLLIDIKGFGTLVWISFVPLVILLLVGAKLEVVIMEMAKEIQDKATVIKGAPVVEPSDRFFWFNRPGWVLFLIHLTALPERLPDGAFRLDTAHPRPEEMLPREAGLSIMKVAVGLVLQVLCSYITFPLYALVTQMGSHMKKTIFEEQTAKAVMKWRKTAKDKVRQREAAGFLDVLTSADTTPSHSRATSPSRGNSPVHLLHKYRGRSEEPQSGPASPGRELGDMYPVADQHRLHRLDPERMRPASSTAVNIDIADADFSFSMR

SEQ ID NO: 7589 - protein, 394 aa, Cricetulus griseus
MGCLGNSKTEDQRNEEKAQREANKKIEKQLQKDKQVYRATHRLLLLGAGESGKSTIVKQMRILHVNGFNGEGGEEDPQAARSNSDGEKATKVQDIKNNLKEAIETIVAAMSNLVPPVELANPENQFRVDYILSVMNVPNFDFPPEFYEHAKALWEDEGVRACYERSNEYQLIDCAQYFLDKIDVVKQADYVPSDQDLLRCRVLTSGIFETKFQVDKVNFHMFDVGGQRDERRKWIQCFNDVTAIIFVVASSSYNMVIREDNQTNRLQEALNLFKSIWNNRWLRTISVILFLNKQDLLAEKVLAGKSKIEDYFPEFARYTTPEDATPEPGEDPRVTRAKYFIRDEFLRISTASGDGRHYCYPHFTCAVDTENIRRVFNDCRDIIQRMHLRQYELL

SEQ ID NO: 7590 - protein, 155 aa, Cricetulus griseus
KIIHQDGYSLEECLEFIAIIYGNTLQSILAIVRAMTTLNIQYGDSARQDDARKLMHMADTIEEGTMPKEMSDIIQRLWKDSGIQACFERASEYQLNDSAGYYLLDLERLVTPGYVPTEQDVLRSRVKTAGIIETQFSFKDLNFRMFDVGGQRSEP

SEQ ID NO: 7591 - protein, 354 aa, Cricetulus longicaudatus
MGCTLSAEERAALERSKAIEKNLKEDGISAAKDVKLLLLGAGESGKSTIVKQMKIIHEDGFSGEDVKQYKPVVYSNTIQSLAAIVRAMDTLGVEYGDKERKADSKMVCDVVSRMEDTEPFSAELLSAMMRLWGDSGIQECFNRSREYQLNDSAKYYLDSLDRIGAADYQPTEQDILRTRVKTTGIVETHFTFKNLHFRLFDVGGQRSERKKWIHCFEDVTAIIFCVALSGYDQVLHEDETTNRMHESLKLFDSICNNKWFTDTSIILFLNKKDIFEEKITRSPLTICFPEYTGPSAFTEAVAHIQGQYESKNKSAHKEIYTHFTCATDTNNIQFVFDAVTDVIIAKNLRGCGLY

SEQ ID NO: 7592 - protein, 394 aa, Cricetulus longicaudatus
MGCLGDSKTEDQRNEEKAQREANKKIEKQLQKDKQVYRATHRLLLLGAGESGKSTIVKQMRILHVNGFNGEGGEEDPQAARSNSDGEKATKVQDIKNNLKEAIETIVAAMSNLVPPVELANPENQFRVDYILSVMNVPNFDFPPEFYEHAKALWEDEGVRACYERSNEYQLIDCAQYFLDKIDVIKQADYVPSDQDLLRCRVLTSGIFETKFQVDKVNFHMFDVGGQRDERRKWIQCFNDVTAIIFVVASSSYNMVIREDNQTNRLQEALNLFKSIWNNRWLRTISVILFLNKQDLLAEKVLAGKSKIEDYFPEFARYTTPEDATPEPGEDPRVTRAKYFIRDEFLRISTASGDGRHYCYPHFTCAVDTENIRRVFNDCRDIIQRMHLRQYELL

SEQ ID NO: 7593 - protein, 354 aa, Mus musculus
MGSGISAEDKELARRSKELEKKLQEDADKEAKTVKLLLLGAGESGKSTIVKQMKIIHQDGYSPEECLEFKSVIYGNVLQSILAIIRAMSTLGIDYAEPSCADAGRQLNNLADSTEEGTMPPELVDVIRKLWKDGGVQACFDRAAEFQLNDSASYYLNQLDRITDPNYLPNEQDVLRSRVKTTGIIETKFSVKDLNFRMFDVGGQRSERKKWIHCFEGVTCIIFCAALSAYDMVLVEDDEVNRMHESLHLFNSICNHKFFAATSIVLFLNKKDLFEEKIKKVHLSICFPEYDGNNSYEDAGNYIKSQFLDLNMRKDVKEIYSHMTCATDTQNVKFVFDAVTDIIIKENLKDCGLF

SEQ ID NO: 7594 - protein, 350 aa, Mus musculus
MGAGASAEEKHSRELEKKLKEDAEKDARTVKLLLLGAGESGKSTIVKQMKIIHQDGYSLEECLEFIAIIYGNTLQSILAIVRAMTTLNIQYGDSARQDDARKLMHMADTIEEGTMPKEMSDIIQRLWKDSGIQACFDRASEYQLNDSAGYYLSDLERLVTPGYVPTEQDVLRSRVKTTGIIETQFSFKDLNFRMFDVGGQRSERKKWIHCFEGVTCIIFIAALSAYDMVLVEDDEVNRMHESLHLFNSICNHRYFATTSIVLFLNKKDVFSEKIKKAHLSICFPDYDGPNTYEDAGNYIKVQFLELNMRRDVKEIYSHMTCATDTQNVKFVFDAVTDIIIKENLKDCGLF

SEQ ID NO: 7595 - protein, 343 aa, Mus musculus
FARRSKELEKKLQEDADKEAKTVKLLLLGAGESGKSTIVKQMKIIHQDGYSPEECLEFKSVIYGNLLQSILAIIRAMSTLGIDYAEPSCADAGRQLNNLADSTEEGTMPPELVDVIRKLWKDGGVQACFDRAAEFQLNDSASYYLNQLDRITDPNYLPNEQDVLRSRVKTTGIIETKFSVKDLNFRMFDVGGQRSERKKWIHCFEGVTCIIFCAALSAYDMVLVEDDEVNRMHESLHLFNSICNHKFFAATSIVLFLNKKDLFEEKIKKVHLSICFPEYDGNNSYEDAGNYIKSQFLDLNMRKDVKEIYSHMTCATDTQNVKFVFDAVTDIIIKENLKDCGLF

SEQ ID NO: 7596 - protein, 354 aa, Mus musculus
MGCTLSAEDKAAVERSKMIDRNLREDGEKAAKEVKLLLLGAGESGKSTIVKQMKIIHEDGYSEDECKQYKVVVYSNTIQSIIAIIRAMGRLKIDFGESARADDARQLFVLAGSAEEGVMTSELAGVIKRLWRDGGVQACFSRSREYQLNDSASYYLNDLDRISQTNYIPTQQDVLRTRVKTTGIVETHFTFKELYFKMFDVGGQRSERKKWIHCFEGVTAIIFCVALSDYDLVLAEDEEMNRMHESMKLFDSICNNKWFTDTSIILFLNKKDLFEEKIKRSPLTICYPEYTGSNTYEEAAAYIQCQFEDLNRRKDTKEVYTHFTCATDTKNVQFVFDAVTDVIIKNNLKECGLY

SEQ ID NO: 7597 - protein, 354 aa, Mus musculus
MGCTLSAEERAALERSKAIEKNLKEDGISAAKDVKLLLLGAGESGKSTIVKQMKIIHEDGFSGEDVKQYKPVVYSNTIQSLAAIVRAMDTLGVEYGDKERKTDSKMVCDVVSRMEDTEPFSAELLSAMMRLWGDSGIQECFNRSREYQLNDSAKYYLDSLDRIGAGDYQPTEQDILRTRVKTTGIVETHFTFKNLHFRLFDVGGQRSERKKWIHCFEDVTAIIFCVALSGYDQVLHEDETTNRMHESLMLFDSICNNKFFIDTSIILFLNKKDLFGEKIKKSPLTICFPEYPGSNTYEDAAAYIQTQFESKNRSPNKEIYCHMTCATDTNNIQVVFDAVTDIIIANNLRGCGLY

SEQ ID NO: 7598 - protein, 355 aa, Mus musculus
MGCTVSAEDKAAAERSKMIDKNLREDGEKAAREVKLLLLGAGESGKSTIVKQMKIIHEDGYSEEECRQYRAVVYSNTIQSILAIVKRMGNLQIDFADPQRADDARQLFALSCAAEEQGMLPEDLSGVIRRLWADHGVQACFGRSREYQLNDSAAYYLNDLERIAQSDYIPTQQDVLRTRVKTTGIVETHFTFKDLHFKMFDVGGQRSERKKWIHCFEGVTAIIFCVALSAYDLVLAEDEEMNRMHESMKLFDSICNNKWFTDTSIILFLNKKDLFEEKITQSSLTICFPEYTGANKYDEAASYIQSKFEDLNKRKDTKEIYTHFTCATDTKNVQFVFDAVTDVIIKNNLKDCGLF

SEQ ID NO: 7599 - protein, 355 aa, Mus musculus
MGCTVSAEDKAAAERSKMIDKNLREDGEKAAREVKLLLLGAGESGKSTIVKQMKIIHEDGYSEEECRQYRAVVYSNTIQSILAIVKAMGNLQIDFADPQRADDARQLFALSCAAEEQGMLPEDLSGVIRRLWADHGVQACFGRSREYQLNDSAAYYLNDLERIAQSDYIPTQQDVLRTRVKTTGIVETHFTFKDLHFKMFDVGGQRSERKKWIHCFEGVTAIIFCVALSAYDLVLAEDEEMNRMHESMKLFDSICNNKWFTDTSIILFLNKKDLFEEKITQSSLTICFPEYTGANKYDEAASYIQSKFEDLNKRKDTKEIYTHFTCATDTKNVQFVFDAVTDVIIKNNLKDCGLF

SEQ ID NO: 7600 - protein, 354 aa, Mus musculus
MGCTLSAEERAALERSKAIEKNLKEDGISAAKDVKLLLLGAGESGKSTIVKQMKIIHEDGFSGEDVKQYKPVVYSNTIQSLAAIVRAMDTLGVEYGDKERKTDSKMVCDVVSRMEDTEPFSAELLSAMMRLWGDSGIQECFNRSREYQLNDSAKYYLDSLDRIGAGDYQPTEQDILRTRVKTTGIVETHFTFKNLHFRLFDVGGQRSERKKWIHCFEDVTAIIFCVALSGYDQVLHEDETTNRMHESLKLFDSICNNKWFTDTSIILFLNKKDIFEEKIKKSPLTICFPEYTGPSAFTEAVAHIQGQYESKNKSAHKEVYSHVTCATDTNNIQFVFDAVTDVIIAKNLRGCGLY

SEQ ID NO: 7601 - protein, 333 aa, Mus musculus
LREDGEKAAREVKLLLLGAGESGKSTIVKQMKIIHEDGYSEEECRQYRAVVYSNTIQSIIAIVKAMGNLQIDFADPQRADDARQLFALSCAAEEQGMLPEDLSGVIRRLWADHGVQACFGRSREYQLNDSAAYYLNDLERIAQSDYIPTQQDVLRTRVKTTGIVETHFTFKDLHFKMFDVGGQRSERKKWIHCFEGVTAIIFCVALSAYDLVLAEDEEMNRMHESMKLFDSICNNKWFTDTSIILFLNKKDLFEEKITQSSLTICFPEYTGANKYDEAASYIQSKFEDLNKRKDTKEIYTHFTCATDTKNVQFVFDAVTDVIIKNNLKDCGLF

SEQ ID NO: 7602 - protein, 355 aa, Mus musculus
MAGCCCLSAEEKESQRISAEIERQLRRDKKDARRELKLLLLGTGESGKSTFIKQMRIIHGSGYSDEDRKGFTKLVYQNIFTAMQAMIRAMDTLRIQYMCEQNKENAQIIREVEVDKVTALSRDQVAAIKQLWLDPGIQECYDRRREYQLSDSAKYYLTDIERIAMPSFVPTQQDVLRVRVPTTGIIEYPFDLENIIFRMVDVGGQRSERRKWIHCFESVTSIIFLVALSEYDQVLAECDNENRMEESKALFRTIITYPWFLNSSVILFLNKKDLLEEKIMYSHLISYFPEYTGPKQDVKAARDFILKLYQDQNPDKEKVIYSHFTCATDTENIRFVFAAVKDTILQLNLREFNLV

SEQ ID NO: 7603 - protein, 355 aa, Mus musculus
MAGCCCLSAEEKESQRISAEIERHVRRDKKDARRELKLLLLGTGESGKSTFIKQMRIIHGSGYSDEDRKGFTKLVYQNIFTAMQAMIRAMDTLRIQYMCEQNKENAQIIREVEVDKVTALSRDQVAAIKQLWLDPGIQECYDRRREYQLSDSAKYYLTDIERIAMPSFVPTQQDVLRVRVPTTGIIEYPFDLENIIFRMVDVGGQRSERRKWIHCFESVTSIIFLVALSEYDQVLAECDNENRMEESKALFRTIITYPWFLNSSVILFLNKKDLLEEKIMYSHLISYFPEYTGPKQDVKAARDFILKLYQDQNPDKEKVIYSHFTCATDTENIRFVFAAVKDTILQLNLREFNLV

SEQ ID NO: 7604 - protein, 355 aa, Mus musculus
MAGCCCLSAEEKESQRISAEIERQLRRDKKDARRELKLLLLGTGESGKSTFIKQMRIIHGSGYSDEDRKGFTKLVYQNIFTAMQAMIRAMDTLRIQYMCEQNKENAQIIREVEVDKVTALSRDQVAAIKQLWLDPGIQECYDRRREYQLSDSAKYYLTDIERIAMPSFVPTQQDVLRVRVPTTGIIEYPFDLENIIFRMVDVGGQRSERRKWIHCFESVTSIIFLVALSEYDQVLAECDNENRMEESKALFRTIITYPWFLNSSVILFLNKKDLLEEKIMYSHLISYFPEYTGPKQDVKAARDFILKLYQDQNPDKEKVIYSHFTCATDTENIPFVFAAVKDTILQLNLREFNLV

SEQ ID NO: 7605 - protein, 359 aa, Mus musculus
MTLESMMACCLSDEVKESKRINAEIEKQLRRDKRDARRELKLLLLGTGESGKSTFIKQMRIIHGAGYSEEDKRGFTKLVYQNIFTAMQAMVRAMETLKILYKYEQNKANALLIREVDVEKVTTFEHQYVNAIKTLWSDPGVQECYDRRREFQLSDSAKYYLTDVDRIATVGYLPTQQDVLRVRVPTTGIIEYPFDLENIIFRMVDVGGQRSERRKWIHCFENVTSIMFLVALSEYDQVLVESDNENRMEESKALFRTIITYPWFQNSSVILFLNKKDLLEDKILHSHLVDYFPEFDGPQRDAQAAREFILKMFVDLNPDSDKIIYSHFTCATDTENIRFVFAAVKDTILQLNLKEYNLV

SEQ ID NO: 7606 - protein, 359 aa, Mus musculus
MTLESMMACCLSDEVKESKRINAEIEKQLRRDKRDARRELKLLLLGTGESGKSTFIKQMRIIHGAGYSEEDKRGFTLLVYQNIFTAMQAMVRAMETLKILYKYEQNKANALLIREVDVEKVTTFEHQYVNAIKTLWSDPGVQECYDRRREFQLSDSAKYYLTDVDRIATVGYLPTQQDVLRVRVPTTGIIEYPFDLENIIFRMVDVGGQRSERRKWIHCFENVTSIMFLVALSEYDQVLVESDNENRMEESKALFRTIITYPWFQNSSVILFLNKKDLLEDKILHSHLVDYFPEFDGPQRDAQAAREFILKMFVDLNPDSDKIIYSHFTCATDTENIRFVFAAVKDTILQLNLKEYNLV

SEQ ID NO: 7607 - protein, 359 aa, Mus musculus
MTLENLMACCLSDEVKESKRINAEIEKQLRRDKRDARRELKLLLLGTGESGKSTFIKQMRIIHGAGYSEEDKRGFTKLVYQNIFTAMQAMVRAMATLKILYKYEQNKANALLIREVDLEKVTTFEHQYVNAIKTLWSDPGVQECYDRRPEFQLSDSAKYYLTDVDRIATVGYLPTQQDVLRVRVPTTGIIEYPFDLENIIFRMVDVGGQRSERRKWIHCFENVTSIMFLVALSEYDQVLVESDNENRMEESKALFRTIITYPWFQNSSVILFLNKKDLLEDKILHSHLVDYFPEFDGPQRDAQAAREFILKMFVDLNPDSDKIIYSHFTCATDTENIRFVFAAVKDTILQLNLKEYNLV

SEQ ID NO: 7608 - protein, 353 aa, Mus musculus
MACCLSEEAKEARRINDEIERHVRRDKRDARRELKLLLLGTGESGKSTFIKQMRIIHGSGYSDEDKRGFTKLVYQNIFTAMQAMIRAMDTLKIPYKYEHNKAHAQLVREVDVEKVSAFENPYVDAIKSLWNDPGIQECYDRRREYQLSDSTKYYLNDLDRVADPSYLPTQQDVLRVRVPTTGIIEYPFDLQSVIFRMVDVGGQRSERRKWIHCFENVTSIMFLVALSEYDQVLVESDNENRMEESKALFRTIITYPWFQNSSVILFLNKKDLLEEKIMYSHLVDYFPEYDGPQRDAQAAREFILKMFVDLNPDSDKIIYSHFTCATDTENIRFVFAAVKDTILQLNLKEYNLV

SEQ ID NO: 7609 - protein, 359 aa, Mus musculus
MTLESIMACCLSEEAKEARRINDEIERHVRRDKRDARRELKLLLLGTGESGKSTFIKQMRIIHGSGYSDEDKRGFTKLVYQNIFTAMQAMIRAMDTLKIPYKYEHNKAHAQLVREVDVEKVSAFENPYVDAIKSLWNDPGIQECYDRRREYQLSDSTKYYLNDLDRVADPSYLPTQQDVLRVRVPTTGIIEYPFDLQSVIFRMVDVGGQRSERRKWIHCFENVTSIMFLVALSEYDQVLVESDNENRMEESKALFRTIITYPWFQNSSVILFLNKKDLLEEKIMYSHLVDYFPEYDGPQRDAQAAREFILKMFVDLNPDSDKIIYSHFTCATDTENIRFVFAAVKDTILQLNLKEYNLV

SEQ ID NO: 7610 - protein, 355 aa, Mus musculus
MGCRQSSEEKEAARRSRRIDRHLRSESQRQRREIKLLLLGTSNSGKSTIVKQMKIIHSGGFNLDACKEYKPLIIYNAIDSLTRIIRALAALKIDFHNPDRAYDAVQLFALTGPAESKGEITPELLGVMRRLWADPGAQACFGRSSEYHLEDNAAYYLNDLERIAAPDYIPTVEDILRSRDMTTGIVENKFTFKELTFKMVDVGGQRSERKKWIHCFEGVTAIIFCVELSGYDLKLYEDNQTSRMAESLRLFDSICNNNWFINTSLILFLNKKDLLAEKIRRIPLSVCFPEYKGQNTYEEAAVYIQRQFEDLNRNKETKEIYSHFTCATDTSNIQFVFDAVTDVIIQNNLKYIGLC

SEQ ID NO: 7611 - protein, 374 aa, Mus musculus
MARSLTWGCCPWCLTEEEKTAARIDQEINRILLEQKKQEREELKLLLLGPGESGKSTFIKQMRIIHGVGYSEEDRRAFRLLIYQNIFVSMQAMIDAMDRLQIPFSRPDSKQHASLVMTQDPYKVSTFEKPYAVAMQYLWRDAGIRACYERRREFHLLDSAVYYLSHLERISEDSYIPTAQDVLRSRMPTTGINEYCFSVKKTKLRIVDVGGQRSERRKWIHCFENVIALIYLASLSEYDQCLEENDQENRMEESLALFSTILELPWFKSTSVILFLNKTDILEDKIHTSHLATYFPSFQGPRRDAEAAKSFILDMYARVYASCAEPQDGGRKGSRARRFFAHFTCATDTQSVRSVFKDVRDSVLARYLDEINLL

SEQ ID NO: 7612 - protein, 377 aa, Mus musculus
MADFLPSRSVLSVCFPGCVLTNGEAEQQRKSKEIDKCLSREKTYVKRLVKILLLGAGESGKSTFLKQMRIIHGQDFDQRAREEFRPTIYSNVIKGMRVLVDAREKLHIPWGDNKNQLHGDKLMAFDTRAPMAAQGMVETRVFLQYLPAIRALWEDSGIQNAYDRRREFQLGESVKYFLDNLDKLGVPDYIPSQQDILLARRPTKGIHEYDFEIKNVPFKMVDVGGQRSERKRWFECFDSVTSILFLVSSSEFDQVLMEDRQTNRLTESLNIFETIVNNRVFSNVSIILFLNKTDLLEEKVQVVSIKDYFLEFEGDPHCLRDVQKFLVECFRGKRRDQQQRPLYHHFTTAINTENIRLVFRDVKDTILHDNLKQLMLQ

SEQ ID NO: 7613 - protein, 379 aa, Mus musculus
MSGVVRTLSRCLLPAEAGARERRAGAARDAEREARRRSRDIDALLARERRAVRRLVKILLLGAGESGKSTFLKQMRIIHGREFDQKALLEFRDTIFDNILKGSRVLVDARDKLGIPWQHSENEKHGMFLMAFENKAGLPVEPATFQLYVPALSALWRDSGIREAFSRRSEFQLGESVKYFLDNLDRIGQLNYFPSKQDILLARKATKGIVEHDFVIKKIPFKMVDVGGQRSQRQKWFQCFDGITSILFMVSSSEYDQVLMEDRRTNRLVESMNIFETIVNNKLFFNVSIILFLNKMDLLVEKVKSVSIKKHFPDFKGDPHRLEDVQRYLVQCFDRKRRNRSKPLFHHFTTAIDTENIRFVFHAVKDTILQENLKDIMLQ

SEQ ID NO: 7614 - protein, 310 aa, Mus musculus
SGKSTFIKQMRIIHGSGYSDEDRKGFTKLVYQNIFTAMQAMIRAMDTLRIQYMCEQNKENAQIIREVEVDKVTALSRDQVAAIKQLWLDPGIQECYDRRREYQLSDSAKYYLTDIERIAMPSFVPTQQDVLRVRVPTTGIIEYPFDLENIIFRMVDVGGQRSERRKWIHCFESVTSIIFLVALSEYDQVLAECDNENRMEESKALFRTIITYPWFLNSSVILFLNKKDLLEEKIMYSHLISYFPEYTGPKQDVKAARDFILKLYQDHNPDKEKVIYSHFTCATDTENIRFVFAAVKDTILQLNLREFNLV

SEQ ID NO: 7615 - protein, 381 aa, Mus musculus
MGCLGNSSKTAEDQGVDEKERREANKKIEKQLQKERLAYKATHRLLLLGAGESGKSTIVKQMRILHVNGFNPEEKKQKILDIRKNVKDAIVTIVSAMSTIIPPVPLANPENQFRSDYIKSIAPITDFEYSQEFFDHVKKLWDDEGVKACFERSNEYQLIDCAQYFLERIDSVSLVDYTPTDQDLLRCRVLTSGIFETRFQVDKVNFHMFDVGGQRDERRKWIQCFNDVTAIIYVAACSSYNMVIREDNNTNRLRESLDLFESIWNNRWLRTISIILFLNKQDMLAEKVLAGKSKIEDYFPEYANYTVPEDATPDAGEDPKVTRAKFFIRDLFLRISTATGDGKHYCYPHFTCAVDTENIRRVFNDCRDIIQRMHLKQYELL

SEQ ID NO: 7616 - protein, 194 aa, Mus musculus
QRLWKDSGIQACFDRASEYQLNDSAGYYLSDLERLVTPGYVPTEQDVLRSRVKTTGIIETQFSFKDLNFRMFDVGGQRSERKKWIHCFEGVTCIIFIAALSAYDMVLVEDDEVNRMHESLHLFNSICNHRYFATTSIVLFLNKKDVFSEKIKKAHLSICFPDYDGPNTYEDAGNYIKVQFLELNMRRDVKEIYS

SEQ ID NO: 7617 - protein, 756 aa, Mus musculus
MEGSPTTATAVEGKVPSPERGDGSSTQPEAMDAKPAPAAQAVSTGSDAGAPTDSAMLTDSQSDAGEDGTAPGTPSDLQSDPEELEEAPAVRADPDGGAAPVAPATPAESESEGSRDPAAEPASEAVPATTAESASGAAPVTQVEPAAAAVSATLAEPAARAAPITPKEPTTRAVPSARAHPAAGAVPGAPAMSASARAAAARAAYAGPLVWGARSLSATPAARASLPARAAAAARAASAARAVAAGRSASAAPSRAHLRPPSPEIQVADPPTPRPPPRPTAWPDKYERGRSCCRYEASSGICEIESSSDESEEGATGCFQWLLRRNRRPGLPRSHTVGSNPVRNFFTRAFGSCFGLSECTRSRSLSPGKAKDPMEERRKQMRKEAIEMREQKRADKKRSKLIDKQLEEEKMDYMCTHRLLLLGAGESGKSTIVKQMRILHVNGFNGDSEKATKVQDIKNNLKEAIETIVAAMSNLVPPVELANPENQFRVDYILSVMNVPNFDFPPEFYEHAKALWEDEGVRACYERSNEYQLIDCAQYFLDKIDVIKQADYVPSDQDLLRCRVLTSGIFETKFQVDKVNFHMFDVGGQRDERRKWIQCFNDVTAIIFVVASSSYNMVIREDNQTNRLQEALNLFKSIWNNRWLRTISVILFLNKQDLLAEKVLAGKSKIEDYFPEFARYTTPEDATPEPGEDPRVTRAKYFIRDEFLRISTASGDGRHYCYPHFTCAVDTENIRRVFNDCRDIIQRMHLRQYELL

SEQ ID NO: 7618 - protein, 377 aa, Mus musculus
MAARGAAGLRGGGEKAQREANKKIEKQLQKDKQVYRATHRLLLLGAGESGKSTIVKQMRILHVNGFNGDEKATKVQDIKNNLKEAIETIVAAMSNLVPPVELANPENQFRVDYILSVMNLPNFDFPPEFYEHAKALWEDEGVRACYERSNEYQLIDCAQYFLDKIDVIKQADYVPSDQDLLRCRVLTSGIFETKFQVDKVNFHMFDVGGQRDERRKWIQCFNDVTAIIFVVASSSYNMVIREDNQTNRLQEALNLFKSIWNNRWLRTISVILFLNKQDLLAEKVLAGKSKIEDYFPEFARYTTPEDATPEPGEDPRVTRAKYFIRDEFLRISTASGDGRHYCYPHFTCAVDTENIRRVFNDCRDIIQRMHLRQYELL

SEQ ID NO: 7619 - protein, 232 aa, Mus musculus
PELLGVMRRLWADPGAQACFGRSSEYHLEDNAAYYLNDLERIAAPDYIPTVEDILRSRDMTTGIVENKFTFKELTFKMVDVGGQRSERKKWIHCFEGVTAIIFCVELSGYDLKLYEDNQTSRMAESLRLFDSICNNNWFINTSLILFLNKKDLLAEKIRRIPLSVCFPEYKGQNTYEEAAVYIQRQFEDLNRNKETKEIYSHFTCATDTSNIQFVFDAVTDVIIQNNLKYIG

SEQ ID NO: 7620 - protein, 394 aa, Mus musculus
MGCLGNSKTEDQRNEEKAQREANKKIEKQLQKDKQVYRATHRLLLLGAGESGKSTIVKQMRILHVNGFNGEGGEEDPQAARSNSDGEKATKVQDIKNNLKEAIETIVAAMSNLVPPVELANPENQFRVDYILSVMNVPDFDFPPEFYEHAKALWEDEGVRACYERSNEYQLIDCAQYFLDKIDVIKQADYVPSDQDLLRCRVLTSGIFETKFQVDKVNFHMFDVGGQRDERRKWIQCFNDVTAIIFVVASSSYNMVIREDNQTNRLQEALNLFKSIWNNRWLRTISVILFLNKQDLLAEKVLAGKSKIEDYFPEFARYTTPEDATPEPGEDPRVTRAKYFIRDEFLRISTASGDGRHYCYPHFTCAVDTENIRRVFNDCRDIIQRMHLPQYELL

SEQ ID NO: 7621 - protein, 362 aa, Mus musculus
MGDSVQILLVFMDKGAGESGKSTIVKQMRILHVNGFNGEGGEEDPQAARSNSDGEKATKVQDIKNNLKEAIETIVAAMSNLVPPVELANPENQFRVDYILSVMNLPNFDFPPEFYEHAKALWEDEGVRACYERSNEYQLIDCAQYFLDKIDVIKQADYVPSDQDLLRCRVLTSGIFETKFQVDKVNFHMFDVGGQRDERRKWIQCFNDVTAIIFVVASSSYNMVIREDNQTNRLQEALNLFKSIWNNRWLRTISVILFLNKQDLLAEKVLAGKSKIEDYFPEFARYTTPEDATPEPGEDPRVTRAKYFIRDEFLRISTASGDGRHYCYPHFTCAVDTENIRRVFNDCRDIIQRMHLRQYELL

SEQ ID NO: 7622 - protein, 241 aa, Mus musculus
MGCRQSSEEKEAARRSRRIDRHLRSESQRQRREIKLLLLGTSNSGKSTIVKQMKIIHSGGFNLDACKEYKPLIIYNAIDSLTRIIRALAALKIDFHNPDRAYDAVQLFALTGPAESKGEITPELLGVMRRLWADPGAQACFGRSSEYHLEDNAAYYLNDLERIAAPDYIPTVEDILRSRDMTTGIVENKFTFKELTFKMVDVGGQRSERKKWIHCFEGVTAIIFCVELSGYDLKLYEDNQT

SEQ ID NO: 7623 - protein, 243 aa, Mus musculus
MGSGISSESKESARRSKELEKKLQEDAERDARTVKLLLLGAGESGKSTIVKQMKIIHKNGYSKQECMEFKAVIYSNTLQSILAIVKAMATLGIDYVNPRSREDQEQLHSMANTLEDGDMTPQLAEIIKRLWGDPGIQACFERASEYQLNDSAAYYLNDLDRLTAPGYVPNEQDVLHSRVKTTGIIETQFSFKDLNFSDGSMDRLHESYNLMEIILEFFSSQCANCQADRTTYLKVLLKAERAN

SEQ ID NO: 7624 - protein, 302 aa, Mus musculus
QDIKNNLKEAIETIVAAMSNLVPPVELANPENQFRVDYILSVMNVPNFDFPPEFYEHAKALWEDEGVRACYERSNEYQLIDCAQYFLDKIDVIKQADYVPSDQDLLRCRVLTSGIFETKFQVDKVNFHMFDVGGQRDERRKWIQCFNDVTAIIFVVASSSYNMVIREDNQTNRLQEALNLFKSIWNNRWLRTISVILFLNKQDLLAEKVLAGKSKIEDYFPEFARYTTPEDATPEPGEDPRVTRAKYFIRDEFLRISTASGDGRHYCYPHFTCAVDTENIRRVFNDCRDIIQRMHLRQYELL

SEQ ID NO: 7625 - protein, 337 aa, Mus musculus
MNLFLKVLVQRLWKSGEEDPQAARSNSDGEKATKVQDIKNNLKEAIETIVAAMSNLVPPVELANPENQFRVDYILSVMNVPNFDFPPEFYEHAKALWEDEGVPACYERSNEYQLIDCAQYFLDKIDVIKQADYVPSDQDLLRCRVLTSGIFETKFQVDKVNFHMFDVGGQRDERRKWIQCFNDVTAIIFVVASSSYNMVIREDNQTNRLQEALNLFKSIWNNRWLRTISVILFLNKQDLLAEKVLAGKSKIEDYFPEFARYTTPEDATPEPGEDPRVTRAKYFIRDEFLRISTASGDGRHYCYPHFTCAVDTENIRRVFNDCRDIIQRMHLRQYELL

SEQ ID NO: 7626 - protein, 157 aa, Mus musculus
MFDVGGQRSERKKWIHCFEGVTCIIFCAALSAYDMVLVEDDEVNRMHESLHLFNSICNHKFFAATSIVLFLNKKDLFEEKIKKVHLSICFPEYDGNNSYEDAGNYIKSQFLDLNMRKDVKEIYSHMTCATDTQNVKFVFDAVTDIIIKENLKDCGLF

SEQ ID NO: 7627 - protein, 167 aa, Mus musculus
MNDNLEQVIRTPLKGGQRSERKKWIHCFEGVTCIIFCAALSAYDMVLVEDEEVNRMHESLHLFNSICNHKYFATTSIVLFLNKKDLFQEKVAKVHLSICFPEYTGPNTFEDAGNYIKNQFLDLNLKKEDKEIYSHMTCATDTQNVKFVFDAVTDIIIKENLKDCGLF

SEQ ID NO: 7628 - protein, 165 aa, Mus musculus
FDVGGQRDERRKWIQCFNDVTAIIYVAACSSYNMVIREDNNTNRLRESLDLFESIWNNRWLRTISIILFLNKQDMLAEKVLAGKSKIEDYFPEYANYTVPEDATPDAGEDPKVTRAKFFIRDLFLRISTATGDGKHYCYPHFTCAVDTENIRRVFNDCRDIIQRM

SEQ ID NO: 7629 - protein, 230 aa, Mus musculus
MGLCYSLRPLLFGSPEDTPCAASEPCAEDAQPSAAPAPASIPAPAPVGTLLRRGGGRIVANARPPGELQSRRRQEQLRAEEREAAKEARKVSRGIDRMLREQKRDLQQTHRLLLLGAGESGKSTIVKQMRILHVNGFNPEEKKQKILDIRKNVKDAIVTIVSAMSTIIPPVPLANPENQFRSDYIKSIAPITDFEYSQEFFDHVKKLWDDEGVKACFERSNEYQLIDCAQ

SEQ ID NO: 7630 - protein, 173 aa, Mus musculus
MADFLPSRSVLSVCFPGCVLTNGEAEQQRKSKEIDKCLSREKTYVKRLVKILLLGAGESGKSTFLKQMRIIHGQDFDQRAREEFRPTIYSNVIKGMRVLVDAREKLHIPWGDNKNQLHGDKLMAFDTRAPMAAQGMVETRVFLQYLPAIRALWEDSGIQNAYDRRREFQLMET

SEQ ID NO: 7631 - protein, 132 aa, Mus musculus
MGCTVSAYDLVLAEDEEMNRMHESMKLFDSICNNKWFTDTSIILFLNKKDLFEEKITQSSLTICFPEYTGANKYDEAASYIQSKFEDLNKRKDTKEIYTHFTCATDTKNVQFVFDAVTDVIIKNNLKDCGLF

SEQ ID NO: 7632 - protein, 61 aa, Mus musculus
SERRKWIHCFEGVTAIIFCVELSGYDLKLYEDNQTSRMAESLRLFDSICNNNWFINTSLIL

SEQ ID NO: 7633 - protein, 61 aa, Mus musculus
SERRKWIHCFENVTSIMFLVALSEYDQVLVESDNENRMEESKALFRTIITYPWFQNSSVIL

SEQ ID NO: 7634 - protein, 354 aa, Rattus norvegicus
MGSGISSESKESAKRSKELEKKLQEDAERDARTVKLLLLGAGESGKSTIVKQMKIIHKNGYSKQECMEFKAVVYSNTLQSILAIVKAMTTLGIDYVNPRSREDQQLLLSMANTLEDGDMTPQLAEIIKRLWGDPGIQACFERASEYQLNDSAAYYLNDLDRLTAPGYVPNEQDVLHSRVKTTGIIETQFSFKDLNFRMFDVGGQRSERKKWIHCFEGVTCIIFCAALSAYDMVLVEDEEVNRMHESLHLFNSICNHKYFATTSIVLFLNKKDLFQEKVTKVHLSICFPEYTGPNTFEDAGNYIKNQFLDLNLKKEDKEIYSHMTCATDTQNVKFVFDAVTDIIIKENLKDCGLF

SEQ ID NO: 7635 - protein, 354 aa, Rattus norvegicus
MGCTLSAEDKAAVERSKMIDRNLREDGEKAAREVKLLLLGAGESGKSTIVKQMKIIHEAGYSEEECKQYKAVVYSNTIQSIIAIIRAMGRLKIDFGDAARADDARQLFVLAGAAEEGFMTAELAGVIKRLWKDSGVQACFNRSREYQLNDSAAYYLNDLDRIAQPNYIPTQQDVLRTRVKTTGIVETHFTFKDLHFKMFDVGGQRSERKKWIHCFEGVTAIIFCVALSDYDLVLAEDEEMNRMHESMKLFDSICNNKWFTDTSIILFLNKKDLFEEKIKKSPLTICYPEYAGSNTYEEAAAYIQCQFEDLNKRKDTKEIYTHFTCATDTKNVQFVFDAVTDVIIKNNLKDCGLF

SEQ ID NO: 7636 - protein, 353 aa, Rattus norvegicus
GCTLSAEDKAAVERSKMIDRNLREDGEKAAREVKLLLLGAGESGKSTIVKQMKIIHEAGYSEEECKQYKAVVYSNTIQSIIAIIRAMGRLKIDFGDAARADDARQLFVLAGAAEEGFMTAELAGVIKRLWKDSGVQACFNRSREYQLNDSAAYYLNDLDRIAQPNYIPTQQDVLRTRVKTTGIVETHFTFKDLHFKMFDVGAQRSERKKWIHCFEGVTAIIFCVALSDYDLVLAEDEEMNRMHESMKLFDSICNNKWFTDTSIILFLNKKDLFEEKIKKSPLTICYPEYAGSNTYEEAAAYIQCQFEDLNKRKDTKEIYTHFTCATDTKNVQFVFDAVTDVIIKNNLKDCGLF

SEQ ID NO: 7637 - protein, 353 aa, Rattus norvegicus
GCTLSAEDKAAVERSKMIDRNLREDGEKAAREVKLLLLGAGESGKSTIVKQMKIIHEAGYSEEECKQYKAVVYSNTIQSIIAIIRAMGRLKIDFGDAARADDARQLFVLAGAAEEGFMTAELAGVIKRLWKDSGVQACFNRSREYQLNDSAAYYLNDLDRIAQPNYIPTQQDVLRTRVKTTGIVETHFTFKDLHFKMFDVGGLRSERKKWIHCFEGVTAIIFCVALSDYDLVLAEDEEMNRMHESMKLFDSICNNKWFTDTSIILFLNKKDLFEEKIKKSPLTICYPEYAGSNTYEEAAAYIQCQFEDLNKRKDTKEIYTHFTCATDTKNVQFVFDAVTDVIIKNNLKDCGLF

SEQ ID NO: 7638 - protein, 353 aa, Rattus norvegicus
GCTLSAEDKAAVERSKMIDRNLREDGEKAAREVKLLLLGAVESGKSTIVKQMKIIHEAGYSEEECKQYKAVVYSNTIQSIIAIIRAMGRLKIDFGDAARADDARQLFVLAGAAEEGFMTAELAGVIKRLWKDSGVQACFNRSREYQLNDSAAYYLNDLDRIAQPNYIPTQQDVLRTRVKTTGIVETHFTFKDLHFKMFDVGGQRSERKKWIHCFEGVTAIIFCVALSDYDLVLAEDEEMNRMHESMKLFDSICNNKWFTDTSIILFLNKKDLFEEKIKKSPLTICYPEYAGSNTYEEAAAYIQCQFEDLNKRKDTKEIYTHFTCATDTKNVQFVFDAVTDVIIKNNLKDCGLF

SEQ ID NO: 7639 - protein, 354 aa, Rattus norvegicus
MGCTLSAEDKAAVERSKMIDRNLREDGEKAAKEVKLLLLGAGESGKSTIVKQMKIIHEDGYSEDECKQYKVVVYSNTIQSIIAIIRAMGRLKIDFGEAARADDARQLFVLAGSAEEGVMTSELAGVIKRLWRDGGVQACFSRSREYQLNDSASYYLNDLDRISQTNYIPTQQDVLRTRVKTTGIVETHFTFKELYFKMFDVGGQRSERKKWIHCFEGVTAIIFCVALSDYDLVLAEDEEMNRMHESMKLFDSICNNKWFTDTSIILFLNKKDLFEEKIKRSPLTICYPEYTGSNTYEEAAAYIQCQFEDLNRRKDTKEVYTHFTCATDTKNVQFVFDAVTDVIIKNNLKECGLY

SEQ ID NO: 7640 - protein, 354 aa, Rattus norvegicus
MGCTLSAEERAALERSKAIEKNLKEDGISAAKDVKLLLLGAGESGKSTIVKQMKIIHEDGFSGEDVKQYKPVVYSNTIQSLAAIVRAMDTLGVEYGDKERKADSKMVCDVVSRMEDTEPFSAELLSAMMRLWGDSGIQECFNRSREYQLNDSAKYYLDSLDRIGAADYQPTEQDILRTRVKTTGIVETHFTFKNLHFRLFDVGGQRSERKKWIHCFEDVTAIIFCVALSGYDQVLHEDETTNRMHESLMLFDSICNNKFFIDTSIILFLNKKDLFGEKIKKSPLTICFPEYPGSNTYEDAAAYIQTQFESKNRSPNKEIYCHMTCATDTNNIQVVFDAVTDIIIANNLRGCGLY

SEQ ID NO: 7641 - protein, 315 aa, Rattus norvegicus
REVKLLLLGAGESGKSTIVKQMKIIHEAGYSEEECKQYKAVVYSNTIQSIIAIIRAMGRLKIDFGDAARADDARQLFVLAGAAEEGFMTAELAGVIKRLWKDSGVQACFNRSREYQLNDSAAYYLNDLDRIAQPNYIPTQQDVLRTRVKTTGIVETHFTFKDLHFKMFDVGGQRSERKKWIHCFEGVTAIIFCVALSDYDLVLAEDEEMNRMHESMKLFDSICNNKWFTDTSIILFLNKKDLFEEKIKKSPLTICYPEYAGSNTYEEAAAYIQCQFEDLNKRKDTKEIYTHFTCSTDTKNVQFVFDAVTDVIIKN

SEQ ID NO: 7642 - protein, 355 aa, Rattus norvegicus
MGCTVSAEDKAAAERSKMIDKNLREDGEKAAREVKLLLLGAGESGKSTIVKQMKIIHEDGYSEEECRQYRAVVYSNTIQSIMAIVKAMGNLQIDFADPQRADDARQLFALSCAAEEQGMLPEDLSGVIRRLWADHGVQACFGRSREYQLNDSAAYYLNDLERIAQSDYIPTQQDVLRTRVKTTGIVETHFTFKDLHFKMFDVGGQRSERKKWIHCFEGVTAIIFCVALSAYDLVLAEDEEMNRMHESMKLFDSICNNKWFTDTSIILFLNKKDLFEEKITQSPLTICFPEYTGANKYDEAASYIQSKFEDLNKRKDTKEIYTHFTCATDTKNVQFVFDAVTDVIIKNNLKDCGLF

SEQ ID NO: 7643 - protein, 354 aa, Rattus norvegicus
MGCTLSAEERAALERSKAIEKNLKEDGISAAKDVKLLLLGAGESGKSTIVKQMKIIHEDGFSGEDVKQYKPVVYSNTIQSLAAIVRAMDTLGVEYGDKERKADSKMVCDVVSRMEDTEPFSAELLSAMMRLWGDSGIQECFNRSREYQLNDSAKYYLDSLDRIGAADYQPTEQDILRTRVKTTGIVETHFTFKNLHFRLFDVGGQRSERKKWIHCFEDVTAIIFCVALSGYDQVLHEDETTNRMHEFLKLFDSICNNKWFTDTSIILFLNKKDIFEEKIKKSPLTICFPEYTGPSAFTEAVAHIQGQYESKNKSAHKEVYSHVTCATDTNNIQFVFDAVTDVIIAKNLRGCGLY

SEQ ID NO: 7644 - protein, 310 aa, Rattus norvegicus
GKSTIVKQMKIIHEDGFSGEDVKQYKPVVYSNTIQSLAAIVRAMDTLGVEYGDKERKADSKMVCDVVSRMEDTEPFSAELLSAMMRLWGDSGIQECFNRSREYQLNDSAKYYLDSLDRIGAADYQPTEQDILRTRVKTTGIVETHFTFKNLHFRLFDVGGQRSERKKWIHCFEDVTAIIFCVALSGYDQVLHEDETTNRMHESLMLFDSICNNKFFIDTSIILFLNKKDLFGEKIKKSPLTICFPEYPGSNTYEDAAAYIQTQFESKNRSPNKEIYCHMTCATDTNNIQVVFDAVTDIIIANNLRGCGLY

SEQ ID NO: 7645 - protein, 359 aa, Rattus norvegicus
MTLESMIACCLSDEVKESKRINAEIEKQLRRDKRDARRELKLLLLGTGESGKSTFIKQMRIIHGAGYSEEDKRGFTKLVYQNIFTAMQAVVRAMDTLKIRYKYEQNKANALLIREVDVEKVTTFEHQYVNAIKTLWSDPGVQECYDRRREFQLSDSAKYYLTDVDRIATVGYLPTQQDVLRVRVPTTGIIEYPFDLENIIFRMVDVGGQRSERRKWIHCFENVTSIMFLVALSEYDQVLVESDNENRMEESKALFRTIITYPWFQHSSVILFLNKKDLLEDKILHSHLVDYFPEFDGPQRDAQAAREFILKMFVDLNPDSDKIIYSHFTCATDTENIRFVFAAVKDTILQLNLKEYNLV

SEQ ID NO: 7646 - protein, 353 aa, Rattus norvegicus
MACCLSEEAKEARRINDEIERQLRRDKRDARRELKLLLLGTGESGKSTFIKQMRIIHGSGYSDEDKRGFTKLVYQNIFTAMQAMVRAMDTLKIPYKYEHNKAHAQLVREVDVEKVSAFENPYVDAIKSLWNDPGIQECYDRRREYQLSDSTKYYLNDLDRVADPSYLPTQQDVLRVRVPTTGIIEYPFDLQSVIFRMVDVGGQRSERRKWIHCFENVTSIMFLVALSEYDQVLVESDNENRMEESKALFRTIITYPWFQNSSVILFLNKKDLLEEKIMYSHLVDYFPEYDGPQRDAQAAREFILKMFVDLNPDSDKIIYSHFTCATDTENIRFVFAAVKDTILQLNLKEYNLV

SEQ ID NO: 7647 - protein, 359 aa, Rattus norvegicus
MTLESIMACCLSEEAKEARRINDEIERQLRRDKRDARRELKLLLLGTGESGKSTFIKQMRIIHGSGYSDEDKRGFTKLVYQNIFTAMQAMVRAMDTLKIPYKYEHNKAHAQLVREVDVEKVSAFENPYVDAIKSLWNDPGIQECYDRRREYQLSDSTKYYLNDLDRVADPSYLPTQQDVLRVRVPTTGIIEYPFDLQSVIFRMVDVGGQRSERRKWIHCFENVTSIMFLVALSEYDQVLVESDNENRMEESKALFRTIITYPWFQNSSVILFLNKKDLLEEKIMYSHLVDYFPEYDGPQRDAQAAREFILKMFVDLNPDSDKIIYSHFTCATDTENIRFVFAAVKDTILQLNLKEYNLV

SEQ ID NO: 7648 - protein, 355 aa, Rattus norvegicus
MGCRQSSEEKEAARRSRRIDRHLRSESQRQRREIKLLLLGTSNSGKSTIVKQMKIIHSGGFNLEACKEYKPLIIYNAIDSLTRIIRALAALKIDFHNPDRAYDAVQLFALTGPAESKGEITPELLGVMRRLWADPGAQACFGRSSEYHLEDNAAYYLNDLERIAAPDYIPTVEDILRSRDMTTGIVENKFTFKELTFKMVDVGGQRSERKKWIHCFEGVTAIIFCVELSGYDLKLYEDNQTSRMAESLRLFDSICNNNWFINTSLILFLNKKDLLSEKIRRIPLSVCFPEYKGQNTYEEAAVYIQRQFEDLNRNKETKEIYSHFTCATDTSNIQFVFDAVTDVIIQNNLKYIGLC

SEQ ID NO: 7649 - protein, 374 aa, Rattus norvegicus
MARSLTWGCCPWCLTEEEKTAARIDQEINKILLEQKKQERGELKLLLLGPGESGKSTFIKQMRIIHGAGYSEEDRRAFRLLVYQNIFVSMQAMIEAMDRLQIPFSRPDSKQHASLVMTQDPYKVSSFEKPYAVAMQYLWRDAGIRACYERRREFHLLDSAVYYLSHLERIAEDDYIPTAQDVLRSRMPTTGINEYCFSVQKTKLRIVDAGGQKSERKKWIHCFENVIALIYLASLSEYDQCLEENSQENRMKESLALFSTILELPWFKSTSVILFLNKTDILEDKIHTSHLASYFPSFQGPRRDAEAAKRFILDMYARVYASCAEPHDGGRKGSRARRLFAHFTCATDTHSVRSVFKDVRDSVLARYLDEINLL

SEQ ID NO: 7650 - protein, 379 aa, Rattus norvegicus
MSGVVRTLSRCLLPAEAGARERRAGAARDAEREARRRSRDIDALLARERRAVRRLVKILLLGAGESGKSTFLKQMRIIHGREFDQKALLEFRDTIFDNILKGSRVLVDARDKLGIPWQHSENEKHGMFLMAFENKAGLPVEPATFQLYVPALSALWRDSGIREAFSRRSEFQLGESVKYFLDNLDRIGQLNYFPSKQDILLARKATKGIVEHDFVIKKIPFKMVDVGGQRSQRQKWFQCFDGITSILFMVSSSEYDQVLMEDRRTNRLVESMNIFETIVNNKLFFNVSIILFLNKMDLLVEKVKSVSIKKHFPDFKGDPHRLEDVQRYLVQCFDRKRRNRGKPLFHHFTTAIDTENIRFVFHAVKDTILQENLKDIMLQ

SEQ ID NO: 7651 - protein, 381 aa, Rattus norvegicus
MGCLGNSSKTAEDQGVDEKERREANKKIEKQLQKERLAYKATHRLLLLGAGESGKSTIVKQMRILHVNGSNPEEKKQKILDIRKNVKDAIVTIVSAMSTIIPPVPLANPENQFRSDYIKSIAPITDFEYSQEFFDHVKKLWDDEGVKACFERSNEYQLIDCAQYFLERIDSVSLVDYTPTDQDLLRCRVLTSGIFETRFQVDKVNFHMFDVGGQRDERRKWIQCFNDVTAIIYVAACSSYNMVIREDNNTNRLRESLDLFESIWNNRWLRTISIILFLNKQDMLAEKVLAGKSKIEDYFPEYANYTVPEDATPDAGEDPKVTRAKFFIRDLFLRISTATGDGKHYCYPHFTCAVDTENIRRVFNDCRDIIQRMHLKQYELL

SEQ ID NO: 7652 - protein, 310 aa, Rattus norvegicus
MCVYVHVNRESTYSQLTGISLVTMLARLQKSMAAESQGLTQALAECAVDSAHGQSSENENAQIIREVEVDKVSAISRDQVAAIKQLWLDPGIQECYDRRREYQLSDSAKYYLTDIDRIAMPSFVPTQQDVLRVRVPTTGIIEYPFDLENIIFRMVDVGGQRSERRKWIHCFESVTSIIFLVALSEYDQVLAECDNENRMEESKALFKTIITYPWFLNSSVILFLNKKDLLEEKIMYSHLISYFPEYTGPKQDVKAARDFILKLYQDQNPDKEKVIYSHFTCATDTENIRFVFAAVKDTILQLNLREFNLV

SEQ ID NO: 7653 - protein, 394 aa, Rattus norvegicus
MGCLGNSKTEDQRNEEKAQREANKKIEKQLQKDKQVYRATHRLLLLGAGESGKSTIVKQMRILHVNGFNGEGGEEDPQAARSNSDGEKATKVQDIKNNLKEAIETIVAAMSNLVPPVELANPENQFRVDYILSVMNVPNFDFPPEFYEHAKALWEDEGVRACYERSNEYQLIDCAQYFLDKIDVIKQADYVPSDQDLLRCRVLTSGIFETKFQVDKVNFHMFDVGGQRDERRKWIQCFNDVTAIIFVVASSSYNMVIREDNQTNRLQEALNLFKSIWNNRWLRTISVILFLNKQDLLAEKVLAGKSKIEDYFPEFARYTTPEDATPEPGEDPRVTRAKYFIRDEFLRISTASGDGRHYCYPHFTCAVDTENIRRVFNDCRDIIQRMHLRQYELL

SEQ ID NO: 7654 - protein, 715 aa, Rattus norvegicus
MPTDLPPASEDAGPDVRAEPDGGTAPATPAESEDNREPAAAAAAEPAAEPAAEPAAEPAAEPAAEPAAEAVPDTEAESASGAVPDTQEEPAAAAASATPAEPAARAAPVTPTEPATRAVPSARAHPAAGAVPGASAMSAAARAAAARAAYAGPLVWGARSLSATPAARASLPARAAAAARAASAARAVAAGRSASAAPSRAHLRPPSPEIQVADPPTPRPAPRPSAWPDKYERGRSCCRYEAASGICEIESSSDESEEGATGCFQWLLRRNRRPGQPRSHTVGSNPVRNFFARAFGSCFGLSECTRSRSLSPGKAKDPMEERRKQMRKEAMEMREQKRADKKRSKLIDKQLEEEKMDYMCTHRLLLLGAGESGKSTIVKQMRILHVNGFNGEGGEEDPQAARSNSDGEKATKVQDIKNNLKEAIETIVAAMSNLVPPVELANPENQFRVDYILSVMNVPNFDFPPEFYEHAKALWEDEGVRACYERSNEYQLIDCAQYFLDKIDVIKQADYVPSDQDLPRCRVLTSGIFETKFQVDKVNFHMFDVGGQRDERRKWIQCFNDVTAIIFVVASSSYNMVIREDNQTNRLQEALNLFKSIWNNRWLRTISVILFLNKQDLLAEKVLAGKSKIEDYFPEFARYTTPEDATPEPGEDPRVTRAKYFIRDEFLRISTASGDGRHYCYPHFTCAVDTENIRRVFNDCRDIIQRMHLRQYELL

SEQ ID NO: 7655 - protein, 846 aa, Rattus norvegicus
MEITRPLLEIGRASTGVDDDTAVNMDSPPIASDGPPIEVSGAPVKSEHAKRPPLERQAAETGNSPISSTTAEEAKVPSLERGEGSPTQPETVHIKPAPVAESGTDSSKADPDSATHAVLQIGPEEVGGVPTMPTDLPPASEDAGPDVRAEPDGGTAPATPAESEDNREPAAAAAAEPAAEPAAEPAAEPAAEPAAEPAAEAVPDTEAESASGAVPDTQEEPAAAAASATPAEPAARAAPVTPTEPATRAVPSARAHPAAGAVPGASAMSAAARAAAARAAYAGPLVWGARSLSATPAARASLPARAAAAARAASAARAVAAGRSASAAPSRAHLRPPSPEIQVADPPTPRPAPRPSAWPDKYERGRSCCRYEAASGICEIESSSDESEEGATGCFQWLLRRNRRPGQPRSHTVGSNPVRNFFARAFGSCFGLSECTRSRSLSPGKAKDPMEERRKQMRKEAMEMREQKRADKKRSKLIDKQLEEEKMDYMCTHRLLLLGAGESGKSTIVKQMRILHVNGFNGEGGEEDPQAARSNSDGEKATKVQDIKNNLKEAIETIVAAMSNLVPPVELANPENQFRVDYILSVMNVPNFDFPPEFYEHAKALWEDEGVRACYERSNEYQLIDCAQYFLDKIDVIKQADYVPSDQDLPRCRVLTSGIFETKFQVDKVNFHMFDVGGQRDERRKWIQCFNDVTAIIFVVASSSYNMVIREDNQTNRLQEALNLFKSIWNNRWLRTISVILFLNKQDLLAEKVLAGKSKIEDYFPEFARYTTPEDATPEPGEDPRVTRAKYFIRDEFLRISTASGDGRHYCYPHFTCAVDTENIRRVFNDCRDIIQRMHLRQYELL

SEQ ID NO: 7656 - protein, 846 aa, Rattus norvegicus
MEITRPLLEIGRASTGVDDDTAVNMDSPPIASDGPPIEVSGAPVKSEHAKRPPLERQAAETGNSPISSTTAEEAKVPSLERGEGSPTQPETVHIKPAPVAESGTDSSKADPDSATHAVLQIGPEEVGGVPTMPTDLPPASEDAGPDVRAEPDGGTAPATPAESEDNREPAAAAAAEPAAEPAAEPAAEPAAEPAAEPAAEAVPDTEAESASGAVPDTQEEPAAAAASATPAEPAARAAPVTPTEPATRAVPSARAHPAAGAVPGASAMSAAARAAAARAAYAGPLVWGARSLSATPAARASLPARAAAAARAASAARAVAAGRSASAAPSRAHLRPPSPEIQVADPPTPRPAPRPSAWPDKYERGRSCCRYEAASGICEIESSSDESEEGATGCFQWLLRRNRRPGQPRSHTVGSNPVRNFFARAFGSCFGLSECTRSRSLSPGKAKDPMEERRKQMRKEAMEMREQKRADKKRSKLIDKQLEEEKMDYMCTHRLLLLGAGESGKSTIVKQMRILHVNGFNGEGGEEDPQAARSNSDGEKATKVQDIKNNLKEAIETIVAAMSNLVPPVELANPENQFRVDYILSVMNVPNFDFPPEFYEHAKALWEDEGVRACYERSNEYQLIDCAWYFLDKIDVIKQADYVPSDQDLPRCRVLTSGIFETKFQVDKVNFHMFDVGGQRDERRKWIQCFNDVTAIIFVVASSSYNMVIREDNQTNRLQEALNLFKSIWNNRWLRTISVILFLNKQDLLAEKVLAGKSKIEDYFPEFARYTTPEDATPEPGEDPRVTRAKYFIRDEFLRISTASGDGRHYCYPHFTCAVDTENIRRVFNDCRDIIQRMHLRQYELL

SEQ ID NO: 7657 - protein, 225 aa, Rattus norvegicus
MKIIHKNGYSKQECMEFKAVVYSNTLQSILAIVKAMTTLGIDYVNPRSREDQQLLLSMANTLEDGDMTPQLAEIIKRLWGDPGIQACFERASEYQLNDSAAYYLNDLDRLTAPGYVPNEQDVLHSRVKTTGIIETQFSFKDLNFRMFDVGGQRSERKKWIHCFEGVTCIIFCAALSAYDMVLVEDEEVNRMHESLPSSTASVITSILQPPPLFCFLTRKISSRRK

SEQ ID NO: 7658 - protein, 362 aa, Rattus norvegicus
MGDSVQILLVFMDKGAGESGKSTIVKQMRILHVNGFNGEGGEEDPQAARSNSDGEKATKVQDIKNNLKEAIETIVAAMSNLVPPVELANPENQFRVDYILSVMNVPNFDFPPEFYEHAKALWEDEGVRACYERSNEYQLIDCAQYFLDKIDVIKQADYVPSDQDLLRCRVLTSGIFETKFQVDKVNFHMFDVGGQRDERRKWIQCFNDVTAIIFVVASSSYNMVIREDNQTNRLQEALNLFKSIWNNRWLRTISVILFLNKQDLLAEKVLAGKSKIEDYFPEFARYTTPEDATPEPGEDPRVTRAKYFIRDEFLRISTASGDGRHYCYPHFTCAVDTENIRRVFNDCRDIIQRMHLRQYELL

SEQ ID NO: 7659 - protein, 378 aa, Rattus norvegicus
MLVQILSSLPGGGRSFGFSLVNSPLRPFDCKYNPVIECSHTYVCASQPSLELQPMFQGKRALVSFQVVSGPCKQKQILLGNRSEFRPTIYSNVIKGMRVLVDAREKLHIPWGDNKNQVHGDKLMAFDTRAPMAAQGMVETRVFLQYLPAIRALWDDSGIQNAYDRRREFQLGESVKYFLDNLDKLGVPDYIPSQQDILLARRPTKGIHEYDFEIKNVPFKMVDVGGQRSERKRWFECFDSVTSILFLVSSSEFDQVLMEDRLTNRLTESLNIFETIVNNRVFSNVSIILFLNKTDLLEEKVQVVSIKDYFLEFEGDPHCLRDVQKFLVECFRGKRRDQQQRPLYHHFTTAINTENIRLVFRDVKDTILHDNLKQLMLQ

SEQ ID NO: 7660 - protein, 109 aa, Rattus norvegicus
QVLHEDETTNRMHESLMLFDSICNNKFFIDTSIILFLNKKDLFGEKIKKSPLTICFPEYPGSNTYEEAAAYIQTQFESKNRSPNKEIYCHMTCATDTNNIQTASWTLCC

SEQ ID NO: 7661 - protein, 353 aa, Rattus rattus
GCTLSAEDKAAVERSKMIDRNLREDGEKAAREVKLLLLGAGESGKSTIVKQMKIIHEAGYSEEECKQYKAVVYSNTIQSIIAIIRAMGRLKIDFGDAARADDARQLFVLAGAAEEGFMTAELAGVIKRLWKDSGVQACFNRSREYQLNDSAAYYLNDLDRIAQPNYIPTQQDVLRTRVKTTGIVETHFTFKDLHFKMFDVGGQRSERKKWIHCFEGVTAIIFCVALSDYDLVLAEDEEMNRMHESMKLFDSICNNKWFTDTSIILFLNKKDLFEEKIKKSPLTICYPEYAGSNTYEEAAAYIQCQFEDLNKRKDTKEIYTHFTCATDTKNVQFVFDAVTDVIIKNNLKDCGLF

SEQ ID NO: 7662 - protein, 85 aa, Rattus sp.
DLDRVADPSYLPTQQDVLRVRVPTTGIIEYPFDLQSVIFRMVDVGGQRSERRKWIHCFENVTSIMFLVALSEYDQVLVESDNENR

SEQ ID NO: 7663 - protein, 354 aa, Cavia porcellus
MGCTLSAEDKAAVERSKMIDRNLREDGEKAAREVKLLLLGAGESGKSTIVKQMKIIHEAGYSEEECKQYKAVVYSNTIQSIIAIIRAMGRLKIDFGDSARADDARQLFVLAGAAEEGFMTAELAGVIKRLWKDSGVQACFNRSREYQLNDSAAYYLNDLDRIAQSNYIPTQQDVLRTRVKTTGIVETHFTFKDLHFKMFDVGGQRSERKKWIHCFEGVTAIIFCVALSDYDLVLAEDEEMNRMHESMKLFDSICNNKWFTDTSIILFLNKKDLFEEKIKKSPLTICYPEYTGSNTYEEAAAYIQCQFEDLNKRKDTKEIYTHFTCATDTKNVQFVFDAVTDVIIKNNLKDCGLF

SEQ ID NO: 7664 - protein, 354 aa, Cavia porcellus
MGCTLSAEDKAAVERSKMIDRNLREDGEKAAREVKLLLLGAGESGKSTIVKQMKIIHEAGYSEEECKQYKAVVYSNTIQSIIAIIRQMGRLKIDFGDSARADDARQLFVLAGAAEEGFMTAELAGVIKRLWKDSGVQACFNRSREYQLNDSAAYYLNDLDRIAQSNYIPTQQDVLRTRVKTTGIVETHFTFKDLHFKMFDVGGQRSERKKWIHCFEGVTAIIFCVALSDYDLVLAEDEEMNRMHESMKLFDSICNNKWFTDTSIILFLNKKDLFEEKIKKSPLTICYPEYTGSNTYEEAAAYIQCQFEDLNKRKDTKEIYTHFTCATDTKNVQFVFDAVTDVIIKNNLKDCGLF

SEQ ID NO: 7665 - protein, 354 aa, Cavia porcellus
MGCTLSAEDKAAVERSKMIDRNLREDGEKAAKEVKLLLLGAGESGKSTIVKQMKIIHEDGYSEEECKQYKVVVYSNTIQSIIAIIRAMGRLKIDFGEPARADDARQLFVLAGSAEEGLMTSELAGVIRRLWRDGGVQACFSRSREYQLNDSASYYLNDLDRISQTNYIPTQQDVLRTRVKTTGIVETHFTFKDLYFKMFDVGGQRSERKKWIHCFEGVTAIIFCVALSDYDLVLAEDEEMNRMHESMKLFDSICNNKWFTDTSIILFLNKKDLFEEKIKRSPLTICYPEYTGSNTYEEAAAYIQCQFEDLNRRKDTKEIYTHFTCATDTKNVQFVFDAVTDVIIKNNLKECGLY

SEQ ID NO: 7666 - protein, 355 aa, Cavia porcellus
MGCTVSAEDKAAAERSKMIDKNLREDGEKAAREVKLLLLGAGESGKSTIVKQMKIIHEDGYSEEECRQYRAVVYSNTIQSIMAIVKAMGNLQIDFADPLRADDARQLFALSCTAEEQGMLPEDLSGVIRRLWADHGVQACFSRSREYQLNDSAAYYLNDLDRIAQSDYIPTQQDVLRTRVKTTGIVETHFTFKDLHFKMFDVGGQRSERKKWIHCFEGVTAIIFCVALSDYDLVLAEDEDMNRMHESMKLFDSICNNKWFTDTSIILFLNKKDLFEEKITHSPLTICFPEYTGANKYDEAASYIQSKFEDLNKRKDTKEIYTHFTCATDTKNVQFVFDAVTDVIIKNNLKDCGLF

SEQ ID NO: 7667 - protein, 355 aa, Cavia porcellus
MGCTVSAEDKAAAERSKMIDKNLREDGEKAAREVKLLLLGAGESGKSTIVKQMKIIHEDGYSEEECRQYRAVVYSNTIQSIMAIVKAMGNLQIDFADPLRADDARQLFALSCTAEEQGMLPEDLSGVIRRLWADHGVQACFSRSREYQLNDSAAYYLNDLDRIAQSDYIPTQQDVLRTRVKTTGIVETHFTFKDLHFKMFDVGGQRSERKKWIHCFEGVTAIIFCVALSAYDLVLAEDEEMNRMHESMKLFDSICNNKWFTDTSIILFLNKKDLFEEKITHSPLTICFPEYTGANKYDEAASYIQSKFEDLNKRKDTKEIYTHFTCATDTKNVQFVFDAVTDVIIKNNLKDCGLF

SEQ ID NO: 7668 - protein, 354 aa, Cavia porcellus
MGCTLSAEDKAAVERSKMIDRNLREDGEKAAKEVKLLLLGAGESGKSTIVKQMKIIHEDGYSEEECKQYKVVVYSNTIQSIIAIIRAMGRLKIDFGEPARADDARQLFVLAGSAEEGLMTSELAGVIRRLWRDGGVQACFSRSREYQLNDSASYYLNDLDRISQTNYIPTQQDVLRTRVKTTGIVETHFTFKDLYFKMFDVGGQRSERKKWIHCFEDVTAIIFCVALSDYTLVLAEDEEMNRMHESMKLFDSICMNKWFTDTSIILFLNKKDLFEEKIKRSPLTICYPEYTGSNTYEEAAAYIQCQFEDLNRRKDTKEIYTHFTCATDTKNVQFVFDAVTDVIIKNNLKECGLY

SEQ ID NO: 7669 - protein, 383 aa, Hordeum vulgare subsp. vulgare
MGSSCSRPHSVNEAEAAGNTRSADIDRRILHETKADQHIHKLLLLGAGESGKSTIFKQIKLLFRTGFDEAELKGYTPVIHANVYQTIKILYDGAKELAQVELESSKYVISSDNQEIGEKLSEIGGRLDYPLLNKELVQDVRKLWEDPAIQETYSCGSVLQVPDCAHYFMENLDRLAEADYVPTKEDVLHARVRTNGVVEIQFSPLGESKRGGEVYRLYDVGGQRNERRKWIHLFEGVDAVIFCAAISEYDQLLFEDETQNRMMETKELFDWVLKQRCFEKTSFMLFLNKFDIFERKIQKVPLTVCEWFKDYEPIAPGKVQDVEHAYEFVKKKFEEVYFQSSKPDRVDRVFKIYRTTALDQKLVKKTFKLIDESMRRSREGTGT

SEQ ID NO: 7670 - protein, 354 aa, Ustilago hordei
MGNCLSSSDQKEAKDRSVAIDKQIEQDSRQFKKECKILLLGSGESGKSTIVKQMKIIHQNGYSKDELLLYRLTVIKNLVDSAQAIVLALRKFKMEPEMPENRENVDVILQYRVDADPGATLDHPMARKVDSLWKDPIIPAIMERSSEFYLMDSAAYFFDNVNRIGQADYVPDENDVLRARSKTTGISETRFNMGQLSIHLFDVGGQRSERKKWIHCFEAVTSIIFCVALSEYDQVLLEESGQNRMAESLVLFESVVNSRWFLRTSVILFLNKIDIFKQKIPKQPLSKYFPEYSGGPDINKAAKYILWRFTQTNRARLSIYPHLTQATDTSNIRLVFAAVKETILTNALKDSGIL

SEQ ID NO: 7671 - protein, 353 aa, Magnaporthe grisea
MGCGMSTEEKEGKARNEEIENQLKRDRLQQRNEIKMLLLGAGESGKSTILKQMKLIHEGGYSRDERESFKEIIFSNTVQSMRVILEAMESLELPLEDQRMEYHVQTIFMQPAQIEGDVLPPEVGNAIEALWKDRGVQECFKRSREYQLNDSARYYFDNIARIAAPDYMPNDQDVLRSRVKTTGITETTFIIGDLTYRMFDVGGQRSERKKWIHCFENVTTILFLVAISEYDQLLFEDETVNRMQEALTLFDSICNSRWFIKTSITLFLNKIDRFKEKLPISPMKNYFPDYEGGDDYAAACDYILNRFVSLNQHETKQIYTHFTCATDTTQIRFVMAAVNDIIIQENLRLCGLI

SEQ ID NO: 7672 - protein, 356 aa, Magnaporthe grisea
MMGACMSASSEESEQKKRSQKIDKDLEEDSKRLRRECKILLLGSGESGKSTIVKQMKIIHLKGYSDDELYNYRPTVFKNLIECAKAVISAMRQFDIEPQLEGNKELCDYLLDYMVESGPQAEIDPKVGQAVQSIWNDPAREQLMDRQTEFYLMDSAEYFFQEVLRIVSPDYLPNEMDVLRARTKTTGIYETRFQMGQLSIHMFDVGGQRSERKKWIHCFENVTSIIFCVALSEYDQVLLEESSQNRMMESLLLFDSVVNSRWFMRTSIILFLNKVDIFKQKLGRSPLGNYFPDYSGGNDVNKADKYLLWRFNQVNRAHLNLYPHLTQATDTSNIRLVFAAVKETILNNALKDSGIL

SEQ ID NO: 7673 - protein, 355 aa, Magnaporthe grisea
MCFGSRNVHDEAGAARSRELDKAIRADEKRLQKEVKLLLLGAGESGKSTVLKQMKLIYAQGFSKNEKIEWKPVVFQHIVQSFRLIHDAMQELDIEFENKENERNITLIMEEQELGAHDALPIEFLDPIKALWVDAGVKKAIAKGNEFALHDNLDYFCDDLDRIWDKSYVPTDQDLLRSRLRTTGITETVFDLGQLTYRMFDVGGQRSERKKWIHCFENVNCLLFLVAISGYDQCLVEDKDGNQMNEALMLWESIANSHWFTKSALILFLNKMDLFKEKITKSPITEYGFTDYHGPSDDWKQTSKYFMDKFRALNRNPEKEIYGHFTNATDTNLLKITMTSVQDMIIQRNLKQLIL

SEQ ID NO: 7674 - protein, 354 aa, Pisolithus sp. 441
MGCVQSTGVDGDAKARNDEIENQLRRDKMLAKNEIKMLLLGAGESGKSTVLKQMKLIHHGGYNDSERDSYKEIIFSNTIQSMRAILEAMPQLDISLSPQNDARRAVILALPIQIEGDVLPRDVADAIRGLWKDPGVKEAVRRSREFQLNDSAVYYFNAIDRMAAPGYLPTDQDILRSRVKTTGITETTFKVGELTYRLFDVGGQRSERKKWIHCFENVTALVFLVSLSEYDQMLYEDESVNRMQEALTLFDSICNSRWFVKTSIILFLNKIDLFAEKLPTSPLSDYFPDYTGGENYDAACDYLLHRFVALNQNAATKQIYAHYTCATDTQQIKFVLSAIQDILLQIHLRECGLL

SEQ ID NO: 7675 - protein, 353 aa, Aspergillus nidulans
MGCGMSTEDKEGKARNEEIENQLKRDKMMQRNEIKMLLLGAGESGKSTILKQMKLIHEGGYSRDERESFKEIIYSNTVQSMRVILEAMESLELPLEDARNEYHVQTVFMQPAQIEGDSLPSEVGNAIAALWQDAGVQECFKRSREYQLNDSAKYYFDSIERIAQSDYLPTDQDVLRSRVKTTGITETTFIIGDLTYRMFDVGGQRSERKKWIHCFENVTTILFLVAISEYDQLLFEDETVNRMQEALTLFDSICNSRWFVKTSIILFLNKIDRFKEKLPVSPMKNYFPDYEGGADYAAACDYILNRFVSLNQAEQKQIYTHFTCATDTTQIRFVMAAVNDIIIQENLRLCGLI

SEQ ID NO: 7676 - protein, 356 aa, Aspergillus nidulans
MGSCFSSESAGDVEQKKRSQAIDRKLEEDSRRLRRECKILLLGSGESGKSTIVKQMKIIHQNGYTVEELALYRLTVYKNLLECAKALIGAYHQFNLEPTSQKVRDNIEFLANYNIDPDPNIPLDPAVGDAITYIWNDPCTSTALERQNEFYLMDSAPYFFEEAKRITSPDYIPNVNDVLRARTKTTGIYETRFTMGQLSIHMFDVGGQRSERKKWIHCFENVTSIIFCVALSEYDQVLLEEGNQNRMMESLVLFDSVVNSRWFMRTSIILFLNKVDLFRQKLPRSPLSNYFPDYSGGNDVNRAAKYLLWRFNQVNRAHLNLYPHLTQATDTTNIRLVFAAVKETILQNALKDSGIL

SEQ ID NO: 7677 - protein, 361 aa, Aspergillus nidulans
MGCMSSKQLEAGDDKEAIQRNARIEKSLKNDKKVMDRTIKILLLGAGESGKSTIIKQMRIIHSGGFPEDERRQTRAVIYSNIVVAFKVLLDIMRTENIDFEQEGTRVSDTEFVDNLEPDVGVEEAFSDLRVRDAMNEMWKDGGVQKAVSKGHEFALHDNLNYFFHSLDRLFESGWLPDNQDMLQARLRTTGITETLFELGQMNFRMMDVGGQRSERKKWIHCFEGVQCLLFMVALSGYDLCLVEDQNANQMHEAMMLFESLVNGEWFKRKPIILFLNKIDLFKDKLAISPISKHFPDYSDSNTDFDAAAKYFADRFRGINRIPEREIYIHYTNATDTTLLKATMDSVQDMIIQKNLHTLIL

SEQ ID NO: 7678 - protein, 357 aa, Anopheles gambiae str. PEST
NQIKMGCAVSRDKEAIERSKNIDRALRADGERAASEVKLLLLGAGESGKSTIVKQMKIIHETGYSQEECEQYRPVVYSNTIQSLMAIIRAMGQLRIDFADPSKTDIARQFFTYASATEEGELTPELVALMKKLWTDPGVQQCFARSREYQLNDSAAYYLNSLDRISQPAYIPTQQDVLRTRVKTTGIVETHFSFKSIHFKMFDVGGQRSERKKWIHCFEGVTAIIFCVALSGYDLVLAEDEEMNRMIESMKLFDSICNSKWFVETSIILFLNKKDLFEEKIVRSPLTICFPEYTGSNTYEEASSYIRMKFENLNRRKDQKEIYTHLTCATDTSNIQFVFDAVSDVIIKNNLKDCGLF

SEQ ID NO: 7679 - protein, 326 aa, Anopheles gambiae str. PEST
MGCAQSAEERAAAARSRLIERNLKEDGIQAAKDIKLLLLGAGESGKSTIVKQMNSMLMLMYSFLLLSFSPPPQCDAKMVFDVVQRMHDTEPFSEDLLLAMKRLWSDSGVQECFCRSNEYQLNDSAKYFLDDLDRLGAKDYQPTEQDILRTRVKTTGIVEVHFSFKNLNFKLFDVGGQRSERKKWIHCFEDVTAIIFCVAMSEYDQVLHEDETTNRMQESLKLFDSICNNKWFTDTSIILFLNKKDLFEEKIRKSPLTICFPEYTGGQEYGEAAAYIQAQFEAKNKSTSKEIYCHMTCATDTNNIQFVFDAVTDVIIANNLRGCGLY

SEQ ID NO: 7680 - protein, 384 aa, Anopheles gambiae str. PEST
ANLAASMECCLSEEAKEQKRINQEIERQLRRDKRDARRELKLLLLGTGESGKSTFIKQMRIIHGSGYSDEDKRGFIKLVYQNIFMAMQSMIRAMDLLKILYSDPANIEHAELIRSVDFETVTTFEPPYVQAIKDLWADAGIQECYDRRREYQLTDSAKYYLMEIDRVAAPNYLPTEQDILRVRVPTTGIIEYPFDLEEIRFSYLSDLARIEAEDFLPTEQDILRARAPTTGILEYPFDLDSIIFRMVDVGGQRSERRKWIHCFENVTSIIFLVALSEYDQILFESENENRMEESKALFKTIITYPWFQHSSVILFLNKKDLLEEKIMYSHLVDYFPEYDDLNPDSEKIIYSHFTCATDTENIRFVFAAVKDTILQSNLKEYNLV

SEQ ID NO: 7681 - protein, 383 aa, Anopheles gambiae str. PEST
MGCFGSAGSKQSDSNSSEDTKSQKRRSDAITRQLQKDKQVYRATHRLLLLGAGESGKSTIVKQMRILHVNGFSDSERKQKIEDIKKNIRDAILTITGAMSTLTPPIQLEKPENQARVDYIQDYASGPDFNYPPEFYEHTEELWKDRGVQQTYERSNEYQLIDCAKYFLDRVSEIKQPNYTPTEQDILRCRVLTSGIFETRFQVDKVNFHMFDVGGQRDERRKWIQCFNDVTAIIFVTACSSYNMVLREDPTQNRLRESLDLFKSIWNNRWLRTISVILFLNKQDLLAEKIKAGKSKLSDYFGEFNRYQTPADAVCEMGEDPEVIRAKYFIRDEFLRISTASGDGKHYCYPHFTCAVDTENIKRVFNDCRDIIQRMHLRQYELL

SEQ ID NO: 7682 - protein, 384 aa, Anopheles gambiae str. PEST
MLLIDCFRRPSHELQARKKQSSKEVVQMRKLYRDPVKVLLLGAGESGKTTIIKQMRILHIQNSYSFDERLEKLSDIYENIHESIYELVRQVILLELEFDSIANQRCAEYILRMGPQAPWNLSAEYVRCVRRLWSDAGVKRCYKRSNEFQLIDSAKYFLDRVEKISMPGYIPTNGDILNCRKTTTGIQEVRFNVRMPGSLGGGTQEFRMFDVGGQRHHRSKWMQAFEGVQAVLFLISCGGFDQTLREDPKQNRLAEGFELFRGVWHNRFLAETGVIVFMNKQDVLEQKLLAGQSIRTYFPDYDDYVAFADKDQLYDELTRTRSFIRSKLVDITNEPPRRTSHLVGRKRTCYFHFTIATDTQNVRTVFNDVHNIILTKNLSKMDLL

SEQ ID NO: 7683 - protein, 374 aa, Anopheles gambiae str. PEST
SKLSCARCCGDFFGYLLRLRVSPEELEQRYKSREIDKILEKDKHAFRRQVKLLLLGAGESGKSTFLKQMRIIHGINFEPELIKEYQHVIYQNIVKGMQVLCDARDKLDIPWEHPTSQLAANEAVMFHSGCLLDAEQFHQYVPLINILWTDGAIRKAYDRRREFQISDSVSYFLDELDRISRLDYKPTHRDILHCRKATKGVFEFTIRIQNIPFVFVDVGGQRTQRQKWTKCFDCSVTSILFLVSTSEFDQVLAEDRKTNRLEESRNIFDTIVNNTTFEGISIILFLNKTDLLQQKVKNPETDIRWYYPQFTGNPHSILDVQNFILQMFMNVRKNTKTPIYHHFTNAVDTQNIQVVFSSVKDTILHRNLSALMLQ

SEQ ID NO: 7684 - protein, 155 aa, Coccidioides posadasii
FDVGGQRSERKKWIHCFENVTTILFLVAISEYDQLLFEDETVNRMQEALTLFDSICNSRWFTKTSIILFLNKIDRFKEKLPVSPMKNYFPDYEGGADYAAACDYILNRFVSLNQAEQKQIYTHFTCATDTTQIRFVMAAVNDIIIQENLRLCGLI

SEQ ID NO: 7685 - protein, 354 aa, Helisoma trivolvis
MGCTLSAEERAAMERSKAIEKNLKEDGMQAAKDIKLLLLGAGESGKSTIVKQMKIIHEGGFTSEDTKQYKPVVYSNTIQSLVAIIRAMGTLSIPFGDNERESDAKMVLDVIARMEDTEPFSEELLAAMKRLWVDSGVQECLGRANEYQLNDSAKYFLDDLDRLGAKDYMPTEQDILRTRVKTTGIVEVHFSFKNLNFKLFDVGGQRSERKKWIHCFEDVTAIIFCVAMSEYDQVLHEDETTNRMQESLKLFDSICNNKWFTETSIILFLNKKDLFEEKIKKSPLTICFPEYTGKQMYQEASAYIQAQFEAKNKSSAKEIYCHQTCATDTNNIQFVFDAVTDVIIANNLRGCGLY

SEQ ID NO: 7686 - protein, 354 aa, Helisoma trivolvis
MGCVTSQEDKAAVERSKQIDKSLRMDGEKAAREVKLLLLGAGESGKSTIVKQMKIIHEKGYSQEECLQYNPVVYSNAIQSMIAIIKAMGQLKIQFGHPDRAEEARQFFALAGHADEGEMSQELSGIMKRLWKDVGVQECFSRSREYQLNDSAEYYLNALDRISAPGYIPTEQDVLRTRVKTTGIVETHFTFKDLHFKMFDVGGQRSERKKWIHCFEGVTAIIFIVAMSEYDLTLAEDQEMNRMMESMKLFDSICNNKWFTETSIILFLNKKDLFEEKIKKSPLTICFPEYTGANTYEEAAAYIQLQFENLNKKKDTKEIYSHFTCATDTNNVQFVFDAVTDVIIKNNLKDCGLF

SEQ ID NO: 7687 - protein, 370 aa, Kluyveromyces lactis
MTGISQALALNDSGVNGFDTDLAKRNGTVNASGGQSPGGSETVNALKVLLLGSGESGKSTVLQQLKILHQNGFSREELLEYKPFIFDNIIETGKDLAKARRTFNVQLEEDAEISESDLDELLSQQYQPTKLPCLPADLAKTLKILWNLQSTQDLLVSEHRSSFYLMDSASYFYENLDRISEPKYIPTITDVIRTRKKTSGIFDTMIDLDKNLKLHFFDVGGQRSERKKWIHCFDNVTLIIFCVSLSEYDQTLLEDNSQNRLEESLILFDSVVNSRWFARSSVVLFLNKIDIFAEKLRHVPLEKYFPDYTGGKDINKAAKYILWRFVQLNRANLNIYPHVTQATDTSNIKLVFAAIKETILENSLKDSGVL

SEQ ID NO: 7688 - protein, 447 aa, Kluyveromyces lactis
MGCVASTGNYENEDDPFIQNKRANDLIEQNLQQERNKNKNEVKLLLLGAGESGKSTVLKQMKLLHQGGFTHRERMQYGQVIWADAIESMRTLILQAGKLGIELDSDLKNAHSGQLVNTELHQCKEKIFRANTLDQIDARMAGGSEFLNEYVLKYNGIGSKKKRQTTLGFKESNGADPEEEDETDAFLSEKLAGTSYTGSSETSELKRIDQSTNEEIAYAIKKLWTQDKGIRQCFNRSSEFQLEGSASYYFDNIEKFARVDYVCDDMDILKVRIKTTGITENSFKIGPSTFKVYDAGGQRSERRKWIHCFEGITAVVFVIAISEYDQMLFEDERVNRMHESIVLLDTLLNSRWFANTPFILFLNKVDIFQEKVKRSPIRTWFPNYPGKLGDSETGLKYFESLFLSLNRSNKPIYVHRTCATDTQSMRFVLGAVTDLVIQQNLKKSGIL

SEQ ID NO: 7689 - protein, 353 aa, Hypocrea virens
MGCGMSTEDKEGKARNEEIENQLKRDKMMQRNEIKMLLLGAGESGKSTILKQMKLIHEGGYSRDERESFKEIIFSNTVQSMRVILEAMESLELPLEDQRMEYHVQTIFIQPAQIEGDVLPPEVGGAIEALWKDHGVQECFKRSREYQLNDSARYYFDNIARIAAPDYMPNDQDVLRSRVKTTGITETTFIIGDLTYRMFDVGGQRSERKKWIHCFENVTTILFLVAISEYDQLLFEDETVNRMQEALTLFDSICNSRWFIKTSIILFLNKIDRFKEKLPVSPMKNYFPDYEGGDDYAAACDYILNRFVSLNQHETKQIYTHFTCATDTTQIRFVMAAVNDIIIQENLRLCGLI

SEQ ID NO: 7690 - protein, 354 aa, Hypocrea virens
MCFGARNKNEDGEARSRELDKGIRQEEKRMAKEVKLLLLGAGESGKSTILKQMKLIYAQGFNKSERLDFKPVIFSNIVQSFKTISEAMAEMGFEYDSPDNEKYMAHILVDNEISPDSGMPEDYLEPIKALWQDSGVLAAVSKGNEYALHDNLTYFVTDIDRIWADGYVPNDQDLLRSRLRTTGITETVFDLGQLTYRMFDVGGQRSERKKWIHCFENVNCLLFLVAISGYDQCLVEDKDGNQMNEALMLWESIANSHWFTMTSLILFLNKIDLFKEKLPKSPISKYGFTDYHGPDDDYKAASKYFLDKFRALSRNPEKEIYGHFTNATDTNLLKITMGSVQDMIIQRNLKKLIL

SEQ ID NO: 7691 - protein, 353 aa, Sporothrix schenckii
MGCGMSVEEKEGKARNEEIENQLKRDRMQQRNEIKMLLLGAGESGKSTILKQMKLIHEGGYSRDERESFKEIIYSNTVQSMRVILEAMESLELPLEDQRMEYHVQTIFMQPAQIEGEVLPPEVGNAIEALWKDAVVQECFKRSREYQLNDSARYYFDNIARIAAPDYMPDDQDVLRSRVKTTGITEKTFIIGDLTYRMFDVGGQRSERKKWIHCFENVTTILFLVAISEYDQLLFEDETVNRMQEALTLFDSICNSRWFIKTSIILFLNKIDRFKEKLPISPMKNYFPDYEGGDDYAAACDYILNRFVNLNQHESKQIYTHFTCATDTTQIRFVMAAVNDIIIQENLRLCGLI

SEQ ID NO: 7692 - protein, 355 aa, Sporothrix schenckii
MGACMSSNSEEVEQKKRSQKIDKDLEEDSKRLRRECKILLLGSGESGKSTIVKQMKIIHLKGYSEDELFSYRPTVFKNLLECAKAVINAMRQFEIELESDEIRAYCDFLLDYSIGSGPQPSIDPKVGEAVLALWEDPVRGQLMERQTEFYLMDSAGYFFDEVRRIVHPDYIPNEMDVLRARTKTTGIYETRFQMGPLSIHMFDVGGQRSERKKWIHCFEDVTSIIFCVALSEYDQVLLEESSQNRMMESLLLFDSVVNSRWFMRTSIILFLNKVDIFKQKLGRSPLGNYFPDYSGGDDANKAAKYLLWRFNQVNRAHLNLYPHLTQATDTSNIRLVFAAVKETILNNALKDSGIL

SEQ ID NO: 7693 - protein, 358 aa, Fugu rubripes
MGAGISAEEKHSREAEKDIKEDAEKDARTVKLLLLGAGESGKSTIVKQMKIIHQDGYSLFECLFFIAIIYGNTLQSILTIVRAMTTLNIQYGDSARQDDARKLMHMADTIEEGTMPKEMSDIIQRLWKDTGLQACFFRASEYQLNDSAGYYLSDLERLVTPGYVPTEQDVLRSRVKTTGIIFTQFSFKDLNFRMFDVGGQRSERKKWIHCFEGVTCIDFIAALSAYDMVLVEDDEVNRMHESLHLFNSICNHRYFAATSIVLFLNKKDVFEEKIKKAHLSICFPDYDGPDTYEDAGNYIKVQFAFLNMRRDIKEIYSHMTCATDTQNVKFVFVFDAVTDIIIKENLKDCGLFVTHHGR

SEQ ID NO: 7694 - protein, 371 aa, Fugu rubripes
MGCTVSAETKALAERSNMIDRNLREDGEKTAREVKLLLLGAGESGKSTIVKQMKIIHEDGYSEDECKQYRAVVYSNTIQSIMAIIKAMGNLKIDYEDSARADDAAQLFALSAAAEEQGILPDDLSRVIQRLWSDGGVQSCFTRAREYQLNDSAAYYLNDLERIAKSDYIPTQQDVLRTRVKTTGIVETHFTFKDLHFKDFDVGGQRSERKKWFHCFEGVTGIIFCVGMSAYDLVLAEDEEMNRMHESMKLFDSICNNKWFTETSIILFLNKKDLFEEKIAHSPLTICFPEYTGPNKYEEAQAYIETKFEDLNKKKDTKEIYTHFTCATDTKNVQFVFDAVTDVIIKNKLKDCGLFVSAAVQRNGRHKAKTV

SEQ ID NO: 7695 - protein, 355 aa, Fugu rubripes
MGCRQTSEEKEKARSCRRIDRHLRSESQRQRREIKLLLLGTSNSGKSTIVKQMKIIHSGGSNLEACKEYMPLILYNLIDSLTRIIRALAALRIDFHNPDRAYDAVQLFALTGPAESSGEITPELLGVMRRLWADPGAGACFKRSSEYHLEDNAAYYLNDLLRISALEYIPTVEDILRSRDMTTGIVENKFTFKELTFKMVDVGGQRSERKKWIHCFEGVTAIIFCVELSGYDLKLYEDNQTSRMAESLRLFDSICKTIWFINTSLILFLNKKDLLAEKIRRIPLVICFPEYKGQNTYEEAAVYIQRQFEDLNRNKETKEIYSHFTCATDTSNIQFVFDAVTDVLIQNNLKYIGLC

SEQ ID NO: 7696 - protein, 109 aa, Fugu rubripes
DSVTSILFLVSSSEYDQVLMEDRQTNRLRESVDIFETIVNNRVFGNVSIILFLNKTDLLEEKVQVPLKDYFPEYTGPEHSLADIQAFMVECFRARRRDATQKPLYHHFT

SEQ ID NO: 7697 - protein, 109 aa, Fugu rubripes
DGITSILFMVSSSEYDQVLMEDRRTNRLVESMNIFETIVNNKLFLNVSIILFLNKTDLLVDKIRTVNICKNFPEFRGDPRRLEDVQAFLVQSFSRKRRNRIKPLFHHLT

SEQ ID NO: 7698 - protein, 340 aa, Caenorhabditis remanei
EGNARNKEIEKQLNADKRAGSSIVKLLLLGAGECGKSTVLKQMQILHSNGFTEEEVNEKRAIVYNNTVSAMCTILRAMDGVLHLPLENGQKEAEKAIVMKVQENGEEGEALTEEVSKAIQSLWADPGVKKAFEMRSEYQLPDSAKYFLDNCQRISEPGYRPNDQDILYSRVATTGVVEVKFKIKELDFRVFDVGGQRSERRKWIHCFDNVESIIFITAISEYDQVLFEDETTNRMIESMQLFNSICNSTWFLSTAMILFMNKKDLFMEKIQRVNITTAFPDYEGGQNYEEAVNFIKQKFAELNLNPDKKTIYMHETCATDTNQVQLVISSVIDTIIQKNL

SEQ ID NO: 7699 - protein, 339 aa, Caenorhabditis remanei
EGNARNKEIEKQLNADKRAGSSIVKLLLLGAGECGKSTVLKQMQILHSNGFTEEEVNEKRAIVYNNTVSAMCTILRAMDGVLHLPLENGQKEAEKAIVMKVQENGEEGEALTEEVSKAIQSLWADPGVKKAFEMRSEYQLPDSAKYFLDNCQRISEPGYRPNDQDILYSRVATTGVVEVKFKIKELDFRVFDVGGQRSERRKWIHCFDNVESIIFITAISEYDQVLFEDETTNRMIESMQLFNSICNSTWFLSTAMILFMNKKDLFMEKIQRVNITTAFPDYEGGQNYEEAVNFIKQKFAELNLNPDKKTIYMHETCATDTNQVQLVISSVIDTIIQKN

SEQ ID NO: 7700 - protein, 340 aa, Caenorhabditis remanei
ENSEGNARNKEIEKQLNADKRAGSSIVKLLLLGAGECGKSTVLKQMQILHSNGFTEEEVNEKRAIVYNNTVSAMCTILRAMDGVLHLPLENGQKEAEKAIVMKVQENGEEGEALTEEVSKAIQSLWADPGVKKAFEMRSEYQLPDSAKYFLDNCQRISEPGYRPNDQDILYSRVATTGVVEVKFKIKELDFRVFDVGGQRSERRKWIHCFDNVESIIFITAISEYDQVLFEDETTNRMIESMQLFNSICNSTWFLSTAMILFMNKKDLFMEKIQRVNITTAFPDYEGGQNYEEAVNFIKQKFAELNLNPDKKTIYMHETCATDTNQVQLVISSVIDTIIQ

SEQ ID NO: 7701 - protein, 343 aa, Caenorhabditis remanei
ENSEGNARNKEIEKQLNADKRAGSSIVKLLLLGAGECGKSTVLKQMQILHSNGFTEEEVNEKRAIVYNNTVSAMCTILRAMDGVLHLPLENGQKEAEKAIVMKVQENGEEGEALTEEVSKAIQSLWADPGVKKAFEMRSEYQLPDSAKYFLDNCQRISEPGYRPNDQDILYSRVATTGVVEVKFKIKELDFRVFDVGGQRSERRKWIHCFDNVESIIFITAISEYDQVLFEDETTNRMIESMQLFNSICNSTWFLSTAMILFMNKKDLFMEKIQRVNITTAFPDYEGGQNYEEAVNFIKQKFAELNLNPDKKTIYMHETCATDTNQVQLVISSVIDTIIQKNL

SEQ ID NO: 7702 - protein, 333 aa, Caenorhabditis remanei
EIEKQLNADKRAGSSIVKLLLLGAGECGKSTVLKQMQILHSNGFTEEEVNEKRAIVYNNTVSAMCTILRAMDGVLHLPLENGQKEAEKAIVMKVQENGEEGEALTEEVSKAIQSLWADPGVKKAFEMRSEYQLPDSAKYFLDNCQRISEPGYRPNDQDILYSRVATTGVVEVKFKIKELDFRVFDVGGQRSERRKWIHCFDNVESIIFITAISEYDQVLFEDETTNRMIESMQLFNSICNSTWFLSTAMILFMNKKDLFMEKIQRVNITTAFPDYEGGQNYEEAVNFIKQKFAELNLNPDKKTIYMHETCATDTNQVQLVISSVIDTIIQKNL

SEQ ID NO: 7703 - protein, 334 aa, Caenorhabditis remanei
KEIEKQLNADKRAGSSIVKLLLLGAGECGKSTVLKQMQILHSNGFTEEEVNEKRAIVYNNTVSAMCTILRAMDGVLHLPLENGQKEAEKAIVMKVQENGEEGEALTEEVSKAIQSLWADPGVKKAFEMRSEYQLPDSAKYFLDNCQRISEPGYRPNDQDILYSRVATTGVVEVKFKIKELDFRVFDVGGQRSERRKWIHCFDNVESIIFITAISEYDQVLFEDETTNRMIESMQLFNSICNSTWFLSTAMILFMNKKDLFMEKIQRVNITTAFPDYEGGQNYEEAVNFIKQKFAELNLNPDKKTIYMHETCATDTNQVQLVISSVIDTIIQKNL

SEQ ID NO: 7704 - protein, 332 aa, Caenorhabditis remanei
NKEIEKQLNADKRAGSSIVKLLLLGAGECGKSTVLKQMQILHSNGFTEEEVNEKRAIVYNNTVSAMCTILRAMDGVLHLPLENGQKEAEKAIVMKVQENGEEGEALTEEVSKAIQSLWADPGVKKAFEMRSEYQLPDSAKYFLDNCQRISEPGYRPNDQDILYSRVATTGVVEVKFKIKELDFRVFDVGGQRSERRKWIHCFDNVESIIFITAISEYDQVLFEDETTNRMIESMQLFNSICNSTWFLSTAMILFMNKKDLFMEKIQRVNITTAFPDYEGGQNYEEAVNFIKQKFAELNLNPDKKTIYMHETCATDTNQVQLVISSVIDTIIQ

SEQ ID NO: 7705 - protein, 336 aa, Caenorhabditis remanei
RNKEIEKQLNADKRAGSSIVKLLLLGAGECGMSTVLKQMQILHSNGFTEEEVNEKRAIVYNNTVSAMCTILRAMDGVLHLPLENGQKEAEKAIVMKVQENGEEGEALTEEVSKAIQSLWADPGVKKAFEMRSEYQLPDSAKYFLDNCQRISEPGYRPNDQDILYSRVATTGVVEVKFKIKELDFRVFDVGGQRSERRKWIHCFDNVESIIFITAISEYDQVLFEDETTNRMIESMQLFNSICNSTWFLSTAMILFMNKKDLFMEKIQRVNITTAFPDYEGGQNYEEAVNFIKQKFAELNLNPDKKTIYMHETCATDTNQVQLVISSVIDTIIQKNL

SEQ ID NO: 7706 - protein, 301 aa, Ephydatia fluviatilis
KIIHENGYTAEECEQYRPVVYSNTVQSMMAIIKAMDTLAIPYENGDRREDAKELCAMASQSDEIRFTEDLVVRMKRLWADGGVKECVRRAREYQLNDSAEYYLSSLDRLAQPDYIPTEQDVLRTRVKTTGIVESFFTYQGLNFKIVDVGGQRSERKKWIHCFEGVTSIIFCVALSGYDLLLAEDEKTNRMLESMKLFHSICNNRWFENTSIILFLNKKDLFAEKIQLSPLTICFPEYTGANSYDEASKYIREKFEALNDKKEKKQIYTHFTCATDTGNIRHVFKDVTDVIVKNNLRDVGLF

SEQ ID NO: 7707 - protein, 302 aa, Ephydatia fluviatilis
KIIHESGFNREECKQYRPVVYSNAIQSLAAIIKGMDLLGINFASPARREDAMLLFEVTARHEDTEPFTPELLAAMKRLWGDTGVQLCFRRSSEYQLNDSAKFYLDSLDRIGDKRYIPTEQDILRTRVKSTGIVEYEFSYKGLHFRVVDVGGQRSERKKWIHCFEDVTAILFFVALSEYDMSLREDATVNRMEEALRLFNSILNNKWFLETSVILFLNKKDLFEEKLRCKPLSHCFPNYVGENTFQDGANFIRDRFVSLNRNPDKKTVYTHITCATDTNNIQIVFQSVTDIVISEHLRGAGLL

SEQ ID NO: 7708 - protein, 301 aa, Ephydatia fluviatilis
RIIHGQGYSDADRADFRSLVFRNVFTAVNALTEAMTSLKIPFQNASNKESGAVYGRKKDEEVTMLSESDRDKLKAFWLDRGVQSCFERRNEFQISDSAKYYLDALDRICTSNYLPTVDDVLRIRIATTGIVEYTFPMRKDVVFRMVDVGGQRSERRKWIHCFEDVKAIIFLTAINEYDQVLVEDDTVNRLKESLALFETILRYPWFEKSSIVLFMNKEDIFKEKIMKSDLARYFPSYQGPKQNNEQAREFLKNEFLAVNPNPERIISPHFTCATDTENISRVFETVRLHVLEENLKDYNLM

SEQ ID NO: 7709 - protein, 304 aa, Ephydatia fluviatilis
KIIHGDGYSKDELESFRPVIYGNLAASMRVVVSNMENLGIPFSDTTNREYANMILSLSTSIPNCNSLPSEVAEAFRRLWNDQGVRACFSRAYEYQLNDSAPYYFENMDRLLKPDYVPDEQDVLRSRVQTTGIIETSFRVEKLVYRVVDVGGQRSERRKWIQCFDDVKAVLFVVALNGYDMTLFEDGKTNRLEESLNLFQAICNNKFFVKTSMILFLNKVDLFENKVLTSDRQLRNYFSSYQGPDRNPEEAKKFIQSQFLERNMSKNKIIYPHFTTATNTSNIRVVFQAVLDAIIRENLEAANLL

SEQ ID NO: 7710 - protein, 301 aa, Ephydatia fluviatilis
RIIHGQGYSDADRADFRTLVFRNIFTAVNALTEAMTSLKIPFERASNKESGAVYGRKKDEEETVLSESDRDKLKAFWLDRGVQSCFERRNEFQISDSAKYYLDALDRICISNYLPTIDDVLRIRIATTGIVEYTFQMRKDVIFRMVDVGGQRSERRKWIHSFEDVKAIIFLTAINEYDQVLQEDAGVNRLLESLALFGTILTYPFFLKCAIILFMNKTDIFAEKIQKSHLKLHFPEYTGPLQDVESGRQFILQKFREKFDSERLFSHHFTCATDTENIKLVFQAVREQILQENIDTIFNNG

SEQ ID NO: 7711 - protein, 305 aa, Ephydatia fluviatilis
RIIHGSGYNETDRANFKATVYRNVVVAIQAIVAAMRDLQIPYASDAVKEAAAEVESIAVEEVQMIDAGAKSAIERLWRDSGVQQCFLRRREYQISDSAKYYLDDLNRLCTQDYIPTMQDVLRVRVPTTGINEYLFTIDTRVFRMVDVGGQRSERRKWIHCFENVASVMFLVALSEYDQLLQETGEDVKVNRMEESLALFKTTTGLQWFTNSSLILFLNKKDLFEEKITTSSPLSDYFPDYKGPPKDHIQARDFILRKFTSSNPSREKDIYPHFTCATDTDNIKFVFETVRDHILDGIIGGIFPGL

SEQ ID NO: 7712 - protein, 307 aa, Ephydatia fluviatilis
KIIHGDGYSNEELDAFKHVVYKNLVASMAAIVRNMERLGISFSDPSNSVHADTLLALSSNQDFSSMPPKLAEAIKHLWSDQGVKACFKRAYEYQIEDSASYFLGDMDRLLQSGYVPNEQDVLRSRVQTTGIIETSFRVKKLIYRIVDVGGQRAERSKWIQCFDDVKAVLFVVALNGYDMTLAEDGVTNRMREALVLFEDICNKPIFARTSMILFLNKVDAFETKILDTDRHLRTFFPEFSGPDHDVEAAKEYIKSQFLACNKSRGKQITPHFTTATNTSNVRVVIDAVIEAIIRENLESIGLIREDE

SEQ ID NO: 7713 - protein, 303 aa, Ephydatia fluviatilis
RIIHGEDYSEQDRLEFRSSIYHNILKGMKILVEARRRLQIPLSNPQCDEYSQVITNYHRTGEITPEDFQDYTKALGTLWKDTGIRETEKRKNEFQLGDNMAYLLNNLDRIGQVGYIPNKEDILYARKATRGVHEYLINIKGVPFRFVDVGGQRSQRQKWFQCFDEVTSVLFLVSSSSFDQTLLEDRVTNRMVESVNIFDTIVNNRCFRTVSIILFFNKTDLLIEKIKYQSIKDFFPDFDGNPRSLEEVKSYLVSMFNSVRKDQSQDLYRHFTTAVDTGNIKVVFNIVKDTILTRHIQEVMEIP

SEQ ID NO: 7714 - protein, 329 aa, Ephydatia fluviatilis
KILHKDGYSDQERYEKVKDIKSNVRDVILSVIEAMDKLQPRVQINDAENVPRAHYVRDIVSQKTFDSFSPEFFNTVSILWRDAGVQAMLRRSNEYQLIDSAAYFMDAHKLTEISRPDYKPSDQDILRCRVLTNGIFETKFVVEKVNFHMFDVGGQRSERRKWIQCFNDVTAIVFVVSCSSFDTVIREDGKTNCLQESLELFDNIWTNRWLQSVSVILFLNKQDTLRHKVEDGKRVEDYFPEFATYRAPTQEGRDKGEPGERESELYTRAKYFVRDLFVRISKATESDPRHPHYLYPHFTTAIDTENIKRVFSSCRDIIQREHLRKYELL

SEQ ID NO: 7715 - protein, 325 aa, synthetic construct
DARTVKLLLLGAGESGKSTIVKQMKIIHQDGYSLEECLEFIAIIYGNTLQSILAIVRAMTTLNIQYGDSARQDDARKLMHMADTIEEGTMPKEMSDIIQRLWKDSGIQACFDRASEYQLNDSAGYYLSDLERLVTPGYVPTEQDVLRSRVKTTGIIETQFSFKDLNFRMFDVGGQRSERKKWIHCFEGVTAIIFCVALSDYDLVLAEDEEMNRMHESMKLFDSICNNKWFTDTSIILFLNKKDLFEEKIKKSPLTICYPEYAGSNTYEEAGNYIKVQFLELNMRRDVKEIYSHMTCATDTQNVKFVFDAVTDIIIKENLKDCGLF

SEQ ID NO: 7716 - protein, 350 aa, synthetic construct
  unsure (1)..(350): unsure at all Xaa locations
MGAGASAEEKHSRELEKKLKEDAEKDARTVKLLLLGAGESGKSTIVKQXKIIHQDGYSLEECLEFIAIIYGNTLQSILAIVRAXTTLNIQYGDSARQDDARKLXHXADTIEEGTXPKEXSDIIQRLWKDSGIQACFDRASEYQLNDSAGYYLSDLERLVTPGYVPTEQDVLRSRVKTTGIIETQFSFKDLNFRXFDVGGQRSERKKWIHCFEGVTAIIFCVALSDYDLVLAEDEEXNRXHESXKLFDSICNNKWFTDTSIILFLNKKDLFEEKIKKSPLTICYPEYAGSNTYEEAGNYIKVQFLELNXRRDVKEIYSHXTCATDTQNVKFVFDAVTDIIIKENLKDCGLF

SEQ ID NO: 7717 - protein, 384 aa, Lotus japonicus
MGLLCSKNRRYNDADTEENTQTAEIERRIELETKAEKHIQKLLLLGAGESGKSTIFKQIKLLFQTGFDEAELKSYQPVIHANVYQTIKLLHDGAKELAQNDVDFSKYVISDENKEIGEKLSEIGGRLDYPCLTKELALEIENLWKDAAIQETYARGNELQVPDCTHYFMENLHRLSDANYVPTKDDVLYARVRTTGVVEIQFSPVGENKKSGEVYRLFDVGGQRNERRKWIHLFEGVSAVIFCAAISEYDQTLFEDENKNRMMETKELFEWVLKQPCFEKTSFMLFLNKFDIFEKKILKVPLNVCEWFKDYQPVSTGKQEIEHAYEFVKKKFEESYFQNTAPDRVDRVFKIYRTTALDQKVVKKTFKLVDETLRRRNLFEAGLL

SEQ ID NO: 7718 - protein, 354 aa, Blumeria graminis
MGCGLSTEEKEKKARNEEIENQLKRDKILQRNEIKMLLLGAGESGKSTILKQMKLIHEGGYSRDERESFKEIIFSNTEQSMRVILEAMESLELPLDDQKAEYHVQTIFMQPAQIEGDNLPPEVGTAISALWTDAGVQDCFKRSREYQLNDSARYYFDNIDRIAQPDYMPNDQDVLRSRVKTTGITETTFIIGDLTYRMFDVGGQRSERKKWIHCFENVTTILFLVAISEYDQLLFEDETVNRMQEALTLFDSICNSRWFIKTSIILFLNKIDRFKEKLPISPMKNYFPDFEGGDDYALACDYILNRFVSLNHHETKQIYTHFTCATDTTQIRFVMAAVNLDIIIQENLRLCGLI

SEQ ID NO: 7719 - protein, 383 aa, Spinacia oleracea
MGLLCSKHQHSTKPDAENAQATGIERRIERETIAEKHIQKLLLLGAGESGKSTIFKQIKLLFQMGFDDAELNSYTPVIHANVYQTIKLLIDGSKELAQNETDSSKYSLSPDNKEIGDKLSEIGGRLDYPQLTKELSEEIEKIWNDPAIQETHARSSELQLPDCANYFMEHLDRLSDVNYIPTKEDVLYARVRTTGVVEIQFSPVGENKKSGEVYRLFDVGGQRNERRKWIHLFEGVTAVIFCAAISDYDQMLYEDENKNRMVETKELFEWVLKQRCFERTSIMLFLNKFDIFEKKVQKVPLSTCEWFKDYQPVSSGQQEIEHTYEFVKKKFEELYYQCTAPDRVDRVFKIYRTTALDQKLVKKTFKLLDETLRRRNLVEAGLL

SEQ ID NO: 7720 - protein, 383 aa, Arabidopsis thaliana
MGLLCSRSRHHTEDTDENTQAAEIERRIEQEAKAEKHIRKLLLLGAGESGKSTIFKQIKLLFQTGFDEGELKSYVPVIHANVYQTIKLLHDGTKEFAQNETDSAKYMLSSESIAIGEKLSEIGGRLDYPRLTKDIAEGIETLWKDPAIQETCARGNELQVPDCTKYLMENLKRLSDINYIPTKEDVLYARVRTTGVVEIQFSPVGENKKSGEVYRLFDVGGQRNERRKWIHLFEGVTAVIFCAAISEYDQTLFEDEQKNRMMETKELFDWVLKQPCFEKTSFMLFLNKFDIFEKKVLDVPLNVCEWFRDYQPVSSGKQEIEHAYEFVKKKFEELYYQNTAPDRVDRVFKIYRTTALDQKLVKKTFKLVDETLRRRNLLEAGLL

SEQ ID NO: 7721 - protein, 353 aa, Penicillium marneffei
MGCGMSTEDKEGKARNEEIENQLKRDKMMQRNEIKMLLLGAGESGKSTILKQMKLINEGGYSRDERESFKEIIYSNTVQSMRVILEAMESLELPLEDPRAEYHVQTIFMQPSQIEGDSLPPEVGGAIQALWHDAGVQECFRRSREYQLNDSAKYYFDSIERIAQPDYLPSDQDVLRSRVKTTGITETTFIIGDLTYRMFDVGGQRSERKKWIHCFENVTTILFLVAISEYDQLLFEDETVNRMQEALTLFDSICNSRWFIKTSIILFLNKIDRFKEKLPVSPMKNYFPDYEGGADYAAACDYILNRFVSLNQAEQKQIYTHFTCATDTNQIRFVMAAVNDIIIQENLRLCGLI

SEQ ID NO: 7722 - protein, 354 aa, Pneumocystis carinii f. sp. ratti
MGCSPLQSYKQDTSRSREIELYLRRDQEEAIHEAKILLLGAGESGKTTILKQMKLIHLSGFTLKEREYYRTIIFSNMLQAMRLIIEAMEEFDICFERRENEQYLDLLLQERELTDRENLPPEYYRPFISLWEDAGVMRAVNRGNEYALHDNCFSFFENIHRLFERKYIPTDQDILRCRLKTTGITETCFKVSRLTYRMIDVGGQRSERRKWFHCFENVTAVLFLVAISGYDQCLAEDIGANQMQEALVLFDSICNSQWFINTSIILFLNKIDLFRVKLHVSLISNYFPDFNSEHQTDYRASCLFFRQKFLKLNRNHQKTIYTHFTNATDTTLLKSVMISVTDIIFNRNLQNLML

SEQ ID NO: 7723 - protein, 455 aa, Glycine max
MLLYKYLSTTLYRTWNTIYYIFLHGEEHKLNLLLSSFASHFTLNVSAKSRGIFHSTTISLQKRPFCFFSDNMGLVCSRGRRFREADAEENAQDAEIERRIKLETKAEKHIQKLLLLGAGESGKSTIFKQIKLLFQTGFDEAELKSYIPVVHANVYQAIKVLHDGSKELAQNDVDSSKYVISNENQDIGEKLSEIGGTLVYPRLTKELAQEIETLWEDAAIQETYARGNELQVPDCAHYFMENLERLSDANYVPTKEDVLYARVRTTGVVEIQFSPVGENKRSGEVYRLFDVGGQRNERRKWIHLFEGVTAVIFCSAISEYDQTLYEDENKNRMMETKELFEWVLRQPCFEKTSFMLFLNKFDIFEKKVLNVPLNVCEWFKDYQPVSTGKQEIEHAYEFVKKKFEELYFQSTAPDCVDRVFKIYQATALDQKLVKKTFKLVDETLRRRNLFEAGLL

SEQ ID NO: 7724 - protein, 385 aa, Glycine max
MGLLCSRNRRYNDADAEENAQTAEIERRIEVRNERAEKHIQKLLLLGAGESGKSTIFKQIKLLFQTGFDEAELKSYLPVIHANVYQTIKLLHDGSKEFAQNDVDSSKYVISNENKEIGEKLLEIGGRLDYPYLSKELAQEIENLWKDPAIQETYARGSELQIPDCTDYFMENLQRLSDANYVPTKEDVLYARVRTTGVVEIQFSPVGENKKSDEVYRLFDVGGQRNERRKWIHLFEGVSAVIFCAAISEYDQTLFEDENRNRMMETKELFEWILKQPCFEKTSFMLFLNKFDIFEKKILKVPLNVCEWFKDYQPVSTGKQEIEHAYEFVKKKFEESYFQSTAPDRVDRVFKIYRTTALDQKVVKKTFKLVDETLRRRNLLEAGLL

SEQ ID NO: 7725 - protein, 385 aa, Glycine max; identical to SEQ ID NO: 7724

SEQ ID NO: 7726 - protein, 393 aa, Glycine max
  unsure (1)..(393): unsure at all Xaa locations
MLSFVTENMGLLCSRNRRYNDADAEESAQTAEIERRIELETKAEKHIQKLLLLGAGESGKSTIFKQIKLLFQTGFDEAELKSYLPVIHANVYQTIKLLHDGSKEFAQNDVDSSKYVISNENKEIGEKLLEIGGRLDYPYLSKELARLLENLWKDPAIQETYARGSELQIPDCTDYFMENLQRLSDTNYVPTKEDVLYARVRTSGVVEIQFSPVGESKKSGEVYRLFDVGGQRNERRKWIHLFEGVSAVIFCAAISEYDQTLFEDENRNRMTETKELFEWILKQPCFEKTSFMLFLNKFDIFEKKILKVPLNVCEWFKDYQPVSTGKQEIEHAYEFVKKKFEESYFQSTAPDRVDRVFRIYRTPALDQKXVVKKTFKLVDETLRRRNLLEAGLL

SEQ ID NO: 7727 - protein, 385 aa, Glycine max
MGLVCSRSRRFREAHAEENAQDAEIERRIELETKAEKHIQKLLLLGAGESGRSTIFKQIKLLFQTGFNEAELKSYIPVVHANVYQTIKVLQDGSKELAQNDFDSSKYVISNENQDIGQKLSEIGGTLVYPRLTKELAQEIETMWEDAAIQETYARGNELQVPDCAHYFMENLERLSDANYVPTKEDFLYARVRTTGVVEIQFSPVGENKRSGEVYRLFDVGGQRNERRKWIHLFEGVTAVIFCSAISEYDQTLYEDENKNRMMETKELFEWVLRQPCFEKTSFMLFLNKFDIFEKKVLNVPLNVCEWFKHDYQPVSTEKQEIEHAYEFVKKKFEELYFQSTAPDCVDRVFKIYQATAPDQKLVKKTFKLGDETLRRRNPLEAGLL

SEQ ID NO: 7728 - protein, 385 aa, Glycine max; identical to SEQ ID NO: 7727

SEQ ID NO: 7729 - protein, 190 aa, Glycine max
  unsure (1)..(190): unsure at all Xaa locations
MGLVCSRSRRFREADAEENAQDAEIERRIELETKAEKHIQKLLLLGAGESGKSTIFKQIKLLFQTGFDEAELKSYIPVVHANVYQTIKVCNTXKGXLHDGSKELAQNDFDSSKYVISNENQDIGEKLSXIGGRLDYPRLTKELAQEIETLWEDAAIQETYARGNELQVPDCAHYFMENLERLSDANYVPX

SEQ ID NO: 7730 - protein, 159 aa, Glycine max
  unsure (1)..(159): unsure at all Xaa locations
XLSVISAPGLVLYSFSPVGESKKSGEVYRLXDVGGQRNERRKWIHLFEGVSAVIFCAAISEYDQTLFEDENRNRMTETKELFEWILKQPCFEKTSFMLFLNKFDIFEKKILKVPLNVCEWFKDYQPVSTGKQEIEHAYEXATSLYSEAYRIKNVADGKX

SEQ ID NO: 7731 - protein, 270 aa, Glycine max
  unsure (1)..(270): unsure at all Xaa locations
HVLIICSRSRSFREADAEENAQDAEIERRIKLETKAEKHIQKLLLLGAGESGKSTIFKQIKLLFQTGFDEAKLKSYIPVIHANVYQAIKVCNXLKEVXEVKXKFDVAGXSRVFKKCNITLKSRTFVKCSPAIKENDLTLYXDENKNRMMETKELFEWVLRQPCFEKTSFMLFLNKFDIFEKKVLNVPLNVCEWFKDYQPVSTGKQEIEHAYEFVKKKFEELYFQSTAPDCVDRVFKIYQATALDQKLVKKTFKLVDETLRRRNLFEAGLL

SEQ ID NO: 7732 - protein, 135 aa, Glycine max
EQTLYEDENKNRMMETKELFEWVLRQPCFEKTSFMLFLNKFDIFEKKVLNVPLNVCEWFKDYQPVSTGKQEIEHAYEFVKKKFEELYFQSTAPDCVDRVFKIYNTRLLEIRRVWKTFKLVDETLRRRGLFEALSL

SEQ ID NO: 7733 - protein, 384 aa, Lupinus luteus
MGLLCSRNRRYNDADAEENAQAAEIERRIELETKAEKHIQKLLLLGAGESGKSTIFKQIKLLFQTGFDEAELKSYLPVIHANVFQTIKLLHDGSKELAQNDVDSSKYVISDENKDIGEKLSEIGSKLDYPYLTTELAKEIETLWEDAAIQETYARGNELQVPGCAHYFMENLQRLSDANYVPTKEDVLYARVRTTGVVEIQFSPVGENKRSGEVYRLFDVGGQRNERRKWIHLFEGVSAVIFCAAISEYDQTLFEDENKNRMTETKELFEWILKQPCFEKTSFMLFLNKFDIFEKKILKVPLNVCEWFKDYQPVSTGKQEIEHAYEFVKKKFEELYFQSTAPERVDRVFKVYRTTALDQKLIKKTFKLVDESLRRRNLFEAGLL

SEQ ID NO: 7734 - protein, 384 aa, Pisum sativum
MGLVCSRNRRYRDSDPEENAQAAEIERRIESETKAEKHIQKLLLLGAGESGKSTIFKQIKLLFQTGFDEAELRSYTPVIFANVYQTIKVLHDGAKELAQNDLNSAKYVISDESKDIGEKLSEIGSRLDYPHLTKDLAKEIETLWEDAAIQETYARGNELQVPDCTKYFMENLQRLSDANYVPTKGDVLYARVRTTGVVEIQFSPVGENKRSGEVYRLFDVGGQRNERRKWIHLFEGVTAVIFCAAISEYDQTLFEDESKNRLMETKELFEWILKQPCFEKTSFMLFLNKFDIFEKKILNVPLNVCEWFKDYQPVSSGKQEIEHAYEFVKKKFEELYFQSSAPDRVDRVFKIYRTTALDQKVVKKTFKLVDETLRRRNLFEAGLL

SEQ ID NO: 7735 - protein, 384 aa, Pisum sativum
MGLVCSRNRRYRDSDPEENAQAAEIERRIEPEPKAEKHIQKLLLLGAGESGKSTIFKQIKLLFQTGFDEAELRSYTPVIFANVYQTIKVLHDGAKELAQNDLNSAKYVISDESKDIGEKLSEIGSRLDYPHLTKDLAKEIETLWEDAAIQETYARGNELQVPDCTKYFMENLQRLSDANYVPTKGDVLYARVRTTGVVEIQFSPVGENKRSGEVYRLFDVGGQRNERRKWIHLFEGVTAVIFCAAISEYDQTLFEDESKNRLMETKELFEWILKQPCFEKTSFILFLNKFDIFEKKILNVPLNVCEWFKDYQPVSSGKQEIEHAYEFVKKKFEELYFQSSAPDRVDRVFKIYRTTALDQKVVKKTFKLVDETLRRRNLFEAGLL

SEQ ID NO: 7736 - protein, 384 aa, Pisum sativum
MGLLCSKSNRYNDAKAEENAQTAEIERRIELETKAEKHIRKLLLLGAGESGKSTIFKQIKLLFQTGFDEAELKSYLPVVHANVYQTIKLLHDGSKEFAQNDVDFSKYVISTENKDIGEKLSEIGGRLDYPRLTKELAQEIESIWKDAAIQETYARGNELQVPDCTHYFMENLQRLSDANYVPTKEDVLLARVRTTGVVEIQFSPVGENKKSGEVYRLFDVGGQRNERRKWIHLFEGVSAVIFCVAISEYDQTLFEDENKNRMMETKELFEWVLKQQCFEKTSFMLFLNKFDIFEKKILDVPLNVCEWFKDYQPVSTGKQEIEHAYEFVKKKFEESYFQSTAPDSVDRVFKIYRTTALDQKVVKKTFKLVDETLRRRNLFEAGLL

SEQ ID NO: 7737 - protein, 384 aa, Pisum sativum
MGLVCSRNRRYRDSDPGENAQAAEIERRIESETKAEKHIQKLLLLGAGESGKSTIFKQIKLLFQTGFDEAELRSYTPVIFANVYQTIKVLHDGAKELAQNDLNSAKYVISDESKDVGEKLSEIGSRLDYPHLTKDLAKEIETLWEDAAIQETYARGNELQVPDCTKYFMENLQRLSDANYVPTKGDVLYARVRTTGVVEIQFSPVGENKGSGEVYRLFDVGGQRNERRKWIHLFEGVTAVIFCAAISEYDQTLFEDESKNRLMETKELFEWILKQPCFEKTSFMLFLNKFDIFEKKILNVPLNVCEWFKDYQPVSSGKQEIEHAYEFVKKKFEELYFQSSAPDRVDRVFKIYRTTALDQKVVKKTFKLVDETLRRRNLFEAGLL

SEQ ID NO: 7738 - protein, 384 aa, Pisum sativum
MGLLCSKSNRYNDAKAEENAQTAEIERRIELETKAEKHIQKLLLLGAGESGKSTIFKQIKLLFQTGFDEAELKSYLPVVHANVYQTIKLLHDGSKEFAQNDVDFSKYVISTENKDIGEKLSEIGGRMDYPRLTKELAQEIESMWKDAAIQETYARGNELQAPDCTHYFMENLQRLSDANYVPTKEDVLLARVRTTGVVEIQFSPVGENKKSGEVYRLFDVGGQRNERRKWIHLFEGVSAVIFCVAISEYDQTLFEDENKNGMMETKELFEWVLKQQCFEKTSFMLFLNKFDIFEKKILDVPLNVCEWFKDYQPVSTGKQEIEHAYEFVKKKFEESYFQSTAPDSVNRVFKIYRTTALVKKVVKKTFKLVDETLRRRNLFEAGLL

SEQ ID NO: 7739 - protein, 380 aa, Oryza sativa (indica cultivar-group)
MGSSCSRSHSLSEAETTKNAKSADIDRRILQETKAEQHIHKLLLLGAGESGKSTIFKQIKLLFQTGFDEAELRSYTSVIHANVYQTIKILYEGAKELSQVESDSSKYVISPDNQEIGEKLSDIDGRLDYPLLNKELVLDVKRLWQDPAIQETYLRGSILQLPDCAQYFMENLVRLAEAGYVPTKEDVLYARVRTNGVVQIQFSPVGENKRGGEVYRLYDVGGQRNERRKWIHLFEGVNAVIFCAAISEYDQMLFEDETKNRMMETKELFDWVLKQRCFEKTSFILFLNKFDICEKKIQKVPLSVCEWFKDYQPIAPGKQEVEHAYEFVKKKFEELYFQSSKPDRVDRVFKIYRTTALDQKLVKKTFKLIDESMRRSREGT

SEQ ID NO: 7740 - protein, 867 aa, Oryza sativa (japonica cultivar-group)
MAGAGAVGGSNWEEMVRRMLPPGTTIPEAPANLDYSIALEYDGPPVSYELPRIDPVDLPAIPTAQPVSGPLVPGRSNGVVAPVVRPVFMPPVHRKQDAHRAEPPPVAAQGRRRRSSESVDSAPQNEGFSDDDDSCSVSQESAHNFHGQRGGRTAAQEGRRAQVVTFGVTEDSRYESKEFDDVSEQYVAVTKKEKRGRTCSRCGKRKWESKESCIVCDARFCSYCVLRAMGSMPEGRKCITCIGQPIDESKRSKLGKGSRILSRLLSPLEVRQILKAEKECQANQLRPEQLIINGFPLNPDEMASLLSCQRPPQKLKPGRYWYDKESGLWGKEGEKPDRVVSTNLTFNGKLQPNASNGNTQVYMNGREITKIELRVLKIAQVQCPRDTHFWVYHDGGYEEEGQNNIKGKIWESPVTRFACALFSLPVPPANSDEPKDEAPYSARTVPDYLDQKRIQKLLILGSPGAGTSTIFKQAKLLYDTRFTQEELDSIKLMIQSNMFKYLGILLEGRERFEEEALAGSNNPSSEDENTQHDGNKSNGSDSCIYSINAKLKKFSDWLLDIIAMGDLDAFFPAATREYAPIVEEMWKDPAIQATYKRKDELHFLPDVAEYFLSRAIEVSSNEYEPSEKDIIYAEGVTQGNGLAFIEFTLDDRSPMSEMYTDNHEPHSQTLNKYQLIRVSAKGMNEGCKWVEMFEDVSMVIFSVALSDYDQLGAPSSGGNSPLVNKMIQSRDLFEATIRQPCFRDMPFVLVLNKFDLFEEKIGRVPLSTCEWFSDFCPLRTHHNNQSLAHQAFYYVAMKFKELYAACTDRKLFVWQARARDRLTVDEAFKFIREVLKWEDEKDGGGYYPDESFYSTTELSSSRLIRQE

SEQ ID NO: 7741 - protein, 432 aa, Cryptococcus neoformans var. neoformans
MGGCMSTPEAPKKTAETKQVPSSSTSSRPPQASTSATATAAGAGTSAANGTANGIKGDTTATNRVGTSGGQGLAAALASTEPPGAQDSKGNKDRSNQIDRQLEDDQKKFRKECKILLLGSGESGKSTIVKQMKIIHQNGYSKDELLSFRGVIYKNVLDSAQALIMAMRKIGVDPEDANNRSYADRILEYRMDAGLDAVIPSEILYNIESLWHDPVIPSVMDRSSEFYLMDSATYFFANIRKIAGPDYVPDEADVLRARTKTTGISETRFNMGQLSIHMFDVGGQRSERKKWIHCFEAVTSIIFCVALSEYDQVLLEESGQNRMQESLVLFESVINSRWFLRTSVILFLNKIDLFKQKLPKVPLVQYFPEYTGGADINKAAKYILWRFTQTNRARLSVYPHLTQATDTSNIRLVFAAVKETILQNALRDSGIL

SEQ ID NO: 7742 - protein, 353 aa, Botryotinia fuckeliana
MGCGMSTEEKEGKARNEEIENQLKRDKMLQRNEIKMLLLGAGESGKSTILKQMKLIHEGGYSRDERESFKEIIFSNTVQSMRVILEAMESLELPLDDQRAEYHVQTIFMQPQQIEGDNLPPEVGSAIAALWKDAGVQDCFKRSREYQLNDSARCYFDNIERIAQHDYMPNDQDVLRSRVKTTGITETTFIIGDLTYRMFDVGGQRSERKKWIHCFENVTTILFLVAISEYDQLLFEDETVNRMQEALTLFDSICNSRWFIKTSIILFLNKIDRFKEKLPVSPMKNYFPDYEGGDDYALACDYILNRFVSLNQHETKQIYTHFTCATDTTQIRFVMAAVNDIIIQENLRLCGLI

SEQ ID NO: 7743 - protein, 355 aa, Botryotinia fuckeliana
MMCFGSREDVEAKRSKEIDALIHRDEKVMQRQVKLLLLAGAGESGKSTILKQMRLIYTDKGFSKTEKEEWRIIIFHNILDGLRMTVEAMNDFNTPFEHENTKQYLPMITEEKDLRPCEPIPLEYLKAFKDMWADSGIQKTVERGNEFALHDNLGYFFEDLDRLFSKEFVPTDQDVLRARLRTTGITETHFDLGSLQYRMFDVGGQRSERKKWIHCFENVNALLFLVAISGYDQCLAEDKDENQMQEALMLWESIANSHWFKHSALILFLNKIDLFKAKIGHSPITKFGFSDFQGDTTSWQQTSKYFMDKFIALNRSPGREVYGHFTNATDTDLLKVTMSSVQDMIIQRNLQKLIL

SEQ ID NO: 7744 - protein, 384 aa, Lycopersicon esculentum
MGSLCSRNKHYSQADDEENTQTAEIERRIEQETKAEKHIQKLLLLGAGDSGKSTIFKQIKLLFQTGFDEEELKNYIPVIHANVYQTTKILHDGSKELAQNELEASKYLLSAENKEIGEKLSEIGGRLDYPHLTKDLVQDIEALWKDPAIQETLLRGNELQVPDCAHYFMENLERFSDVHYIPTKEDVLFARIRTTGVVEIQFSPVGENKKSGEVYRLFDVGGQRNERRKWIHLFEGVTAVIFCAAISEYDQTLFEDERKNRMMETKELFEWVLKQPCFEKTSFMLFLNKFDIFEQKVPKVPLNACEWFKDYQSVSTGKQEIEHAYEFVKKKFEESYFQCTAPDRVDRVFKIYRTTALDQKLVKKTFKLVDETLRRRNLFEAGLL

SEQ ID NO: 7745 - protein, 372 aa, Nicotiana plumbaginifolia
MRCVVLENMGLLCSRNKGYNQADDEENTQTADIERRIEQETKADKHIQKLLLLGAGDSGKSTIFKQIKLLFQTGFDEAELKNYIPVIHANVYQTIKVLHDGSKELAQSELEASKYLLSAENKDIGEKLSEIGGRLDYPHLTKDLVQDIEALWRDPAIQETILRGNELQVPDCAHYFMENLQRFSDVNYVPSKEDVLFARIRTTGVVEIQFSPVGENKKSGEVYRLFDVGGQRNERRKWIHLFEDERKNRMMETKELFEWVLKQPCFEKTSFMLFLNKFDIFEQKALKVPLNVCEWFKDYQPVSTGKQEIEHAYEFVKKKFEESYFQCTAPDRVDRVFKIYRTTALDQKLVKKTFKLVDETLRRRNLFEAGLL

SEQ ID NO: 7746 - protein, 384 aa, Nicotiana tabacum
MGLLCSRNKGYNQADDEENTQTADIERRIEQETKADKHIQKLLLLGAGDSGKSTIFKQIKLLFQTGFDEAELKNYIPVIHANVYQTIKVLHDGSKELAQSELEASKYLLSAENKDIGEKLSEIGGRLDYPHLTKDLVQDIEALWKDPAIQETILRGNELQVPDCAHYFMENLQRFSDINYVPSKEDVLFARIRTTGVVEIQFSPVGENKKSGEVYRLFDVGGQRNERRKWIHLFEGVTAVIFCAAISGYDQTLFEDERKNRMMETKELFEWVLKQPCFEKTSFMLFLNKFDIFEQKALKVPLNVCEWFKDYQSVSTGKQEIEHAYEFVKKKFEESYFQCTAPDRVDRVFKIYRTTALDQKLVKKTFKLVDETLRRRNLFEAGLL

SEQ ID NO: 7747 - protein, 366 aa, Nicotiana tabacum
NQADDEENTQTADIERRIEQETKADKHIQKLLLLGAGDSGKSTIFKQIKLLFQTGFDEAELKNYIPVIHANVYQTIKVLHDGSKELAQSELEASKYLLSAENKDIGEKLSEIGGRLDYPHLTKDLVQDIEALWKDPAIQETILRGNELQVPDCAHYFMENLQRFSDINYVPSKEDVLFARIRTTGVVEIQFSPVGENKKSGEVYRLFDVGGQRNERRKWIHLFEGVTAVIFCAAISEYDQTLFEDERKNRMMETKELFEWVLKQPCFEKTSFMLFLNKFDIFEQKALKVPLNVCEWFKDYQPVSTGKQEIEHAYEFVKKKFEESYFQCTAPDRVDRVFKIYRTTALDQKLVKKTFKLVDETLRRRN

SEQ ID NO: 7748 - protein, 384 aa, Nicotiana tabacum
MGLLCSRNKGYNQADDEENTQTADIERRIEQETKADKHIQKLLLLGAGDSGKSTIFKQIKLLFQTGFDEAELKNYIPVIHANVYQTIKVLHDGSKELAQSELEASKYLLSAENKDIGEKLSEIGGRLDYPHLTKDLVQDIEALRKDPAIQETILRGNELQVPDCAHYFMENLQRFSDINYVPSKEDVLFARIRTTGVVEIQFSPVGENKKSGEVYRLFDVGGQRNERRKWIHLFEGVTAVIFCAAISEYDQTLFEDERKNRMMETKELFEWVLKQPCFEKTSFMLFLNKFDIFEQKALKVPLNVCEWFKDYQSVSTGKQEIEHAYEFVKKKLEESYFQCTAPDRVDRVFKIYRTTALDQKLVKKTFKLVDETLRRRNLFEAGLL

SEQ ID NO: 7749 - protein, 366 aa, Nicotiana tomentosiformis
NQADDEENTQTADIERRIEQETKADKHIQKLLLLGAGDSGKSTIFKQIKLLFQTGFDEAELKNYIPVIHANVYQTIKVLHDGSKELAQSELEASKYLLSAENKDIGEKLSEIGGRLDYPHLTKDLVQDIEALWKDPAIQETILRGNELQVPDCAHYFMENLQRFSDINYVPSKEDVLFARIRTTGVVEIQFSPVGENKKSGEVYRLFDVGGQRNERRKWIHLFEGVTAVIFCAAISEYDQTLFEDERKNRMMESKELFEWVLKQPCFEKTSFMLFLNKFDIFEQKALKVPLNVCEWFKDYQSVSTGKQEIEHAYEFVKKKFEESYFQCTAPDRVDRVFKIYRTTALDQKLVKRTFKLVDETLRRRN

SEQ ID NO: 7750 - protein, 392 aa, Solanum tuberosum
MLSVVLENMGSLCSRNKHYSQADDEENTQTAEIERRIEQETKADKHIQKLLLLGAGDSGKSTIFKQIKLLFQTGFDEAELKNYIPVIHANVYQTIKILHDGSKELAQNELEASKYLLSAENKEIGEKLSEIGGRLDYPRLTKDLVQDIEALWKDPAIQETLLRGNELQVPDCAHYFMENLERFSDIHYIPTKEDVLFARIRTTGVVEIQFSPVGENKKSGEVYRLFDVGGQRNERRKWIHLFEGVTAVIFCAAISEYDQTLFEDERKNRMMETKELFEWVLKQPCFEKTSFMLFLNKFDIFEQKVLKVPLNTCEWFKDYQSVSTGKQEIEHAYEFVKKKFEESYFQCTAPDCVDRVFKIYRTTALDQKLVKKTFKLVDETLRRRNLFEAGLL

SEQ ID NO: 7751 - protein, 384 aa, Solanum tuberosum
MGSLCSRNKHYSQADDEENTQTAEIERRIEQETKADKHIQKLLLLGAGDSGKSTIFKQIKLLFQTGFDEAELKNYIPVIHANVYQTIKILHDGSKELAQNELEASKYLLSAENKEIGEKLSEIGGRLDYPRLTKDLVQDIEALWKDPAIQETLLRGNELQVPDCAHYFMENLERFSDIHYIPTKEDVLFARIRTTGVVEIQFSPVGENKKSGEVYRLFDVGGQRNERRKWIHLFEGVTAVIFCAAISEYDQTLFEDERKNRMMETKELFEWVLKQPCFEKTSFMLFLNKFDIFEQKVLKVPLNTCEWFKDYQSVSTGKQEIEHAYEFVKKKFEESYFQCTAPDRVDRVFKIYRTTALDQKLVKKTFKLVDETLRRRNLFEAGLL

SEQ ID NO: 7752 - protein, 385 aa, Solanum tuberosum
MGSLCSSRNKHYSQADDEENTQTAEIERRIEQETKADKHIQKLLLLGAGDSGKSTIFKQIKLLFQTGFDEAELKNYIPVIHANAYQTIKILHDGSKELAQNELEASKYLLSAENKEIGEKLSEIGGRLDYPRLTKDLVQDIEALWKDPAIQETLLRGNELQVPDCAHYFMENLERFSDIHYIPTKEDVLFARIRTTGVVEIQFSPVGENKKSGEVYRLFDVGGQRNERRKWIHLFEGVTAVIFCAAISEYDQTLFEDERKNRMMETKELFEWVLKQPCFEKTSCMLFLNKFDIFEQKVLKVPLNTCEWFKDYQSVSTGKQEIEHAYEFVKKKFEESYFQCTAPDRVDRVFKIYRTTALDQKLVKKTFKLVDETLRRRNLFEAGLL

SEQ ID NO: 7753 - protein, 356 aa, Dictyostelium discoideum
MGNICGKPELGSPEEIKANQHINSLLKQARSKLEGEIKLLLLGAGESGKSTIAKQMKIIHLNGFNDEEKSSYKTIIYNNTVGSMRVLVNAAEELKIGISENNKEAASRISNDLGDHFNGVLTAELAQDIKALWADPGIQNTFQRSSEFQLNDSAAYYFDSIDRISQPLYLPSENDVLRSRTKTTGIIETVFEIQNSTFRMVDVGGQRSERKKWMHCFQEVTAVIFCVALSEYDLKLYEDDTTNRMQESLKLFKEICNTKWFANTAMILFLNKRDIFSEKITKTPITVCFKEYDGPQTYEGCSEFIKQQFINQNENPKKSIYPHLTCATDTNNILVVFNAVKDIVLNLTLGEAGMIL

SEQ ID NO: 7754 - protein, 347 aa, Dictyostelium discoideum
MGCILTIEAKKSRDIDYQLRKEEGSKNETKLLLLGPGESGKSTIFKQMKIIQDDGGFSIDERLEYRYIIYGNCISQMKVLVTAAISQDLKPNNPDNETRFEKFSKISPGGNSWTLEIAEDIKQLWSDDSIQNIYRMKDKFYQLNDSAAYFFDNIGRFANENYVPTQDDVLRSRVRTTGIQEAHFKFINIEFRMLDVGGQRSERRKWIHCFDSVTAVIFCVALSEYDQTLREEESQNRMKESLMLFDEIVNSHWFRNTAFIIFFNKVDLFREKIAKIDLGDYFPAYTGGLSFDNSTQFIKKMFLDLSTGNQRIFAHFTCAIDTANIQFVFHAVRETLLKNIFNTIINY

SEQ ID NO: 7755 - protein, 357 aa, Dictyostelium discoideum
MGICASSMEGEKTNTDINLSIEKERKKKHNEVKLLLLGAGESGKSTISKQMKIIHQSGYSNEERKEFKPIITRNILDNMRVLLDGMGRLGMTIDPSNSDAAVMIKELTSLQASIVTDCWGELNEDQGKKIKALWTDPGVKQAMRRANEFSTLPDSAPYFFDSIDRMTSPVYIPTDQDILHTRVMTRGVHETNFEIGKIKFRLVDVGGQRSERKKWLSCFDDVTAVVFCVALSEYDLLLYEDNSTNRMLESLRVFSDVCNSWFVNTPIILFLNKSDLFREKIKHVDLSETFPEYKGGRDYERASNYIKERFWQINKTEQKAIYSHITCATDTNNIRVVFEAVKDIIFTQCVMKAGLYS

SEQ ID NO: 7756 - protein, 403 aa, Dictyostelium discoideum
MGCYQSRVQVEDKTNEQLDKYLVQAGKEGLLDFRILLLGAGESGKSTVVKQLKSIYKIQVDDDELHSYAVNIHKNTVLCMQVLLEAGETLGIELTDPETKKRAINVKSFQFEPEVKQMPVSIGLDIEELWRDEDIQKIWDRRSEYWFLDATPYYFENIQRFLDDDFVPTEEDCIMTRVRTTGISVTEFDEGPVHFRVVDVGGQRNERKKWIHCFDDVKALLFVVNLAGYDQVMFEDPSQNRMQESLTLFGQICNNPIFSETPTFLVLNKKDLFEQMIQKTDLSKCFPDYKGGSDVKTALEFIQMKYQQKIQESNKPLHTFHIAARYKKDIKYTWEEAKGILLEENKKVLMKATKDLKKSSKQSSKSSLGNSTQNNSNNNNNNNNSNNNNGQTTIDGATAKINS

SEQ ID NO: 7757 - protein, 345 aa, Dictyostelium discoideum
MRFKCFGSEETEQSSKIDKSIETDRRKLRKDVKLLLLGPGESGKSTIFKQMKIIQEDGGYSVEELLEYRAFVYSNCISQMEALLTASAKLNIELEVENKQRAANVLRRTIGNEPWLLLAADIKHLWEDKGIKETYAQKDKHFQLNDSAAYFFDNIDRYMREDFVPNEQDVLRCRVRTTGIQESEFTFDKIRLKIVDVGGQRSQRRKWIHCFDCVTAVIFVAAMSDYDQVLREDESVNRTRESLALFKEIVNCDYFKETPIVLFLNKKDLFKEKLKRVPLQSCFSDYTGPNKYKDAAMFIQSQYLAQGPSPRTIYTHATCAVDTENIKFVFRAVRQTILSQALEHF

SEQ ID NO: 7758 - protein, 390 aa, Dictyostelium discoideum
MSSTTTNTTTATPAIQVNGNQSSSPQSPSSSTSTLSPPMSPSLLTRYREQKAVNKQIEKQLKEEKKIMDSELKLLLLGTGDSGKSTVVKQMKILHLEGYSQEERINQRQFVYRNIIEIAYSIIRGCGVLNLTIPSQFDSICSSIEEIYETKNYTNLDKNVLKGVAELSKNESFINAANNSGSNFQLHSSSQYFLDDIARFSEEDYIPTDQDILYTRVASTSVSETRFSVRGIKFRMIDVAGQRGHRDKWIHHFSEVTAILFVISLCEYDQVLEEDGKTNRMIESIKVFGDIINQRLFKDIPIILFLNKRDLFAEKIKKTGISICFPDYTGPSDDYEQSLVFLKKKILSANKTSKAVYTNVTTATDTTNIGHVFEAVKDILTRQTMEEGGI

SEQ ID NO: 7759 - protein, 390 aa, Dictyostelium discoideum
MSSTTTNTTTATPAIQVNGNQSSSPQSPSSSTSTLSPPMSPSLLTRYREQKAVNKQIEKQLKEEKKIMDSELKLLLLGTGDSGKSTVVKQMKILHLEGYSQEERINQRQFVYRNIIEIAYSIIRGCGVLNLTIPSQFDSICSSIEEIYETKNYTNLDKNVLKGVAELSKNESFINAANNSGSNFQLHSSSQYFLDDIARFSEEDYIPTDQDILYTRVASTSVSETRFSVRGIKFRMIDVAGQRGHRDKWIHHFSEVTAILFVISLCEYDQVLEEDGKTNRMIESIKVFGDIINQRWFKDIPIILFLNKRDLFAEKIKKTGISICFPDYTGPSDDYEQSLVFLKKKILSANKTSKAVYTNVTTATDTTNIGHVFEAVKDILTRQTMEEGGI

SEQ ID NO: 7760 - protein, 504 aa, Dictyostelium discoideum
MEYVYNSNNNPREFCLSVETENKNWIISTGSKAQQLEWIEAIKHAIESAVETDEIKLQKHKSIEKQLQLDGKNKNKIPVLKLLLLGTGESGKSTVVKQMKILHHKGFSKEEEEFYRNLIYINLLDGMALLIHVIKENNIEIPQETLSAIKNYSSWYRVYIEKRNKNGIRNNPIGSMIPISILNNNKDNNNSNSSSLKNNSGGSSSSELDKKMTHLSLDGSTCINSNSASPNGPSSSTTTSTINTHNRSNSDGSSNNIFNVQDFGIPPIITNYISTIWSDPVVQSEVMLQAQKYHINESTQYYLNEIKRIGKPTYQPVNLDILKSRATTNGVVETDFNVNGEVIFRIVDVAGQRGERKKWINFFDDVTAIVFVAAINEYDQKLVEDNCTNRLHESLNLFDSICNDSTFPKTSIILFLNKIDLFREKLKRTSINICFPDYNGDQSYEKSSNYIKNNFLSKKKGGNGINSQNFIYFHFTCATDTKSFETVFNSVRDIIISKTLEFYC

SEQ ID NO: 7761 - protein, 219 aa, Avena fatua
STILKQIKLIHEGGYSRDERVPFKEIIFSNTVQSMRVILEAMESLELPLDDQRAEYHVRPSSCSRHRLRATRAFGVGNAISVLWKDAGVQQCFQRSNQYQLNDSAKYYFDSIDRYLAPDYIPNDQDVLRSRVKTTGIVETTFIIGDLTYRMFDVGGQRSEHKKWIHCFENVTTILFLVAISEYDQLLFEDETVNRMQEALTLFDSICNSRWFVKTSIIL

SEQ ID NO: 7762 - protein, 383 aa, Triticum aestivum
MGSSCSRPHSVNEAEAADNTRSADIDRRILQETKADQHVHKLLLLGAGESGKSTIFKQIKLLFRTGFDEAELKGYTPVIHANVFQTIKILYDGAKELAQLETESSKNVISPDNQEIGEKLSEIGGRLDYPLLNKELVQDVRKLWEDPAIQETYSCGSVLQVPDCAHYFMENLDRLAEPDYIPTKEDVLHARVRTNGVVEIQFSPLGESKRGGEVYRLYDVGGQRNERRKWIHLFEGVDAAIFCAAISEYDQLLFEDGTQNRMMETKELFDWVLKQRCFEKTSFMLFLNKFDIFEREIQKVPLTVCEWFKDYEPIAPGKVQDVEHAYEFVKKKFEEVYFQSSKPERVDRVFKIYRTTALDQKLVKKTFKLIDESMRRSREGTGT

SEQ ID NO: 7763 - protein, 390 aa, Triticum aestivum
MGSSCSRPHSVNEAEAADNTRSADIDRRILQETKADQHVHKLLLLGAGESGKSTIFKQIKLLFRTGFDEAELKGYTPVIHANVFQTIKVCQYWERILYDGAKELAQLETESLKHVISPDNQEIGEKLSEIGGRLDYPLLNKELVQDVRKLWEDPAIQETYSCGSVLQVPDCAHYFMENLDRLAEPDYIPTKEDVLHARVRTNGVVEIQFSPLGESKRGGEVYRLYDVGGQRNERRKWIHLFEGVDAVIFCAAISEYDQLLFEDETQNRMMETKELFDLVLKQRCFEKTSFMLFLNKFDIFERKIQKVPLTVCEWFKDYEPIAPGKVQDVEHAYEFVKKKFEEVYFQSSKPERVDRVFKIYRTTALDQKLVKKTFKLIDESMRRSREGTGT

SEQ ID NO: 7764 - protein, 396 aa, Triticum aestivum
  unsure (1)..(396): unsure at all Xaa locations
MSMLACALQTKGSTCLRHHFVNEAEAANNTRTADIDGGILQGTKPDQHVHKLLLLSAGESGKSTIFKQIKCVVIXLFSVGEEEDXFDPFVLAFTNKVQKTVLIYSTVSYKVAKVQPESSKYVILPDNQEIGEKLSEIGGRLDYPLLNKELVQDVRKLWEDQAIQETYSCGSVLQVPDCAHYFMDNLDRLAEADYVPTKEDVLHARVRTNGVVEIQFSPLGESKRGGEVYRLYDVGGQRNERRKWIHLFEGVDAVIFCAAISEYDQLLFEDETQNRMMETKELFDWVLKQRCFEKTSFMLFLNKFDIFERKIQKVPLTVCEWFKDYEPIAPGKQDVEHAYEFVKKKFEEVYFQSSKPERVDRVFKIYRTTALDQKLVKKTFKLMDESMRRSREGTGT

SEQ ID NO: 7765 - protein, 134 aa, Triticum aestivum
  unsure (1)..(134): unsure at all Xaa locations
XEYDQMLCEDETKNRMMETKELFDWVLKQRCFEKTSFMLFLNKFDIFERKIQKVPLSACEWFKDYQPIAPGKQEVEHAYEFVKKKFEELYFQSSLPDRVDRVFKIYRTTALDQKLVKKTFKLIDESMRRSREGT

SEQ ID NO: 7766 - protein, 131 aa, Triticum aestivum
  unsure (1)..(131): unsure at all Xaa locations
MSMLACALQTMGSSCSRPHSVNEAEAADNTRSADIDRRILQETKADQHVHKLLLLGAGESGKSTIFKQIKLLFRTGFDEAELKGYMPVIHANVFQTIKILYDGAKELAQLETESSKHVISPDNQEIGEKLX

SEQ ID NO: 7767 - protein, 110 aa, Triticum aestivum
  unsure (1)..(110): unsure at all Xaa locations
XKQRCFEKTSFMLFLNKFDIFXRKIQKVPLXVCEWFKDYEPIAXGKQDVEHXYEFVKKKFEEXYFQSSKPDRVDRVFKXYRTTALDQKLVKKTFKLIDESMRRSREGTGT

SEQ ID NO: 7768 - protein, 390 aa, Zea mays
MSVLTCVIESMGSSCSRSHSFDEAEAAENAKSADIDRRILQETKAEQHIHKLLLLGAGESGKSTIFKQIKLLFQTGFDEAELRSYTSVIHANVYQTIKILYEGAKELAQVEPDSSKYVLSPDNQEIGEKLSEIGARLEYPSLNKERVQDVRKLWQDPAIQETYSRGSILQVPDCAQYFMENLDRLSEEDYVPTKEDVLHARVRTNGVVETQFSPLGESKRGGEVYRLYDVGGQRNERRKWIHLFEGVNAVIFCAAISEYDQMLFEDETKNRMMETKELFDWVLKQRCFEKTSFMLFLNKFDIFERKIQKVPLSVCEWFKDYQPTAPGKQEVEHAYEFVKKKFEELYFQSSKPDRVDRVFKIYRTTALDQKLVKKTFKLIDESMRRSREGT

SEQ ID NO: 7769 - protein, 390 aa, Zea mays
MSVLTCVIESMGSSCSRSHSFDEAEAAENAKSADIDRRILQETKAEQHIHKLLLLGAGESGKSTIFKQIKLLFQTGFDEAELRSYTSVIHANVYQTIKILYEGAKELAQVEPDSSKYVLSPDNQEIGEKLSEIGARLEYPSLNKERVQDVRKLWQDPAIQETYSRGSILQVPDCAQYFMENLDKLSEEDYVPTKEDVLHARVRTNGVVETQFSPLGESKRGGEVYRLYDVGGQRNERRKWIHLFEGVNAVIFCAAISEYDQMLFEDETKNRMMETKELFDWVLKQRCFEKTSFMLFLNKFDIFERKIQKVPLSVCEWFKDYQPTAPGKQEVEHAYEFVKKKFEELYFQSSKPDRVDRVFKIYRTTALDQKLVKKTFKLIDESMRRSREGT

SEQ ID NO: 7770 - protein, 370 aa, Zea mays
MSVLTCVIESMGSSCSRSHSFDEAEAAENAKSADIDRRILQETKAEQHIHKLLLLGAGESGKSTIFKQIKLLFQTGFDEAELRSYTSVIHANVYQTIKILYEGAKELAQVEPDSSKYVLSPDNQEIGEKLSEIGARLEYPSLNKERVQDVRKLWQDPAIQETYSRGSILQVPDCAQYFMENLDKLSEEDYVPTKEDVLHARVRTNGVVETQFSPLGESKRGGEVYRLYDVGGQRNERRKWIHLFEGVNAVIFCAAISEYDQMLFEDETKNRMMETKELFDWVLKQRCFEVPLSVCEWFKDYQPTAPGKQEVEHAYEFVKKKFEELYFQSSKPDRVDRVFKIYRTTALDQKLVKKTFKLIDESMRRSREGT

SEQ ID NO: 7771 - protein, 216 aa, Zea mays
  unsure (1)..(216): unsure at all Xaa locations
FVYLIIYLRYLTRADFQXTREDVLHARVRTNGVVETQFSPLGESKRGGEVYRLYDVGGQRNERRKWIHLFEGVNAVIFCAAISEYDQMLFEDETKNRMMETKELFDWVLKQRCFEKTSFMLFLNKFDIFERKIQKVPLSVCEWFKDYQPTAPGKQEVEHAYEFVKKKFEELYFQSSKPDRVDRVFKIYRTTALDQKLVKKTFKLIDESMRRSREGT

SEQ ID NO: 7772 - protein, 179 aa, Zea mays
  unsure (1)..(179): unsure at all Xaa locations
MSMLACALQTMGSSCSRPHSVNEADAADNTRSADIDRRILHETEADQHIHKLLLLGAGESGKATIFKQIKLLFRTGFDEAELKGYTPVIHANVFQTIKILYDGAKELAQVESESSKYVMLPDNQEIGEKLSEIGGRLDYPSLNKXLVQDVRKLWEDQAIQETYSCGSVLLGPDCAPYFX

SEQ ID NO: 7773 - protein, 318 aa, Pneumocystis carinii
FSATYNQDTLRSKEIESYLRQEQEHACHEAKILLLGAGESGKTTILKQMKLLHLSGLTLKEREYYRTIIFSNMLQSMRLIIEAMEEFDICVERRENEQYLDLLLQERELTNRENLPPEYYRPFISLWEDAGVTRAVNRGNEYALHDNCFYFFENIHRLFERKYTPTDQDILRCRLKTTGITETCFKVSRLTYRMIDVGGQRSERRKWIHCFENVTAVLFLVAISGYDQCLTEDIGANRMQEALVLFDSICNSQWFINTSIILFLNKIDLFKVKLHVSLISNYFPDFNNENQTDYRACCLFFRQKFLRLNRNHQKTIYT

SEQ ID NO: 7774 - protein, 354 aa, Pneumocystis carinii
MGCCFSATYNQDTLRSKEIESYLRQEQEHACHEAKILLLGAGESGETTILKQMKLIHLSGFTLKEREYYRTIIFSNMLQSMRLIIEAMEEFDICFERRENEQYLDLLLQERELTNRENLPPEYYRPFISLWKDAGVTRAVNRGNEYALHDNCFYFYENIHRLFERKYIPTDQDILRCRLKTTGITETCFKVSRLTYRMIDVGGQRSERRKWIHCFENVTAVLFLVAISGYDQCLTEDIGANQMQEALVLFDSICNSQWFINTSIILFLNKIDLFKVKLHVSLISNYFPDFNNENQTDYRACCLFFRQKFLRLNRNHQKTIYTHFTNATDTTLLKNVMISVTDIIFNRNLQNLML

SEQ ID NO: 7775 - protein, 355 aa, Phytophthora infestans
MGLCASQMNDNDRQAMAKSREIEAKNEEAHRVEQEKVKLLLLGAGESGKSTVFKQMKILFGAALTEDEKRHCTPIIYNNVVTSMKMLIEQCAEMKLKGDVVCVQDFEDIRTLSDEAEVNLVIGQKIKNLWSDPGIVATWNRRAEFQIIESVKYYFNDLDRIMRDDYAATQQDMLYARVRTSGIVEERYQIDGATFVMYDVGGQRNERKKWIHCFEDVTAVIFVAALSEYDQSLYEDASTNRMIEAITLFDEIINNKFFLNSAMILFLNKKDLFQDKIKKVDPKTVEVFKDFPGGIGDYELGVQYFLGKFMEMNRQPEKEIYHHVTCATDSQNVQVVFNACKDIILKQNIKGSGFM

SEQ ID NO: 7776 - protein, 355 aa, Phytophthora palmivora
MGLCASQMSDSDRQAMAKSREIEAKNEEAHRVEHEKVKLLLLGAGESGKSTVFKHMKILYGASLTEEEKRHCTPIIYNNVVTSMKMLIEQCTEMKLKGEVVCAQDFEDIRTLSDEAEVNPVVGQKIKNLWTDPGIVATWNRRAEFQIIESVKYNSNDLDRIMRDDYAATQQDMLYARVRTSGIVEERYQIDGATFVMYDVGGQRNERKKWIHCFEDVTAVIFVAALSEYDQSLYEDASTNRMIEAITLFDEIINNKFFLNSAMILFLNKKDLFQDKIKKVDPKTVDVFKDFPGGIGDYELGVQYFLGKFMEMNRQPEKEIYHHVTCATDSQNVQVVFNACKDITLKQNIKGSGFM

SEQ ID NO: 7777 - protein, 201 aa, Mucor racemosus
TILKQDEGWIHDGGFTPEEKEAYKEIIFSNSVQSIHVLLEAMEILDIPLDDASNQGYFDYIMEQYQKMDYFSMPPELVKAIKQLWQDKGVQEAHSRRNEFQLNDSASYYFDSIDRIGDPNYLPTDQDVLRSRVKTTGIAESKFTFGTLTYRMFDVGGQRSERKKWIHCFEDVTAIIFLVAISEYDQVLIEDESVNRMQEAF

SEQ ID NO: 7778 - protein, 191 aa, Mucor racemosus
TILKQMKLIHDGGYTRNERESFKEVIFSNTMQSMRVTLEAMNNLGIAFDNPENEGHKRLVLEAPPQIDYLGHELVEAIASLWDDQGVQECVQRSNEFQLNDSARYYFDSILRIGQSNYMPSDQDVLRSRVKSTGITETTFVIDSLTYRMFDVGGQRSERKKWIHCFENVTALVFLVAISEYDQVLFEDESV

SEQ ID NO: 7779 - protein, 205 aa, Mucor racemosus
TILKQMKLIHDGGYSRDEREAFKEIIFSNTVQSMRVILEAMENMGVSYASSQNRLHSTVILDLPSQIERDSLPPEVTLALKSLWKDENLLSVFDRSREYQLNDSAKYYFDSIDRIGDINYIPTDQDVLRSRVKTTGITETTFVIGDLTYRMFDVGGQRSERKKWIHCFENVTAIIFLVAISEYDQVLIEDETVVNMHMQKRDDHR

SEQ ID NO: 7780 - protein, 352 aa, Suillus bovinus
MGNCVSAQDREEKARSDAIDRQIEEDSRKFRKECKILLLGSGESGKSTIVKQMKIIHQNGFNENELMTFRPTIYRNTLDSAQAIVLQMRNMNVECATPANRTFAERIVEYRVENTPDFVFSADIAQAIHELWQDPIIPKVMDCSSQFYLMDSAGYFFTEVLRIGTPDYIPTENDVLRARAKTTGITETRFNMGQLSIHMFDVGGQRSERKKWIHCFESVTSIIFCTALSEYDQVLLEEKNQNRMQESLILFESASTPAGLRTSIILFLNKIDVFKNKLPKVPIEKYFPEYTGGADINKAAKYILWKFMQANRARLSVYPHLTQATDTTNIRLVFAAVKETILQNALKDSGIL

SEQ ID NO: 7781 - protein, 354 aa, Schizosaccharomyces pombe
MTIFNGLSESGESKKLNSKIEKQIENASKKDKKIYKVLLLGASDSGKSTISKQIKILNKNGFSQEEIMTFIPVIRRNLLESAKTLVKIIVQKGINLDPLGTHNCEIIEKFNPTPGELINANIGQAITSLWSANSVRSCTYGNDSVLIDSAPYFFSRADEICSRHYVPTIDDILRSRNSTLGISEISFTLDHLQIRMFDVGGQRTERRKWIYCFENVNSIIFCVSLNDYDKKLYERAAPERNRLVESISLFDSIINSQWFMHSSIILFLNKFDLFRKKLEHVPFQDYFPQYEGKNSVKSITRYILWLFVNPSINRAKHNIYPHITTAVDTSNIKVVFSAVKETILQHSLKEAGMF

SEQ ID NO: 7782 - protein, 354 aa, Schizosaccharomyces pombe
MTIFNGLSESGESKKLNSKIEKQIENASKKDKKIYKVLLLGASDSGKSTISKQIKILNKNGFSQEEIMTFIPVIRRNLLESAKTLVKIIVQKGINLDPLGTHNCEIIEKFNPTPGELINANIGQAITSLWSANSVRSCTYGNDSVLIDSAPYFFSRADEICSRHYVPTIDDILRSRNSTLGISEISFTLDHLQIRMFDVGGQRTERRKWIYCFENVNSIIFCVSLNDYDKKLYERAAPERMRLVESISLFDSIINSQWFMHSSIILFLNKFDLFRKKLEMVPFQDYFPQYEGKNSVKSITRYILWLFVNPSINRAKHNIYPNITTAVDTSNIKVVFSAVKETILQHSLKEAGMF

SEQ ID NO: 7783 - protein, 407 aa, Schizosaccharomyces pombe
MGCMSSKYADTSGGEVIQKKLSDTQTSNSSTTGSQNARVPVLENWLNIVLRGKPQNVESSGVRVKGNSTSGGNDIKVLLLGAGDSGKTTIMKQMRLLYSPGFSQVVRKQYRVMIFENIISSLCLLLEAMDNSNVSLLPENEKYRAVILRKHTSQPNEPFSPEIYEAVHALTLDTKLRTVQSCGTNLSLLDNFYYYQDHIDRIFDPQYIPSDQDILHCRIKTTGISEETFLLNRHHYRFFDVGGQRSERRKWIHCFENVTALLFLVSLAGYDQCLVEDNSGNQMQEALLLWDSICNSSWFSESAMILFLNKLDLFKRKVHISPIQKHFPDYQEVGSTPTFVQTQCPLADNAVRSGMYYFYLKFESLNRIASRSCYCHFTTATDTSLLQRVMVSVQDTIMSNNLQSLMF

SEQ ID NO: 7784 - protein, 407 aa, Schizosaccharomyces pombe
MGCMSSKYADTSGGEVIQKKLSDTQTSNSSTTGSQNARVPVLENWLNIVLRGKPQNVESSGVRVKGNSTSGGNDIKVLLLGAGDSGKTTIMKQMRLLYSPGFSQVVRKQYRVMIFENIISSLCLLLEAMDNSNVSLLPENEKYRAVILRKHTSQPNEPFSPEIYEAVHALTLDTKLRTVQSCGTNLSLLDNFYYYQDHIDRIFDPQYIPSDQDILHCRIKTTGISEETFLLNRHHYRFFDVGGQRSERRKWIHCFENVTALLFLVSLAGYDQCLVEDNSGNQMQEALLLWDSICNSSWFSESAMILFLNKLDLFKRKGSHFPIQKHFPDYQEVGSTPTFVQTQCPLADNAVRSGMYYFYLKFESLNRIASRSCYCHFTTATDTSLLQRVMVSVQDTIMSNNLQSLMF

SEQ ID NO: 7785 - protein, 449 aa, Saccharomyces cerevisiae
MGLCASSEKNGSTPDTQTASAGSDNVGKAKVPPKQEPQKTVRTVNTANQQEKQQQRQQQPSPHNVKDRKEQNGSINNAISPTATANTSGSQQINIDSALRDRSSNVAAQPSLSDASSGSNDKELKVLLLGAGESGKSTVLQQLKILHQNGFSEQEIKEYIPLIYQNLLEIGRNLIQARTRFNVNLEPECELTQQDLSRTMSYEMPNNYTGQFPEDIAGVISTLWALPSTQDLVNGPNASKFYLMDSTPYFMENFTRITSPNYRPTQQDILRSRQMTSGIFDTVIDMGSDIKMHIYDVGGQRSERKKWIHCFDNVTLVIFCVSLSEYDQTLMEDKNQNRFQESLVLFDNIVNSRWFARTSVVLFLNKIDLFAEKLRKVPMENYFPDYTGGSDINKAAKYILWRFVQLNRANLSIYPHVTQATDTSNIRLVFAAIKETILENTLKDSGVLQ

SEQ ID NO: 7786 - protein, 449 aa, Saccharomyces cerevisiae
MGLCASSEKNGSTPDTQTASAGSDNVGKAKVPPKQEPQKTVRTVNTANQQEKQQQRQQQPSPHNVKDRKEQNGSINNAISPTATANTSGSQQINIDSALRDRSSNVAAQPSLSDASSGSNDKELKVLLLGAGESGKSTVLQQLKILHQNGFSEQEIKEYIPLIYQNLLEIGRNLIQARTRFNVNLEPECELTQQDLSRTMSYEMPNNYTGQFPEDIAGVISTLWALPSTQDLVNGPNASKFYLMDSTPYFMENFTRITSPNYRPTQQDILRSRQMTSGIFDTVIDMGSDIKMHIYDVGGQRSERKKWIHCFDNVTLVIFCVSLSEYDQTLMEDKNQNRFQESLVLFDNIVNSRWFARTSVVLFLNKIDLFAEKLSKVPMENYFPDYTGGSDINKAAKYILWRFVQLNRANLSIYPHVTQATDTSNIRLVFAAIKETILENTLKDSGVLQ

SEQ ID NO: 7787 - protein, 472 aa, Saccharomyces cerevisiae
MGCTVSTQTIGDESDPFLQNKRANDVIEQSLQLEKQRDKNEIKLLLLGAGESGKSTVLKQLKLLHQGGFSHQERLQYAQVIWADAIQSMKILIIQARKLGIQLDCDDPINNKDLFACKRILLKAKALDYINASVAGGSDFLNDYVLKYSERYETRRRVQSTGRAKAAFDEDGNISNVKSDTDRDAETVTQNEDADRNNSSRINLQDICKDLNQEGDDQMFVRKTSREIQGQNRRNLIHEDIAKAIKQLWNNDKGIKQCFARSNEFQLEGSAAYYFDNIEKFASPNYVCTDEDILKGRIKTTGITETEFNIGSSKFKVLDAGGQRSERKKWIHCFEGITAVLFVLAMSEYDQMLFEDERVNRMHESIMLFDTLLNSKWFKDTPFILFLNKIDLFEEKVKSMPIRKYFPDYQGRVGDAEAGLKYFEKIFLSLNKTNKPIYVKRTCATDTQTMKFVLSAVTDLIIQQNLKKIGII

SEQ ID NO: 7788 - protein, 472 aa, Saccharomyces cerevisiae
MGCTVSTQTIGDESDPFLQNKRANDVIEQSLQLEKQRDKNEIKLLLLGAGESGKSTVLKQLKLLHQGGFSHQERLQYAQVIRADAIQSMKILIIQARKLGIQLDCDDPINNKDLFACKRILLKAKALDYINASVAGGSDFLNDYVLKYSERYETRRRVQSTGRAKAAFDEDGNISNVKSDTDRDAETVTQNEDVDRNNSSRINLQDICKDLNQEGDDQMFVRKTSKEIQGQNRRNLIHEDIAKAIRQLWNNDKGIKQCFARSNEFQLEGSAAYYFDNIEKFASPNYVCTDEDILKGRIKTTGITETEFNIGSSKFKVLDAGGQRSERKKWIHCFEGITAVLFVLAMSEYDQMLFEDERVNRMHESIMLFDTLLNSKWFKDTPFILFLNKIDLFEEKVKSMPIRKYFPDYQGRVGDAEAGLKYFEKIFLSLNKTNKPIYVKRTCATDTQTMKFVLSAVTDLIIQQNLKKSGII

SEQ ID NO: 7789 - protein, 353 aa, Cochliobolus heterostrophus
MGCGMSTEEKEGKQRNEEIENQLKRDKLMQRNEIKMLLLGAGESGKSTILKQMKLIHEGGYSRDERESFKEIIFSNTVQSMRVILEAMESLELPLDDQRAEYHVQTIFMQPAQIEGDSLPPEVGNAISVLWKDAGVQQCFQRSREYQLNDSAKYYFDSIDRIAAPDYIPNDQDVLRSRVKTTGITETTFIIGDLTYRMFDVGGQRSERKKWIHCFENVTTILFLVAISEYDQLLFEDETVNRMQEALTLFDSICNSRWFVKTSIILFLNKIDRFKEKLPVSPMKNYFPDYEGGPDYAAACDYILNRFVSLNQHETKQIYTHFTCATDTMQIRFVMAAVNDIIIQENLRLCGLI

SEQ ID NO: 7790 - protein, 353 aa, Leptosphaeria maculans
MGCGMSTEEKEGKQRNEEIENQLKRDKMMQRNEIKMLLLGAGESGKSTILKQMKLIHEGGYSRDERESFKEIIFSNTVQSMRVILEAMESLELPLDDQRAEYHVQTIFMQPAQIEGDSLPPEVGNAISVLWKDAGVQQCFQRSREYQLNDSAKYYFDSIDRIAAPDYIPNDQDVLRSRVKTTGITETTFIIGDLTYRMFDVGGQRSERKKWIHCFENVTTILFLVAISEYDQLLFEDETVNRMQEALTLFDSICNSRWFVKTSIILFLNKIDRFKEKLPVSPMKNYFPDYEGGADYAAACDYILNRFVSLNQHETKQIYTHFTCATDTMQIRFVMAAVNDIIIQENLRLCGLI

SEQ ID NO: 7791 - protein, 353 aa, Aspergillus fumigatus
MGCGMSTEDKEGKARNEEIENQLKRDKMMQRNEIKMLLLGAGESGKSTILKQMKLIHEGGYSRDERESFKEIIYSNTVQSMRVILEAMESLELPLEDARNEYHVQTIFMQPAQIEGDSLPPEVGNAIGALWRDTGVQECFKRSREYQLNDSAKYYFDAIDRIAQPDYLPTDQDVLRSRVKTTGITETTFIIGDLTYRMFDVGGQRSERKKWIHCFENVTTILFLVAISEYDQLLFEDETVNRMQEALTLFDSICNSRWFVKTSIILFLNKIDRFKEKLPVSPMKNYFPDYEGGADYAAACDYILNRFVSLNQAEQKQIYTHFTCATDTTQIRFVMAAVNDIIIQENLRLCGLI

SEQ ID NO: 7792 - protein, 356 aa, Aspergillus fumigatus
MGSCFSTESPGDAEQKKRSQAIDRRLEEDSRRLRRECKILLLGSGESGKSTIVKQMKIIHQNGYTVEELALYRLTIYKNLLDCAKALIGAYHQFNLQPTSPKVREFIEFLSEYNIDPDPNTPLDPRIGDAVTYLWNDPCTSTALEHQNEFYLMDSAPYFFEEAKRIAAPDYIPNVADVLRARTKTTGIYETRFTMGQLSIHMFDVGGQRSERKKWIHCFENVTSIIFCVALSEYDQVLLEESNQNRMMESLVLFDSVVNSRWFMRTSIILFLNKVDLFRQKLPRSPLSNYFPDYSGGNDVNRAAKYLLWRFNQVNRAHLNLYPHLTQATDTTNIRLVFAAVKETILQNALKDSGIL

SEQ ID NO: 7793 - protein, 353 aa, Cryphonectria parasitica
MGCGMSTEEKEGKARNEEIENQLKRDRMQQRNEIKMLLLGAGESGKSTILKQMKLIHEGGYSRDERESFKEIIFSNTVQSMRVILEAMESLELPLEDQRMEYHVQTIFMQPAQIEGDVLPPEVGSAIEALWKDRGVQECFKRSREYQLNDSARYYFDNIARIAAPDYMPNDQDVLRSRVKTTGITETTFIIGDLTYRMFDVGGQRSERKKWIHCFENVTTILFLVAISEYDQLLFEDETVNRMQEALTLFDSICNSRWFIKTSIILFLNKIDRFKEKLPVSPMKNYFPDYEGGDDYAAACDYILNRFVSLNQHETKQIYTHFTCATDTTQIRFVMAAVNDIIIQENLRLCGLI

SEQ ID NO: 7794 - protein, 355 aa, Cryphonectria parasitica
MGACMSSSSEETEQKKRSQKIDKDLEEDSKRLRRECKILLLGSGESGKSTIVKQMKIIHLKGYSDEELYNYRPTVFKNLIECAKAVVNAMRQFDIEPEKEETKTLCDFLLEYSVDSGPQVLIDTRVGEAIQAIWNDPARKQLMDRQTEFYLMDSAEYFFEQAQRIVRQDYLPNEMDVLRARTKTTGIYETRFQMGQLSIHMFDVGGQRSERKKWIHCFENVTSIIFCVALSEYDQVLLEESSQNRMMESLLLFDSVVNSRWFVRTSIILFLNKVDIFKQKLGRSPLSNYFPDYSGGNDVNKAAKYLLWRFNQVNRAHLNLYPHLTQATDTSNIRLVFAAVKETILNNALKDSGIL

SEQ ID NO: 7795 - protein, 354 aa, Cryphonectria parasitica
MCFGSRKKEEADAMRSRELDKIIKADEKRMAKEVKLLLLGAGESGKSTVLKQMKLIYATGFSKTEKLEWKPVVFNNIVQSFRMIYDAMKEFDIPFEKPQSEKDMEQVLVDYELSPNDQFPEQYLQPLKDLWLDEGVKKAIAKGNEYALHDNLDYFCDDLDRFWDRTYIPTDQDLLRSRLRTTGITETIFDLSQLTYRMFDVGGQRSERKKWIHCFENVNCLLFLVAISGYDQCLVEDKDGNQMNEALMLWESIANSHWFLKSALILFLNKMDLFKEKLKKSPITQHGFTDYHGEPDDWKQASKYFMDKFRALNRNPEKEIYGHFTNATDTNLLKITMGSVQDMIIQRNLKQLIL

SEQ ID NO: 7796 - protein, 353 aa, Gibberella fujikuroi
MGCGMSTEEKEGKARNEEIENQLKRDKMMQRNEIKMLLLGAGESGKSTILKQMKLIHEGGYSRDERESFKEIIFSNTVQSMRVILEAMESLELPLEDQRMEYHVQTIFMQPAQIEGDVLPPEVGSAIEALWKDRGVQECFKRSREYQLNDSARYYFDNIARIAAPDYMPNDQDVLRSRVKTTGITETTFIIGDLTYRMFDVGGQRSERKKWIHCFENVTTILFLVAISEYDQLLFEDETVNRMQEALTLFDSICNSRWFIKTSIILFLNKIDRFKEKLPVSPMKNYFPDYEGGDDYAAACDYILNRFVSLNQHETKQIYTHFTCATDTTQIRFVMAAVNDIIIQENLRLCGLI

SEQ ID NO: 7797 - protein, 353 aa, Neurospora crassa
MGCGMSTEEKEGKARNEEIENQLKRDRMQQRNEIKMLLLGAGESGKSTILKQMKLIHEGGYSRDERESFKEIIFSNTVQSMRVILEAMESLELPLADQRVEYHVQTIFMQPAQIEGDVLPPEVGNAIEALWRDAGVQSCFKRSREYQLNDSARYYFDNIARIAAPDYMPNDQDVLRSRVKTTGITETTFIIGDLTYRMFDVGGQRSERKKWIHCFENVTTILFLVAISEYDQLLFEDETVNRMQEALTLFDSICNSRWFIKTSIILFLNKIDRFKEKLPVSPMKNYFPDYEGGDDYAAACDYILNRFVSLNQHETKQIYTHFTCATDTTQIRFVMAAVNDIIIQENLRLCGLI

SEQ ID NO: 7798 - protein, 353 aa, Neurospora crassa
MGCGMSTEEKEGKARNEEIENQLKRDRMQQRNEIKMLLLGAGESGKSTILKQMKLIHEGGYSRDGAESFKEIIFSNTVQSMRVILEAMESLELPLADQRVEYHVQTIFMQPAQIEGDVLPPEVGNAIEALWRDAGVQSCFKRSREYQLNDSARYYFDNIARIAAPDYMPNDQDVLRSRVKTTGITETTFIIGDLTYRMFDVGGQRSERKKWIHCFENVTTILFLVAISEYDQLLFEDETVNRMQEALTLFDSICNSRWFIKTSIILFLNKIDRFKEKLPVSPMKNYFPDYEGGDDYAAACDYILNRFVSLNQHETKQIYTHFTCATDTTQIRFVMAAVNDIIIQENLRLCGLI

SEQ ID NO: 7799 - protein, 356 aa, Neurospora crassa
MGACMSKNDEETEQKKRSQKIDRDLEEDSKKLRKECKILLLGSGESGKSTIVKQMKIIHLKGYSDEELTNYRPTVYKNLLECAKAVVNAMHQFDIQPADPSLRPYVEFLQDYNMEGCPPGQSIDPKVGTAIQALWNDPAKEQLMERQTEFYLMDSAEYFFTEVMRIVAEDYRPNEMDVLRARTKTTGIYETRFKMGQLSIHMFDVGGQRSERKKWIHCFENVTSIIFCVALSEYDQVLLEESSQNRMMESLLLFDSVVNSRWFMRTSIILFLNKVDIFKQKLGRSPLGNYFPDYSGGNDVNKAAKYLLWRFNQVNRAHLNLYPHLTQATDTSNIRLVFAAVKETILNNALKDSGIL

SEQ ID NO: 7800 - protein, 355 aa, Neurospora crassa
MCFGGRGKDDEAEASRSRDVDKQIRADEKRLSKEVKLLLLGAGESGKSTILKQMKLIYAQGFSKNEKLEWRPVIFANILQSFRLIFDAMNEFNIKLEDEDNEKNMVQMMVDYEMRGDEPLPLEYFEPAKKLWQDSGVRQAIEKGNEFALHDNLQYFCSDLDRLWDRNYVPSDQDLLRSRLRTTGITETVFDLGQLTYRMFDVGGQRSERKKWIHCFENVNCLLFLVAISGYDQCLVEDKDGNQMNEALMLWESIANSHWFTKSALILFLNKIDLFKEKLPRSPITNHGFTDYHGPPDDSKQASKYFMDKFRALNRNPDKEIYGHFTNATDTNLLKITMGSVQDMIIQRNLKQLIL

SEQ ID NO: 7801 - protein, 355 aa, Neurospora crassa
MCFGGRGKDDEAEASRSRELDKQIRADEKRLSKEVKLLLLGAGESGKSTILKQMKLIYAQGFSKNEKLEWRPVIFANILQSFRLIFDAMNEFNIKLEDEDNEKNMVQMMVDYEMRGDEPLPLEYFEPAKKLWQDSGVRQAIEKGNEFALHDNLQYFCSDLDRLWDRNYVPSDQDLLRSRLRTTGITETVFDLGQLTYRMFDVGGQRSERKKWIHCFENVNCLLFLVAISGYDQCLVEDKDGNQMNEALMLWESIANSHWFTKSALILFLNKIDLFKEKLPRSPITNHGFTDYHGPPDDSKQASKYFMDKFRALNRNPDKEIYGHFTNATDTNLLKITMGSVQDMIIQRNLKQLIL

SEQ ID NO: 7802 - protein, 313 aa, Neurospora crassa
MCFGGRGKDDEAEASRSRELDKQIRADEKRLSKEVKLLLLGAGESGKSTILKQMKLIYAQGFSKNEKLEWRPVIFANILQSFRLIFDAMNEFNIKLEDEDNEASLIQWTLISAPAKKLWQDSGVRQAIEKGNEFALHDNLQYFCSDLDRLWDRNYVPSDQDLLRSRLRTTGITETVFDLGQLTYPISGYDQCLVEDKDGNQMNEALMLWESIANSHWFTKSALILFLNKIDLFKEKLPRSPITNHGFTDYHGPPDDSKQASKYFMDKFRALNRNPDKEIYGHFTNATDTNLLKITMGSVQDMIIQRNLKQLIL

SEQ ID NO: 7803 - protein, 354 aa, Podospora anserina
MGSCMSTSGEESEQRKRSNKIDRDLEEDSKRLRRECKILLLGSGESGKSTIVKQMKIIHLKGYSHEELKNYRPTVFKNLLECAKSVASAMRQFDIEPVLDENKRHLDFLIDYSLDTNPQTIDAKVSVAIQSLWNDPAKEQLMERQTEFYLMDSAEYFFDEAARIAHKEYIPNEMDVLRARTKTTGIYETRFKMGQLSIHMFDVGGQRSERKKWIHCFENVTSIIFCVALSEYDQVLLEESSQNRMMESLLLFDSVVNSRWFMRTSIILFLNKVDIFKQKLGRSPLSNYFPDYSGGNDVNKAAKYLLWRFNQVNRAHLNLYPHLTQATDTSNIRLVFAAVKETILNNALKDSGIL

SEQ ID NO: 7804 - protein, 355 aa, Sclerotinia sclerotiorum
MGACMSSNVEDTEQRKRSQRIDKTLEEDSKRLRRECKILLLGSGESGKSTIVKQMKIIHQNGYTVDELALYRLTIYKNLIDCAKALVGAMRQMEIEPTNPANKEYGSFLLEYIVDPDPHTPLNPRVGTAVASVWKDGSMERLLARQSEFYLMDSAPYFFEEAGRIAAHDYIPTEADVLRARTKTTGIYETRFTMGSLSIHMFDVGGQRSERKKWIHCFENVTSIIFCVALSEYDQVLLEESNQNRMMESLVLFDSVVNSRWFMRTSIILFLNKVDLFKQKLGRSPLENYFPDYSGGNDLNRAAKYLLWRFNQVNRAHLNLYPHLTQATDTSNIRLVFAAVKETILQNALKDSGIL

SEQ ID NO: 7805 - protein, 433 aa, Cryptococcus neoformans
MGGCMSTPEAPKKTAETKQVPSTSTSSRPPQASTSATATAAGAGTSAANGTANGIKGDTTATNRVGTSGGQGLAAALASTEPPGAQDSKGNKDRSNQIDRQLEDDQKKFRKECKILLLGSGESGKSTIVKQMKIIHQNGYSKDELLSFRGVIYKNVLDSAQALIMAMRKIGVDPEDANNRSYADRILEYRMDAGLDAVIPSEILYNIESLWHDPVIPSVMDRSSEFYLMDSATYFFANIRKIAGPDYVPDEADVLRARTKTTGISETRFNMGQLSIHMFDVGGQRSERKKWIHCFEAVTSIIFCVALSEYDQVLLEESGQNRMQESLVLFESVINSRWFLRTSVILFLNKIDLFKQKLPKVPLVQYFPEYTGMRRNINKAAKYILWRFTQTNRARLSVYPHLTQATDTSNIRLVFAAVKETILQNALRDSGIL

SEQ ID NO: 7806 - protein, 353 aa, Ustilago maydis
MGCGASKVDKEGQARNDAIDAQLKKDRLAQKNEIKMLLLGAGESGKSTILKQMKLINHGSYSAEERESYKEIIFSNTVQSMRVLLDAMERLDIPLADATNAPRAEIILGLSPSIESSVLPRQVADAIHALWGDAGVQACFGRSREYQLNDSAKYYFDSIQRMAEPSYLPTDQDVLRSRVKTTGITETHFKIGELNYKLFDVGGQRSERKKWIHCFENVTAIIFLVAISEYDQLLYEDENVNRMQEALTLFDSICNSRWFVKTSIILFLNKIDLFKQKLPISPMADYFSDYTGGADYNSASEYIVNRFVSLNQSDAKTIYTHFTCATDTSQIKFVMSAVNDIIIQVNLRDCGLL

SEQ ID NO: 7807 - protein, 354 aa, Ustilago maydis
MGNCLSSSDQKEAKDRSVAIDKQIEEDSRKFKKECKILLLGSGESGKSTIVKQMKIIHQNGYTKDELLLYRLTVIKNLVDSAQAMVLALRKFKMEPEMPENRENVDAILQYRVDADPGATLDHAMARKVDSLWKDPIVPAIMERSSEFYLMDSAAYFFDNVNRIGQSDYVPNENDVLRARSKTTGISETRFNMGQLSIHLFDVGGQRSERKKWIHCFEAVTSIIFCVALSEYDQVLLEESGQNRMAESLVLFESVVNSRWFLRTSVILFLNKIDIFKQKIPKQPLSKYFPEYSGGPDINKAAKYILWRFTQTNRARLSIYPHLTQATDTSNIRLVFAAVKETILTNALKDSGIL

SEQ ID NO: 7808 - protein, 356 aa, Ustilago maydis
MGACLSAEQSHDTPEYKRSKALDRRIKEDEKNLSREVKLLLLGAGESGKSTILKSMRIIHHIPFTDEERENFRRLVFLNLVQGMKTILDVMEEWSIDFQDDSNIDHLLLFVSYPDISEDEPFPTNYLVALKDLWLDQGVQSVYRRGNEAAVPDNMSYYYTDLDRLFSPSYIPSEDDILRCRNKTTGIIETTFPLQDHVYRIFDVGGQRSERKKWIHCFENVTAVLFCVALSGYDSCLVEDKDSNQMQEALMLFDSICNSKWFARTSMILFLNKVDVFRQKIAYSSIKHYFPDYDGDDQDFNAARSYFKARFCRLNRSVNKEIYPSFTNATDVSLLKIVMASVTDIILTNNLRDIVL

SEQ ID NO: 7809 - protein, 580 aa, Ustilago maydis
MSPSVSSPQLRHTKSNRAISRIDRTDPLALALQPPANEAPADKYARLHQEKLAKQRSDEIDKFLKQHQEDRATHGLASSPSTSVDGANFKKGRVYKMVLLGQAGAGKTTVLKQMRLLYDPPAHERERRGWTKIVLLNLTSSVRVLLETLSLYHDQRLERKSSELSRLESSTSASTSTSASASSPKHVDTESQPNDATRLELAKQLGTTKKINTSSLPWLTHIPSVVQLERALRTELGAFGEEAVLSASSDEAAITNQKVRTRLDAQGSSSIRGEKSPLVLRPGWQERLFTYARRSLSLTQNGRAAAARRETDGGDSQSESEKDNSETLKLLRAIRPEVLALWNDDAGCRALRKRGLFLDGQSDAATSYFLDNYSRITDAAYRPTDEDILHSRVRTLGVTEDVFRVDRSLIYRIYDVGGSRSQRAAWAPFLDDIESIIFLAPLSAFDQPLVEDCSTNRLADTFTLFNQIVTNPLLEHATMILFLNKIDLLEKKLRQGVQLHKYWPEYVGDNDFEAVWRWFRAKFRDALRRAEDEVNLDQTSRRRLYVHTTVATSTVQIRAILMSVKDSILRENLKLTGLVG

SEQ ID NO: 7810 - protein, 354 aa, Schizophyllum commune
MGCVQSSGVDEEAKARNDEIESQLKKDRMMAKNEIKMLLLGAGESGKSTVLKQMKLIHHGGYNEQERDSYKEIIFSNTIQSMRAILEAMPQLDIPLTPQNDARRAVIMSMPMQIEADVLPPDVVDAIRSLWKDPGVRQAVQRSREFQLNDSAVYYFNSIDRMAAPNYMPTDQDILRSRVKTTGITETTFKVGELTYKLFDVGGQRSERKKWIHCFENVTALVFLVSLSEYDQMLYEDESVNRMQEALTLFDSICNSRWFVKTSIILFLNKIDLFAEKLPRSPLGDYFPDYTGGDNYDAACDYLLHRFVSLNQSAATKQIYAHYTCATDTQQIKFVLSAIQDILLQLHLRECGLL

SEQ ID NO: 7811 - protein, 355 aa, Schizophyllum commune
MGGCASKPVDLEAKARSDDIDKMIEEDGKRLKKECKILLLGSGESGKSTIVKQMKIIHQDGFSQDELIAYRPIIHRNVLDSAKAILVHMKKLSVECEDFKNRPLQDKILDYQLDETTNLTISPDIAEAIDAFWKDPAVTRIIDEQTSHFYLMDSATYFFTEVLRIGEPNYIPTETDVLRARAKTTSITETRFTMGPLSIHMFDVGGQRSERKKWIHCFESVTSIIFCTALSEYDQSLLEEKNQNRMAESLVLFESIINSRWFLRTSIIIFLNKIDVFKLKVHKVPLERYFPEYTGGKDPNKAAKFILWKFMQANRAGLSVYPHLTQATDTSNIRLVFAAVKETILQNALKDSGIL

SEQ ID NO: 7812 - protein, 352 aa, Schizophyllum commune
MGACVSSSSQPVADVQAKERSDEIDSQIKADSERLKKECKILLLGSGESGKSTIVKQMKIIHKNGFSPQELASFRPTVYRNVIDSAQAVAQIIKKANPESPNLALLDKIIDYDANGIVTPDLADAIRRITSDPATPKIIDEHANEFYLMDNAAYFFENVVRIGAEKYLPTETDILRARVKTTSIKETRFACGPLTIHMFDVGGQRSERKKWIHCFESVTSIIFCTALSEYDQVLLEEKNQNRMAESLTLFESVINSRWFLRTSIILFLNKTDVFKIKLPKVPLDRYFPEYTGGNDINKAAKFILWKFMQANRARLSVYPHLTQATDTKNVRHVFAAVKETILHNALKDSGIL

SEQ ID NO: 7813 - protein, 352 aa, Schizophyllum commune
MGGCASKPVDLEAKARSDDIDKMIEEDGKRLKKECKILLLGSGESGKSTIVKQMKIIHQDGFSQDELIAFRPSSTANVLDSAKAILSHEKLNVECEDFKNRPLQDKILDYQLDETNLPFPRHLPNHKPFWKDPAVTRIIDEQTSHFYLMDSATYFFTEVLRIGEPNYIPTETDVLRARAKTTSITETRFTMGPLSIHMFDVGGQRSERKKWIHCFESVTSIIFCTALSEYDQSLLEEKNQNRMAESLVLFESIINSRWFLRTSIIIFLNKIDVFKLKVHKVPLERYFPEYTGGKDPNKAAKFILWKFMQANRAGLSVYPHLTQATDTSNIRLVFAAVKETILQNALKDSGIL

SEQ ID NO: 7814 - protein, 351 aa, Schizophyllum commune
MGACVSSSSQPVADVQAKERSDEIDSQIKADSERLKKECKILLLGSGESGKSTIVKQMKIIHKNGFSPQELASFRPTVYRNVIDSAQAVAQIIKKANPESPNLALLDKIIDYDANGIVTPDLADAIRRITSDPATPKIIDEHANEFYLMDNAAFFENVVRIGAEKYVPTETDILRARVKTTSISETRFACGPLTIHMFDVGGQRSERKKWIHCFESVTSIIFCTALSEYDQVLLEEKNQNRMAESLTLFESVINSRWFLRTSIILFLNKTDVFKIKLPKVPLDRYFPEYTGGNDINKAAKFILWKFMQANRARLSVYPHLTQATDTKNVRHVFAAVKETILHNALKDSGIL

SEQ ID NO: 7815 - protein, 353 aa, Coprinellus congregatus
MGCVQSTGVDDEAKARNDEIENQLKRDRVMAKNEIKMLLLGAGESGKSTVLKQMKLIHHGGYSDQEKDSYKEIIFSNTVQSMRAILDALPALDLALQPANDARRATILAVPGQIEAEVLPRDIADAIRQLWADPGLKEAVRRSREFQLNDSAVYYFNSIDRMSAPGYLPTDQDILRSRVKTTGITETTFKVGELTYKLFDVGGQRSERKKWIHCFENVTALVFLVSLSEYDQMLYEDESVNRMQEALTLFDSICNSRWFVKTSIILFLNKIDLFAEKLPARRSTYFPDFTGGDNYDAACDYLLHRFVSLNQSAATKQIYAHYTCATDTQQIKFVLSAIQDILLQLHLRECGLL

SEQ ID NO: 7816 - protein, 354 aa, Lentinula edodes
MGCAQSSGIDDEAKARNDEIENQLRRDRMMAKNEIKMLLLGAGESGKSTVLKQMKLIHHGGYNDSERDSYKEIIFSNTIQSMRAILDAMPSLDLFLNPSNDARRATILSLPVQLEVDVMPRDVGDSIRGLWSDPAVKEAVKRSREFQLNGSAVYYFNSIDRMSGPGYMPSDQDILRSRVKTTGITETTFQVGELTYKLFDVGGQRSERKKWIHCFENVTALVFLVSLSEYDQMLYEDESVNRMQEALTLFDSICNSRWFVKTSIILFLNKIDLFAEKLPRSPLGDYFPDYTGGNNYDAACEYLLRRFVSLNQSAATKQVYAHYTCATDTQQIKFVLSAIQDILLQLHLREAGLL

SEQ ID NO: 7817 - protein, 353 aa, Helicobasidium mompa
MGACFSSEGGGQHDISYAIDRQIEEDARKFKKECKILLLGSGESGKSTIVKQMKIIHQNGYTRDELVLFKATVFKNVVDSAQAIVLALRKFRMDPVEPVNRMYADRIMEYRVDLDMGIGLSQDVVRSIESLWHDPIIPSVLDRGSEFYLMDSAPYFFDDVQRIGSPDYIPNETDVLMARTKTTGISETKFRSGQLSIHMFDVGGQRSERKKWIHCFEAVTSIIFCVALSEYDQVLLEESNQNRMAESLVLFESVINSRWFLRTSIILFLNKIDLFKAKLPKVPLERYFAEYTGGDDVNKAAKYILWRFTQLNRARLSIYPHLTQATDTSNIRLVFAAVKETILQNALRDSGIL

SEQ ID NO: 7818 - protein, 353 aa, Colletotrichum trifolii
MGCGMSTEDKEGKARNEEIENQLKRDKMMQRNEIKMLLLGAGESGKSTILKQMKLIHEGGYSRDERESFKEIIFSNTVQSMRVILEAMESLELPLEDQRMEYHVQTIFMQPAQIEGDVLPPEVGSAIEAVWKDRGVQDCFKRSREYQLNDSARYYFDNIARIAAPDYMPNDQDVLRSRVKTTGITETTFIIGDLTYRMFDVGGQRSERKKWIHCFENVTTILFLVAISEYDQLLFEDETVNRMQEALTLFDSICNSRWFIKTSIILFLNKIDRFKEKLPVSPMKNYFPDYEGGDDYAAACDYILNRFVSLNQHETKQIYTHFTCATDTTQIRFVMAAVNDIIIQENLRLCGLI

SEQ ID NO: 7819 - protein, 429 aa, Candida albicans
MGCGASVPVDDDEIDPFLQDKRINDAIEQSLQLRQQNSKKGVKLLLLGAGESGKSTVLKQLKLLHKGGFTQQERRQYSHVIWCDVIQSMKVLIIQARKLKIKLDCDQPNNSLIPYKQIILRSDPLKQIDASVAGGTDFLNDFVVKYSEENKNKRRLKSTGTTDIWGKDDDSNINSDAINQALELSLNKDSEQFTRLSIAEAIHKLWKLDSGIKKCFDRSNEFQLEGSADYYFDNVVNFADTNYLSTDLDILKGRIKTTGITETDFLIKSFQFKVLDAGGQRSVRKKWIHCFEDITAVLFVLAISEYDQNLFEDERVNRMHESIVLFDSLCNSKWFANTPFILFLNKIDIFENKIKKNPLKNYFPDYDGKPDDTNEAIKFFETNFLKINQTNKPIYVHRTCATDSKSMKFVLSAVTDMIVQQNLKKSGIM

SEQ ID NO: 7820 - protein, 429 aa, Candida albicans
MGCGASVPVDDDEIDPFLQDKRINDAIEQSLQLRQQNSKKGVKLLLLGAGESGKSTVLKQLKLLHKGGFTQQERRQYSHVIWCDVIQSMKVLIIQARKLKIKLDCDQPNNSLIPYKQIILRSDPLKQIDASVAGGTDFLNDFVVKYSEENKNKRRLKSTGTTDIWGKDDDSNINSDAINQALESSLNKDSEQFTRLSIAEAIHKLWKLDSGIKKCFDRSNEFQLEGSADYYFDNVVNFADTNYLSTDLDILKGRIKTTGITETDFLIKSFQFKVLDAGGQRSVRKKWIHCFEDITAVLFVLAISEYDQNLFEDERVNRMHESIVLFDSLCNSKWFANTPFILFLNKIDIFENKIKKNPLKNYFPDYDGKPDDTNEAIKFFETNFLKINQTNKPIYVHRTCATDSKSMKFVLSAVTDMIVQQNLKKSGIM

SEQ ID NO: 7821 - protein, 353 aa, Mamestra brassicae
MECCMSEEAKEQKRINQEIERQLRKDKRDARRELKLLLLGTGESGKSTFIKQMRIIHGSGYSDDDKRGFIKLVYQNIFMAMQSMIRAMELLTIQYGNPSNSEKAELISSIDFESVTTFESPYVEAIKALWADAGIQECYDRRREYQLTDSAKYYLQEIDRVAAPNYLPTEQDILRVRVLTTGIIEYPFDLEEIRFRMVDVGGQRSERRKWIHCFENVTSIIFLVALSEYDQILFESENENRMEESKALFKTIITYPWFQHSSVILFLNKKDLLEEKIMYSHLVDYFPEYDGPQRDANTAREFILRTFVDLNPDAEKIIYSHFTCATDTENIKLVFCAVKDTIMQSALKEFNLA

SEQ ID NO: 7822 - protein, 327 aa, Trichoderma viride
  unsure (1)..(327): unsure at all Xaa locations
ENQLKRDKXMQRNEIKMLLLGAGESGKSTILKXMKLIHEGGYSRDERESFKEIIFSNTXQSMRVILEAMESLELPLQDXRMEYHVQTIFIQPAQIEGDVLPPEVGGAIEALWKDHGVXECFKRSREYXLNDSARYYXDXIVXIAGXXYMPXDQDVLRSRVKTTGITETTFIIGDLTYXMFDVGGQRSEXKKWIHCFENVTTILFLVAISEYDQLLFEDETVNRMQEALTLFXSICNSRWFIKTSIILFLNKIDRFKEKLPVSPMKNYFPDYEGGDDYXAACXYILNRFVSLNQHETKQIYTHFTCATDTXXIRFVMAAVNXXIXXDN

SEQ ID NO: 7823 - protein, 402 aa, Trichomonas vaginalis
MGCSASKPSEPSNAKLPSAPVPKKVEQVPEPKPEPQPQPEPQPQPEPPKPAEPAPAPAPAPEPQKPAEPAPKVVAVEDDTNEAYGLLLCGAGESGKTTFTRQLKLRYLNGFNEKDCRDFLRTIRGNLVETMQLLLVWLEHNNIEIEDSELSSMAQDIIDVDPQDCEFNEELVEKLKALWENEQIKKAFEHKDETAVPDHMPYFFAKIDELAGEDYIPSNEDVLRARIRSIGIEAITFDLQGARIRIFDVGGQKSERSKWANVMNQVEGVIFCVSFAEFDKPMFEDQNVLRINDSLEIFGNITHQEKFSNSPIFLVCNKFDVFTEKIKNTDAFVKIFPEFSGDSHNPEACADYLIQRFLDKAAPLSEDRPIIQYKIVALNGDQVVETADAICKFISDKYYQDA

SEQ ID NO: 7824 - protein, 147 aa, Stentor coeruleus
MRILSHVNGFSTQEKLSKLEDIKRNIRDAILTICDAMEKLNVSLENEQLRPKLDWIIDHASETKFLISPEFWEYTEELWKDKGIQQCYERSNEYQLIDCAKYFLDKVKLIISPGYVPDEQDILRCRVHTSGIFETTFTVDKVCFYMF

SEQ ID NO: 7825 - protein, 359 aa, Geodia cydonium
  unsure (1)..(359): unsure at all Xaa locations
MGGCVSATPEEREAKTRSSVIDRQQRQDARQYENTIKILLLGAGESGKSTVVKQMKIIHGDGYSQTEXRSFKSVIYGNLAASMRVVLNAMEKLGIPYGNQASQEQARVILSLSNSLSSYESFPPDVTSAFISLWRDAGVQECFSRAYEYQLNDSAPYYFQNMDRLLREDYVPDEQDVLRSRVQTTGIIETSFRVKQLTYRVVDVGGQRSERRKWIQCFDDVRAVLFVCALSGYDMTLFEDGKTNRLEESLNLFQAICNNKFFVKTSMILFLNKADLFRDKITNSDRHLRLYFTQYTGPDRDVEAASRFIQSEFMERNLNKQKIIYPHLTTATDTTNIKVVFGVVLDTIIRENLEAANLL

SEQ ID NO: 7826 - protein, 355 aa, Geodia cydonium
MSCLLSEEERLQKRINTRINRELQRDHKDAKKEIKLLLLGTGESGKSTFIKQMRIIHGKGYSKQDCLEYKNLVFRNILMSMHSMLQATAELKIAYIDPDAQRHVQLLMALRPETAQSLGGETCEAIRKLWQDAGVQECYQRRNEYQLSDSTKYYLDDLPRISSNDYVPTTQDVLRVRVPTTGINEYPFTINKIIFKMVDVGGQRSERRKWIHCFDHVTSVMFLVAISEYDQILVEADSRVNRMVESLHLFNTIISYPWFNKSSIILFLNKKDLLEEKVMHSHLIDYFEEYDGPKCDHVSARESIAKMFISINDMRSADIYPHFTCATDTENIKFVFDVVKNHILQQHITEVVPGL

SEQ ID NO: 7827 - protein, 381 aa, Geodia cydonium
MSCFGGGVEDDRTKEQKRQNKLIDQQLKKDKKAYRALHRLLLLGAGESGKSTVVKQMKILHKDGFSDEERKEKLVDIKSNIRDIVVTVTKAMSELDPPVSLGSPENEEHLQYLWSDEVTRKDYDYPEKFFEAVSKVWNDSGVQTCSARSNEYQLIDSAAYFMASEKQAQLKEPNYIPNDQDILRCRVLTSGIFETRFVVDKVHFYMFGVGGQRIERRKWIQCFNDVTAIIFVVACSSFNMVIREDLYTNRLRESLDLFEQIWNNRWLRTVSIILFLNKQDILKEKIDAGKRVENYFLEFNSYRPPDNLDLSKEPPGSSSTFLKARYFFRDMFLRITNKSHDGRHFCYPHFTTAVDTENIRRVFDSCRDIIQRMHLQKYELL

SEQ ID NO: 7828 - protein, 305 aa, Hydra magnipapillata
RIIHGQGYTEDDRRGYTNLVFLNIYQAMQALTRAMRNLKISYSNPANEENARLILDVDLSEDKSRTTITLSPQYASAIESLWKDSGIQEVYDRRREYQLSDSAKYYLSDLKRICAPNFVPTMQDVLRARAPTTGIIEYPFDLDTIIFRMVDVGGQRSERRKWIHCFENVTSIMFLVALSEYDQVLFESQSENRMDESKALFKTIITYPWFLQSSIILFLNKTDLLEEKIQKSDLQTYFPEYDGAKGDAKAAKEFILKMFVDLNPDTDKIIYSHFTCATDTENIRFVFAAVRDTILQLNLKEYNLV

SEQ ID NO: 7829 - protein, 301 aa, Hydra magnipapillata
KIIHESGYTSDECFQYKPVVYSNTIQSMLAIIRALGTLNIEFSNPDRQEDARQLFSLASGVEDGSFTPELIAIMKRLWRDEGVQQCFQRSREYQLNDSAGFYLSDLDRIGAPDYVPTQQDVLRTRVKTTGIVETHFVFKELHFKMFDVGGQRSERKKWIHCFEGVTAIIFCVALSGYDLLLAEDEETNRMHESMKLFDSICNNKWFMDTSIILFLNKKDLFAEKIKKSPLTTCFPEYMGANTYDEAGSYIQLQFENLNSRKGEKEIYTHFTCATDTNNIQFVFDAVTDVIIKNNLKDCGLF

SEQ ID NO: 7830 - protein, 305 aa, Hydra magnipapillata
RIIHGKDYSEESLLEFKPIIYSNVLKGMKVLADARRKLDIPWGDPNSELYGEYILNIDHQTSTFDTAFFLEHVEAIRHLWNDTGIQTAFKRRNEFQLGDSTSYFLDSLDRVGRKDFMPSKQDMLHSRKATKGIQEYEFDLKGVPFVMVDVGGQRSQRTKWFQCFDNVTSILFMVSSSAYDQVIMEDRRTNCLIESCMIFETIVNNKCFTKVSIILFLNKTDLLEQKIRNRHNSIKDFFPQFQGDPYNLSDVQNFILQMFDSRRRERSKALFHHFTTAIDTENIKFVFHAVKDTILQDNLKSLMLQ

SEQ ID NO: 7831 - protein, 321 aa, Hydra magnipapillata
RILHVDGFNETEKKEKIEDIKKNIKEGILTITGAMKTIVPPVKLENPANQWRIDWLHDNATVDDNDFTYPEEFYNHVEVLWKDKGVQECFERSNEYQLIDCAQYFLDRTADVRKPIYSPSNQDLLRCRVLTRGIIETRFQVDRVNFHMFDVGGQRDERRKWIQCFNDVTAIIFVVACSSYNLVLREDPTTNRLRESLTLFTGIWNNRFLKTISVILFLNKQDLLREKVLAQKSKIEDYFADYARYRTPEDAVKEASEEEEVTRAKYFIRDEFLRISTATGEGKHYCYPHFTCAVDTENIRRVFNDCRDIIQRMHLRQYELL

SEQ ID NO: 7832 - protein, 328 aa, Schistosoma mansoni
  unsure (1)..(328): unsure at all Xaa locations
MQAAKDVKLLLLGAGESGKSTIVKQMKIIHEGGFTQEDNKQYKPVVYSNTIQSMVAILRAMNTLGIQFGDSEQGAEDARIVCDVIQAMEDTKPFSEDLLDAMKRLWADSGVQECFARSNEYQLNDSAKYFLDDLDRLGAKDYMPTEQDILRTRVKTTGIVEVHFQFKNMNFKLFDVGGQRSERKKWIHCFEDVTAIIFCVAMSEYDQVLHEDETTNRMQESLKLFDSICNNKWFTDTSIILFLNKKDLFEEKIKRSPLTICFPEYPGKQTYEEAAIYIQASFEXKNRSPNKEIYCHQTCATDTNNIQFVFDAVTDVIIANNLKGCGLY

SEQ ID NO: 7833 - protein, 379 aa, Schistosoma mansoni
MVIGCCTLNNISEDAKTRSDANKQIEKLIEKEKKNFKSTHRLLLLGAGESGKSTIVKQMRILHIDGFSEREKKEKIDAIRKNLRDAICSIAGAMGSLKPPVKLELSENRKLRDYILETASKPDFDYPPEFFTYCAKLWKDGGIQETFERSNEYQLIDCAKYFLDKALEVGAPNYIPSEQDILRCRVLTSGIFETKFSVDKVNFHMFDVGGQREERRKWIQCFNDVTAIIFVAACSSYNMVLREDPSQNRVKESLELLASIWNNRWLRNISVILFLNKQDLLTEKVLAGKSKIEVYFPHYATYQAPADTLAEYRHENSEVVRARFFFRDEFLKVTSNNNGGRHYCYPHLTCAVDTENIRRVFNDCRDIIQRMHLRQYELL

SEQ ID NO: 7834 - protein, 356 aa, Caenorhabditis briggsae
MGSCQSNENSEGNARNKEIEKQLNADKRAGSSIVKLLLLGAGECGKSTVLKQMQILHSNGFTEEEVNEKRAIVYNNTVSAMCTILRAMDGVLHLPLENGQKEAEKAIVMKVQENGEEGEALTEEVSRAIQSLWADPGVKKAFEMRSEYQLPDSAKYFLDNCQRISEPGYRPNDQDILYSRVATTGVVEVKFKIKELDFRVFDVGGQRSERRKWIHCFDNVESIIFITAISEYDQVLFEDETTNRMIESMQLFNSICNSTWFLSTAMILFMNKKDLFMEKIQRVNITTAFPDYEGGQNYEEAVAFIKQKFAELNLNPDKKTIYMHETCATDTNQVQLVISSVIDTIIQKNLQKAGMM

SEQ ID NO: 7835 - protein, 333 aa, Caenorhabditis briggsae
MGSCQSNENSEGNARNKEIEKQLNADKRAGSSIVKLLLLGAGECGKSTVLKQMQILHSNGFTEEEVNEKRAIVYNNTVSAMCTILRAMDGVLHLPLENGQKEAEKAIVMKVQENGEEGEALTEEVSRAIQSLWADPGVKKAFEMRSEYQLPDSAKYFLDNCQRISEPGYRPNDQDILYSRVATTGVVEVKFKIKELDFRVFDVGGQRSERRKWIHCFDNVESIIFITAISEYDQVLFEDETTNRMIESMQLFNSICNSTWFLSTAMILFMNKKDLFMEKIQRVNITTAFPDYEGGQNYEEAVAFIKQKFAELNLNPDKKTIYMHETCATDTNQ

SEQ ID NO: 7836 - protein, 354 aa, Caenorhabditis elegans
MGCTMSQEERAALERSRMIEKNLKEDGMQAAKDIKLLLLGAGESGKSTIVKQMKIIHESGFTAEDYKQYKPVVYSNTVQSLVAILRAMSNLGVSFGSADREVDAKLVMDVVARMEDTEPFSEELLSSMKRLWGDAGVQDCFSRSNEYQLNDSAKYFLDDLERLGEAIYQPTEQDILRTRVKTTGIVEVHFTFKNLNFKLFDVGGQRSERKKWIHCFEDVTAIIFCVAMSEYDQVLHEDETTNRMHESLKLFDSICNNKWFTDTSIILFLNKKDLFEEKIKKSPLTICFPEYSGRQDYHEASAYIQAQFEAKNKSANKEIYCHMTCATDTTNIQFVFDAVTDVIIANNLRGCGLY

SEQ ID NO: 7837 - protein, 354 aa, Caenorhabditis elegans
MGCTMSQEERAALERSRMIEKNLKEDGMQAAKDIKLLLLGAGESGKSTIVKQMKIIHESGFTAEDYKQYKPVVYSNTVQSLVAILRAMSNLGVSFGSADREVDAKLVMDVVARMEDTEPFSEELLSSMKRLWGDAGVQDCFSRSNEYQLNDSAKYFLDDLERLGEAIYQPTEQHILRTRVKTTGIVEVHFTFKNLNFKLFDVGGQRSERKKWIHCFEDVTAIIFCVAMSEYDQLLHEDETTNRMHESLKLFDSICNNKWFTDTSIILFLNKKDLFEEKIKKSPLTICFPEYSGRQDYHEASAYIQAQFEAKNKSANKEIYCHMTCATDTTNIQFVFDAVTDVIIANNLRGCGLY

SEQ ID NO: 7838 - protein, 342 aa, Caenorhabditis elegans
MGSCQSNENSEGNARNKEIEKQLNADKRAGSSIVKLLLLGAGECGKSTVLKQMQILHSNGFTEEEVNEKRAIVYNNTVSAMCTILRAMDGVLHLPLENGQKEAEKAIVMKVQENGEEGEALTEEVSKAIQSLWADPGVKKAFEMRSEYQLPDSAKYFLDNCQRISEPGYRPNDQDILYSRVATTGVVEVKFKIKELDFRVFDVGGQRSERRKWIHCFDNVESIIFITAISEYDQVLFEDETTNRMIESMQLFNSICNSTWFLSTAMILFMNKKDLFMEKIQRVNITTAFPDYEGGQNYEEAVSFIKQKFAELNLNPDKKTIYMHETCATDTNQVQLVISSVI

SEQ ID NO: 7839 - protein, 356 aa, Caenorhabditis elegans
MGSCQSNENSEGNARNKEIEKQLNADKRAGSSIVKLLLLGAGECGKSTVLKQMQILHSNGFTEEEVNEKRAIVYNNTVSAMCTILRAMDGVLHLPLENGQKEAEKAIVMKVQENGEEGEALTEEVSKAIQSLWADPGVKKAFEMRSEYQLPDSAKYFLDNCQRISEPGYRPNDQDILYSRVATTGVVEVKFKIKELDFRVFDVGGQRSERRKWIHCFDNVESIIFITAISEYDQVLFEDETTNRMIESMQLFNSICNSTWFLSTAMILFMNKKDLFMEKIQRVNITTAFPDYEGGQNYEEAVSFIKQKFAELNLNPDKKTIYMHETCATDTNQVQLVISSVIDTIIQKNLQKAGMM

SEQ ID NO: 7840 - protein, 344 aa, Caenorhabditis elegans
MGSCQSNENSEGNARNKEIEKQLNADKRAGSSIVKLLLLGAGECGKSTVLKQMQILHSNGFTEEEVNEKRAIVYNNTVSAMCTILRAMDGVLHLPLENGQKEAEKAIVMKVQENGEEGEALTEEVSKAIQSLWADPGVKKAFEMRSEYQLPDSAKYFLDNCQRISEPGYRPNDQDILYSRVATTGVVEVKFKIKELDFRVFDVGGQRSERRKWIHCFDNVESIIFITAISEYDQVLFEDETTNRMIESMQLFNSICNSTWFLSTAMILFMNKKDLFMEKIQRVNITTAFPDYEGGQNYEEAVSFIKQKFAELNLNPDKKTIYMHETCATDTNQVQLVISSVIDT

SEQ ID NO: 7841 - protein, 346 aa, Caenorhabditis elegans
MGSCQSNENSEGNARNKEIEKQLNADKRAGSSIVKLLLLGAGECGKSTVLKQMQILHSNGFTEEEVNEKRAIVYNNTVSAMCTILRAMDGVLHLPLENGQKEAEKAIVMKVQENGEEGEALTEEVSKAIQSLWADPGVKKAFEMRSEYQLPDSAKYFLDNCQRISEPGYRPNDQDILYSRVATTGVVEVKFKIKELDFRVFDVGGQRSERRKWIHCFDNVESIIFITAISEYDQVLFEDETTNRMIESMQLFNSICNSTWFLSTAMILFMNKKDLFMEKIQRVNITTAFPDYEGGQNYEEAVSFIKQKFAELNLNPDKKTIYMHETCATDTNQVQLVISSVIDTII

SEQ ID NO: 7842 - protein, 350 aa, Caenorhabditis elegans
MGSCQSNENSEGNARNKEIEKQLNADKRAGSSIVKLLLLGAGECGKSTVLKQMQILHSNGFTEEEVNEKRAIVYNNTVSAMCTILRAMDGVLHLPLENGQKEAEKAIVMKVQENGEEGEALTEEVSKAIQSLWADPGVKKAFEMRSEYQLPDSAKYFLDNCQRISEPGYRPNDQDILYSRVATTGVVEVKFKIKELDFRVFDVGGQRSERRKWIHCFDNVESIIFITAISEYDQVLFEDETTNRMIESMQLFNSICNSTWFLSTAMILFMNKKDLFMEKIQRVNITTAFPDYEGGQNYEEAVSFIKQKFAELNLNPDKKTIYMHETCATDTNQVQLVISSVIDTIIQKNL

SEQ ID NO: 7843 - protein, 345 aa, Caenorhabditis elegans
MGSCQSNENSEGNARNKEIEKQLNADKRAGSSIVKLLLLGAGECGKSTVLKQMQILHSNGFTEEEVNEKRAIVYNNTVSAMCTILRAMDGVLHLPLENGQKEAEKAIVMKVQENGEEGEALTEEVSKAIQSLWADPGVKKAFEMRSEYQLPDSAKYFLDNCQRISEPGYRPNDQDILYSRVATTGVVEVKFKIKELDFRVFDVGGQRSERRKWIHCFDNVESIIFITAISEYDQVLFEDETTNRMIESMQLFNSICNSTWFLSTAMILFMNKKDLFMEKIQRVNITTAFPDYEGGQNYEEAVSFIKQKFAELNLNPDKKTIYMHETCATDTNQVQLVISSVIDTI

SEQ ID NO: 7844 - protein, 354 aa, Caenorhabditis elegans
MGLCQSAEDKELTLKSKAIDKEMMQNHMSQQKVVKLLLLGAGECGKSTVLKQMRILHDHGFTAEEAEQQKSVVFNNTLQAMTAILKGMEALRMTFDKPIRENDAKFVMESHKMLQEAKVFPEELANAIQALWNDKAVQQVIAKGNEFQMPESAPHFLSSLDRIKLPDYNPTEQDILLSRIKTTGIVEVKFQMKSVDFRVFDVGGQRSERKKWIHCFEDVNAIIFIAAISEYDQVLFEDETTNRMIESMRLFESICNSRWFINTSMILFLNKKDLFAEKIKRTSIKSAFPDYKGAQTYDESCRYIEEKFDGLNANPEKTIYMHQTCATDTDQVQMILDSVIDMIIQANLQGCGLY

SEQ ID NO: 7845 - protein, 354 aa, Caenorhabditis elegans
MGLCQSAEDKELTLKSKAIDKEMMQNHMSQQKVVKLLLLGAGECGKSTVLKQMRILHDHGFTAEEAEQQKSVVFNNTLQAMTAILKGMEALRMTFDKPIRENDAKFVMESHKMLQEAKVFPEELANAIQALWNDKAVQQVIAKGNEFQMPESAPHFLSSLDRIKLPDYNPTEQDILLSRIKTTGIVEVKFQMKSVDFRVLDVGGQRSERKKWIHCFEDVNAIIFIAAISEYDQVLFEDETTNRMIESMRLFESICNSRWFINTSMILFLNKKDLFAEKIKRTSIKSAFPDYKGAQTYDESCRYIEEKFDGLNANPEKTIYMHQTCATDTDQVQMILDSVIDMIIQANLQGCGLY

SEQ ID NO: 7846 - protein, 352 aa, Caenorhabditis elegans
MGHCTSKDQKEGKRLNRRIDEQIKKDQSMSLRIIKLLLLGAGESGKSTILKQMRILHKDGFSQQDLEMIRPVVYSNCIHSMLSILRAMFHLQIEYGEPDRVRDSQLVFATVHANKEELTEELAAAMQRLWHDPGVRECYRRSNEYQIDDSAKYFLDNLPRLSSPNYVPSEQDLLRTRIKTTGITEVLFELKGLTFRVIDVGGQRSERKKWIHCFDNVNAIIFISSLSEYDQTLREDNCTNRMQESLKLFDSICNSPWFADIHFILFLNKKDLFAEKIVRSPLTVCFPEYKGQQNQTECINYIQWKFEQLNRSSQREIYCHHTCATDTNNVQFVLDACLDMIIAKNLKSMGLC

SEQ ID NO: 7847 - protein, 357 aa, Caenorhabditis elegans
MGCIMSQEDEAAKRRSKKIDRLLKEDGENSMRTIKLLLLGAGESGKSTILKQMRIIHDVGYTTEERKVFRGVVYGNIILSLNAIIHAMEQLKISFTTLDHESDARKLLMFSTTGEEDELPEELVVLMKSVWSDSGIQKALERSREYQLNDSAGYYLSQLDRICAPNYIPTQDDILRTRIKTTGIVETQFVYKDRLFLVFDVGGQRSERKKWIHCFEDVTALIFCVALSEYDMVLVEDCQTNRMRESLKLFDSICNNKWFVETSIILFLNKKDLFEEKIVRSPLTHCFPEYTGANNYEEASAYIQQQFEDMNKRTTGEKNQEIYTQFTCATDTNNIRFVFDAVTDIIIRDNLRTCGLY

SEQ ID NO: 7848 - protein, 357 aa, Caenorhabditis elegans
MGNCESRELVAQAKQNKIINTELDKAKKTDENIIKLLLLGAGESGKSTVLKQMKIIHNSGFSQEEISNKRNVVCANTVQAMGALLDGMKQLQFDFSTRVCNAHEKLIRETLNDKAEYGPFSDAMFNALTELWADKGVQCAYDKREFFYLHDSAKYFLDRIARVHTPNYVPTENDILHTRVPTMGVIEVNFTIKGKFFRVFDVGGQRSQRKKWIHCFDDAKAMIYVASLSEYDQVLLEDNTTNRMHESIQLFKQVINNKYFVNTSVILFLNKIDLFEEKIVTKKRSLGIAFESFSGPSQDLNAAVAFVEKKYRSMAENKEKNIYCHHTCATDTQQVQYVLDAVLDTILSTKLKGCGLY

SEQ ID NO: 7849 - protein, 357 aa, Caenorhabditis elegans
MGNCESRELVAQAKQNKIINTELDKAKKTDENIIKLLLLGAGESGKSTVLKQMKIIHNSGFSQEEISNKRNVVCANTVQAMGALLDGMKQLQFDFSTRVCNAHEKLIRETLNDKAEYGPFSDAMFNALTELWADKGVQCAYDKREFFYLHDSAKYFFDAIARVHTPNYVPTENDILHTRVPTMGVIEVNFTIKGKFFRVFDVGGQRSQRKKWIHCFDDAKAMIYVASLSEYDQVLLEDNTTNRMHESIQLFKQVINNKYFVNTSVILFLNKIDLFEEKIVTKKRSLGIAFESFSGPSQDLNAAVAFVEKKYRSMAENKEKNIYCHHTCATDTQQVQYVLDAVLDTILSTKLKGCGLY

SEQ ID NO: 7850 - protein, 356 aa, Caenorhabditis elegans
MGSTCSTPESKEQKRINSVIDKQIRKDEDDEIGNQKLLLLGTGECGKSTILKQINILHSSGFSKADLKNVAGTVYSNIIQGVATLLKAKDHFYYELSTPELDADAQHILSLADSSKDAMPFIPLTFNAIKRLWHDPVVQKTFERRAEFQMMDTLVYFMNELDRINNADYIPTVDDMLRIRIPTMGVVQQTIEIKGTKFRIYDVGGQRSERRKWIHLFDNVNATIFISAINEFNQKLNEDGQTNRMKESIKLFETICNSRWFVQAAMILFLNKRDLFEQKLKTTSINVLFSTYQGSNDYAECVAYIQMRFERLNKYSDIKKIYTHVTCATDTNQIQLVIDSVVDMVIGRNLRGTGME

SEQ ID NO: 7851 - protein, 359 aa, Caenorhabditis elegans
MGCFHSTGSEAKKRSKLIDEQLRHDHERCVGEIKLLLLGAGESGKSTIVRQMRILHETGFNKQEQMAYRPVVFSNMVQSMLAILKAMQPLNISFTDAAREEDARMFISHFLHVNNAELSEAFSLELSDLMKQLWMDEGVKKCVKRAHEYQLNDSAEYYFNALDRISSSSYLPTQDDILRARVKSTGIVETTFMYKDLCFKMFDVGGQRSERKKWIHCFDSVTAVIFCVALSEYDLRLAEDQTMNRMHESMQLFDSIVNNCWFTETSIILFLNKMDIFEERIRYTPLTVCFPEYQGGMTITETSTFIQSRFEILNKRQTPAQKEIYSHFTCATDTNNIRFVFDAVTDIIIRNNLYLCGLY

SEQ ID NO: 7852 - protein, 329 aa, Caenorhabditis elegans
MGCFHSTGSEAKKRSKLIDEQLRHDHERCVGEIKLLLLGAGESGKSTIVRQMRILHETGFNKQEQMAYRPVVFSNMVQSMLAILKAMQPLNISFTDAAREEDARMFISHFLHVNNAELSEAFSLELSDLMKQLWMDEGVKKCVKRAHEYQLNDSAEYYFNALDRISSSSYLPTQDDILRARVKSTGIVETTFMYKDLCFKMFDVGGQRSERKKWIHCFDSVTAVIFCVALSEYDLRLAEDQTMNRMHESMQLFDSIVNNCWFTETSIILFLNKMDIFEERIRYTPLTVCFPEYQGGMTITETSTFIQSRFEILNKRQTPAQKASCKALI

SEQ ID NO: 7853 - protein, 356 aa, Caenorhabditis elegans
MGLCQSEEEKVGTLKSRAIDKEIKQLQTSEERTVKLLLLGAGECGKSTVLKQMRLLTSKQYTDEELLTQAKLVYTNIVIEMDHLVKAMPAAGLNFSDPMREHDVHMLTLYIKDMQHKNFQQDAADHVEKLWKDPVVKRLYAERKELNIRDIGDNTEYFFENLPRISKEDYHPNATDTLLLRTKTTGIVEVGFEIKKVKFRVFDVGGQRSERKKWIHCFEDVNAIIFIAALSEYNEVLFEDETTNRMIESMRLFESICNSRWFHNTNIILFLNKKDLFEEKIKKENIHKAFPEYRGEQNYAETVAFIKTKFEALSNNPKKTFYVHETCATDTNQVQKILDSVISMIIQSNLHKSGLY

SEQ ID NO: 7854 - protein, 375 aa, Caenorhabditis elegans
MGSTCSTPESKEQKRINSVIDKQIRKDEDDEIGNQKLLLLGTGECGKSTILKQINILHSSGFSKADLKNVAGTVYSNIIQGVATLLKAKDHFYYELSTPELDADAQHILSLADSSKDAMPFIPLTFNAIKRLWHDPVVQKTFERRAEFQMMDTLVYFMNELDRINNADYIPTVDDMLRIRIPTMGVVQQTIEIKGTKFRWSSVNGIFNGRPHNLDLVRIYDVGGQRSERRKWIHLFDNVNATIFISAINEFNQKLNEDGQTNRMKESIKLFETICNSRWFVQAAMILFLNKRDLFEQKLKTTSINVLFSTYQGSNDYAECVAYIQMRFERLNKYSDIKKIYTHVTCATDTNQIQLVIDSVVDMVIGRNLRGTGME

SEQ ID NO: 7855 - protein, 355 aa, Caenorhabditis elegans
MACCLSEEAREQKRINQEIEKQLQRDKRNARRELKLLLLGTGESGKSTFIKQMRIIHGQGYSEEDKRAHIRLVYQNVFMAIQSMIRAMDTLDIKFGNESEELQEKAAVVREVDFESVTSFEEPYVSYIKELWEDSGIQECYDRRREYQLTDSAKYYLSDLRRLAVPDYLPTEQDILRVRVPTTGIIEYPFDLEQIIFRMVDVGGQRSERRKWIHCFENVTSIMFLVALSEYDQVLVECDNENRMEESKALFRTIITYPWFTNSSVILFLNKKDLLEEKILYSHLADYFPEYDGPPRDPIAAREFILKMFVDLNPDADKIIYSHFTCATDTENIRFVFAAVKDTILQHNLKEYNLV

SEQ ID NO: 7856 - protein, 364 aa, Caenorhabditis elegans
MGAGATGLRGARLSPEERANSSKSRAIDRALSKDHTDDLNRFKILLLGTAESGKSTIFKQMRVLHLDGYAKEDALEYLSIIHSNCMEALTQLVDACTAFGINHDITVQEDVNRFEDFKRKLRDPEGLVIPVVIGRCMDRVWHSPSLQLCYDTRRFRFALLDSAKYFMDNIVRLTEDNYVPSIQDIVHCRISTTGINELAFNYKKMDFKMVDVGGQRSERRKWIHCFDNVDMILFIVSMSDYDQLDPEDNKYNRMKQSYEIFKTIVHSDLFRHASIVLFLNKYDVFVEKLKTSPLRRSFKNYEGDNSEESAREFIKKLFRRCITDRHKFFVFETTATDTGNIDLVFGSAVAHIVNENLRSAGLHE

SEQ ID NO: 7857 - protein, 355 aa, Caenorhabditis elegans
MVCCFGKKDERTKTIEKELHKERKIMRRQINLLLLGSGESGKSTFVKQMHIIHGAGEFTADEVRAYRQQIYQNAISAMRVLLDARNKLGIAWEDPKRQVEVEKVMRFSVGDLLKGIDFTTFVEVAPIISDFWNDAAIRKTYEQRNLFQISDSCQYFFEHIPRIAMPDFYPTNRDILFCRKATRGISEHIFEINKIPFRFIDVGGQRSQRQKWFQCFTDITSILFMVASNEYDQVILEDRRTNRVVESRSVFETIVNNRAFSNVSIILFMNKNDLLQEKVPKSDIRQYFTDFTGDHTLVRDVQFFLVDKFEASRRDRARPFFYHFTTAVDTENIRRVFRDVRESILEQNLKTLMMQ

SEQ ID NO: 7858 - protein, 356 aa, Caenorhabditis elegans
MGVCQSFVLTDEMKDQIKVNKEIEKQLEKKKNMQLEQTVLLLGPGESGKSTVMKQMRAMTGNYTKTELHERKVLIIQNLCQFSEMLLEYVREYILEMTEDDDKRYTVMCEELKMAVIHDGIMRPELADTLKEFWGNSAIQDAYSKRDTFHLTDSAKYFFDNIDRIKLPGFEPTNQDIVHIRVPTTGVAQVEVIMNNIKLMICDCGGQRSERRKWYHFFDEADAVLFVAAISEFDQKLAEDEETNRMHESIRLFWTVFNGKFFKKAAVILFLNKIDLFEEKVKHVKIKDYFPKFEGANTVSEGTKFFRRQFREGIHPDFKKRMYTHETCAISDQVQIIINTVIDTVIQDNLKDTGMI

SEQ ID NO: 7859 - protein, 364 aa, Caenorhabditis elegans
MGALCSSETYMLDKEEYKKQVEHNKSIENDLEKDRKIKILKLLILGPGESGKSTTIKQIKIIHDEGYSAEEKMVRKHGIYMNILEGIEEIHLSVGRENKSYKNPLSFDHINEVRMFTENFKKADDSEKLLGPEVINAIQKYIKDETIAMMLRDKTVYNIDDSTIYFLENFSRIIQKDYLPTEEDILKSRVPTSGVIQYKIMLKNFNFRIFDVGGQRAQRRKWLHVFDDVQAVLFITSLSEYDQVLREDATVNRMKESLNLFEKICNGRYFLNTAMILFLNKIDLFKIKIKHTNITVALTSYKGPQECDSALDYIRKRFISLNKNKKRSIYEHVTCATDTEQIQVVIDSVIDVVIQHTMQKVGIQ

SEQ ID NO: 7860 - protein, 363 aa, Caenorhabditis elegans
MSAADMARKNSLINRQLEKEKIDSKKMLKILLLGGPECGKSTIFKQMKIIHMNGFSDLDYVNFRYLIYSNIMQSMDQLLEAAEFFHFPPDDSPSIRRALNHYKSYKVRYSTSEVELNRELADSLSKLYNAEFIKSVLNRKNELKLLDSAVYFLDDIDRISAHEYKPTEMDVLRARVPTTGITEIEFPFKQASLRMVDVGGQRSEQRKWIHCFDNVNGVLFIAAISGYNLYDEDEENRKDDGTPTKTNRLRYSMELFKRIANHQCFSKKTAMILFLNKIDIFKEKIGKYPLTTCFKNYKGVNAFEPACKYVTDRFSRLVSGDIQHEKPLYTHITNATDTRNIDRVFDSCMDVIFKISMEKVGFM

SEQ ID NO: 7861 - protein, 422 aa, Caenorhabditis elegans
MLEFSQKLAAGTPGPHSSTHNIESSAFATADITLGFLLCGRLSFTTQVNNRVNVCGGTEMSAADMARKNSLINRQLEKEKIDSKKMLKILLLGGPECGKSTIFKQMKIIHMNGFSDLDYVNFRYLIYSNIMQSMDQLLEAAEFFHFPPDDSPSIRRALNHYKSYKVRYSTSEVELNRELADSLSKLYNAEFIKSVLNRKNELKLLDSAVYFLDDIDRISAHEYKPTEMDVLRARVPTTGITEIEFPFKQASLRMVDVGGQRSEQRKWIHCFDNVNGVLFIAAISGYNLYDEDEENRKDDGTPTKTNRLRYSMELFKRIANHQCFSKKTAMILFLNKIDIFKEKIGKYPLTTCFKNYKGVNAFEPACKYVTDRFSRLVSGDIQHEKPLYTHITNATDTRNIDRVFDSCMDVIFKISMEKVGFM

SEQ ID NO: 7862 - protein, 343 aa, Caenorhabditis elegans
MPLPPCIVLATSSPVSTINLLLLGSGESGKSTFVKQMHIIHGAGEFTADEVRAYRQQIYQNAISAMRVLLDARNKLGIAWEDPKRQVEVEKVMRFSVGDLLKGIDFTTFVEVAPIISDFWNDAAIRKTYEQRNLFQISDSCQYFFEHIPRIAMPDFYPTNRDILFCRKATRGISEHIFEINKIPFRFIDVGGQRSQRQKWFQCFTDITSILFMVASNEYDQVILEDRRTNRVVESRSVFETIVNNRAFSNVSIILFMNKNDLLQEKVPKSDIRQYFTDFTGDHTLVRDVQFFLVDKFEASRRDRARPFFYHFTTAVDTENIRRVFRDVRESILEQNLKTLMMQ

SEQ ID NO: 7863 - protein, 348 aa, Caenorhabditis elegans
MGCNFSSQSKLQVPEIRASRSITPASQKSEDPYSHIRLLLLGSAESGKTTVLEQVRLLYKQHFTESEYFHRRAFIYHNIFKSIKALCRAMRMSDIQFADPINMGRAQSIIADEHGHYGLFSKDLAEKIKHIWNDKSMQKLYARRSQFNLNDSASYFLNNIDKINMVDYKPSERDLIMAYVPTCGVQNVIFTACNQSFQLFDIGGQKIDRRKWALQYEGIDAIFFCIAISEYDQVMSEDMVTNRLDDALNLLQSISEDPAFATTPIYLFLNEIDVFCEKLSVIPLSKYKPDFKGGDQDDAIDFMENLACEALGKRDRSLYRVYRCIAIDTQMMAELLSTVFKDIAKRKK

SEQ ID NO: 7864 - protein, 375 aa, Caenorhabditis elegans
MGCVGAGADAEGREARKVNKQIEEQLAKDKQVMRATHRLLLLGAGESGKSTIVKQMRILHINGFNEAEKREKITDIRRNVRDAMQVILRAMDEIVPKVSLDDPSTAISRDYILRITNDPEDNYPSEFYDHILTCWKDKGVMACYERSSEYQLIDCAQYFLDKVDVVRQNNYDPSEQDILRCRVMTTGIFETKFEVDKVRFHMFDVGGQRDERRKWIQCFNDVTAIIFVCASSSYNLVLWEDNTQNRLRESLALFKNIWNNRWLKTISVILFLNKQDLLSEKIKAKRYLLESFFPEFEGYNLPNDAVFDNQEDKDVVRAKYFIRGEFLRISTANSDGRHHCYPHFTCAVDTENIRRVFNDCRDIIQRIHLRQYELL

SEQ ID NO: 7865 - protein, 378 aa, Caenorhabditis elegans
MRLMGCVGAGADAEGREARKVNKQIEEQLAKDKQVMRATHRLLLLGAGESGKSTIVKQMRILHINGFNEAEKREKITDIRRNVRDAMQVILRAMDEIVPKVSLDDPSTAISRDYILRITNDPEDNYPSEFYDHILTCWKDKGVMACYERSSEYQLIDCAQYFLDKVDVVRQNNYDPSEQDILRCRVMTTGIFETKFEVDKVRFHMFDVGGQRDERRKWIQCFNDVTAIIFVCASSSYNLVLWEDNTQNRLRESLALFKNIWNNRWLKTISVILFLNKQDLLSEKIKAKRYLLESFFPEFEGYNLPNDAVFDNQEDKDVVRAKYFIRGEFLRISTANSDGRHHCYPHFTCAVDTENIRRVFNDCRDIIQRIHLRQYELL

SEQ ID NO: 7866 - protein, 356 aa, Caenorhabditis elegans
MGCNFSSQSKLQVPEIRASRSITPASQKSEDPYSHIRLLLLGSAESGKTTVLEQVRLLYKQHFTESEYFHRRAFIYHNIFKSIKALCRAMRMSDIQFADPINMGRAQSIIADEHGHYGLFSKDLAEKIKHIWNDKSMQKLYARRSQFNLNDSASYFLNNIDKINMVDYKPSERDLIMAYVPTCGVQNVIFTACNQSFQLFDIGGQKIDRRKWALQYEGIDAIFFCIAISEYDQVMSEDMVTNRLDDALNLLQSISEDPAFATTPIYLFLNEIDVFCEKLSVIPLSKYKPDFKGGDQDDAIDFMENLACEALGKRDRSLYRVYRCIAIDTQMMAELLSTCFLKKERRLIRYANNIPV

SEQ ID NO: 7867 - protein, 385 aa, Caenorhabditis elegans
MRLMGCVGAGADAEGREARKVNKQIEEQLAKDKQVMRATHRLLLLGAGESGKSTIVKQMRILHINGFNEAEKREKITDIRRNVRDAMQVSEKDSRVILRAMDEIVPKVSLDDPSTAISRDYILRITNDPEDNYPSEFYDHILTCWKDKGVMACYERSSEYQLIDCAQYFLDKVDVVRQNNYDPSEQDILRCRVMTTGIFETKFEVDKVRFHMFDVGGQRDERRKWIQCFNDVTAIIFVCASSSYNLVLWEDNTQNRLRESLALFKNIWNNRWLKTISVILFLNKQDLLSEKIKAKRYLLESFFPEFEGYNLPNDAVFDNQEDKDVVRAKYFIRGEFLRISTANSDGRHHCYPHFTCAVDTENIRRVFNDCRDIIQRIHLRQYELL

SEQ ID NO: 7868 - protein, 303 aa, Caenorhabditis elegans
MRIIHGQGYSEEDKRAHIRLVYQNVFMAIQSMIRAMDTLDIKFGNESEELQEKAAVVREVDFESVTSFEEPYVSYIKELWEDSGIQECYDRRREYQLTDSAKYYLSDLRRLAVPDYLPTEQDILRVRVPTTGIIEYPFDLEQIIFRMVDVGGQRSERRKWIHCFENVTSIMFLVALSEYDQVLVECDNENRMEESKALFRTIITYPWFTNSSVILFLNKKDLLEEKILYSHLADYFPEYDGPPRDPIAAREFILKMFVDLNPDADKIIYSHFTCATDTENIRFVFAAVKDTILQHNLKEYNLV

SEQ ID NO: 7869 - protein, 381 aa, Caenorhabditis elegans
MGVCQSFVLTDEMKDQIKVNKEIEKQLEKKKNMQLEQTVLLLGPGESGKSTVMKQMRAMTGNYTKTELHERKVLIIQNLCQFSEMLLEYVREYILEMTEDDDKRYTVMCEELKMAVIHDGIMRPELADTLKEFWGNSAIQDAYSKRDTFHLTDSAKKMFQLIQKHVSKMSEMFLKIFFYVTHFFDNIDRIKLPGFEPTNQDIVHIRVPTTGVAQVEVIMNNIKLMICDCGGQRSERRKWYHFFDEADAVLFVAAISEFDQKLAEDEETNRMHESIRLFWTVFNGKFFKKAAVILFLNKIDLFEEKVKHVKIKDYFPKFEGANTVSEGTKFFRRQFREGIHPDFKKRMYTHETCAISDQVQIIINTVIDTVIQDNLKDTGMI

SEQ ID NO: 7870 - protein, 385 aa, Caenorhabditis elegans
MGLVTCKQEREAELQNRQIDTQIRIENQANKRKIKMLLLGVTDSGKSTIVKQMRVNYLDGFNETEVVNAIFVIRNNIIDAFKNICNIILHSDITVTQEEKVLVKLFAYESGKIELMQEVDELNVINAVSGYECIKQFFERFAFHPMVPDHIHYFYPNLDRIASSNYVPTAEDLIHMRQTTLGVHEISFDYTKHIIRLIDVGGQKTERRKWIHFFEGVTAVMFVCSLASFNQTTEEEPKAFVWESSLNKVQNKVLVRSAGKAKVEKPGLINRLDESVDLFKSIRENSFLKMSNFMLFLNKKDLLTKKLTKVVFSDYFPDYKKWITNDNSDVSVAEFIENMFREGLEPEKRMYAHLTQATVTANIEGTFALCCDVIFGKNYEDTNLE

SEQ ID NO: 7871 - protein, 390 aa, Caenorhabditis elegans
MFSAESNLRNRWRLSKTLSENIFLKIDENLKIETQILEERKKKALKLLIIGPGESGKSTIVKQVRILHCGGYSVEEKRALKHGIYINILEGIDEIHWAIMWRQLIYENPSSIECLNQIRIFTKQFNKTGETENVLCKDIIKSIQMYIKDETVAMMLRNKTVYNIEDSTIQQVKRWVLFSLIIIISSFIENLARVIGKEYLPTGEDILKTRVPTLGIAQYEANIKHLTFKFIFFDIGGQRAQRRKITHLSGHVLDDSHAILFITSLSEYNQVLREDAFVSRIEESLHLFNEICNGMYFHSTAIILFLNKIDLFEIKITHTNITVAFPDYEGPRERDCALEYIRVQFISLNNNKNRKIYQHVTSATDTARIQVVIDMLFDIIISASLKMVGV

SEQ ID NO: 7872 - protein, 368 aa, Caenorhabditis elegans
MVPSRNGEGTELRGHMEIEKELALEKKTYGSHIKILILGGPLSGKSTIFKQMQIIHVDGFKTDQELIQYRGLIDNNIRDIYLQLIAGSRVVGIPLDPIEHITYEIDEIYAPMSDAFSVRTISELLEPLTEFWNSKQIQEIYKRRCEFELLDSTKYYLENLTRIADPTYLPNQEDIVHSRKATMSINSIVFEYTGVSLLMIDVGGQRSERKKWLHLFDDAKVVLFVIDLTGYAKRSEESRMELSRFPKFFRDVGSNAYDMKVALKIFNEVAAASALANAVFLLFFNKVDLFKEILSQVNLQPCFSKFDGENTYEETSKYICEKFIRAASSKKSVFPHFTTATNTENVKLVFRACMESVFKANAKATGLS

SEQ ID NO: 7873 - protein, 420 aa, Caenorhabditis elegans
MVPSRNGEGTELYAHSEELEAKLRELARRGHMEIEKELALEKKTYGSHIKILILGGPLSGKSTIFKQMQIIHVDGFKTDQELIQYRGLIDNNIRDIYLQLIAGSRVVGIPLDPIEHITYEIDEIYAPMSDAFSVRTISELLEPLTEFWNSKQIQEIYKRRCEFELLDSTKYYLENLTRIADPTYLPNQEDIVHSRKATMSINSIVFEYTGVSLLNILVKLKILDFFLFYFRMIDVGGQRSERKKWLHLFDDAKVVLFVIDLTGYAKRSEESRMEVKYFETFQFKISRTWILRILSRFPKFFRDVGSNAYDMKVALKIFNEVAAASALANAVFLLFFNKVDLFKEILSQVNLQPCFSKFDGENTYEETSKYICEKFIRAASSKKSVFPHFTTATNTENVKLVFRACMESVFKANAKATGLS

SEQ ID NO: 7874 - protein, 355 aa, Strongyloides stercoralis
MGVCQSSKEKEMQNKTKAIDKELMQGHLNQQKIVKLLLLGAGECGKSTVLKQMRILHDHGFSDEEMTDQKGVIYNNTVQAIACIIRGMGTLQINYENPEREADARIVLDTIKRGEESEPLTAELANAIERLWADKGVNTIAYSRGNEYQLPESANYFLDNVKRISQPDYKPTEQDILLSRIKTTGIVEVKFKMKNVDFRVFDVGGQRSERKKWIHCFEDVNAIIFIAAISEYDQVLFEDETTNRMLESMRLFESICNSRWFINTSMILFLNKKDLFLEKIKKTSIKVAFPEYKGGNTYEEQVKFIEDTFEGLNANPDKTLYMHQTCATDTNQVQMILDSVIDMIIQANLQGCGLY

SEQ ID NO: 7875 - protein, 355 aa, Strongyloides stercoralis
MGICHSEEEKEQGMVNKEIDKKLKESKMLGEKTIKLLLLGAGECGKSTIMKQMKILHSNGFTDDELNQQKSVVYSNTINSMVLLIKAMNTYKVGYSNIQCEAEARVILDVVKRNEESEPFTKEVYNALKILWNDTSINTIVYEKRKEYHLQDSAKYFLDSLDRIADSSYKPTETDILLTRIKTTGIVEVIFKIKSVNFRVFDVGGQRSERKKWIHCFENVNAIIFVTAVSEYDEVLFEDETTNRMTESMRLFESICNSRWFITTSMILFLNKKDLFAEKIKKISIKILFPEYSGEQNYDESISYIKGKFEELNSNPKKTIYVHQTCATDTNQVQLILDSVVSMVIQANLHKSGLY

SEQ ID NO: 7876 - protein, 353 aa, Trichoderma atroviride
MGCGMSTEDKEGKARNEEIENQLKRDKMMQRNEIKMLLLGAGESGKSTILKQMKLIHEGGYSRDERESFKEIIFSNTVQSMRVILEAMESLELPLQDQRMEYHVQTIFIQPAQIEGDVLPPEVGGAIEALWKDHGVQECFKRSREYQLNDSARYYFDNIVRIAAPDYMPNDQDVLRSRVKTTGITETTFIIGDLTYRMFDVGGQRSERKKWIHCFENVTTILFLVAISEYDQLLFEDETVNRMQEALTLFDSICNSRWFIKTSIILFLNKIDRFKEKLPVSPMKNYFPDYEGGDDYAAACDYILNRFVSLNQHETKQIYTHFTCATDTTQIRFVMAAVNDIIIQENLRLCGLI

SEQ ID NO: 7877 - protein, 355 aa, Trichoderma atroviride
MGGCMSSNNDEVEQKKRSQAIDKELDEDSKRLRKECKILLLGSGESGKSTIVKQMKIIHLKGYSEEELYNYRPTVFKNLVECAKAVITAMQQFSIELAQDDNRAHADFLIDYQAESGPQAHIDPKVGLAVQAIWSDPAKEQLMEHQTEFYLMDSAEYFFQEAMRIVAPDYLPNEMDVLRARTKTTGIYETRFQMGQLSIHMFDVGGQRSERKKWIHCFENVTSIIFCVALSEYDQVLLEESSQNRMMESLLLFDSVVNSRWFMRTSIILFLNKVDIFKQKLGRSPLSNFFPDYTGGTDVNKAAKYLLWRFNQVNRAHLNLYPHLTQATDTSNIRLVFAAVKETILNNALKDSGIL

SEQ ID NO: 7878 - protein, 354 aa, Lymnaea stagnalis
MGCTLSAEERAAMERSKAIEKNLKEDGMQAAKDIKLLLLGAGESGKSTIVKQMKIIHEGGFTSEDNKQYKPVVYSNTIQSLVAIIRAMGTLSIPFGDNERESDAKMVLDVIARMEDTEPFSEELLAAMKRLWVDSGVQECLGRANEYQLNDSAKYFLDDLDRLGAKDYMPTEQDILRTRVKTTGIVEVHFSFKNLNFKLFDVGGQRSERKKWIHCFEDVTAIIFCVAMSEYDQVLHEDETTNRMQESLKLFDSICNNKWFTETSIILFLNKKDLFEEKIKKSPLTICFPEYTGKQMYQEASAYIQAQFEAKNKSSAKEIYCHQTCATDTNNIQFVFDAVTDVIIANNLRGCGLY

SEQ ID NO: 7879 - protein, 354 aa, Lymnaea stagnalis
MGCVTSQEDKAAVERSKQIDKSLRMDGEKAAREVKLLLLGAGESGKSTIVKQMKIIHEKGYSQEECLQYKPVVYSNAIQSMIAIIKAMGQLKIQFGHPDRAEDARQFFALAGHADEGEMSAELSGIMKRLWKDVGVQECFSRSREYQLNDSAEYYLNALDRISAPGYIPTEQDVLRTRVKTTGIVETHFTFKDLHFKMFDVGGQRSERKKWIHCFEGVTAIIFIVAMSEYDLTLAEDQEMNRMMESMKLFDSICNNKWFTETSIILFLNKKDLFEEKIKKSPLTICFPEYTGANTYEEAAAYIQLQFENLNKKKDTKEIYSHFTCATDTNNVQFVFDAVTDVIIKNNLKDCGLF

SEQ ID NO: 7880 - protein, 353 aa, Lymnaea stagnalis
MACCIPDELKEQKRINQEIERQLKRDKRDARRELKLLLLGTGESGKSTFIKQMRIIHGAGYSDEDKRSHIKIVYQNIFMAMHAMIRAMDTLNIQYINPANRENGNMIRQIDYETVTTFDKPCVDAIISLWNDDGIQECYDRRREYQLTDSAKYYLDSVERISQQDYLPTLQDILRVRVPTTGIIEYPFDLDSIIFRMVDVGGQRSERRKWIHCFENVTSIMFLVALSEYDQVLVESDNENRMEESKALFRTIITYPWFQNSSVILFLNKKDLLEEKIMHSHLVDYFPEFDGPKKEASTAREFILKMFVELNPDPDKIIYSHFTCATDTENIRFVFAAVKDTILQLNLKEYNLV

SEQ ID NO: 7881 - protein, 376 aa, Lymnaea stagnalis
MGCFRQTRDDEDDKLRKEANKKIEKQLAKDKLLYRGTHRLLLLGAGESGKSTIVKQMRILHVNGFSPEERKQKIEDIKRNVRDAILTITGAMSTLNPPVQLEHPQNKAKVDYIQDKASQAEFDYPPIFYEYTEILWKDKGVQAAFERSNEYQLIDCAQYFLDRVHIIRQAEYTPSEQDILRCRVLTSGIFETKFSVDKVNFHMFDVGGQRDERRKWIQCFNDVTAIIFVTACSGYNMVLREDATQNRLKESLDLFKSIWNNRWLRTISVILFLNKQDLLAEKVKAGKSKIEDYFPEYARYQVPPDASSEPGEDTEVVRAKYFIRDEFLRISTASGDGRHYCYPHFTCAVDTENIRRVFDDCRDIIQRMHLRQYELL

SEQ ID NO: 7882 - protein, 376 aa, Lymnaea stagnalis
MGCFRQTRDDEDDKLRKEANKKIEKQLAKDKLLYRGTHRLLLLGAGESGKSTIVKQMRILHVNGLSPEERKQKIEDIKRNVRDAILTITGAMSNLNPPVQLEHPQNKAKVDYIQDKASQAEFDYPPIFYEYTEILWKDKGVQAAFERSNEYQLIDCAQYFLDRVHIIRQAEYTPSEQDILRCRVLTSGIFETKFSVDKVNFHMFDVGGQRDERRKWIQCFNDVTAIIFVTACSGYNMVLREDATQNRLKESLDLFKSIWNNRWLRTISVILFLNKQDLLAEKVKAGKSKIEDYFPEYARYQVPPDASSEPGEDTEVVRAKYFIRDEFLRISTASGDGRHYCYPHFTCAVDTENIRRVFNDCRDIIQRMHLRQYELL

SEQ ID NO: 7883 - protein, 386 aa, Lymnaea stagnalis
MSKGGRAAVARSRSIDHQLDEERERREKEVQILIIGGPGAGKSTFIKQLRLHYGDQFPPNERRLFHDQILQNVAMGLVHLIEHMERMGLQFETPEVQDLSREFRKKHPRISIVTLIKKFKEENEKAEEICPVTTRAELTKRLSSFDVYNPEVPNVDDMHTLWADPAMQICFEKRNKFETDKLTHSSEYFLLHIGRICSKEYLASVQDILLIRWPTLGVQEHKFMVDGLLYRMIDVAGQRSLRKKWIHFFDEVAAVAFFVNLTAYDEFTEEDPTVNSLQDSLQAFAEISHSQFLDKTDFILFLNKKDLFANKLKTSSIATCFPDYKGPNTVDASLKYIKEQFLQSKPAQKQVYSHATCAIDVPHMKDLLATVVDCIVDINVKRSKNY

SEQ ID NO: 7884 - protein, 357 aa, Mizuhopecten yessoensis
MGCTMSAEDRAAAERSRDIEKKLKEDGIQAAKDIKLLLLGAGESGKSTIVKQMKIIHEGGFTSEDNKQYKPVVYSNTIQSLVAIVRAMSTLNIPYGDNEREEIKSDAKIVLDVIARMEDTEPFSEELLAAMKRLWTDTGVQECFGRSNEYQLNDSAKYFLDDLDRLGSKDYMPTEQDILRTRVKTTGIVEVHFSFKNLNFKLFDVGGQRSERKKWIHCFEDVTAIIFCVAMSEYDQVLHEDETTNRMQESLKLFDNICNNKWFTDTSIILFLNKKDLFEEKIKKSSLTICFNEYTGNQTYEEAAAYIQAQFEAKNKSSSKEIYCHQTCATDTNNIQFVFDAVTDVIIANNLRGCGLY

SEQ ID NO: 7885 - protein, 353 aa, Mizuhopecten yessoensis
MACCLSEEAKEQKRINCEIEKELRKAKRDARRELKLLLLGTGESGKSTFIKQMRIIHGTGYSEEDKRGFIKIVYQNIFMAMHSMIRAMDTIKISFEVADNEENAIMIRQVDYETVTTLDSQSVEAILSLWADAGIQECYDRRREYQLTDSAKYYLDAVDRIAEPNYLPTLQDILRVRVPTTGIIEYPFDLDSIIFRMVDVGGQRSERRKWIHCFENVTSIMFLVALSEYDQVLVESDNENRMEESKALFRTIITYPWFQNSSVILFLNKKDLLEEKIMHSHLVDYFPEFDGQKKDAQGAREFILRMFVDLNPDPDKIIYSHFTCATDTENIRFVFAAVKDTILQLNLKEYNLV

SEQ ID NO: 7886 - protein, 354 aa, Loligo forbesi
MACCLSEEAKEQKRINQEIEKQLRRDKRDARRELKLLLLGTGESGKSTFIKQMRIIHGSGYSEEDRKGFEKIVYQNIFSAIQTLIAAMETLSLEYKDPSNNEHAEFLNSIDADSADIFEDGHVTAIKGCWTDPGMQECYDRRREYQLTDSAKYYLDDVERIHEPGYIPTLQDILRVRVPTTGIIEYPFDLYSIIFRMVDVGGQRSERRKWIHCFENVTSIMFLVALSEYDQVLVESDNEENRMEESKALFRTIITYPWFQNSSVILFLNKKDLLEEKIMTSHLADYFPDYDGPKCDYEAAREFMMDSYMDLNEDKEKMLYYHYTCATDTENIRFVFAAVKDTILQLNLKEYNLV

SEQ ID NO: 7887 - protein, 354 aa, Loligo pealei
MACCLSEEAKEQKRINQEIEKQLRRDKRDARRELKLLLLGTGESGKSTFIKQMRIIHGAGYSEEDRKGFEKIVYQNIFSAIQTLIAAMETLSLEYKDPANNEHAEFLNSIDADAADTFEQAHVDAIQGCWKDPGMQECYDRRREYQLTDSAKYYLDDVERIHEPGYIPTLQDILRVRVPTTGIIEYPFDLDSIIFRMVDVGGQRSERRKWIHCFENVTSIMFLVALSEYDQVLVESDNEENRMEESKALFRTIITYPWFQNSSVILFLNKKDLLEEKIMTSHLVDYFPEYDGPKCDYEAAREFMCDSYMDLNEDKEKMLYYHYTCATDTENIRFVFAAVKDTILQLNLKEYNLV

SEQ ID NO: 7888 - protein, 354 aa, Octopus vulgaris
MGCTMSAEERLALERSKAIEKNLKEDGIQAAKDIKLLLLGAGESGKSTIVKQMKIIHEGGFTSEDNKQYKPVVYSNTIQSLVAIIRAMGTLDIPFGDNERECDAKMVLDVIGRMEDTEPFSDELLQAMKRLWADTGVQECFGRSNEYQLNDSAKYFLDDLDRLGAKDYMPTVQDILRTRVKTTGIVEVHFAFKTLNFKLFDVGGQRSERKKWIHCFEDVTAIIFCVAMSEYDQVLHEDETTNRMQESLKLFDSICNNKWFTDTSIILFLNKKDLFEEKIKKSPLTICFPEYTGRQTYEEAAAYIQAQFEAKNKSATKEIYCHQTCATDTNNIQFVFDAVTDVIIANNLRGCGLY

SEQ ID NO: 7889 - protein, 354 aa, Octopus vulgaris
MGCAVSSVDKAGAERSKAIDKSLRAEGERSAREVKLLLLGAGESGKSTIVKQMKIIHEKGYTQEECLQYKPVVYSNIMQSMMAIIRAMGLLKINFGSSEGENDAKTLFEISQNSDECDMTPELSALYMRLWSDPGVMSCVARSREYQLNDSAQYYLHALERISQPYYIPNVQDVLRTRVKTTGIVETHFTFKELRFKMFDVGGQRSERKKWIHCFEGVTAIIFIVAMSEYDLMLAEDQEMNRMMESMKLFDSICNNKWFLDTSIMLFLNKKDLFEDKIKNSPLTTCFPEYEGGNTYEESAAYIQLQFENLNKRKEEKEIYTHFTCATDTNNVQFVFDVVTDVIIKNNLKDCGLF

SEQ ID NO: 7890 - protein, 353 aa, Octopus vulgaris
MACCLSEEAKEQKRINQEIERQLRRDKRDARRELKLLLLGTGESGKSTFIKQMRIIHGAGYSEEDRKGFEKIVYQNIFSAIQTLIAAMETLSLEYKTSGNNENAEFIDSIDADSADTFDQSHVDAIKSLWTDEGMQECYDRRREYQLTDSAKYYLDDTERLHEPGHSPTLQDILRVRVPTTGIIEYPPDLDSTILRMADVGGQRSERRKWIHCFENVTSIMFLVALSEYDQVLVESDNENRMEESKALFRTIITYPWFQNSSVILFLNKKDLLEEKIMTSHLADYFPDYDGPKKDAQAAREFILRMFVDLNPDPDKIIYSHFTCATDTENIRFVFAAVKDTILQLNLKEYNLV

SEQ ID NO: 7891 - protein, 377 aa, Octopus vulgaris
MGCFRRTREDEDDKLRKEQNKKIEKQLQKDKQVYRSTHRLLLLGAGESGKSTIVKQMRILHVDGGFGPEERKLKIEDIKRNIRDAILTITGAMSTLNPPVELDDSSLMHHVNYIQEIASQQDFDYPAEFYEHTEILWRDKGVQTCYERSNEYQLIDCAQYFLDRVHIVKSADYTPTEQDILRCRVLTSGIFETRFIVDKVNFHMFDVGGQRDERRKWIQCFNDVTAIIFVTACSSYNLVLREDNTQNRLKESLELFQSIWNNRWLRSISVILFLNKQDLLAEKVKAGKSKIETYFADFERYVTPVDAHTEPGDDPEVVRAKYFIRDEFLRISTATRDGRHYCYPHFTCAVDTENIRRVFNDCRDIIQRMHLRQYELL

SEQ ID NO: 7892 - protein, 355 aa, Homarus americanus
MGCAMSNAADKEAAERSKKIDKDLRLAGERAAREVKLLLLGAGESGKSTIVKQMKIIHETGYSREECEQYRPVVYSNTIQSLMAIIRAMGQLKIDFRDSSRADDARHFFTLASAADEGELTPELANIMKRLWNESGVQHCRNRSREYQLNDTAAYYLNALDRIARPGYIPTQQDVLRTRVKTTGIVETNFSFKNLNFKLFDVGGQRSERKKWIHCFEGVTAIIFVVALSGYDLVLAEDEEMNRMIESMKLFDSICNNKWFVETSIILFLNKKDLFEQKITKSPLTICFPEYQGSNVYEDSANYIRMKFENLNKRKDQKEIYTHFTCATDTNNIQFVFDAVTDVIIKNNLKDCGLF

SEQ ID NO: 7893 - protein, 339 aa, Homarus americanus
MGCAMSNAADKEAAERSKKIDKDLRLAGERAAREVKLLLLGAGESGKSTIVKQMKIIHETGYSREECEQYRPVVYSNTIQSLMAIIRAMGQLKIDFRDSSRADDARHFFTLASAADEGELTPELANIMKRLWNESGVQHCFNRSREYQLNDTAAYYLNALDRIARPGYIPTQQDVLRTRVKTTGIVETNFSFKNLNFKLFDVGGQRSERKKWIHCFEGVTAIIFVVALSGYDLVLAEDEEMNRMIESMKLFDSICNNKWFVETSIILFLNKKDLFEQKITKSPLTICFPEYQGSNVYEDSANYIRMKFTCATDTNNIQFVFDAVTDVIIKNNLKDCGLF

SEQ ID NO: 7894 - protein, 353 aa, Homarus americanus
MACCLSEEAKEQKRINQEIERQLRKDKRDARRELKLLLLGTGESGKSTFIKQMRIIHGAGYSDEDKRGFIKLVFQNIFMAMQSMIRAMDLLQISYGDSANIEHADLVRSVDYESVTTFEEPYVTAMNSLWQDTGIQHCYDRRREYQLTDSAKYYLTDLDRIAAKDYVSTLQDILRVRAPTTGIIEYPFDLEEIRFRMVDVGGQRSERRKWIHCFENVTSIIFLVALSEYDQILFESDNENRMEESKALFKTIITYPWFQHSSVILFLNKKDLLEEKIMYSHLVDYFPEYDGPRKDAIAAREFILRMFVELNPDPEKIIYSHFTCATDTENIRFVFAAVKDTILQLNLKEYNLV

SEQ ID NO: 7895 - protein, 379 aa, Homarus americanus
MGCFGSAGAKGDAEENKKRKEANKNINKQIQKDKQVYRATHRLLLLGAGESGKSTIVKQMRILHVDGFSEEEKREKIHAIRCNIRDAILTITGNMSTLTPPIALENPAHQFRVDYIQDVASQKDFDYPEEFYEHTEMLWKDKGVQACYERANEYQLIDCAKYFLDRVHIVRQTDYTPTEQDILRCRVLTLGIFETRFQVDKVNFHMFDVGGQRDERRKWIQCFNDVTAIIFVTACSSYNMVLREDPSQNRLRESLDLFKSIWNNRWLRTISVILFLNKQDLLAEKIRAGKSKLEDYFPDFARYQTPLDATVEPGEDPEVVRAKYFIRDEFLRISTASGDGKHYCYPHFTCAVDTENIRRVFNDCRDIIQRMHLRQYELL

SEQ ID NO: 7896 - protein, 353 aa, Panulirus argus
MACCLSEEAKEQKRINQEIERQLRKDKRDARRELKLLLLGTGESGKSTFIKQMRIIHGAGYSDEDKRGFIKLVFQNIFMAMQSMIRAMDLLQISYGDSANIEHADLVRGVDYESVTTFEEPYVTAMKSLWQDTGIQHCYDRRREYQLTDSAKYYLTDLDRIAATDYVSTLQDILRVRAPTTGIIEYPFDLEEIRFRMVDVGGQRSERRKWIHCFENVTSIIFLVALSEYDQILFESDNENRMEESKALFKTIITYPWFQHSSVILFLNKKDLLEEKIMYSHLVDYFPEYDGPRKDAIAAREFILRMFVELNPDPEKIIYSHFTCATDTENIRFVFAAVKDTILQLNLKEYNLV

SEQ ID NO: 7897 - protein, 353 aa, Limulus polyphemus
MACCLSEEGKEQKRINQEIERQLRKDKRDARRELKLLLLGTGESGKSTFIKQMRIIHGQGYSDDDKKSYIKLVYQNIIMAMQSMNKAMEMLKISYKDRNNIENAELVLSVDYETVTTFDSPYVEAIKSLWVDPGIQECYDRRREYQLTDSAKYYLNDIDRIAVPNYLPTQQDILRVRVPTTGIIEYPFILDSIIFRMVDVGGQRSERRKWIHCFENVTSIIFLVALSEYDQILFESDNENRMEESKALFKTIITYPWFLNSSVILFLNKKDLLEEKIMFSHLVDYFPEYDGPKKDAVQGREFILKMFVDLNPDSEKIIYSHFTCATDTENIRFVFAAVKDTILQLNLKEYNLV

SEQ ID NO: 7898 - protein, 354 aa, Locusta migratoria
MGCAMSAEERAALARSKQIEKNLKEDGLQAAKDIKLLLLGAGESGKSTIVKQMKIIHESGFTAEDFKQYRPVVYSNTIQSLVAILRAMPNLGISFCNNERETDAKMVFDVIQRMEDTEPFSEELLAAMKRLWADSGVQECFGRSNEYQLNDSAKYFLDDLDRLGAKDYQPTEQDILRTRVKTTGIVEVHFSFKNLNFKLFDVGGQRSERKKWIHCFEDVTAIIFCVAMSEYDQVLHEDETTNRMQESLKLFDSICNNKWFTDTSIILFLNKKDLFEEKIKKSPLTICFPEYAGAQEYGEAAAYIQAQFEAKNKSTTKEIYCHMTCATDTNNIQFVFDAVTDVIIANNLRGCGLY

SEQ ID NO: 7899 - protein, 355 aa, Manduca sexta
MGCASSAEERAAPSAQQADREKLKEDGIQAAKDIKLLLLGAGESGKSTIVKQMKIIHESGFTNEDFKQYRPVVYSNTIQSLVAILRAMPTLGITYANKDRESDGKMVFDVIQRMEDTEPFSEELLAAMKRLWADAGVQECFGRSNEYQLNDSAKYFLDDLDRLGARDYQPTEEDILRTRVKTTGIVEVHFSFKNLNFKLFDVGRGQRSERKKWIHCFEDVTAIIFCVAMSEYDQVLHEDETTNRMQESLKLFDSICNNKWFTDTSIILFLNKKDLFEEKIRKSPLTICFPEYTRAYQEYGEAAAYIRSQFEAKNNSTTKEIYCHMTATDTNNNQFVFDAVTDVIIANNLRGCGLY

SEQ ID NO: 7900 - protein, 354 aa, Drosophila melanogaster
MGCAQSAEERAAAARSRLIERNLKEDGIQAAKDIKLLLLGAGESGKSTIVKQMKIIHESGFTAEDFKQYRPVVYSNTIQSLVAILRAIPTLSIQYSNNERESDAKMVFDVCQRMHDTEPFSEELLAAMKRLWQDAGVQECFSRSNEYQLNDSAKYFLDDLDRLGAKDYQPTEQDILRTRVKTTGIVEVHFSFKNLNFKLFDVGGQRSERKKWIHCFEDVTAIIFCVAMSEYDQVLHEDETTNRMQESLKLFDSICNNKWFTDTSIILFLNKKDLFEEKIRKSPLTICFPEYTGGQEYGEAAAYIQAQFEAKNKSTSKEIYCHMTCATDTNNIQFVFDAVTDVIIANNLRGCGLY

SEQ ID NO: 7901 - protein, 354 aa, Drosophila melanogaster
MGCAQSAEERAAAARSRLIERNLKEDGIQAAKDIKLLLLGAGESGKSTIVKQMKIIHESGFTAEDFKQYRPVVYSNTIQSLVAILRAMPTLSIQYSNNERESDAKMVFDVCQRMHDTEPFSEELLAAMKRLWQDAGVQECFSRSNEYQLNDSAKYFLDDLDRLGAKDYQPTEQDILRTRVKTTGIVEVHFSFKNLNFKLFDVGGQRSERKKWIHCFEDVTAIIFCVAMSEYDQVLHEDETTNRMQESLKLFDSICNNKWFTDTSIILFLNKKDLFEEKIRKSPLTICFPEYTGGQEYGEAAAYIQAQFEAKNKSTSKEIYCHMTCATDTNNIQFVFDAVTDVIIANNLRGCGLY

SEQ ID NO: 7902 - protein, 355 aa, Drosophila melanogaster
MGCAVSTARDKEAIERSKNIDRALRAEGERAASEVKLLLLGAGESGKSTIVKQMKIIHDTGYSQEECEEYRRVVFSNTVQSLMVIIRAMGRLKIEFADPSRTDIARQFFTHASAADEGILLPEIVLLMKKLWADGGVQQTFARSREYQLNDSAGYYLNSLDRIAQPNYIPTQQDVLRTRVKTTGIIETHFSCKQLHFKLFDVGGQRSERKKWIHCFEGVTAIIFCVALSGYDLVLAEDEEMNRMIESLKLFDSICNSKWFVETSIILFLNKKDLFEEKIKRSPLTICFPEYTGTNTFEEAANYIRMKFENLNKRKDQKEIYTHLTCATDTNNVKFVFDAVTDVIIKNNLKQIGLF

SEQ ID NO: 7903 - protein, 354 aa, Drosophila melanogaster
MGCTTSAEERAAIQRSKQIEKNLKEDGIQAAKDIKLLLLGAGESGKSTIVKQMKIIHESGFTAEDFKQYRPVVYSNTIQSLVAILRAMPTLSIQYSNNERESDAKMVFDVCQRMHDTEPFSEELLAAMKRLWQDAGVQECFSRSNEYQLNDSAKYFLDDLDRLGAKDYQPTEQDILRTRVKTTGIVEVHFSFKNLNFKLFDVGGQRSERKKWIHCFEDVTAIIFCVAMSEYDQVLHEDETTNRMQESLKLFDSICNNKWFTDTSIILFLNKKDLFEEKIRKSPLTICFPEYTGGQEYGEAAAYIQAQFEAKNKSTSKEIYCHMTCATDTNNIQFVFDAVTDVIIANNLRGCGLY

SEQ ID NO: 7904 - protein, 355 aa, Drosophila melanogaster
MGCAVSTARDKEAIERSKNIDRALRAEGERAASEVKLLLLGAGESGKSTIVKQMKIIHDTGYSQEECEEYRRVVFSNTVQSLMVIIRAMGRLKIEFADPSRTDIARQFFTHASAADEGILLPEIVLLMKKLWADGGVQQSFARSREYQLNDSAGYYLNSLDRIAQPNYIPTQQDVLRTRVKTTGIIETHFSCKQLHFKLFDVGGQRSERKKWIHCFEGVTAIIFCVALSGYDLVLAEDEEMNRMIESLKLFDSICNSKWFVETSIILFLNKKDLFEEKIKRSPLTICFPEYTGTNTFEEAANYIRMKFENLNKRKDQKEIYTHLTCATDTNNVKFVFDAVTDVIIKNNLKQIGLF

SEQ ID NO: 7905 - protein, 360 aa, Drosophila melanogaster
MECCLSEEAKEQKRINQEIEKQLRRDKRDARRELKLLLLGTGESGKSTFIKQMRIIHGSGYSDEDKRGYIKLVFQNIFMAMQSMIKAMDMLKISYGQGEHSELADLVMSIDYETVTTFEDPYLNAIKTLWDDAGIQECYDRRREYQLTDSAKYYLSDLARIEQADYLPTEQDILRARVPTTGILEYPFDLDGIVFRMVDVGGQRSERRKWIHCFENVTSIIFLVALSEYDQILFESDNENRMEESKALFRTIITYPWFQNSSVILFLNKKDLLEEKIDLLEEKIMYSHLVDYFPEYDGPKQDHAAAKQFVLKKYLACNPDPERQCYSHFTTATDTENIKLVFCAVKDTIMQNALKEFNLG

SEQ ID NO: 7906 - protein, 353 aa, Drosophila melanogaster
MECCLSEEAKEQKRINQEIEKQLRRDKRDARRELKLLLLGTGESGKSTFIKQMRIIHGSGYSDEDKRGYIKLVFQNIFMAMQSMIKAMDMLKISYGQGEHSELADLVMSIDYETVTTFEDPYLNAIKTLWDDAGIQECYDRRREYQLTDSAKYYLSDLARIEQADYLPTEQDILRARVPTTGILEYPFDLDGIVFRMVDVGGQRSERRKWIHCFENVTSIIFLVALSEYDQILFESDNENRMEESKALFRTIITYPWFQNSSVILFLNKKDLLEEKIMYSHLVDYFPEYDGPKQDHAAAKQFVLKKYLACNPDPERQCYSHFTTATDTENIKLVFCAVKDTIMQNALKEFNLG

SEQ ID NO: 7907 - protein, 302 aa, Drosophila melanogaster
MKIIHESGFTAEDFKQYRPVVYSNTIQSLVAILRAMPTLSIQYSNNERESDAKMVFDVCQRMHDTEPFSEELLAAMKRLWQDAGVQECFSRSNEYQLNDSAKYFLDDLDRLGAKDYQPTEQDILRTRVKTTGIVEVHFSFKNLNFKLFDVGGQRSERKKWIHCFEDVTAIIFCVAMSEYDQVLHEDETTNRMQESLKLFDSICNNKWFTDTSIILFLNKKDLFEEKIRKSPLTICFPEYTGGQEYGEAAAYIQAQFEAKNKSTSKEIYCHMTCATDTNNIQFVFDAVTDVIIANNLRGCGLY

SEQ ID NO: 7908 - protein, 353 aa, Drosophila melanogaster
MECCLSEEAKEQKRINQEIEKQLRRDKRDARRELKLLLLGTGESGKSTFIKQMRIIHGSGYSDEDKRGYIKLVFQNIFMAMQSMIKAMDMLKISYGQGEHSELADLVMSIDYETVTTFEDPYLNAIKTLWDDAGIQECYDRRREYQLTDSAKYYLKDLDRVAQPAYLPTEQDILRVRVPTTGIIEYPFDLEEIRFRMVDVGGQRSERRKWIHCFENVTSIIFLVALSEYDQILFESDNENRMEESKALFRTIITYPWFQNSSVILFLNKKDLLEEKIMYSHLVDYFPEYDGPQRDAITAREFILRMFVDLNPDSEKIIYSHFTCATDTENIRFVFAAVKDTILQSNLKEYNLV

SEQ ID NO: 7909 - protein, 353 aa, Drosophila melanogaster
MDCCLSDQACEERRISREIDKFLKAEKKKARRELKLLVLGTGESGKTTFIKQMRIIHGKGFLDKERKQFTKNVFQNIFMAIQSMISAMDTLRIPYGQQEHSKLADLVKSIDYKTVTRLEAPYLNAIKTLWKDAGIKECYNRRREYQLTDSTEYFLNDIARIERSDYQATDQDILHVRAPTTNIVEYPFNLDGFLIRLVDVAGQRTERRKWIHCFSNVTSIMFLVAMSEFDLSLAESENDNRMKESKALFHNIISFSWFQHSSVILFLNKEDLFKKKILSTHLADYFPEYNGPKKDAKAAREFILYMFTSVNPDPYKCIYPHFTVATNTENIKFVFTAVKDTILELHLSETNLL

SEQ ID NO: 7910 - protein, 399 aa, Drosophila melanogaster
MKLRLLRCLRQQPAKPAAVMTHKEDQYPVSLDHHVLKDMAKGVRDTTVKILLLGTAESGKTTIIKQMRILHINGFTDDERREKIPEIYQNIHESILQLVGQMGVLGIDFGSCTSERSADYILSLPGSAPEYMNEEYCDHVTTLWNDVGIRACYDRSNEFPLLDSAKYFLDNFVRISDAEYIPSTEDILHSRKITTGISQITFRVPIPKSMGGGEQQFQMYDVGGQRDQRNKWIQVFEGIQAVLFLISCSEFDQNLREDPSQNRLQEALKLFRAVWQNRFLASAGLIVFLNKYDIMERKIRAGKHIVDYFPEYEDFCKRPQQDNCFGESDWTKMFIKQKLVDITQEPFKRHSRNQVDLGTSERECYYHFTVATDTRCIRDVFCDVQKMILSENVSSMGLF

SEQ ID NO: 7911 - protein, 385 aa, Drosophila melanogaster
MGCFGSPTSKQSDVNSEDSKSQKRRSDAISRQLQKDKQLYRATHRLLLLGAGESGKSTIVKQMRILHVDGFSDSEKKQKIDDIKKNIRDAILTITGAMSTLNPPVALEKKENEPRVEYIQDYASSPDFNYPPEFYEHTEELWKDKGVLQTYERSNEYQLIDCAKYFLDRVSTIKNPNYTPNEQDILRCRVLTSGIFETRFQVDKVNFHMFDVGGQRDERRKWIQCFNDVTAIIFVTACSSYNMVLREDPTQNRLRESLDLFKSIWNNRWLRTISIILFLNKQDLLAEKIKAGKSKLSEYFSEFNKYQTPIDTGDAIMESNDDPEVIRAKYFIRDEFLRISTASGDGKHYCYPHFTCAVDTENIKRVFNDCRDIIQRMHLRQYELL

SEQ ID NO: 7912 - protein, 382 aa, Drosophila melanogaster
MGCFGSPTSKQSDVNSEDSKSQKRRSDAISRQLQKDKQLYRATHRLLLLGAGESGKSTIVKQMRILHVDGFSDSEKKQKIDDIKKNIRDAILTITGAMSTLNPPVALEKKENEPRVEYIQDYASSPDFNYPPEFYEHTEELWKDKGVLQTYERSNEYQLIDCAKYFLDRVSTIKNPNYTPNEQDILRCRVLTSGIFETRFQVDKVNFHMFDVGGQRDERRKWIQCFNDVTAIIFVTACSSYNMVLREDPTQNRLRESLDLFKSIWNNRWLRTISIILFLNKQDLLAEKIKAGKSKLSEYFSEFNKYQTPSDAIMESNDDPEVIRAKYFIRDEFLRISTASGDGKHYCYPHFTCAVDTENIKRVFNDCRDIIQRMHLRQYELL

SEQ ID NO: 7913 - protein, 457 aa, Drosophila melanogaster
MSGITLTKLTQERISIPNNNVITNGVENNIDSDTLSGTLTHLMEEHRTRVGAVTGPEAATTSTDGLISNGAERLRLQGSRLQTSRFACFRCCGNIITYLVRLRSTPEELEQRYKSKEIDKFLEKEKHTFRRQVKLLLLGAGESGKSTFLKQMRIIHGVNFDYELLLEYQSVIYQNVIRGMQVLLDAREKLNIAWGSDGREQDAYDAKLMECNSLDVPKFMEYAPPISRLWQDRGIRRAFERRREFQISDSVSYFLDEIQRLATPDYVPTHKDILHCRKATKGVYEFCVKVQNIPFVFVDVGGQRTQRQKWTRCFDSSVTSIIFLVSSSEFDQVLAEDRKTNRLEESKNIFDTIVNNATFKGISIILFLNKTDLLEQKVCNPETDIRWYYPHFNGNPHSVLDVQNFILQMFMSVRRSSSISRIYHHFTTAIDTRNINVVFNSVKDTILQRNLNALMLQ

SEQ ID NO: 7914 - protein, 340 aa, Drosophila melanogaster
MRKLTNSCALRKKDLNGNSNYCYWVRGVGCIGMYQGYNVRISTGACESGKSTFIKQMRIIHGSGYSDEDKRGYIKLVFQNIFMAMQSMIKAMDMLKISYGQGEHSELADLVMSIDYETVTTFEDPYLNAIKTLWHDAGIQECYDRRREYQLTDSTEYFLGDIGRIEQADYLPTNQDILRAREPTFNITVYPFELDGYVLSMVDVAGQRTERRKWIHFFSNVTSIIFLAALSEYDQFMMESENDNRLEESKALFHTIITFEWFKNASIILFLNKMDVLEEKIMYSHLVDYFPEYDGPKQDAYAAREYVLRMFQSISLDTYKKIYSHFTCATGKCIVLIYLA

SEQ ID NO: 7915 - protein, 321 aa, Drosophila melanogaster
MRKLTNSCALRKKDLNGNSNYCYWVRGVGCIGMYQGYNVRISTGACESGKSTFIKQMRIIHGSGYSDEDKRGYIKLVFQNIFMAMQSMIKAMDMLKISYGQGEHSELADLVMSIDYETVTTFEDPYLNAIKTLWHDAGIQECYDRRREYQLTDSTEYFLGDIGRIEQADYLPTNQDILRAREPTFNITVYPFELDGYVLSMVDVAGQRTERRKWIHFFSNVTSIIFLAALSEYDQFMMESENDNRLEESKALFHTIITFEWFKNASIILFLNKMDVLEEKIMYSHLVDYFPEYDDTENIKFVFAAVKDTILQCNLKESNLF

SEQ ID NO: 7916 - protein, 199 aa, Drosophila melanogaster
FLDDLDRLGAKDYQPTEQDILRTRVKTTGIVEVHFSFKNLNFKLFDVGGQRSERKKWIHCFEDVTAIIFCVAMSEYDQVLHEDETTNRMQESLKLFDSICNNKWFTDTSIILFLNKKDLFEEKIRKSPLTICFPEYTGGQEYGEAAAYIQAQFEAKNKSTSKEIYCHMTCATDTNNIQFVFDAVTDVIIANNLRGCGLY

SEQ ID NO: 7917 - protein, 333 aa, Drosophila melanogaster
MDCCLSDQACEERRISREIDKFLKAEKKKARRELKLLVLGFLDKERKQFTKNVFQNIFMAIQSMISAMDTLRIPYGQQEHSKLADLVKSIDYKTVTRLEAPYLNAIKTLWKDAGIKECYNRRREYQLTDSTEYFLNDIARIERSDYQATDQDILHVRAPTTNIVEYPFNLDGFLIRLVDVAGQRTERRKWIHCFSNVTSIMFLVAMSEFDLSLAESENDNRMKESKALFHNIISFSWFQHSSVILFLNKEDLFKKKILSTHLADYFPEYNGPKKDAKAAREFILYMFTSVNPDPYKCIYPHFTVATNTENIKFVFTAVKDTILELHLSETNLL

SEQ ID NO: 7918 - protein, 305 aa, Drosophila melanogaster
MSGITLTKLTQERISIPNNNVITNGVENNIDSDTLSGTLTHLMEEHRTRVGAVTGPEAATTSTDGLISNGAERLRLQGSRLQTSRFACFRCCGNIITYLVRLRSTPEELEQRYKSKEIDKFLEKEKHTFRRQVRVKLLLLGAGESGKSTFLKQMRIIHGVNFDYELLLEYQSVIYQNVIIGMQVLLDAREKLNIAWGSDGREQDAYDAKLMECNSLDVPKFMEYAPPISRLWQDRGIRRAFERRREFQISDSVSYFLDEIQRLATPDYVPTHKDILHCRKATKGVYEFCVKVQKNQSSRRVKEYI

SEQ ID NO: 7919 - protein, 156 aa, Drosophila sp.
FQNIFMAMQSMIKAMDMLKISYGQGEHSELADLVMSIDYETVTTFEDPYLNAIKTLWDDAGIQECYDRRREYQLTDSAKYYLSDLARIEQADYLPTEQDILRARVPTTGILEYPFDLDGIVFRMVDVGGQRSERRKWIHCFENVTSIIFLVALSEY

SEQ ID NO: 7920 - protein, 353 aa, Calliphora vicina
MECCLSEEAKEQKRINQEIERQLRRDKRDARRELKLLLLGTGESGKSTFIKQMRIIHGSGYSDDDKRGYIKLVFQNIFMAMQSMIKAMDMLRISYGARDHAELAELVMSIDYETVTSFEDPYLSAIKTLWADTGIQECYDRRREYQLTDSAKYYLSDLERIEQADYLPSEQDILRARVPTTGILEYPFDLDGIVFRMVDVGGQRSERRKWIHCFENVTSIIFLVALSEYDQILFESDNENRMEESKALFRTIITYPWFQNSSVILFLNKKDLLEEKIMYSHLVDYFPEYDGPKCDHAAAKQFVLKKYLAANPDPERQCYSHFTTATDTENIKLVFCAVKDTIMQNALKEFNLG

SEQ ID NO: 7921 - protein, 354 aa, Asterina pectinifera
MGCATSAEDKAAAERSKAIDRNLRIDGEKAAREVKLLLLGAGESGKSTIVKQMKIIHEEGYSEEDCKQYKPVVYSNTIQSMIAIIRAMGSLKVDFGDGDRTDDARQLFALAGQAEEGELSPELAAVMKRLWADGGVQGCFSRSREYQLNDSASYYLNALDRLAAPGYIPTQQDVLRTRVKTTGIVETHFTFKDLHFKMFDVGGQRSERKKWIHCFEGVTAIIFCVALSAYDLVLAEDEEMNRMHESMKLFDSICNNKWFTETSIILFLNKKDLFEEKITKSPLTICFPEYTGSNTYEEAAAYIQMQFEDLNKRKDQKEIYTHFTCATDTNNIQFVFDAVTDVIIKNNLKDCGLF

SEQ ID NO: 7922 - protein, 353 aa, Rosellinia necatrix
MGCGMSTEEKEGKARNEEIENQLKRDKMMQRNEIKMLLLGAGESGKSTILKQMKLIHEGGYSRDERESFKEIIFSNTVQSMRVILEAMESLELPLEEPRMEYHVQTIFMQPAQIEGDVLPPEVGGAIEALWKDHGVQECFKRSREYQLNDSARYYFDNIVRIATPDYMPNDQDVLRSRVKTTGITETTFIIGDLTYRMFDVGGQRSERKKWIHCFENVTTILFLVAISEYDQLLFEDETVNRMQEALTLFDSICNSRWFIKTSIILFLNKIDRFKEKLPVSPMKNYFPDYEGGDDYAAACDYILNRFVSLNQHETKQIYTHFTCATDTTQIRFVMAAVNDIIIQENLRLCGLI

SEQ ID NO: 7923 - protein, 356 aa, Rosellinia necatrix
MMGACMSSNKEDEEQKKRSQAIDRALDEDSKRLRRECKILLLGSGESGKSTIVKQMKIIHLKGYSEEELYNYRATVFKNLIECAKAVIIAMDQFEIEPSSEGTTDYCDYLRNYTVESGPSARIEAKVGIAVQALWNDPCIDRLMQHATEFYLMDSAGYFFDEVHRICAPDYLPNEMDVLRARTKTTGIYETKFQMGALNIHMFDVGGQRSERKKWIHCFENVTSIIFCVALSEYDQVLLEESSQNRMMESLLLFDSVVNSRWFMRTSIILFLNKVDIFKAKLPRSPLGNYFPDYSGGNDVNKAAKYLLWRFNQVNRAHLNLYPHLTQATDTSNIRLVFAAVKETILNNALKDSGIL

SEQ ID NO: 7924 - protein, 354 aa, Rosellinia necatrix
MCFGSRKTDEAGDARSRELDKIIKQDEKRMLKEVKLLLLGAGESGKSTVLKQMKLIYAQGFSKTEKLEWKPVVLINVIQSLRLIFDAMEDYNIEFERKENEKNKELVLLDVEIGPNDPLPQDYLQPIKSLWADSGVQKAILKGNEYALHDNIAYFCDDVDRLWDKNYIPTDQDLLRTRLRTTGITETVFDLGQLTYRMFDVGGQRSERKKWIHCFENVHCLLFLVAISGYDQCLVEDKDGNQMNEALMLWESIANSHWFAKSALILFLNKMDLFKEKLVSSPITSYGFTDYRGPADDHKLASKYFMDKFKALNRNPEKEIYGHFTNATDTNLLKITMTSVQDMIIQRNLKQLIL

SEQ ID NO: 7925 - protein, 354 aa, Ciona intestinalis
MGCTVSTDDKAANERSRAIDRNLRVDGDKQSREVKLLLLGAGESGKSTIVKQMKIIHEDGYSEEECLQYKAVVYSNTLQSLITIVRAMGNLKIDFGSSDRADDARQLFSLAGSLEDGEMTQELGDCMKRMWGDKGVQVCFNRSREFQLNDSAQYYLDSLDRLTEPRYVPTQQDVLRTRVKTTGIVEVDFNFKGLTFKMFDVGGQRSERKKWIHCFEGVTAIIFCVALSAYDLVLAEDEEMNRMHESMKLFDSICNNKWFTETSIILFLNKKDLFEVKILKSPLSICFPEYPGQNTYAEAAAYIQLQFEDLNKRKDSKEIYTHFTCATDTTNIQFVFDAVTDVIIKNNLKDCGLF

SEQ ID NO: 7926 - protein, 354 aa, Ciona intestinalis
MGCTVSTDDKAANERSRAIDRNLRVDGDKQSREVKLLLLGAGESGKSTIVKQMKIIHEDGYSEEECLQYKAVVYSNTLQSLITIVRAMGNLKIDFGSSDRADDARQLFSLAGSLEDGEMTQELGDCMKRMWGDKGVQVCFNRSREFQLNDSAQYYLDSLDRLVASDYVPTEQDVLRSRVKTTGIVETQFEHKDLHFKMFDVGGQRSERKKWIHCFEGVTAIIFCVALSAYDLVLAEDEEMNRMHESMKLFDSICNNKWFTETSIILFLNKKDLFEVKILKSPLSICFPEYPGQNTYAEAAAYIQLQFEDLNKRKDSKEIYTHFTCATDTTNIQFVFDAVTDVIIKNNLKDCGLF

SEQ ID NO: 7927 - protein, 103 aa, Ciona intestinalis
GDCMKRMWGDKGVQVCFNRSREFQLNDSAQYYLDSLDRLTEPRYVPTQQDVLRTRVKTTGIVEVDFNFKGLTFKMFDVGGQRSERKKWIHCFEGVTAIIFCVA

SEQ ID NO: 7928 - protein, 165 aa, Ciona intestinalis
KQMRIIHESGYSEDECIQYKPVVYSNTIQSMLAIIRAMGTLSIEFANPERQDDARQLFSLAGSVEDGSFTPELISIMKRLWQDDTLQQCFQRAREYQLNDSAGYYLFALERIGAPDYVPTQQDVLRTRVKTTGIVETHFVFKDLHFKMFDVGGQRSERKKWIHCF

SEQ ID NO: 7929 - protein, 103 aa, Ciona intestinalis
GDCMKRMWGDKGVQVCFNRSREFQLNDSAQYYLDSLDRLVASDYVPTEQDVLRSRVKTTGIVETQFEHKDLHFKMFDVGGQRSERKKWIHCFEGVTAIIFCVA

SEQ ID NO: 7930 - protein, 164 aa, Ciona intestinalis
KQMRIIHGTGYSHEELAGHIPLIYQNINFSIKTLATAMLELGIPYELEANKDFGEVSIELPRECENSLDTTRVLGIMLFWKDEGVQQCYLRRNEFHLLDSAAYYLNNLTRISSASYLPTLQDVLRSRRPTLGITEYLFKIDKFMFGIVDVGGQKSERRKWIHCF

SEQ ID NO: 7931 - protein, 165 aa, Ciona intestinalis
KQMKIIHGAGYSDEDKRSFIKLVYQNIVTSIQNMSAAMQTLNLEYEIEENNEHAEEIREVQVDKISSYDDFITNISYIECLWKDTGIQKCYDRRREYQLSDSTYYYLSDLDRIKKPDFLPTQQDILRVRIPTTGIIEYPFDLDQIIFRMVDVGGQRSERRKWIHC

SEQ ID NO: 7932 - protein, 357 aa, Halocynthia roretzi
MGCAPSKSENDKDAVSKSKEIDKQLKKDAENARKEVKLLLLGAGESGKSTIAKQMKILHQDGFSEEERKNFAPVVYTNTIQSMVAIVKAMESLGIDYEDNEREEDGRKIRAASQTMEEIDITADIGAALKRLWMDKGVQACVARSREYQLNDSATYYLDALDRLCSPDYIPTEQDVLRTRVKTTGIIETTFQYKNLNFTLIDVGGQRSERKKWIHCFQDVTAIIFCVAMSAYDQVLAEDEETNRMIESLKLFQSICNNPFFAKTSMILFLNKKDLFEEKIKKSPLNTCFKEYEGENSYADASEHIKEQFEAANKNNCMKEIYTHFTCATDTGNVRFVFDAVSDVLMRKIIDNVFGSG

SEQ ID NO: 7933 - protein, 354 aa, Halocynthia roretzi
MGCAVSSEDKAAQERSKAIDRNLKMDGEKASREVKLLLLGAGESGKSTIVKQMKIIHEDGYSEDECIQYKAVVYSNTLQSLITIVRAMGNLKIDFGHPDRADDARQLFSLASSLEDGEMTSELGDCMKRLWNDKGVQVCFSRSREYQLNDSAQYYLDALDRLVQQDYIPSEQDVLRSRVKTTGIVETHFEFKDLHFKMFDVGGQRSERKKWIHCFEGVTAIIFCVALSAYDLVLAEDEEMNRMHESMKLFDSICNNKWFTDTSIILFLNKKDLFEQKISKSSLTICFPEYTGANTYEEAAAYIQLKFEDLNKRKDTKEIYTHFTCATDTNNIQFVFDAVTDVIIKNNLKDCGLF

SEQ ID NO: 7934 - protein, 360 aa, Halocynthia roretzi
MLEIMEFCCKSEEQREAKRINAEIERELRRHKRDARRELKLLLLGTGESGKSTFIKQMRIIHGKGYSDNDRREFCKLVHQNILTSMQNMIRAMETLHIQYSDPQNEQNSYDFLELDVERVAEQNGFPEYCTAIEALWTDKGIHDCYDRRREYQLSDSTSYYLNSLDRIRMPDYLPTEQDVLRVRVPTTGISEYPFDLDSIIFRMVDVGGQRSERRKWIHCFENVTSIMFLVALSEYDQVLVESNNENRMEESKALFRTIIMYPWFQNSSVILFLNKKDLLEEKIMYSHLADYFSDYDGPTQDANAAREFILSRFVELNPDADKIVYSHFTCATDTENIRFVFAAVKDTILQCNLREYNLV

SEQ ID NO: 7935 - protein, 382 aa, Halocynthia roretzi
MLMACFCSQPGGSNAEDLNNQKRINREINDILQKDKQEYRSTHRLLLLGAGESGKSTIVKQMRILHVNGFNDEEKKHKILDIKKNIRDAMVSVIGAMKNLTPPVKLQLPDNEPSVDYILSVSVNFKEEEDFNEGFFDKVLNLWIDEGVQQCFQRSNEYQLIDCAKYFLDKVHDIRNSNYSPSNQDLLRCRVLTRGIFETKFNVDRVKFHMFDVGGQRDERRKWIHCFNEVTAIIFVVASSSYDMVLREDPSQNRLKEALDLFKNIWNNRWLRTISVILFLNKQDLLTEKVLAGRSVLEHYFPDFGPYRIPHDATPDENEEPRVTRAKYFIRDEFLRLSQTGDGRHYCYPHFTCAVDTENIRRVFNDCRDIIQRMHLRQYELL

SEQ ID NO: 7936 - protein, 469 aa, Halocynthia roretzi
MSSLVSCFLGNDRTAAKEISKRIEQQIKDDKKIARTQVKLLVLGTSESGKSTFLKQMRIIHGTGYTADEKRSFIGLICQNVHTSMKILLQSMKNLNIEYDLEENSNIAMALDDGERDESRLPKSLALDFMKLWNDGGIQQCYARRNEFQLSDSTLYFMSNLDQISEEDYIPSLQDILRSRMPTTGIREYQFTIGNFVFGIVDVGGQKSERRKWIHCFENVTSIIFLARLSEYDLTIPLEEVSQDLRASLRHRQQRALQSRGKTVKGGLNYSGSGSAMNNGLAELDLSNGNNPHSTQRKLRTRPSNKKNFVATEFPRTPVIPRMSSKNSPDQNGNTRKHDSSSRQDEAYARSHINRMKESRALFKTIISCEYFINTSVILFLNKKDILAEKIHTSHLVDHFPEFDGPRADAESARAFILTKYADCFERSERQREICTPIHVSTDTRNIRYVFAAVKDIILKNYLVTYNLV

SEQ ID NO: 7937 - protein, 98 aa, Halocynthia roretzi
MGCAPSKSENDKDAVSKSKEIDKQLKKDAENARKEVKLLLLGAGESGKSTIAKQMKILHQDGFSEEERKNFAPVVYTNTIQSMVAIVKAMDRSESTMK

SEQ ID NO: 7938 - protein, 355 aa, Squalus acanthias
MGCTISAEDKAAAERSKMIDKNLREDGEKAAREVKLLLLGAGESGKSTIVKQMKIIHEDGYSEEECRQYKAVVYSNTIQSIMAIIKAMGNLKVDFGESGRADDARQLFALSGTAEEQGILPEDLANVIRRLWADAGVQACFGRSREYQLNDSAAYYLNDLERIARSDYIPTQQDVLRTRVKTTGIVETHFTFKDLHFKMFDVGGQRSERKKWIHCFEGVTAIIFCVALSAYDLVLAEDEEMNRMHESMKLFDSICNNKWFTDTSIILFLNKKDLFEEKITKSPLTICFPEYSGANEYDAAAGYIQTKFEDLNKRKDTKEIYTHFTCATDTKNVQFVFDAVTDVIIKNNLKDCGLF

SEQ ID NO: 7939 - protein, 354 aa, Danio rerio
MGSGASAEDKEMAKKSKELEKQLQEDADKEAKTVKLLLLGAGESGKSTIVKQMKILHQGGYTKEEQMEFRSIIFGNILQSALAIIRGMEMLSINFGSPSAQEDSQKLQNLSDSIEEGTMPPELADVIKRLWKDAGVQASFDRAAEYQLNDSAGYYLNEMDRICKPDYLPTEQDVLRSRVKTTGIIEEQFGCKELHFRMFDVGGQRSERKKWIHCFEGVTCIIFCGALSAYDMVLVEDDEVNRMHESLHLFNSICNHRFFATTSIVLFLNKKDLFQEKIKKVHLSICFPDYDGPNTYEDASNYIKTQFQDLNMKKGVKEIYSHMTCATDTKNVEIVFNAVTDIIIKENLKDCGLF

SEQ ID NO: 7940 - protein, 377 aa, Danio rerio
MIILYFLTLRLLKSFRSLLNFEKMGCTLSSDDKSAQERSKMIDRNLRDDGEKASREVKLLLLGAGESGKSTIVKQMKIIHEAGYSEEECKQYRVVVYSNTIQSIIAIIRAMGRLRIDFADPERADDARQLFVMAGSVDEGFMTSELAGVIKRLWRDEGVRLCFHRSREYQLNDSASYYLNDLDRISNSSYVPTQQDVLRTRVKTTGIVETHFTFKDLHFKMFDVGGQRSERKKWIHCFEGVTSIIFCVSLSDYDLVLAEDEEMNRMHESMKLFDSICNNKWFTDTSIILFLNKKDLFEEKIRMSPLSICFPEYPGSDVYEEAAAYIQCQFEDLNKRKDTKEIYSHFTCATDTKNVQFVFDAVTDVIIKNNLKDCGLF

SEQ ID NO: 7941 - protein, 347 aa, Danio rerio
MGCTVSAEDKAAAERSKMIDKNLREVKLLLLGAGESGKSTIVKQMKIIHEDGYSEDECKQYRAVVYSNTIQSIMAIIKAMSNLKIDYGESARVDDARQLFALSAAAEEQGILTDDLANVIRRLWADSGVQGCFSRSREYQLNDSAAYYLNDLDRIARSDYIPTQQDVLRTRVKTTGIVETHFTFKDLHFKMFDVGGQRSERKKWIHCFEGVTAIIFCVALSAYDLVLAEDEEMNRMHESMKLFDSICNNKWFTETSIILFLNKKDLFEEKITRSPLTICFPEYSGANKYDEAASYIQTKFEDLNKKKDTKEIYTHFTCATDTKNVQFVFDAVTDVIIKNNLKDCGLF

SEQ ID NO: 7942 - protein, 350 aa, Danio rerio
MGAGASAEEKHSRELEKKLKEDADKDARTVKLLLLGAGESGKSTIVKQMKIIHKDGYSLEECLEFIVIIYSNTMQSILAVVRAMTTLNIGYGDAAAQDDARKLMHLADTIEEGTMPKELSDIILRLWKDSGIQACFDRASEYQLNDSAGYYLNDLERLIQPGYVPTEQDVLRSRVKTTGIIETQFSFKDLNFRMFDVGGQRSERKKWIHCFEGVTCIIFIAALSAYDMVLVEDDEVNRMHESLHLFNSICNHRYFATTSIVLFLNKKDVFVEKIKKAHLSMCFPEYDGPNTFEDAGNYIKVQFLDLNLRRDIKEIYSHMTCATDTENVKFVFDAVTDIIIKENLKDCGLF

SEQ ID NO: 7943 - protein, 355 aa, Oryzias latipes
MGCTVSQEDKAAADRSKMIDKNLREDGEKAAREVKLLLLGAGESGKSTIVKQMKIIHEDGYSEDECKQYRAVVYSNTVQSIMAIIKAMTILHLDYERPEREEDAKRLFKMAAEAEERGDLPEELANIIKDLWADSGIQHCLTRAREYQLNDSAAYYLKDLERISKPDYIPTQQDVLRTRVKTTGIVETHFTFKDLHFKMFDVGGQRSERKKWIHCFEGVTAIIFCVAMSAYDLVLAEDEEMNRMHESMKLFDSICNNKWFTETSIILFLNKKDLFEQKIAHSPLTICFPEYEGPNTYQEAQAYIQTKFEDLNKKKETKEIYTHFTCATDTKNVQFVFDAVTDVIIKNNLKDCGLF

SEQ ID NO: 7944 - protein, 354 aa, Oryzias latipes
MGCTLSTDDKAAQERSKMIDRNLRDDGEKAAREVKLLLLGAGESGKSTIVKQMKIIHEAGYSEEECKQYKAVVYSNTIQSIIAIIRAMGRLKIDFADQARADDARQLFILAGSTEEGFMTGELAGVIQRLWKDGGVQACFSRSREYQLNDSAAYYLNDLDRISHASYVPTQQDVLRTRVKTTGIVETHFTFKDLHFKMFDVGGQRSERKKWIHCFEGVTAIIFCVALSDYDLVLAEDEEMNGMHESMKLFDSICNNKWFTDTSIILFLNKKDLFEEKIKKSLLTICFPEYAGSNTYEEAAAYVQCQFEDLNKRKDTKEIYTHFTCATDTKNVQFVFDAVTDVIIKNNLKDCGLF

SEQ ID NO: 7945 - protein, 350 aa, Sparus aurata
MGAGASAEDKKSKELEKQLQEDADKDSKTVKLLLLGAGESGKSTIVKQMKILHQGGYTKEEQLEFRAIIYGNILQSALAIIRGMEMLGIDFGSSTGQEDAQKLQNLSDSIEEGTMPSELADVIKKLWADSGVQASFERAAEFQLNDSAGYYLNEMERICKPEYLPTEQDVLRSRVKTTGIIEEQFSCKELHFRMFDVGGQRSERKKWIHCFEGVTCIIFCGALSAYDMVLVEDDEVNRMHESLHLFNSICNHRFFALTSIVLFLNKKDLFEEKIKKVHLSICFPDYDGPNSYEDASNYIKAQFEELNMKKGVKEIYSHLTCATDTKNVQIVFNAVTDIIIKENLKDCGLF

SEQ ID NO: 7946 - protein, 350 aa, Ambystoma tigrinum
MGAGASAEAKHSRELEKKLKEDAEKDARTVKLLLLGAGESGKSTIVKQMKIIHQDGYTKEECMEFISIINSNTLQSMLAIVRAMNTLNIGYGDPARQDDSRKLMHLADTIDEGQMPKEMSDIIARLWKDSGIQACFDRASEYQLNDSASYYLNDLERLVKPGYVPTEQDVLRSRVKTTGIIETQFGLKDLNFRMFDVGGQRSERKKWIHCFEGVTCIIFIAALSAYDMVLVEDDEVNRMHESLHLFNSICNHRYFAATSIVLFLNKKDVFTEKIKKAHLSICFPDYDGPNTYEDAGNYIKQQFLELNMRRDIKEIYSHMTCATDTENVKFVFDAVTDIIIKENLKDCGLF

SEQ ID NO: 7947 - protein, 354 aa, Ambystoma tigrinum
MGSGASTEDKELAKRSKELEKRLQEDADKDAKTVKLLLLGAGESGKSTIVKQMKIIHQDGYTEQECLEFKSIIYGNILQSILSIIRAMTTLGIDYASNQRAEDGRLLCHLADSIEEGTMPKELVDVIKRLWKDEGVQACFERAAEYQLNDSAPYYLNELDRITTPTYLPNEQDVLRSRVKTTGIIETQFSFKDLHFRMFDVGGQRSERKKWIHCFEGVTCIIFCGALSAYDMVLVEDDEVNRMHESLHLFNSICNHKFFAATSIVLFLNKKDLFEQKIKKVHLSICFPDYDGPNTYDDAANYIKLQFLDLNMRKDIKEIYGHLTCATDTKNVKFVFDAVTDIVIKETLKDCGLF

SEQ ID NO: 7948 - protein, 354 aa, Xenopus laevis
MGCTLSAEDKAAVERSKMIDRNLREDGEKAAREVKLLLLGAGESGKSTIVKQMKIIHEAGYSEEECKQYKAVVYSNTIQSIIAIIRAMGRLKIDFGDPSRADDARQLFVLAGAAEEGFMTAELAGVIKRLWKDGGVQACFNRSREYQLNDSAAYYLNDLDRIAQNSYIPTQQDVLRTRVKTTGIVETHFTFKDLHFKMFDVGGQRSERKKWIHCFEGVTAIIFCVALSDYDLVLAEDEEMNRMHESMKLFDSICNNKWFTDTSIILFLNKKDLFEEKIKRSPLTICYPEYPGSNTYEEAAAYIQCQFEDLNKRKDTKEIYTHFTCATDTKNVQFVFDAVTDVIIKNNLKDCGLF

SEQ ID NO: 7949 - protein, 350 aa, Xenopus laevis
MGAGASAEEKHSRELEKKLKEDADKDARTVKLLLLGAGESGKSTIVKQMKIIHQDGYSVEECLEFIAIIYGNTLQSMIAIVKAMNTLNIQFGDPARQDDARKLMHLADTIDEGSMPKEMSDIIGRLWKDTGIQACFDRASEYQLNDSAGYYLNDLDRLVIPGYVPTEQDVLRSRVKTTGIIETQFGLKDLNFRMFDVGGQRSERKKWIHCFEGVTCIIFIAALSAYDMVLVEDDEVNRMHESLHLFNSICNHRYFATTSIVLFLNKKDVFTEKIKKAHLSICFPDYDGPNTYEDAGNYIKTQFLELNMRRDVKEIYSHMTCATDTENVKFVFDAVTDIIIKENLKDCGLF

SEQ ID NO: 7950 - protein, 354 aa, Xenopus laevis
MGCTLSAEDKEAAERSKMIDRNLREDGEKASKEVKLLLLGAGESGKSTIVKQMKIIHEDGYSEEECRQYKVVVYSNTIQSIIAIIRAMGRLRIDFGDVARADDARQLFVLASSAEEGVMSPELAGVIQRLWEDSGVQACFSRSREYQLNDSASYYLNDIERIAQGSYIPTQQDVLRTRVKTTGIVETHFTFKDLYFKMFDVGGQRSERKKWIHCFEGVTAIIFCVALSDYDLLLAEDEEMNRMHESMKLFDSICNNKWFIDTSIILFLNKKDLFEEKISRSPLTICYPEYSGSNTYEEAAAYIQCQFEDLNRRKDTKEIYTHFTCATDTKNVQFVFDAVTDVIIKSNLMECGLY

SEQ ID NO: 7951 - protein, 345 aa, Xenopus laevis
REAAERSKMIDRNLREDGEKASKEVKLLLLGAGESGKSTIVKQMKIIHEDGYSEEECRQYKVVVYSNTIQSIIAIIRAMGRLRIDFGDVARADDARQLFVLASSAEEGVMSPELAGVIQRLWEDSGVQACFSRSREYQLNDSASYYLSDIERIAQGSYIPTQQDVLRTRVKTTGIVETHFTFKDLYFKMFDVGGQRSERKKWIHCFEGVTAIIFCVALSDYDLLLAEDEEMNRMHESMKLFDSICNNKWFIDTSIILFLNKKDLFEEKISRSPLTICYPEYSGSNTYEEAAAYIQCQFEDLNRRKDTKEIYTHFTCATDTKNVQFVFDAVTDVIIKSNLMECGLY

SEQ ID NO: 7952 - protein, 350 aa, Xenopus laevis
MGCTSSAEDKAAAERSKMIDKNLREDGEKAAREVKLLLLGAGESGKSTIVKQMKIIHEDGYSEEECRQYRAVVFSNTIQSIMAIIKAMGNLKIDFGDSARADDARQLFALSCSAEEQGVLPEDLSGVIRRLWADHGVQACFNRSREYQLNDSAAYYLNDLERIARSDYLPTQQDVLRTRVKTTGIVETHFTFKDLHFKMFDVGGQRSERKKWIHCFEGVTAIIFCVALSAYDLVLAEDEEMNRMHESMKLFDSIWNNKWFTETSIILFLNKKDLFEEKITHSPLTICFPEYTGANKYDEAASYIHSKFEDLNKRKDTKEIYTHFTCATDTKNVEFVFDAVTDVIIKNNLK

SEQ ID NO: 7953 - protein, 354 aa, Xenopus laevis
MGCTLSAEERAALERSKQIEKNLKEDGVTAAKDVKLLLLGAGESGKSTIVKQMKIIHEDGFSGEDVKQYKPVVYSNTIQSLAAIVRAMDTLGIEYGDKERRADAKMVCDVVSRMEDTEPYSPELLSAMVRLWADSGIQECFNRSREYQLNDSAKYYLDSLDRIGAPDYQPTEQDILRTRVKTTGIVETHFTFKNLHFRLFDVGGQRSERKKWIHCFEDVTAIIFCVALSGYDQVLHEDETTNRMHESLMLFDSICNNKFFIDTSIILFLNKKDLFAEKIKKSPLSICFPEYTGPNTYEDAAAYIQAQFESKNRSPNKEIYCHMTCATDTNNIQVVFDAVTDIIIANNLRGCGLY

SEQ ID NO: 7954 - protein, 354 aa, Xenopus laevis
MGCTLSAEERAALERSKQIEKNLKEDGVTAAKDVKLLLLGAGESGKSTIVKQMKIIHEDGFSGEDVKQYKPVVYSNTIQSLAAIVRAMDTLGIEYGDKERRADAKMVCDVVSRMEDTEPYSPELLSAMVTLWADSGIQECFNRSREYQLNDSAKYYLDSLDRIGAPDYQPTEQDILRTRVKTTGIVETHFTFKNLHFRLFDVGGHRSERKKWIHCFEDVTAIIFCVALCGYDQVLHEDETTNRMHESLMLFDSICNNKFFIDTSIILFLNKKDLFAEKIKKSPLSICFPEYTGSNTYEDAAAYIQAQFESKNRSPNKEIYCHMTCATDTNNIQVVFDAVTDIIIATTLRGCGLY

SEQ ID NO: 7955 - protein, 354 aa, Xenopus laevis
MGCTLSAEERAALERSKQIEKNLKEDGVTAAKDVKLLLLGAGESGKSTIVKQMKIIHEDGFSGEDVKQYKPVVYSNTIQSLAAIVRAMDTLGIEYGDKERRADAKMVCDVVSRMEDTEPYSPELLSAMVRLWADSGIQECFNRSREYQLNDSAKYYLDSLDRIGAPDYQPTEQDILRTRVKTTGIVETHFTFKNLHFRLFDVGGQRSERKKWWHCFEDVTAIIFCVALTGYDQVLHEDETTNRMHESLKLFDSICNNKWFTDTSIILFLNKKDIFQEKIKSSPLTICFPEYTGPNSFTEAVAHTQHQYESRNKSENKEIYTHITCATDTQNIQFVFDAVTDVIIAYNLRGCGLY

SEQ ID NO: 7956 - protein, 354 aa, Xenopus laevis
MGCTLSAEERAAVERSKQIEKNLKEDGVTAAKDVKLLLLGAGESGKSTIVKEMKIIHEDGFSGEDVKQYKPVVYSNTIQSLRAIVRAMDTLGIEYGDKERRADAKMVCDVVSRMEDTEPYSPEVVSAMVRLWADSGIQECFNRSREYQLNDSAKYYLDSLDRIGAPDYQPTEQDILRTRVKTTGIVETHFTFKNLHSRLFDVGGQRSERKKWWHCFEDVTAIIFCVALTGYDQVLHEDETTNRMHESLKLFDSICNNKWFTDTSIILFLNKKDIFQEKIKSSPLTICFPEYTGPNSFTEAVAHTQHQYESRNKSENKEIYTHITCATDTQNIQFVFDAVTDVIIAYNLRGCGLY

SEQ ID NO: 7957 - protein, 359 aa, Xenopus laevis
MTLDSMMACCLSEEVKESKRINAEIEKQLRRDKKDSRRELKLLLLGTGESGKSTFIKQMRIIHGSGYSEEDKRGFTKLVFQNIFTAMQSMIRAMETLKILYKFEQNKANAQIVREVDVEKVCTFEQPYVNAVKNLWSDPGIQECYDRRREYQLSDSTKYYLTDVDRISKPGYLPTQQDVLRVRVPTTGIIEYPFDLENIIFRMVDVGGQRSERRKWIHCFENVTSIMFLVALSEYDQVLVESDNENRMEESKALFRTIITYPWFQNSSVILFLNKKDLLEDKIMYSHLVDYFPEFDGPQRDAATAREFILKMFVDLNPDSDKIIYSHFTCATDTENIRFVFAAVKDTILQHNLKEYNLV

SEQ ID NO: 7958 - protein, 359 aa, Xenopus laevis
MTLDSTMACCLSEEVKESKRINAEIEKQLRRDKKDSRRELKLLLLGTGESGKSTFIKQMRIIHGSGYSEEDKKGFTKLVFQNIFTAMQSMIRAMETLKILYKYEQNKANAQVVREVDVEKVCTFEQPYVNAIKNLWSDPGIQECYDRRREYQLSDSTKYYLTDVDRISKPGYLPTQQDVLRVRVPTTGIIEYPFDLENIIFRMVDVGGQRSERRKWIHCFENVTSIMFLVALSEYDQVLVESDNENRMEESKALFRTIITYPWFQNSSVILFLNKKDLLEDKIMYSHLVDYFPEFDGPQRDAATAREFILKMFVDLNPDSDKIIYSHFTCATDTENIRFVFAAVKDTILQHNLKEYNLV

SEQ ID NO: 7959 - protein, 359 aa, Xenopus laevis
MTLESIMACCLSEEAEEARRINDEIERQLRRDKRDARRELKLLLLGTGESGKSTFIKQMRIIHGSGYSDEDKRGFTKLVYQNIFSAMQAMIRAMETLKIPYKYEHNKGHALLVREVDVEKVASFENPYVDAIKYLWNDPGIQECYDRRREYQLSDSTKYYLNDLDRIATHGYLPTQQDVLRVRVPTTGIIEYPFDLQSVIFRMVDVGGQRSERRKWIHCFENVTSIMFLVALSEYDQVLVESDNENRMEESKALFRTIITYPWFQNSSVILFLNKKDLLEEKIMYSHLVDYFPEYDGPQRDAQAAREFILKMFVDLNPDSDKIIYSHFTCATDTENIRFVFAAVKDTILQLNLKEYNLV

SEQ ID NO: 7960 - protein, 353 aa, Xenopus laevis
MACCLSEEAEEARRINDEIERQLRRDKRDARRELKLLLLGTGESGKSTFIKQMRIIHGSGYSDEDKRGFTKLVYQNIFSAMQAMIRAMETLKIPYKYEHNKGHALLVREVDVEKVASFENPYVDAIKYLWNDPGIQECYDRRREYQLSDSTKYYLNDLDRIATHGYLPTQQDVLRVRVPTTGIIEYPFDLQSVIFRMVDVGGQRSERRKWIHCFENVTSIMFLVALSEYDQVLVESDNENRMEESKALFRTIITYPWFQNSSVILFLNKKDLLEEKIMYSHLVDYFPEYDGPQRDAQAAREFILKMFVDLNPDSDKIIYSHFTCATDTENIRFVFAAVKDTILQLNLKEYNLV

SEQ ID NO: 7961 - protein, 359 aa, Xenopus laevis
MTLESIMACCLSEEAKEARRINDEIERQLRRDKRDARRELKLLLLGTGESGKSTFIKQMRIIHGSGYSDEDKRGFTKLVYQNIFTAMQAMIRAMETLKIPYKYEHNKGHALLVREVDVEKVASFENPYVDAIKYLWNDPGIQECYDRRREYQLSDSTKYYLNDVDRIATQGYLPTQQDVLRVRVPTTGIIEYPFDLQSVIFRMVDVGGQRSERRKWIHCFENVTSIMFLVALSEYDQVLVESDNENRMEESKALFRTIITYPWFQNSSVILFLNKKDLLEEKIMYSHLVDYFPEYDGPQRDAQAAREFILKMFVDLNPDSDKIIYSHFTCATDTENIRFVFAAVKDTILQLNLKEYNLV

SEQ ID NO: 7962 - protein, 354 aa, Xenopus laevis
MAGCCLSAEEKESQRINAEIEKQLRRDKRDARRELKLLLLGTGESGKSTFIKQMRIIHGSGYTDEDRKGFTKLVYQNIFTSMQSMIRAMDTLRIQYTSEQNMENALVIREVEVDKVSSLERKHVEAIKKLWEDEGIQECYDRRREYQLSDSTKYYLSDIDRISNPGFIPTQQDVLRVRVPTTGIIEYPFDLENIIFRMVDVGGQRSERRKWIHCFENVTSIIFLVALSEYDQVLAECDNENRMEESKALFKTIITYPWFQNSSVILFLNKKDLLQEKIMYSHLIDYFPEFTGPKQDSQAARDFILKLYQDQNPDKEKVIYSHFTCATDTENIRFVFAAVKDTILQLNLREFNLV

SEQ ID NO: 7963 - protein, 379 aa, Xenopus laevis
MGCLGNSKTEDQRIDEKAQREANKKIEKQLQKERLAYKATHRLLLLGAGESGKSTIVKQMRILHVNGFNSEEKKQKSQDIRKNVKDAIVTIVSAMSTLIPPVPLANPENQFRIDYIKSIAPLSDFDYTQEFFDHAQKLWDDDGVKACFERSNEYQLIDCAQYFLERIDHVRQNDYTPTDQDLLRCRVLTSGIFETRFQVDKVNFHMFDVGGQRDERRKWIQCFNDVTAIIFVVASSSYNMVIREDNNTNRLREALDLFKSIWNNRWLRTISVILFLNKQDMLAEKVLAGKSKIEDYFPEYVRYTIPDDAVPDAGEDPKVTRAKFFIRDEFLRISTASGDGRHYCYPHFTCAVDTENIRRVFNDCRDIIQRMHLRQYELL

SEQ ID NO: 7964 - protein, 379 aa, Xenopus laevis
MGCLGNSKTEDQRNEEKVQRETNKKIEKQLQKDKQVYRATHRLLLLGAGESGKSSIVKQMRILHVNGFNAEEKKTKVQDIKNNIKEAIETIVTAMGNLSPPVELVNPENQFRIDYILNLPNYKDFEFSPEFYEHTKTLWQDEGVRACYERSNEYQLIDCAQYFLDKIDIVKQNDYTPSDQDLLRCRVLTSGIFETKFQVDKVNFHMFDVGGQRDERRKWIQCFNDVTAIIFVVASSSYNMVIREDNHTNRLQEALNLFKSIWNNRWLRTISVILFLNKQDLLAEKVNAGKSKIEDYFPEFARYTTPDDATPEVGEDPRVTRAKYFIRDEFLRISTASGDGRHYCYPHFTCAVDTENIRRVFNDCRDIIQRMHLRQYELL

SEQ ID NO: 7965 - protein, 353 aa, Oculimacula yallundae
MGCGMSSEEKEGKQRNEEIENQLKRDKMLQRNEIKMLLLGAGESGKSTILKQMKLIHEGGYSRDERESFKEIIFSNTVQSMRVILEAMEQLELPLDDQRTEYHVQTIFMQPAQIEGDNLPPEVGNAISALWRDIGVQECFKRSREYQLNDSAEYYFNNIDRISLPDYMPDDQDVLRSRVKTTGITETAFIIGDLTYRMFDVGGQRSERKKWIHCFENVTTILFLVAISEYDQLLFEDETVNRMQEALTLFDSICNSRWFIKTSIILFLNKIDRFKEKLPISPMKNYFPDYEGGDDYSLACDYILNRFVSLNQHETKQIYTHFTCATDTTQIRFVMAAVNDIIIQENLRLCGLI

SEQ ID NO: 7966 - protein, 353 aa, Oculimacula yallundae
MCFGGRDDGEAKRSREIDALIHRDEKVMQKVVKLLLLGAGESGKSTILKQMRLIYTKDGFTKNEKEEWRVIIFNNILDGLRMTLDAMEEFGIPFEFKNTDVHLPVILADKDLRPYEPIPVEYLRAFKDMWKDQGIQKAIKRGNEFALHDNLSYFFQDLDRLFNKEFVPTDQDVLRARLRTTGITETVFDLGSLQYRMFDVGGQRSERKKWIHCFENVNALMFLVAISGYDQCLAEDKDGNQMQEALMLWESIANSHWFKNSALILFLNKMDLFKEKIAISPITKFGFSDFQGDPRDPQQASKYFMDKFVALNRSPVREVYSHFTNATDTDLLKVTMASVQDMIIQKNLQKLIL

SEQ ID NO: 7967 - protein, 354 aa, Gallus gallus
MGCTLSAEDKAAVERSKMIDRNLREDGEKAAREVKLLLLGAGESGKSTIVKQMKIIHEAGYSEEECKQYKAVVYSNTIQSIIAIIRAMGRLKIDFGDPTRADDARQLFVLAGAAEEGFMTADVAGVIKRLWKDSGVQACFNRSREYQLNDSAAYYLNDLDRIAQTSYIPTQQDVLRTRVKTTGIVETHFTFKDLHFKMFDVGGQRSERKKWIHCFEGVTAIIFCVALSDYDLVLAEDEEMNRMHESMKLFDSICNNKWFTDTSIILFLNKKDLFEEKIKRSPLTICYPEYAGSNTYEEAAAYIQCQFEDLNKRKDTKEIYTHFTCATDTKNVQFVFDAVTDVIIKNNLKDCGLF

SEQ ID NO: 7968 - protein, 354 aa, Gallus gallus
MGSGASAEDKEMAKRSKELEKKLQEDADKEAKTVKLLLLGAGESGKSTIVKQMKIIHQDGYTPEECMEFKAVIYGNILQSILAIIRAMSTLGIDYAESGRADDGRQLFNLADSIEEGTMPPELVDCIKKLWKDGGVAGVFDRAAEYQLNDSAAYYLNQLDRITAPGYLPNEQDVLRSRVKTTGIIETKFSVKDLNFRMFDVGGQRSERKKWIHCFEGVTCIIFCGALSAYDMVLVEDDEVNRMHESLHLFNSICNHKFFAATSIILFLNKKDLFEEKIKKVHLSICFPDYDGPNTFEDAGNYIKTQFLDLNMRKDVKEIYSHMTCATDTQNVKFVFDAVTDVIIKENLKDCGLF

SEQ ID NO: 7969 - protein, 354 aa, Gallus gallus
MGCTLSAEDKAAVERSKMIDRNLREDGEKAAKEVKLLLLGAGESGKSTIVKQMKIIHEDGYSEEECKQYKVVVYSNTIQSIIAIIRAMGRLKIDFGEVARADDARQLFVLAGSAEEGVMTAELAGVIKRLWRDAGVQACFSRSREYQLNDSASYYLNDLDRISQPTYIPTQQDVLRTRVKTTGIVETHFTFKDLYFKMFDVGGQRSERKKWIHCFEGVTAIIFCVALSDYDLVLAEDEEMNRMHESMKLFDSICNNKWFTDTSIILFLNKKDLFEEKIKKSPLTICYPEYTGSNTYEEAAAYIQCQFEDLNRRKDTKEIYTHFTCATDTKNVQFVFDAVTDVIIKNNLKECGLY

SEQ ID NO: 7970 - protein, 350 aa, Gallus gallus
MGAGASAEEKHSRELEKKLKEDAEKDARTVKLLLLGAGESGKSTIVKQMKIIHQDGYSLEECLEFIAIIYSNTLQSMLAIVRAMTTLNIQYGDSARQDDARKLLHLSDTIEEGTMPKEMSDIIGRLWKDAGIQACFDRASEYQLNDSAGYYLSDLERLVTPGYVPTEQDVLRSRVKTTGIIETQFSFKDLNFRMFDVGGQRSERKKWIHCFEGVTCIIFIAALSAYDMVLVEDDEVNRMHESLHLFNSICNHRYFATTSIVLFLNKKDVFLEKIKKAHLSICFPDYDGPNTYDDAGNYIKLQFLELNMRRDVKEIYSHMTCATDTENVKFVFDAVTDIIIKENLKDCGLF

SEQ ID NO: 7971 - protein, 355 aa, Gallus gallus
MGCTVSAEDKAAAERSRMIDRNLREDGEKAAREVKLLLLGAGESGKSTIVKQMKIIHEDGYSEEECRQYKAVVYSNTIQSIMAIIKAMGNLQIDFGDSSRADDARQLFALACTAEEQGIMPEDLANVIRRLWADHGVQACFNRSREYQLNDSAAYYLNDLERIARADYIPTQQDVLRTRVKTTGIVETHFTFKDLHFKMFDVGGQRSERKKWIHCFEGVTAIIFCVALSAYDLVLAEDEEMNRMHESMKLFDSICNNKWFTDTSIILFLNKKDLFEEKIVHSPLTICFPEYTGANKYDEAAGYIQSKFEDLNKRKDTKEIYTHFTCATDTKNVQFVFDAVTDVIIKNNLKDCGLF

SEQ ID NO: 7972 - protein, 354 aa, Gallus gallus
MGCTLSAEERAALERSKAIEKNLKEDGISAAKDVKLLLLGAGESGKSTIVKQMKIIHEDGYSEEECKQYKVVVYSNTIQSIIAIIRAMGRLKIDFGEVARADDARQLFVLAGSAEEGVMTAELAGVIKRLWRDAGVQACFSRSREYQLNDSASYYLNDLDRISQPTYIPTQQDVLRTRVKTTGIVETHFTFKDLYFKMFDVGGQRSERKKWIHCFEGVTAIIFCVALSDYDLVLAEDEEMNRMHESMKLFDSICNNKWFTDTSIILFLNKKDLFEEKIKKSPLTICYPEYTGSNTYEEAAAYIQCQFEDLNRRKDTKEIYTHFTCATDTKNVQFVFDAVTDVIIKNNLKECGLY

SEQ ID NO: 7973 - protein, 359 aa, Meleagris gallopavo
MTLESMMACCLSDEVKESKRINAEIEKQLRRDKRDARRELKLLLLGTGESGKSTFIKQMRIIHGSGYSEEDKKGFTKLVYQNIFTAMQSMIRAMETLKILYKYEQNKANAVLIREVDVEKVMTFEQPYVSAIKTLWNDPGIQECYDRRREYQLSDSAKYYLSDVDRIATPGYLPTQQDVLRVRVPTTGIIEYPFDLENIIFRMVDVGGQRSERRKWIHCFENVTSIMFLVALSEYDQVLVESDNENRMEESKALFRTIITYPWFQNSSVILFLNKKDLLEDKILYSHLVDYFPEFDGPQRDAQAAREFILKMFVDLNPDSDKIIYSHFTCATDTENIRFVFAAVKDTILQLNLKEYNLV

SEQ ID NO: 7974 - protein, 354 aa, Homo sapiens
MGSGISSESKESAKRSKELEKKLQEDAERDARTVKLLLLGAGESGKSTIVKQMKIIHKNGYSEQECMEFKAVIYSNTLQSILAIVKAMTTLGIDYVNPRSAEDQRQLYAMANTLEDGGMTPQLAEVIKRLWRDPGIQACFERASEYQLNDSAAYYLNDLDRITASGYVPNEQDVLHSRVKTTGIIETQFSFKDLHFRMFDVGGQRSERKKWIHCFEGVTCIIFCAALSAYDMVLVEDEEVNRMHESLHLFNSICNHKYFSTTSIVLFLNKKDIFQEKVTKVHLSICFPEYTGPNTFEDAGNYIKNQFLDLNLKKEDKEIYSHMTCATDTQNVKFVFDAVTDIIIKENLKDCGLF

SEQ ID NO: 7975 - protein, 354 aa, Homo sapiens
MGCTLSAEDKAAVERSKMIDRNLREDGEKAAREVKLLLLGAGESGKSTIVKQMKIIHEAGYSEEECKQYKAVVYSNTIQSIIAIIRAMGRLKIDFGDSARADDARQLFVLAGAAEEGFMTAELAGVIKRLWKDSGVQACFNRSREYQLNDSAAYYLNDLDRIAQPNYIPTQQDVLRTRVKTTGIVETHFTFKDLHFKMFDVGGQRSERKKWIHCFEGVAAIIFCVALSDYDLVLAEDEEMNRMHESMKLFDSICNNKWFTDTSIILFLNKKDLFEEKIKKSPLTICYQEYAGSNTYEEAAAYIQCQFEDLNKRKDTKEIYTHFTCATDTKNVQFVFDAVTDVIIKNNLKDCGLF

SEQ ID NO: 7976 - protein, 354 aa, Homo sapiens
MGCTLSAEDKAAVERSKMIDRNLREDGEKAAREVKLLLLGAGESGKSTIVKQMKIIHEAGYSEEECKQYKAVVYSNTIQSIIAIIRAMGRLKIDFGDSARADDARQLFVLAGAAEEGFMTAELAGVIKRLWKDSGVQGCFNRSREYQLNDSAAYYLNDLDRIAQPNYIPTQQDVLRTRVKTTGIVETHFTFKDLHFKMFDVGGQRSERKKWIHCFEGVTAIIFCVALSDYDLVLAEDEEMNRMHESMKLFDSICNNKWFTDTSIILFLNKKDLFEEKIKKSPLTICYPEYAGSNTYEEAAAYIQCQFEDLNKRKDTKEIYTHFTCATDTKNVQFVFDAVTDVIIKNNLKDCGLF

SEQ ID NO: 7977 - protein, 349 aa, Homo sapiens
SAEDKAAVERSKMIDRNLREDGEKAAREVKLLLLGAGESGKSTIVKQMKIIHEAGYSEEECKQYKAVVYSNTIQSIIAIIRAMGRLKIDFGDSARADDARQLFVLAGAAEEGFMTAELAGVIKRLWKDSGVQACFNRSREYQLNDSAAYYLNDLDRIAQPNYIPTQQDVLRTRVKTTGIVETHFTFKDLHFKMFDVGGQRSERKKWIHCFEGVTAIIFCVALSDYDLVLAEDEEMNRMHESMKLFDSICNNKWFTDTSIILFLNKKDLFEEKIKKSPLTICYPEYAGSNTYEEAAAYIQCQFEDLNKRKDTKEIYTHFTCATDTKNVQFVFDAVTDVIIKNNLKDCGLF

SEQ ID NO: 7978 - protein, 350 aa, Homo sapiens
MGAGASAEEKHSRELEKKLKEDAEKDARTVKLLLLGAGESGKSTIVKQMKIIHQDGYSLEECLEFIAIIYGNTLQSILAIVRAMTTLNIQYGDSARQDDARKLMHMADTIEEGTMPKEMSDIIQRLWKDSGIQACFERASEYQLNDSAGYYLSDLERLVTPGYVPTEQDVLRSRVKTTGIIETQFSFKDLNFRMFDVGGQRSERKKWIHCFEGVTCIIFIAALSAYDMVLVEDDEVNRMHESLHLFNSICNHRYFATTSIVLFLNKKDVFFEKIKKAHLSICFPDYDGPNTYEDAGNYIKVQFLELNMRRDVKEIYSHMTCATDTQNVKFVFDAVTDIIIKENLKDCGLF

SEQ ID NO: 7979 - protein, 354 aa, Homo sapiens
MGSGASAEDKELAKRSKELEKKLQEDADKEAKTVKLLLLGAGESGKSTIVKQMKIIHQDGYSPEECLEFKAIIYGNVLQSILAIIRAMTTLGIDYAEPSCADDGRQLNNLADSIEEGTMPPELVEVIRRLWKDGGVQACFERAAEYQLNDSASYYLNQLERITDPEYLPSEQDVLRSRVKTTGIIETKFSVKDLNFRMFDVGGQRSERKKWIHCFEGVTCIIFCAALSAYDMVLVEDDEVNRMHESLHLFNSICNHKFFAATSIVLFLNKKDLFEEKIKKVHLSICFPEYDGNNSYDDAGNYIKSQFLDLNMRKDVKEIYSHMTCATDTQNVKFVFDAVTDIIIKENLKDCGLF

SEQ ID NO: 7980 - protein, 354 aa, Homo sapiens
MGCTLSAEDKAAVERSKMIDRNLREDGEKAAKEVKLLLLGAGESGKSTIVKQMKIIHEDGYSEDECKQYKVVVYSNTIQSIIAIIRAMGRLKIDFGEAARADDARQLFVLAGSAEEGVMTPELAGVIKRLWRDGGVQACFSRSREYQLNDSASYYLNDLDRISQSNYIPTQQDVLRTRVKTTGIVETHFTFKDLYFKMFDVGGQRSERKKWIHCFEGVTAIIFCVALSDYDLVLAEDEEMNRMHESMKLFDSICNNKWFTETSIILFLNKKDLFEEKIKRSPLTICYPEYTGSNTYEEAAAYIQCQFEDLNRRKDTKEIYTHFTCATDTKNVQFVFDAVTDVIIKNNLKECGLY

SEQ ID NO: 7981 - protein, 325 aa, Homo sapiens
GAREVKLLLLGAGESGKSTIVKQMKIIHEAGYSEEECKQYKAVVYSNTIQSIIAIIRAMGRLKIDFGDSARADDARQLFVLAGAAEEGFMTAELAGVIKRLWKDSGVQACFNRSREYQLNDSAAYYLNDLDRIAQPNYIPTQQDVLRTRVKTTGIVETHFTFKDLHFKMFDVGGQRSERKKWIHCFEGVTAIIFCVALSDYDLVLAEDEEMNRMHESMKLFDSICNNKWFTDTSIILFLNKKDLFEEKIKKSPLTICYPEYAGSNTYEEAAAYIQCQFEDLNKRKDTKEIYTHFTCATDTKNVQFVFDAVTDVIIKNNLKDCGLF

SEQ ID NO: 7982 - protein, 355 aa, Homo sapiens
  unsure (1)..(355): unsure at all Xaa locations
MGCTVSAEDKAAAERSKMIDKNLREDGEKAAREVKLLLLGAGESGKSTIVKQMKIIHEDGYSEEECRQYRAVVYSNTIQSIMAIVKAMGNLQIDFADPSRADDARQLFALSCTAEEQGVLPDDLSGVIRRLWADHGVQACFGRSREYQLNDSAAYYLNDLERIAQSDYIPTQQDVLRTRVKTTGIVETHFTFKDLHFKMFDVGGQRSERKKWIHCFEGVTAIIFCVALSAYDLVLAEDEEMNRMHESMKLFDSICNNKWFTDTSIILFLNKKDLFEEKITHSPLTICFPEYTGANKYDEAASYIQSKFEDLNKRKDTKEIYTHFTCATDTKNVQFVFDAVTDXIIKNNLKDCGLF

SEQ ID NO: 7983 - protein, 350 aa, Homo sapiens [sequence omitted]

SEQ ID NO: 7984 - protein, 355 aa, Homo sapiens
MGCTVSAEDKAAAERSKMIDKNLREDGEKAAREVKLLLLGAGESGKSTIVKQMKIIHEDGYSEEECRQYRAVVYSNTIQSIMAIVKAMGNLQIDFADPSRADDARQLFALSCTAEEQGVLPDDLSGVIRRLWADHGVQACFGRSREYQLNDSAAYYLNDLERIAQSDYIPTQQDVLRTRVKTTGIVETHFTFKDLHFKMFDVGGQRSERKKWIHCFEGVTAIIFCVALSAYDLVLAEDEEMNRMHESMKLFDSICNNKWFTDTSIILFLNKKDLFEEKITHSPLTICFPEYTGANKYDEAASYIQSKFEDLNKRKDTKEIYTHFTCATDTKNVQFVFDAVTDVIIKNNLKDCGLF

SEQ ID NO: 7985 - protein, 354 aa, Homo sapiens
MGCTLSAEERAALERSKAIEKNLKEDGISAAKDVKLLLLGAGESGKSTIVKQMKIIHEDGFSGEDVKQYKPVVYSNTIQSLAAIVRAMDTLGIEYGDKERKADAKMVCDVVSRMEDTEPFSAELLSAMMRLWGDSGIQECFNRSREYQLNDSAKYYLDSLDRIGAADYQPTEQDILRTRVKTTGIVETHFTFKNLHFRLFDVGGQRSERKKWIHCFEDVTAIIFCVALSGYDQVLHEDETTNRMHESLKLFDSICNNKWFTDTSIILFLNKKDIFEEKIKKSPLTICFPEYTGPSAFTEAVAYIQAQYESKNKSAHKEIYTHVTCATDTNNIQFVFDAVTDVIIAKNLRGCGLY

SEQ ID NO: 7986 - protein, 355 aa, Homo sapiens [sequence omitted]

SEQ ID NO: 7987 - protein, 354 aa, Homo sapiens
MGCTLSAEERAALERSKAIEKNLKEDGISAAKDVKLLLLGAGESGKSTIVKQMKIIHEDGFSGEDVKQYKPVVYSNTIQSLAAIVRAMDTLGIEYGDKERKADAKMVCDVVSRMEDTEPFSAELLSAMMRLWGDSGIQECFNRSREYQLNDSAKYYLDSLDRIGAADYQPTEQDILRTRVKTTGIVETHFTFKNLHFRLFDVGGQRSERKKWIHCFEDVTAIIFCVALSGYDQVLHEDETTNRMHESLKLFDSICNNKWFTDTSIILFLNKKDIFEEKIKKSPLTICFPEYTGPSAFTEAVAYIQAQYESKNKSAHKEIYSHVTCATDTNNIQFVFDAVTDVIIAKNLRGCGLY

SEQ ID NO: 7988 - protein, 354 aa, Homo sapiens
MGCTLSAEERAALERSKAIEKNLKEDGISAAKDVKLLLLGAGESGKSTIVKQMKIIHEDGFSGEDVKQYKPVVYSNTIQSLAAIVRAMDTLGIEYGDKERKADAKMVCDVVSRMEDTEPFSAELLSAMMRLWGDSGIQECFNRSREYQLNDSAKYYLDSLDRIGAADYQPTEQDILRTRVKTTGIVETHFTFKNLHFRLFDVGGQRSERKKWIHCFEDVTAIIFCVALSGYDQVLHEDETTNRMHESLMLFDSICNNKFFIDTSIILFLNKKDLFGEKIKKSPLTICFPEYTGPNTYEDAAAYIQAQFESKNRSPNKEIYCHMTCATDTNNIQVVFDAVTDIIIANNLRGCGLY

SEQ ID NO: 7989 - protein, 354 aa, Homo sapiens [sequence omitted]

SEQ ID NO: 7990 - protein, 355 aa, Homo sapiens
MAGCCCLSAEEKESQRISAEIERQLRRDKKDARRELKLLLLGTGESGKSTFIKQMRIIHGSGYSDEDRKGFTKLVYQNIFTAMQAMIRAMDTLRIQYVCEQNKENAQIIREVEVDKVSMLSREQVEAIKQLWQDPGIQECYDRRREYQLSDSAKYYLTDIDRIATPSFVPTQQDVLRVRVPTTGIIEYPFDLENIIFRMVDVGGQRSERRKWIHCFESVTSIIFLVALSEYDQVLAECDNENRMEESKALFKTIITYPWFLNSSVILFLNKKDLLEEKIMYSHLISYFPEYTGPKQDVRAARDFILKLYQDQNPDKEKVIYSHFTCATDTDNIRFVFAAVKDTILQLNLREFNLV

SEQ ID NO: 7991 - protein, 339 aa, Homo sapiens
MEYAGHLPASSAQGTILACTSCTGAGESGKSTIVKQMKIIHEDGYSEEECRQYRAVVYSNTIQSIMAIVKAMGNLQIDFADPSRADDARQLFALSCTAEEQGVLPDDLSGVIRRLWADHGVQACFGRSREYQLNDSAAYYLNDLERIAQSDYIPTQQDVLRTRVKTTGIVETHFTFKDLHFKMFDVGGQRSERKKWIHCFEGVTAIIFCVALSAYDLVLAEDEEMNRMHESMKLFDSICNNKWFTDTSIILFLNKKDLFEEKITHSPLTICFPEYTGANKYDEAASYIQSKFEDLNKRKDTKEIYTHFTCATDTKNVQFVFDAVTDVIIKNNLKDCGLF

SEQ ID NO: 7992 - protein, 359 aa, Homo sapiens [sequence omitted]

SEQ ID NO: 7993 - protein, 359 aa, Homo sapiens
MTLESMMACCLSDEVKESKRINAEIEKQLRRDKRDARRELKLLLLGTGESGKSTFIKQMRIIHGAGYSEEDKRGFTKLVYQNIFTAMQAMIRAMETLKILYKYEQNKANALLIREVDVEKVTTFEHQYVSAIKTLWEDPGIQECYDRRREYQLSDSAKYYLTDVDRIATLGYLPTQQDVLRVRVPTTGIIEYPFDLENIIFRMVDVGGQRSERRKWIHCFENVTSIMFLVALSEYDQVLVESDNENRMEESKALFRTIITYPWFQNSSVILFLNKKDLLEDKILYSHLVDYFPEFDGPQREPQAAREFILKMFVDLNPDSDKIIYSHFTCATDTENIRFVFAAVKDTILQLNLKEYNLV

SEQ ID NO: 7994 - protein, 359 aa, Homo sapiens
MTLESMMACCLSDEVKESKRINAEIEKQLRRDKRDARRELKLLLLGTGESGKSTFIKQMRIIHGAGYSEEDKRGFTKLVYQNIFTAMQAMIRAMETLKILYKYEQNKANALLIREVDVEKVTTFEHQYVSAIKTLWEDPGIQECYDRRREYQLSDSAKYYLTDVDRIATLGYLPTQQDVLRVRVPTTGIIEYPFDLENIIFRMVDVGGQRSERRKWIHCFENVTSIMFLVALSEYDQVLVESDNENRMEESKALFRTIITYPWFQNSSVILFLNKKDLLEDKILYSHLVDYFPEFDGPQRDAQAAREFILKMFVDLNPDSDKIIYSHFTCATDTENIRFVFAAVKDTILQLNLKEYNLV

SEQ ID NO: 7995 - protein, 359 aa, Homo sapiens [sequence omitted]

SEQ ID NO: 7996 - protein, 355 aa, Homo sapiens [sequence omitted]

SEQ ID NO: 7997 - protein, 359 aa, Homo sapiens [sequence omitted]

SEQ ID NO: 7998 - protein, 355 aa, Homo sapiens [sequence omitted]

SEQ ID NO: 7999 - protein, 353 aa, Homo sapiens
MACCLSEEAKEARRINDEIERQLRRDKRDARRELKLLLLGTGESGKSTFIKQMRIIHGSGYSDEDKRGFTKLVYQNIFTAMQAMIRAMDTLKIPYKYEHNKAHAQLVREVDVEKVSAFENPYVDAIKSLWNDPGIQECYDRRREYQLSDSTKYYLNDLDRVADPAYLPTQQDVLRVRVPTTGIIEYPFDLQSVIFRMVDVGGQRSERRKWIHCFENVTSIMFLVALSEYDQVLVESDNENRMEESKALFRTIITYPWFQNSSVILFLNKKDLLEEKIMYSHLVDYFPEYDGPQRDAQAAREFILKMFVDLNPDSDKIIYSHFTCATDTENIRFVFAAVKDTILQLNLKEYNAV

SEQ ID NO: 8000 - protein, 359 aa, Homo sapiens
MTLESIMACCLSEEAKEARRINDEIERQLRRDKRDARRELKLLLLGTGESGKSTFIKQMRIIHGSGYSDEDKRGFTKLVYQNIFTAMQAMIRAMDTLKIPYKYEHNKAHAQLVREVDVEKVSAFENPYVDAIKSLWNDPGIQECYDRRREYQLSDSTKYYLNDLDRVADPAYLPTQQDVLRVRVPTTGIIEYPFDLQSVIFRMVDVGGQRSERRKWIHCFENVTSIMFLVALSEYDQVLVESDNENRMEESKALFRTIITYPWFQNSSVILFLNKKDLLEEKIMYSHLVDYFPEYDGPQRDAQAAREFILKMFVDLNPDSDKIIYSHFTCATDTENIRFVFAAVKDTILQLNLKEYNAV

SEQ ID NO: 8001 - protein, 355 aa, Homo sapiens
MGCRQSSEEKEAARRSRRIDRHLRSESQRQRREIKLLLLGTSNSGKSTIVKQMKIIHSGGFNLEACKEYKPLIIYNAIDSLTRIIRALAALRIDFHNPDRAYDAVQLFALTGPAESKGEITPELLGVMRRLWADPGAQACFSRSSEYHLEDNAAYYLNDLERIAAADYIPTVEDILRSRDMTTGIVENKFTFKELTFKMVDVGGQRSERKKWIHCFEGVTAIIFCVELSGYDLKLYEDNQTSRMAESLRLFDSICNNNWFINTSLILFLNKKDLLAEKIRRIPLTICFPEYKGQNTYEEAAVYIQRQFEDLNRNKETKEIYSHFTCATDTSNIQFVFDAVTDVIIQNNLKYIGLC

SEQ ID NO: 8002 - protein, 359 aa, Homo sapiens
MTLESIMACCLSEEAKEARRINDEIERQLRRDKRDARRELKLLLLGTGESGKSTFIKQMRIIHGSGYSDEDKRGFTKLVYQNIFTAMQAMIRAMDTLKIPYKYEHNKAHAQLVREVDVEKVSAFENPYVDAIKSLWNDPGIQECYDRRREYQLSDSTKYYLNDLDRVADPAYLPTQQDVLRVRVPTTGIIEYPFDLQSVIFRMVDVGGQRSERRKWIHCFENVTSIMFLVALSEYDQVLVESDNENRMEESKALFRTIITYPWFQNSSVILFLNKKDLLEEKIMYSHLVDYFPEYDGPQRDAQAAREFILKMFVDLNPDSDKINYSHFTCATDTENIRFVFAAVKDTILQLNLKEYNLV

SEQ ID NO: 8003 - protein, 355 aa, Homo sapiens [sequence omitted]

SEQ ID NO: 8004 - protein, 374 aa, Homo sapiens
MARSLTWRCCPWCLTEDEKAAARVDQEINRILLEQKKQDRGELKLLLLGPGESGKSTFIKQMRIIHGAGYSEEERKGFRPLVYQNIFVSMRAMIEAMERLQIPFSRPESKHHASLVMSQDPYKVTTFEKRYAAAMQWLWRDAGIRACYERRREFHLLDSAVYYLSHLERITEEGYVPTAQDVLRSRMPTTGINEYCFSVQKTNLRIVDVGGQKSERKKWIHCFENVIALIYLASLSEYDQCLEENNQENRMKESLALFGTILELPWFKSTSVILFLNKTDILEEKIPTSHLATYFPSFQGPKQDAEAAKRFILDMYTRMYTGCVDGPEGSKKGARSRRLFSHYTCATDTQNIRKVFKDVRDSVLARYLDEINLL

SEQ ID NO: 8005 - protein, 374 aa, Homo sapiens
MARSLTWRCCPWCLTEDEKAAARVDQEINRILLEQKKQDRGELKLLLLGPGESGKSTFIKQMRIIHGAGYSEEERKGFRPLVYQNIFVSMRAMIEAMERLQIPFSRPESKHHASLVMSQDPYKVTTFEKRYAAAMQWLWRDAGIRAYYERRREFHLLDSAVYYLSHLERITEEGYVPTAQDVLRSRMPTTGINEYCFSVQKTNLRIVDVGGQKSERKKWIHCFENVIALIYLASLSEYDQCLEENNQENRMKESLALFGTILELPWFKSTSVILFLNKTDILEEKIPTSHLATYFPSFQGPKQDAEAAKRFILDMYTRMYTGCVDGPEGSKKGARSRRLFSHYTCATDTQNIRKVFKDVRDSVLARYLDEINLL

SEQ ID NO: 8006 - protein, 377 aa, Homo sapiens
MADFLPSRSVLSVCFPGCLLTSGEAEQQRKSKEIDKCLSREKTYVKRLVKILLLGAGESGKSTFLKQMRIIHGQDFDQRAREEFRPTIYSNVIKGMRVLVDAREKLHIPWGDNSNQQHGDKMMSFDTRAPMAAQGMVETRVFLQYLPAIRALWADSGIQNAYDRRREFQLGESVKYFLDNLDKLGEPDYIPSQQDILLARRPTKGIHEYDFEIKNVPFKMVDVGGQRSERKRWFECFDSVTSILFLVSSSEFDQVLMEDRLTNRLTESLNIFETIVNNRVFSNVSIILFLNKTDLLEEKVQIVSIKDYFLEFEGDPHCLRDVQKFLVECFRNKRRDQQQKPLYHHFTTAINTENIRLVFRDVKDTILHDNLKQLMLQ

SEQ ID NO: 8007 - protein, 377 aa, Homo sapiens
MADFLPSRSVLSVCFPGCLLTSGEAEQQRKSKEIDKCLSREKTYVKRLVKILLLGAGESGKSTFLKQMRIIHGQDFDQRAREEFRPTIYSNVIKGMRVLVDAREKLHIPWGDNSNQQHGDKMMSFDTRAPMAAQGMVETRVFLQYLPAIRALWADSGIQNAYDRRREFQLGESVKYFLDNLDKLGEPDYIPSQQDILLARRPTKGIHEYDFEIKNVPFKMLDVGGQRSERKRWFECFDSVTSILFLVSSSEFDQVLMEDRLTNRLTESLNIFETIVNNRVFSNVSIILFLNKTDLLEEKVQIVSIKDYFLEFEGDPHCLRDVQKFLVECFRNKRRDQQQKPLYHHFTTAINTENIRLVFRDVKDTILHDNLKQLMLQ

SEQ ID NO: 8008 - protein, 381 aa, Homo sapiens [sequence omitted]

SEQ ID NO: 8009 - protein, 381 aa, Homo sapiens
MSGVVRTLSRCLLPAEAGGARERRAGSGARDAEREARRRSRDIDALLARERRAVRRLVKILLLGAGESGKSTFLKQMRIIHGREFDQKALLEFRDTIFDNILKGSRVLVDARDKLGIPWQYSENEKHGMFLMAFENKAGLPVEPATFQLYVPALSALWRDSGIREAFSRRSEFQLGESVKYFLDNLDRIGQLNYFPSKQDILLARKATKGIVEHDFVIKKIPFKMVDVGGQRSQRQKWFQCFDGITSILFMVSSSEYDQVLMEDRRTNRLVESMNIFETIVNNKLFFNVSIILFLNKMDLLVEKVKTVSIKKHFPDFRGDPHQLEDVQRYLVQCFDRKRRNRSKPLFHHFTTAIDTENVRFVFHAVKDTILQENLKDIMLQ

SEQ ID NO: 8010 - protein, 381 aa, Homo sapiens
MSGVVRTLSRCLLPAEAGGARERRAGSGARDAEREARRRSRDIDALLARERRAVRRLVKILLLGAGESGKSTFLKQMRIIHGREFDQKALLEFRDTIFDNILKGSRVLVDARDKLGIPWQYSENEKHGMFLMAFENKAGLPVEPATFQLYVPALSALWRDSGIREAFSRRSEFQLGESVKYFLDNLDRIGQLNYFPSKQDILLARKATKGIVEHDFVIKKIPFKMVDVGGQRSQRQKWFQCFDGITSILFMVSSSEYDQVLMEDRRTNRLVESMNIFETIVNNKLFFNVSIILFLNKMDLLVEKVKTVSIKKHFPDFRGDPHRLEDVQRYLVQCFDRKRRNRSKPLFHHFTTAIDTENVRFVFHAVKDTILQENLKDIMLQ

SEQ ID NO: 8011 - protein, 458 aa, Homo sapiens
MGLCYSLRPLLFGGPGDDPCAASEPPVEDAQPAPAPALAPVRAAARDTARTLLPRGGEGSPACARPKADKPKEKRQRTEQLSAEEREAAKEREAVKEARKVSRGIDRMLRDQKRDLQQTHRLLLLGAGESGKSTIVKQMRILHVNGFNPEEKKQKILDIRKNVKDAIVTIVSAMSTIIPPVPLANPENQFRSDYIKSIAPITDFEYSQEFFDHVKKLWDDEGVKACFERSNEYQLIDCAQYFLERIDSVSLVDYTPTDQDLLRCRVLTSGIFETRFQVDKVNFHMFDVGGQRDERRKWIQCFNDVTAIIYVAACSSYNMVIREDNNTNRLRESLDLFESIWNNRWLRTISIILFLNKQDMLAEKVLAGKSKIEDYFPEYANYTVPEDATPDAGEDPKVTRAKFFIRDLFLRISTATGDGKHYCYPHFTCAVDTENIRRVFNDCRDIIQRMHLKQYELL

SEQ ID NO: 8012 - protein, 381 aa, Homo sapiens
MGCLGGNSKTTEDQGVDEKERREANKKIEKQLQKERLAYKATHRLLLLGAGESGKSTIVKQMRILHVNGFNPEEKKQKILDIRKNVKDAIVTIVSAMSTIIPPVPLANPENQFRSDYIKSIAPITDFEYSQEFFDHVKKLWDDEGVKACFERSNEYQLIDCAQYFLERIDSVSLVDYTPTDQDLLRCRVLTSGIFETRFQVDKVNFHMFDVGGQRDERRKWIQCFNDVTAIIYVAACSSYNMVIREDNNTNRLRESLDLFESIWNNRWLRTISIILFLNKQDMLAEKVLAGKSKIEDYFPEYANYTVPEDATPDAGEDPKVTRAKFFIRDLFLRISTATGDGKHYCYPHFTCAVDTENIRRVFNDCRDIIQRMHLKQYELL

SEQ ID NO: 8013 - protein, 249 aa, Homo sapiens
MVCDVVSRMEDTEPFSAELLSAMMRLWGDSGIQECFNRSREYQLNDSAKYYLDSLDRIGAADYQPTEQDILRTRVKTTGIVETHFTFKNLHFRLFDVGGQRSERKKWIHCFEDVTAIIFCVALSGYDQVLHEDETTNRMHESLMLFDSICNNKFFIDTSIILFLNKKDLFGEKIKKSPLTICFPEYTGPNTYEDAAAYIQAQFESKNRSPNKEIYCHMTCATDTNNIQVVFDAVTDIIIANNLRGCGLY

SEQ ID NO: 8014 - protein, 351 aa, Homo sapiens
MLRDQKRDLQQTHRLLLLGAGESGKSTIVKQMRILHVNGFNPEEKKQKILDIRKNVKDAIVTIVSAMSTIIPPVPLANPENQFRSDYIKSIAPITDFEYSQEFFDHVKKLWDDEGVKACFERSNEYQLIDCAQYFLERIDSVSLVDYTPTDQDLLRCRVLTSGIFETRFQVDKVNFHMFDVGGQRDERRKWIQCFNDVTAIIYVAACSSYNMVIREDNNTNRLRESLDLFESIWNNRWLRTISIILFLNKQDMLAEKVLAGKSKIEDYFPEYANYTVPEDATPDAGEDPKVTRAKFFIRDLFLRISTATGDGKHYCYPHFTCAVDTENIRRVFNDCRDIIQRMHLKQYELL

SEQ ID NO: 8015 - protein, 379 aa, Homo sapiens
MGCLGNSKTEDQRNEEKAQREANKKIEKQLQKDKQVYRATHRLLLLGAGESGKSTIVKQMRILHVNGFNGDEKATKVQDIKNNLKEAIETIVAAMSNLVPPVELANPENQFRVDYILSVMNVPDFDFPPEFYEHAKALWEDEGVRACYERSNEYQLIDCAQYFLDKIDVIKQADYVPSDQDLLRCRVLTSGIFETKFQVDKVNFHMFDVGGQRDERRKWIQCFNDVTAIIFVVASSSYNMVIREDNQTNRLQEALNLFKSIWNNRWLRTISVILFLNKQDLLAEKVLAGKSKIEDYFPEFARYTTPEDATPEPGEDPRVTRAKYFIRDEFLRISTASGDGRHYCYPHFTCAVDTENIRRVFNDCRDIIQRMHLRQYELL

SEQ ID NO: 8016 - protein, 380 aa, Homo sapiens
MGCLGNSKTEDQRNEEKAQREANKKIEKQLQKDKQVYRATHRLLLLGAGESGKSTIVKQMRILHVNGFNGDSEKATKVQDIKNNLKEAIETIVAAMSNLVPPVELANPENQFRVDYILSVMNVPDFDFPPEFYEHAKALWEDEGVRACYERSNEYQLIDCAQYFLDKIDVIKQADYVPSDQDLLRCRVLTSGIFETKFQVDKVNFHMFDVGGQRDERRKWIQCFNDVTAIIFVVASSSYNMVIREDNQTNRLQEALNLFKSIWNNRWLRTISVILFLNKQDLLAEKVLAGKSKIEDYFPEFARYTTPEDATPEPGEDPRVTRAKYFIRDEFLRISTASGDGRHYCYPHFTCAVDTENIRRVFNDCRDIIQRMHLRQYELL

SEQ ID NO: 8017 - protein, 394 aa, Homo sapiens [sequence omitted]

SEQ ID NO: 8018 - protein, 342 aa, Homo sapiens
GATHRLLLLGAGESGKSTIVKQMRILHVNGFNGDEKATKVQDIKNNLKEAIETIVAAMSNLVPPVELANPENQFRVDYILSVMNVPDFDFPPEFYEHAKALWEDEGVRACYERSDEYQLIDCAQYFLDKIDVIKQADYVPSDQDLLRCRVLTSGIFETKFQVDKVNFHMFDVGGQRDERRKWIQCFNDVTAIIFVVASSSYNMVIREDNQTNRLQEALNLFKSIWNNRWLRTISVILFLNKQDLLAEKVLAGKSKIEDYFPEFARYTTPEDATPEPGEDPRVTRAKYFIRDEFLRISTASGDGRHYCYPHFTCAVDTENIRRVFNDCRDIIQRMHLRQYELL

SEQ ID NO: 8019 - protein, 394 aa, Homo sapiens
MGCLGNSKTEDQRNEEKAQREANKKIEKQLQKDKQVYRATHRLLLLGAGESGKSTIVKQMRILHVNGFNGEGGEEDPQAARSNSDGEKATKVQDIKNNLKEAIETIVAAMSNLVPPVELANPENQFRVDYILSVMNVPDFDFPPEFYEHAKALWEDEGVRACYERSNEYQLIDCAQYFLDKIDVIKQADYVPSDQDLLRCRVLTSGIFETKFQVDKVNFHMFDVGGQRDERRKWIQCFNDVTAIIFVVASSSYNMVIREDNQTNRLQEALNLFKSIWNNRWLRTISVILFLNKQDLLAEKVLAGKSKIEDYFPEFARYTTPEDATPEPGEDPRVTRAKYFIRDEFLRISTASGDGRHYCYPHFTCAVDTENIRRVFNDCRDIIQRMHLRQYELL

SEQ ID NO: 8020 - protein, 909 aa, Homo sapiens
MQALRLRPALMEPGAFSGARPGLGGYSPPPEEAMPFEFDQPAQRGCSQLLLQVPDLAPGGPGAAGVPGAPPEEPQALRPAKAGSRGGYSPPPEETMPFELDGEGFGDDSPPPGLSRVIAQVDGSSQFAAVAASSAVRLTPAANAPPLWVPGAIGSPSQEAVRPPSNFTGSSPWMEISGPPFEIGSAPAGVDDTPVNMDSPPIALDGPPIKVSGAPDKRERAERPPVEEEAAEMEGAADAAEGGKVPSPGYGSPAAGAASADTAARAAPAAPADPDSGATPEDPDSGTAPADPDSGAFAADPDSGAAPAAPADPDSGAAPDAPADPDSGAAPDAPADPDAGAAPEAPAAPAAAETRAAHVAPAAPDAGAPTAPAASATRAAQVRRAASAAPASGARRKIHLRPPSPEIQAADPPTPRPTRASAWRGKSESSRGRRVYYDEGVASSDDDSSGDESDDGTSGCLRWFQHRRNRRRRKPQRNLLRNFLVQAFGGCFGRSESPQPKASRSLKVKKVPLAEKRRQMRKEALEKRAQKRAEKKRSKLIDKQLQDEKMGYMCTHRLLLLGAGESGKSTIVKQMRILHVNGFNGEGGEEDPQAARSNSDGEKATKVQDIKNNLKEAIETIVAAMSNLVPPVELANPENQFRVDYILSVMNVPDFDFPPEFYEHAKALWEDEGVRACYERSNEYQLIDCAQYFLDKIDVIKQADYVPSDQDLLRCRVLTSGIFETKFQVDKVNFHMFDVGGQRDERRKWIQCFNDVTAIIFVVASSSYNMVIREDNQTNRLQEALNLFKSIWNNRWLRTISVILFLNKQDLLAEKVLAGKSKIEDYFPEFARYTTPEDATPEPGEDPRVTRAKYFIRDEFLRISTASGDGRHYCYPHFTCAVDTENIRRVFNDCRDIIQRMHLRQYELL

SEQ ID NO: 8021 - protein, 395 aa, Homo sapiens
MGCLGNSKTEDQRNEEKAQREANKKIEKQLQKDKQVYRATHRLLLLGAGESGKSTIVKQMRILHVNGFNGEGGEEDPQAARSNSDGSEKATKVQDIKNNLKEAIETIVAAMSNLVPPVELANPENQFRVDYILSVMNVPDFDFPPEFYEHAKALWEDEGVRACYERSNEYQLIDCAQYFLDKIDVIKQADYVPSDQDLLRCRVLTSGIFETKFQVDKVNFHMFDVGGQRDERRKWIQCFNDVTAIIFVVASSSYNMVIREDNQTNRLQEALNLFKSIWNNRWLRTISVILFLNKQDLLAEKVLAGKSKIEDYFPEFARYTTPEDATPEPGEDPRVTRAKYFIRDEFLRISTASGDGRHYCYPHFTCAVDTENIRRVFNDCRDIIQRMHLRQYELL

SEQ ID NO: 8022 - protein, 384 aa, Homo sapiens
QRNEEKAQREANKKIEKQLQKDKQVYRATHRLLLLGAGESGKSTIVKQMRILHVNGFNGEGGEEDPQAARSNSDGSEKATKVQDIKNNLKEAIETIVAAMSNLVPPVELANPENQFRVDYILSVMNVPDFDFPPEFYEHAKALWEDEGVRACYERSNEYQLIDCAQYFLDKIDVIKQADYVPSDQDLLRCRVLTSGIFETKFQVDKVNFHMFDVGGQRDQRRKWIQCFNDVTAIIFVVASSSYNMVIREDNQTNRLQEALNLFKSIWNNRWLRTISVILFLNKQDLLAEKVLAGKSKIEDYFPEFARYTTPEDATPEPGEDPRVTRAKYFIRDEFLRISTASGDGRHYCYPHFTCAVDTENIRRVFNDCRDIIQRMHLRQYELL

SEQ ID NO: 8023 - protein, 419 aa, Homo sapiens
PVRSSAPRRGHSVASAPRSGLRQVAGRRGAALPCSLAPGCGAAAGASPCPGAGRRRAAGGRCLACECTSLTCAGESGKSTIVKQMRILHVNGFNGEGGEEDPQAARSNSDGEKATKVQDIKNNLKEAIETIVAAMSNLVPPVELANPENQFRVDYILSVMNVPDFDFPPEFYEHAKALWEDEGVRACYERSNEYQLIDCAQYFLDKIDVIKQADYVPSDQDLLRCRVLTSGIFETKFQVDKVNFHMFDVGGQRDERRKWIQCFNDVTAIIFVVASSSYNMVIREDNQTNRLQEALNLFKSIWNNRWLRTISVILFLNKQDLLAEKVLAGKSKIEDYFPEFARYTTPEDATPEPGEDPRVTRAKYFIRDEFLRISTASGDGRHYCYPHFTCAVDTENIRRVFNDCRDIIQRMHLRQYELL

SEQ ID NO: 8024 - protein, 335 aa, Homo sapiens
MRILHVNGFNGEGGEEDPQAARSNSDGEKATKVQDIKNNLKEAIETIVAAMSNLVPPVEVANPENQFRVDYILSVMNVPDFDFPPEFYEHAKALWEDEGVRACYERSNEYQLIDCAQYFLDKIDVIKQADYVPSDQDLLRCRVLTSGIFETKFQVDKVNFHMFDVGGQRDERRKWIQCFNDVTAIIFVVASSSYNMVIREDNQTNRLQEALNLFKSIWNNRWLRTISVILFLNKQDLLAEKVLAGKSKIEDYFPEFARYTTPEDATPEPGEDPRVTRAKYFIRDEFLRISTASGDGRHYCYPHFTCAVDTENIRRVFNDCRDIIQRMHLRQYELL

SEQ ID NO: 8025 - protein, 308 aa, Homo sapiens
EKATKVQDIKNNLKEAIETIVAAMSNLVPPVELANPENQFRVDYILSVMNVPDFDFPPEFYEHAKALWEDEGVRACYERSNEYQLIDCAQYFLDKIDVIKQADYVPSDQDLLRCRVLTSGIFETKFQVDKVNFHMFDVGGQRDERRKWIQCFNDVTAIIFVVASSSYNMVIREDNQTNRLQEALNLFKSIWNNRWLRTISVILFLNKQDLLAEKVLAGKSKIEDYFPEFARYTTPEDATPEPGEDPRVTRAKYFIRDEFLRISTASGDGRHYCYPHFTCAVDTENIRRVFNDCRDIIQRMHLRQYELL

SEQ ID NO: 8026 - protein, 266 aa, Homo sapiens
MQAMIRAMETLKILYKLEQNKANALQIREVDVEKVTTFEHRYVSAIKTLWDDPGIHECYDRRREYQLSDSAKYCVTDVDCIATSSYLPTQQDVLRVRVPTTGVFRPGEHHLQDGGCWGTARKWIHCFENLTSIPFLVALSEYDQVLVESDNENRMEESKALFRTIIDYPWFQNSPVITFLNKKDLLEDNILYSHMVDYFPEFEGPQQDAQAAREFILKMLVDMNPDSDKIIDSHFTYATDTKNIRFVFAAVKDTILQLSLKEYNLV

SEQ ID NO: 8027 - protein, 157 aa, Homo sapiens
MFDVGGQRSERKKWIHCFEGVTAIIFCVALSAYDLVLAEDEEMNRMHESMKLFDSICNNKWFTDTSIILFLNKKDLFEEKITHSPLTICFPEYTGANKYDEAASYIQSKFEDLNKRKDTKEIYTHFTCATDTKNVQFVFDAVTDVIIKNNLKDCGLF

SEQ ID NO: 8028 - protein, 242 aa, Homo sapiens
MSGVVRTLSRCLLPAEAGGARERRAGSGARDAEREARRRSRDIDALLARERRAVRRLVKILLLGAGESGKSTFLKQMRIIHGREFDQKALLEFRDTIFDNILKGSRVLVDARDKLGIPWQYSENEKHGMFLMAFENKAGLPVEPATFQLYVPALSALWRDSGIREAFSRRSEFQLGESVKYFLDNLDRIGQLNYFPSKQDILLARKATKGIVEHDFVIKKIPFKMVDVGGQRSQRQKWFQCF

SEQ ID NO: 8029 - protein, 197 aa, Homo sapiens
MGCTVSAEDKAAAERSKMIDKNLREDGEKAAREVKLLLLGAGESGKSTIVKQMKIIHEDGYSEEECRQYRAVVYSNTIQSIMAIVKAMGNLQIDFADPSRADDARQLFALSCTAEEQGVLPDDLSGVIRRLWADHGVQACFGRSREYQLNDSAAYYLNDLERIAQSDYIPTQQDVLRTRVKTTGIVETHFTFKDLHF

SEQ ID NO: 8030 - protein, 156 aa, Homo sapiens [sequence omitted]

SEQ ID NO: 8031 - protein, 155 aa, Homo sapiens
RIIHGAGYSEEDKRGFTKLVYQNIFTAMQAMIRAMETLKILYKLEQNKANALQIREVDVEKVTTFEHRYVSAIKTLWDDPGIHECYDRRREYQLSDSAKYCVTDVDCIATSSYLPTQQDVLRVRVPTTGVIEYPFDLENIIFRMADVGGQRSAQR

SEQ ID NO: 8032 - protein, 128 aa, Homo sapiens
MQAMIRAMETLKILYKLEQNKANALQIREVDVEKVTTFEHRYVSAIKTLWDDPGIHECYDRRREYQLSDSAKYCVTDVDCIATSSYLPTQQDVLRVRVPTTGVIEYPFDLENIIFRMADVGGQRSAQR

SEQ ID NO: 8033 - protein, 101 aa, Homo sapiens
MGCTLSAEDKAAVERSKMIDRNLREDGEKAAREVKLLLLGAGESGKSTIVKQMKIIHEAGYSEEECKQYKAVVYSNTIQSIIAIIRAMGRLKIDFGDSARA

SEQ ID NO: 8034 - protein, 350 aa, Canis familiaris
MGAGASAEEKHSRELEKKLKEDAEKDARTVKLLLLGAGESGKSTIVKQMKIIHQDGYSLEECLEFIAIIYGNTLQSILAIVRAMTTLNIQYGDSARQDDARKLMHMADTIEEGTMPKEMSDIIQRLWKDSGIQACFERASEYQLNDSAGYYLSDLERLVTPGYVPTEQDVLRSRVKTTGIIETQFSFKDLNFRMFDVGGQRSERKKWIHCFEGVTCIIFIAALSAYDMVLVEDDEVNRMHESLHLFNSICNHRYFATTSIVLFLNKKDVFSEKIKKAHLSICFPDYDGPNTYEDAGNYIKVQFLELNMRRDVKEIYSHMTCATDTQNVKFVFDAVTDIIIKENLKDCGLF

SEQ ID NO: 8035 - protein, 355 aa, Canis familiaris
MGCTVSAEDKAAAERSKMIDKNLREDGEKAAREVKLLLLGAGESGKSTIVKQMKIIHEDGYSEEECRQYRAVVYSNTIQSIMAIVKAMGNLQIDFDDPSRADDARQLFALSCTAEEQGVLPEDLSCVIRRLWADNGVQACFGRSREYQLNDSAAYYLNDLERIAQSDYIPTQQDVLRTRVKTTGIVETHFTFKDLHFKMFDVGGQRSERKKWIHCFEGVTAIIFCVALSAYDLVLAEDEEMNRMHESMKLFDSICNNKWFTDTSIILFLNKKDLFEEKITHSPLTICFPEYTGANKYEEAASYIQSKFEDLNKRKDTKEIYTHFTCATDTKNVQFVFDAVTDVIIKNNLKDCGLF

SEQ ID NO: 8036 - protein, 353 aa, Canis familiaris
MACCLSEEAKEARRINDEIERQLRRDKRDARRELKLLLLGTGESGKSTFIKQMRIIHGSGYSDEDKRGFTKLVYQNIFTAMQAMIRAMDTLKIPYKYEHNKAHAQLVREVDVEKVSAFENPYVDAIKSLWNDPGIQECYDRRREYQLSDSTKYYLNDLDRVADPAYLPTQQDVLRVRVPTTGIIEYPFDLQSVIFRMVDVGGQRSERRKWIHCFENVTSIMFLVALSEYDQVLVESDNENRMEESKALFRTIITYPWFQNSSVILFLNKKDLLEEKIMYSHLVDYFPEYDGPQRDAQAAREFILKMFVDLNPDSDKIIYSHFTCATDTENIRFVFAAVKDTILQLNLKEYNLV

SEQ ID NO: 8037 - protein, 359 aa, Canis familiaris
MTLESIMACCLSEEAKEARRINDEIERQLRRDKRDARRELKLLLLGTGESGKSTFIKQMRIIHGSGYSDEDKRGFTKLVYQNIFTAMQAMIRAMDTLKIPYKYEHNKAHAQLVREVDVEKVSAFENPYVDAIKSLWNDPGIQECYDRRREYQLSDSTKYYLNDLDRVADPAYLPTQQDVLRVRVPTTGIIEYPFDLQSVIFRMVDVGGQRSERRKWIHCFENVTSIMFLVALSEYDQVLVESDNENRMEESKALFRTIITYPWFQNSSVILFLNKKDLLEEKIMYSHLVDYFPEYDGPQRDAQAAREFILKMFVDLNPDSDKIIYSHFTCATDTENIRFVFAAVKDTILQLNLKEYNLV

SEQ ID NO: 8038 - protein, 198 aa, Canis familiaris
LLGTGESGKSTFIKQMRIIHGAGYSEEDKRGFTKLVYQNIFTAMQAMIRAMETLKILYKYEQNKANALLIREVDVEKVTTFEHRYVHAIKTLWDDPGIQECYDRRREYQLSDSAKYYLADVDRIATSGYLPTQQDVLRVRVPTTGIIEYPFDLENIIFRMVDVGGQRSERRKWIHCFENVTSIMFLVALSEYDHVLVE

SEQ ID NO: 8039 - protein, 397 aa, Sus scrofa
MGCLGNSKTEDQRNEEKAQREANKKIEKQLQKDKQVYRATHRLLLLGAGESGKSTIVKQMRILHVNGFNGDEKATKVQDIKNNLKEAIETIVAAMSNLVPPVELANPENQFRVDYILSVMNVPDFDFPPEFYEHAKALWEDEGVRACYERSNEYQLIDCAQYFLDKIDVIKQDDYVPSDQDLLRCRVLTSGIFETKFQVDKVNFHMFDVGGQRDERRKWIQCFNDVTAIIFVVASSSYNMVIREDNQTNRLQEALNLFKSIWNNRWLRTISVILFLNKQDLLAEKVLAGKSKIELFVLDDRLFQERPFSFIEDYFPEFARYTTPEDATPEPGEDPRVTRAKYFIRDEFLRISTASGDGRHYCYPHFTCAVDTENIRRVFNDCRDIIQRMHLRQYELL

SEQ ID NO: 8040 - protein, 188 aa, Sus scrofa
GVQACFGRSREYQLNDSAAYYLNDLERIAQSDYIPTQQDVLRTRVKTTGIVETHFTFKDLHFKMFDVGGQRSERKKWIHCFEGVTAIIFCVALSAYDLVLAEDEEMNRMHESMKLFDSICNNKWFTDTSIILFLNKKDLFEEKITHSPLTICFPEYTGANKYDEAASYIQSKFEDLNKRKDTKEIYTH

SEQ ID NO: 8041 - protein, 209 aa, Sus scrofa
KQMKIIHEAGYSEEECKQYKAVVYSNTIQSIIAIIRAMGRLKIDFGDSARADDARQLFVLAGAAEEGFMTAELAGVIKRLWKDSGVQACFNRSREYQLNDSAAYYLNDLDRIAQPNYIPTQQDVLRTRVKTTGIVETHFTFKDLHFKMFDVGGQRSERKKWILCFEGVTAIIFCVALSDYDLVLAEDEEMNRMHESMKLFDSICNNKWF

SEQ ID NO: 8042 - protein, 133 aa, Sus scrofa
DSASYYLNDVDRISQTNYIPTQQDVLRTRVKTTGIVETHFTFKDLYFKMFDVGGQRSERKKWIHCFGGVTAIIFCVALSDYDLVLAEDEEMNRMHESMKLFDSIWYNKWFTDNSIILFLNQKDLFEEKIKRSP

SEQ ID NO: 8043 - protein, 354 aa, Bos taurus
MGCTLSAEDKAAVERSKMIDRNLREDGEKAAREVKLLLLGAGESGKSTIVKQMKIIHEAGYSEEECKQYKAVVYSNTIQSIIAIIRAMGRLKIDFGDSARADDARQLFVLAGAAEEGFMTAELAGVIKRLWKDSGVQACFNRSREYQLNDSAAYYLNDLDRIAQPNYIPTQQDVLRTRVKTTGIVETHFTFKDLHFKMFDVGGQRSERKKWIHCFEGVTAIIFCVALSDYDLVLAEDEEMNRMHESMKLFDSICNNKWFTDTSIILFLNKKDLFEEKIKKSPLTICYPEYAGSNTYEEAAAYIQCQFEDLNKRKDTKEIYTHFTCATDTKNVQFVFDAVTDVIIKNNLKDCGLF

SEQ ID NO: 8044 - protein, 350 aa, Bos taurus
MGAGASAEEKHSRELEKKLKEDAEKDARTVKLLLLGAGESGKSTIVKQMKIIHQDGYSLEECLEFIAIIYGNTLQSILAIVRAMTTLNIQYGDSARQDDARKLMHMADTIEEGTMPKEMSDIIQRLWKDSGIQACFDRASEYQLNDSAGYYLSDLERLVTPGYVPTEQDVLRSRVKTTGIIETQFSFKDLNFRMFDVGGQRSERKKWIHCFEGVTCIIFIAALSAYDMVLVEDDEVNRMHESLHLFNSICNHRYFATTSIVLFLNKKDVFSEKIKKAHLSICFPDYNGPNTYEDAGNYIKVQFLELNMRRDVKEIYSHMTCATDTQNVKFVFDAVTDIIIKENLKDCGLF

SEQ ID NO: 8045 - protein, 354 aa, Bos taurus
MGSGASAEDKELAKRSKELEKKLQEDADKEAKTVKLLLLGAGESGKSTIVKQMKIIHQDGYSPEECLEYKAIIYGNVLQSILAIIRAMPTLGIDYAEVSCVDNGRQLNNLADSIEEGTMPPELVEVIRKLWKDGGVQACFDRAAEYQLNDSASYYLNQLDRITAPDYLPNEQDVLRSRVKTTGIIETKFSVKDLNFRMFDVGGQRSERKKWIHCFEGVTCIIFCAALSAYDMVLVEDDEVNRMHESLHLFNSICNHKFFAATSIVLFLNKKDLFEEKIKKVHLSICFPEYDGNNSYEDAGNYIKSQFLDLNMRKDVKEIYSHMTCATDTQNVKFVFDAVTDIIIKENLKDCGLF

SEQ ID NO: 8046 - protein, 324 aa, Bos taurus [sequence omitted]

SEQ ID NO: 8047 - protein, 354 aa, Bos taurus
MGCTLSAEERAALERSKAIEKNLKEDGISAAKDVKLLLLGAGESGKSTIVKQMKIIHEDGFSGEDVKQYKPVVYSNTIQSLAAIVRAMDTLGIEYGDKERKADAKMVCDVVSRMEDTEPFSPELLSAMMRLWGDSGIQECFNRSREYQLNDSAKYYLDSLDRIGAADYQPTEQDILRTRVKTTGIVETHFTFKNLHFRLFDVGGQRSERKKWIHCFEDVTAIIFCVALSGYDQVLHEDETTNRMHESLMLFDFICNNKFFIDTSIILFLNKKDLFGEKIKKSPLTICFPEYTGSNTYEDAAAYIQAQFESKNRSPNKEIYCHMTCATDTNNIQVVFDAVTDIIIANNLRGCGLY

SEQ ID NO: 8048 - protein, 354 aa, Bos taurus
MGCTLSAEERAALERSKAIEKNLKEDGISAAKDVKLLLLGAGESGKSTIVKQMKIIHEDGFSGEDVKQYKPVVYSNTIQSLAAIVRAMDTLGIEYGDKERKADAKMVCDVVSRMEDTEPFSPELLSAMMRLWGDSGIQECFNRSREYQLNDSAKYYLDSLDRIGAADYQPTEQDILRTRVKTTGIVETHFTFKNLHFRLFDVGGQRSERKKWIHCFEDVTAIIFCVALSGYDQVLHEDETTNRMHESLMLFDSICNNKFFIDTSIILFLNKKDLFGEKIKKSPLTICFPEYTGSNTYEDAAAYIQAQFESKNRSPNKEIYCHMTCATDTNNIQVVFDAVTDIIIANNLRGCGLY

SEQ ID NO: 8049 - protein, 354 aa, Bos taurus
MGCTLSAEERAALERSKAIEKNLKEDGISAAKDVKLLLLGAGESGKSTIVKQMKIIHEDGFSGEDVKQYKPVVYSNTIQSLAAIVRAMDTLGIEYGDKERKADAKMVCDVVSRMEDTEPFSPELLSAMMRLWGDSGIQECFNRSREYQLNDSAKYYLDSLDRIGAADYQPTEQDILRTRVKTTGIVETHFTFKNLHFRLFDVGGQRSERKKWIHCFEDVTAIIFCVALSGYDQVLHEDETTNRMHESLMLFDSICNNKFFIDISIILFLNKKDLFGEKIKKSPLTICFPEYTGSNTYEDAAAYIQAQFESKNRSPNKEIYCHMTCATDTNNIQVVFDAVTDIIIANNLRGCGLY

SEQ ID NO: 8050 - protein, 355 aa, Bos taurus
MAGCCCLSAEEKESQRISAEIERQLRRDKKDARRELKLLLLGTGESGKSTFIKQMRIIHGSGYSDEDRKGFTKLVYQNIFTAMQAMIRAMDTLKIQYVCEQNKENAQLIREVEVDKVSTLSRDQVEAIKQLWQDPGIQECYDRRREYQLSDSAKYYLTDIDRIAMPAFVPTQQDVLRVRVPTTGIIEYPFDLENIIFRMVDVGGQRSERRKWIHCFESVTSIIFLVALSEYDQVLAECDNENRMEESKALFKTIITYPWFLNSSVILFLNKKDLLEEKIMYSHLISYFPEYTGPKQDVKAARDFILKLYQDQNPDKEKVIYSHFTCATDTENIRFVFAAVKDTILQLNLREFNLV

SEQ ID NO: 8051 - protein, 359 aa, Bos taurus
MTLESMMACCLSDEVKESKRINAEIEKQLRRDKRDARRELKLLLLGTGESGKSTFIKQMRIIHGAGYSEEDKRGFTKLVYQNIFTAMQAMIRAMETLKILYKYEQNKANALLIREVDVEKVTTFEHRYVSAIKTLWNDPGIQECYDRRREYQLSDSAKYYLTDVDRIATSGYLPTQQDVLRVRVPTTGIIEYPFDLENIIFRMVDVGGQRSERRKWIHCFENVTSIMFLVALSEYDQVLVESDNENRMEESKALFRTIVTYPWFQNSSVILFLNKKDLLEDKILHSHLVDYFPEFDGPQRDAQAAREFILKMFVDLNPDSDKIIYSHFTCATDTENIRFVFAAVKDTILQLNLKEYNLV

SEQ ID NO: 8052 - protein, 353 aa, Bos taurus
MACCLSDEVKESKRINAEIEKQLRRDKRDARRELKLLLLGTGESGKSTFIKQMRIIHGAGYSEEDKRGFTKLVYQNIFTAMQAMIRAMETLKILYKYEQNKANALLIREVDVEKVTTFEHRYVSAIKTLWNDPGIQECYDRRREYQLSDSAKYYLTDVDRIATSGYLPTQQDVLRVRVPTTGIIEYPFDLENIIFRMVDVGGQRSERRKWIHCFENVTSIMFLVALSEYDQVLVESDNENRMEESKALFRTIVTYPWFQNSSVILFLNKKDLLEDKILHSHLVDYFPEFDGPQRDAQAAREFILKMFVDLNPDSDKIIYSHFTCATDTENIRFVFAAVKDTILQLNLKEYNLV

SEQ ID NO: 8053 - protein, 249 aa, Bos taurus
QLFVLAGSAEEGFMTAELAGVIKRLWKDSGVQACFNRSREYQLNDSAAYYLNDLDRIAQPNYIPTQQDVLRTRVKTTGIVETHFTFKDLHFKMFDVGGQRSERKKWIHCFEGVTAIIFCVALSDYDLVLAEDEEMNRMHESMKLFDSICNNKWFTDTSIILFLNKKDLFEEKIKKSPLTICYPEYAGSNTYEEAAAYIQCQFEDLNKRKDTKEIYTHFTCATDTNNVQFVFEAVTDVIIKNNLKDCGLF

SEQ ID NO: 8054 - protein, 388 aa, Bos taurus
MGCLGNSKTEDQRNEEKAQREANKKIEKQLQKDKQVYRATHRLLLLGAGESGKSTIVKQMRILHVNGFNGDGEKATKVQDIKNNLKEAIETIVAAMSNLVPPVELANPENQFRVDYILSVMNVPDFDFPPEFYEHAKALWEDEGVRACYERSNEYQLIDCAQYFLDKIDVIKQDDYVPSDQDLLRCRVLTSGIFETKFQVDKVNFHMFDVGGQRDERRKWIQCFNDVTAIIFVVASSSYNMVIREDNQTNRLQEALNLFKSIWNNRWLRTISVILFLNKQDLLAEKVLAGKSKIEDYFPEFARYTTPEDATPEPGEDPRVTRAKYFIRDEFLRISTASGDGRHYCYPHFTCAVDTENIRRVFNDCRDIIQRMHLRQYELLGGHHHHHH

SEQ ID NO: 8055 - protein, 380 aa, Bos taurus
MGCLGNSKTEDQRNEEKAQREANKKIEKQLQKDKQVYRATHRLLLLGAGESGKSTIVKQMRILHVNGFNGDGEKATKVQDIKNNLKEAIETIVAAMSNLVPPVELANPENQFRVDYILSVMNVPDFDFPPEFYEHAKALWEDEGVRACYERSNEYQLIDCAQYFLDKIDVIKQDDYVPSDQDLLRCRVLTSGIFETKFQVDKVNFHMFDVGGQRDERRKWIQCFNDVTAIIFVVASSSYNMVIREDNQTNRLQEALNLFKSIWNNRWLRTISVILFLNKQDLLAEKVLAGKSKIEDYFPEFARYTTPEDATPEPGEDPRVTRAKYFIRDEFLRISTASGDGRHYCYPHFTCAVDTENIRRVFNDCRDIIQRMHLRQYELL

SEQ ID NO: 8056 - protein, 173 aa, Bos taurus
DLSGVIRRLWADHGVQACFGRSREYQLNDSAAYYLNDLERIAQSDYIPTQQDVLRTRVKTTGIVETHFTFKDLHFKMFDVGGQRSERKKWIHCFEGVTAIIFCVALSAYDLVLAEDEEMNRMHESMKLFDSICNNKWFTDTSIILFLNKKDLFEEKIIHSPLTICFPEYTGAN

SEQ ID NO: 8057 - protein, 394 aa, Bos taurus
MGCLGNSKTEDQRNEEKGQREANKKIEKQLQKDKQVYRATHRLLLLGAGESGKSTIVKQMRILHVNGFNGEGGEEDPQAARSNSSGEKATKVQDIKNNLKEAIETIVAAMSNLVPPVELANPENQFRVDYILSVMNVPDFDFPPEFYEHAKALWEDEGVRACYERSNEYQLIDCAQYFLDKIDVIKQDDYVPSDQDLLRCRVLTSGIFETKFQVDKVNFHMFDVGGQRDERRKWIQCFNDVTAIIFVVASSSYNMVIREDNQTNRLQEALNLFKSIWNNRWLRTISVILFLNKQDLLAEKVLAGKSKIEDYFPEFARYTTPEDATPEPGEDPRVTRAKYFIRDEFLRISTASGDGRHYCYPHSTCAVDTENIRRVFNDCRDIIQRMHLRQYELL

SEQ ID NO: 8058 - protein, 394 aa, Bos taurus
MGCLGNSKTEDQRNEEKAQREANKKIEKQLQKDKQVYRATHRLLLLGAGESGKSTIVKQMRILHVNGFNGEGGEEDPQAARSNSDGEKATKVQDIKNNLKEAIETIVAAMSNLVPPVELANPENQFRVDYILSVMNVPDFDFPPEFYEHAKALWEDEGVRACYERSNEYQLIDCAQYFLDKIDVIKQDDYVPSDQDLLRCRVLTSGIFETKFQVDKVNFHMFDVGGQRDERRKWIQCFNDVTAIIFVVASSSYNMVIREDNQTNRLQEALNLFKSIWNNRWLRTISVILFLNKQDLLAEKVLAGKSKIEDYFPEFARYTTPEDATPEPGEDPRVTRAKYFIRDEFLRISTASGDGRHYCYPHFTCAVDTENIRRVFNDCRDIIQRMHLRQYELL

SEQ ID NO: 8059 - protein, 402 aa, Bos taurus
MGCLGNSKTEDQRNEEKAQREANKKIEKQLQKDKQVYRATHRLLLLGAGESGKSTIVKQMRILHVNGFNGGEGGEEDPNAKSNSDGEKATKVQDIKNNLKEAIETIVAAMSNLVPPVELANPENQFRVDYILSVMNVPDFDFPPEFYEHAKALWEDEGVRACYERSNEYQLIDCAQYFLDKIDVIKQDDYVPSDQDLLRCRVLTSGIFETKFQVDKVNFHMFDVGGQRDERRKWIQCFNDVTAIIFVVASSSYNMVIREDNQTNRLQEALNLFKSIWNNRWLRTISVILFLNKQDLLAEKVLAGKSKIEDYFPEFARYTTPEDATPEPGEDPRVTRAKYFIRDEFLRISTASGDGRHYCYPHFTCAVDTENIRRVFNDCRDIIQRMHLRQYELLGGHHHHHH

SEQ ID NO: 8060 - protein, 104 aa, Bos taurus
VPANDSAAYYLNDLERIAQSDYIPTQQDVLGTRVKTTGIVKTHFTFKDLHFKMFDVGGHGSERKKWIHCFEGVTAIIFCVALSAYDLVLTDVIIKNNLRNCGLF

SEQ ID NO: 8061 - protein, 374 aa, Oryctolagus cuniculus
MARSLAWRCCPWCLSEDEKAAARVDQEITRLLLEHRRQVRGELKLLLLGTGESGKSTFIKQMRIIHGAGYSEEDRKGFRPLVFQNIFLSVQAIIEAMDRLQIPYSRPESKLHASLVMSQDPYKVNTFETRYALAVQSLWRDAGVRACYERRREFHLLDSAVYYLSHLERIAEEGYVPTAQDVLRSRMPTTGINEYCFSVQKTNLRIVDVGGQKSERRKWIHCFEDVTALIFLASLSEYDQCLEENGQENRMQESLALFGTVLALPWFRATSVILFLNKTDILEDKVRTSHLATYFPGFRGPPQDPEAAKRFILELYTRVYAGAAAGPDGASKGPRSRRLFSHYTCATDTQNIRKVFKDVRDSVLARYLDEINLL

SEQ ID NO: 8062 - protein, 386 aa, Oryctolagus cuniculus
MEDEAQRGEGQGEANKKIEKQLQKDKQVYRATHRLLLLGAGESGKSTIVKQMRILHVNGFNGEGGEEDAQAARSNSDGEKATKVQDIKNNLKEAIETIVAAMSNLVPPVDLANPENQFRVDYILSVMNVPDFDFPPEFYEHAKALWEDEGVRACYERSNEYQLIDCAQYFLDKIDVIKQADYVPSDQDLLRCRVLTSGIFETKFQVDKVNFHMFDVGGQRDERRKWIQCFNDVTAIIFVVASSSYNMVIREDNQTNRLQEALNLFKSIWNNRCLRTISVILFLNKQDLLAEKVLAGKSKIEDYFPEFARYTTPEDATPEPGEDPRVTRAKYFIRDEFLRISTASGDGRHYCYPHFTCAVDTENIRRVFNDCRDIIQRMHLRQYELL

SEQ ID NO: 8063 - protein, 335 aa, Oryctolagus cuniculus
MRILHVNGFNGEGGEEDAQAARSNSDGEKATKVQDIKNNLKEAIETIVAAMSNLVPPVDLANPENQFRVDYILSVMNVPDFDFPPEFYEHAKALWEDEGVRACYERSNEYQLIDCAQYFLDKIDVIKQADYVPSDQDLLRCRVLTSGIFETKFQVDKVNFHMFDVGGQRDERRKWIQCFNDVTAIIFVVASSSYNMVIREDNQTNRLQEALNLFKSIWNNRCLRTISVILFLNKQDLLAEKVLAGKSKIEDYFPEFARYTTPEDATPEPGEDPRVTRAKYFIRDEFLRISTASGDGRHYCYPHFTCAVDTENIRRVFNDCRDIIQRMHLRQYELL

SEQ ID NO: 8064 - protein, 100 aa, Arabidopsis thaliana
MEAGSSNSSGQLSGRVVDTRGKHRIQAELKRLEQEARFLEEELEQLEKMDNASASCKEFLDSVDSKPDPLLPETTGPVNATWDQWFEGPKEAKRCGCSIL

SEQ ID NO: 8065 - protein, 98 aa, Arabidopsis thaliana
MREETVVYEQEESVSHGGGKHRILAELARVEQEVAFLEKELKEVENTDIVSTVCEELLSVIEKGPDPLLPLTNGPLNLGWDRWFEGPNGGEGCRCLIL

SEQ ID NO: 8066 - protein, 138 aa, Arabidopsis thaliana
MEGKSRFESERERLRRQFKLVRTKTRLSLTLSDLRPASERMREETVVYEQEESVSHGGGKHRILAELARVEQEVAFLEKELKEVENTDIVSTVCEELLSVIEKGPDPLLPLTNGPLNLGWDRWFEGPNGGEGCRCLIL

SEQ ID NO: 8067 - protein, 890 aa, Streptomyces coelicolor A3(2)
MEAVSVPAVLLPVRAALPVLTRARARANGHRASVFWGAVAVEALHLVARGLLLPGLSAAEHDAWRVGPLDAEGTERVRHLAAAMPPEAHAVPVGGAGPLRLPDPEPLVRSFLDAVADTLPRSPAAELLTAGPAYASWAPRPSPELRGWALDVAAGHDTGVRLSLRVEVRGLSAAGPQNARPTFRAVPQVHSVSDPGLVADTAQVWGGTVGEAFGTRARMDALLALRRAARAWPSLTPLLSATVPDAVELTDEEITELLGAGSRALAAAGVDVHWPRELARDLTERAEVGPPDGSRASRAAGPEAGPSFLSADALLAFNWTFALGDRTLTREELDLLAEANRPLVRLRDQWVLVDPEEAHRARARQDHKVTPVDALAAALTGSAEVDGHRVEVRPTGWLASVRERLADPETQEPVAQPEALDATLRDYQRRGLNWLARMTSLGLGCCLADDMGLGKTITLIALHLHRQSDAEAAGPTLVVCPTSLMGNWQREIERFAPGTPVRRFHGPRRDLDGLADGEFVLTTYGTMRLDAERLSAVSWGMVVADEAQHVKNPYSETARRLRSIGARARVALTGTPVENNLSELWAVLDWTTPGLLGRLGSFRRHYAQAVEEGQDPAAAERLARLVRPFLLRRRKSDPGIAPELPPKTETDHPVSLTTEQTGLYEAVVREALAEIAGADHMARRGMIVKLLTNLKQICNHPAQFLKEDRPKITGRSGKLELLDELLDTILSEQASVLVFTQYVQMARLLEQHLAARGVSSLFLHGGTSVTARESLVRRFQDGDAPVFLLSLKAAGTGLNLTRAEHVVHYDRWWNPAVEAQATDRAYRIGQTRPVQVHRLIAEGTIEDRIAALLNRKRELADAVLGSGEAALTELTDAELADLVELRGGTR

SEQ ID NO: 8068 - protein, 977 aa, Streptomyces coelicolor A3(2)
MGDMAVTEAGRAGATTASVPVGLAAVFLPAPLPREGRIAFWNPDGGPVDAAEDFGGAAAGDGRGHGDGERSGGPTELTVVRRHGAGVRRGTAPALSLPLAEALPHLVRARHDRAAHPATACWGAAALHALRLTARGRLLPGLTPTGHDAWRAGPLDPDDIAHLRAVAAALPPEGHAVPLDGPGPIRLPEPEALVRAFLDAVADTLPRTPAAPHASGRPFAAREARRLPDAHDWAAEVAAGMDAGVRISLRLDLSAYDLFDREGEGAPGSGSEGVGARNAGAAVVQVHSLADPTLVADAADLWSGTADAAFGARTRVDTALAVRRAARVWPPLDRLTDQDVPDVLALSEEEVTDLLGVAAGRLAAAGVAVHWPRDLAQDLTATAVIRTAPGSATDGTGFFESEDLLQFRWQLAIGGDPLTEAEMDTLAEAHRPVVRLRDRWVLVDPALVRRARKRDLGLLDPVDALSVALTGSAETDGETVEVVPVGALAALRDRLTAGVRPAEAPPGLHATLRDYQLRGLAWLDLMTSLGLGGCLADDMGLGKTVTVIALHLRRARTEPTLVVCPASLLGNWQREINRFAPGVPVRRFHGPDRTLDDLTGGFVLTTYGTMRSAATTLAEQPWGMVVADEAQHVKNPYSATAKALRTIPSPARVALTGTPVENNLSELWALLDWTTPGLLGPLKSFRARHARAVENGEDDQAVERLARLIRPFLLRRRKSDPGIVPELPPKTETDHPVPLTREQAALYEAVVRESMLAIEEAEGIGRRGLVLKLLTSLKQICDHPALFLKEEHPPGGTDRMTARSGKLALLDELLDTVLAEDGSVLVFTQYVGMARLITSHLAARAVPVDLLHGGTPVPERERMVDRFQSGATPVLVLSLKAAGTGLNLTRAGHVVHFDRWWNPAVEEQATDRAYRIGQTQPVQVHRLITEGTVEDRIAEMLQSKRALADAILGSGESALTELTARELSDLVSLRRPS

SEQ ID NO: 8069 - protein, 800 aa, Streptomyces coelicolor A3(2)
MVPILPAVVSLGGEWLPRGSVDQQGAVNARRGPVWAVERCGEGQRGAGSVGRGERDTVARGTRLYEAAQAVVGDHARAVEAVRAALKPIHDEAVKRELDAIPVARLQDVTEGRLRLGSVEKSGLRTLGRVLEAGPYRLRQIPGVGQRTVDQILAAARRLSEAVHETVAVHIDVDRPEPRTTALVMALHVLVEAGPEARRAVDKATVLTERLGPLLADAGPAAGRVRMLLAGREKKARAWAAVAATRSLVDEAEQAGLPGLLAQASVDLLRGTASDVAAWVDFELRSAEYYSLLAEISGRPPDAAAVEGFLPDEVAERVRTQHLDDTHRRVSLRGYQAFGARFALAQRKVILGDEMGLGKTIQAIAVLAHLAAEGQSHFMVVCPASVLVNWTREIEARSALRVMVLHGPDRHYAFADWKGRGGVGVTTFDALRGFPAPGGGEVGLLVVDEAHSVKNPKAKRSQAVGLWAERCERTLFMTGTPMENRVAEFRNLVQMLDGDVADSLGERDALAGSVTFRKAVAPVYLRRNQEDVLTELPSLQQTDEWEELSASDEEAYREAVRAGNFMAMRRAAYMSSGNSAKLERLREIVQEAGENGQKTVVFSNFKDVLAVVKEALAVETTRVTPVFGPLTGGVPAQRRQEIVDDFAGVQGPAVLLGQIQAAGVGLNMQAASVVVICEPQIKPTIEHQAVARAHRMGQVRPVRVHRLLATGGVDERMVKMLEAKTRLFDAYARRSAVAEATPDAVDVSDTELARRIVEEEQARLGMTDERPTSSEWGVPRSAASPQDPLNGRRESTNANE

SEQ ID NO: 8070 - protein, 1051 aa, Mus musculus
MSSAVEPPPPPPPESAPSKPSAAGAGGSSSGNKGGPEGGAAPAAPCAAGSGPADTEMEEVFDHGSPGKQKEIQEPDPTYEEKMQTDRANRFEYLLKQTELFAHFIQPAAQKTPTSPLKMKPGRPRVKKDEKQNLLSVGDYRHRRTEQEEDEELLTESSKATNVCTRFEDSPSYVKWGKLRDYQVRGLNWLISLYENGINGILADEMGLGKTLQTISLLGYMKHYRNIPGPHMVLVPKSTLHNWMSEFKKWVPTLRSVCLIGDKEQRAAFVRDVLLPGEWDVCVTSYEMLIKEKSVFKKFNWRYLVIDEAHRIKNEKSKLSEIVREFKTTNRLLLTGTPLQNNLHELWSLLNFLLPDVFNSADDFDSWFDTNNCLGDQKLVERLHMVLRPFLLRRIKADVEKSLPPKKEVKIYVGLSKMQREWYTRILMKDIDILNSAGKMDKMRLLNILMQLRKCCNHPYLFDGAEPGPPYTTDMHLVTNSGKMVVLDKLLPKLKEQGSRVLIFSQMTRVLDILEDYCMWRNYEYCRLDGQTPHDERQDSINAYNEPNSTKFVFMLSTRAGGLGINLATADVVILYDSDWNPQVDLQAMDRAHRIGQTKTVRVFRFITDNTVEERIVERAEMKLRLDSIVIQQGRLVDQNLNKIGKDEMLQMIRHGATHVFASKESEITDEDIDGILERGAKKTAEMNEKLSKMGESSLRNFTMDTESSVYNFEGEDYREKQKIAFTEWIEPPKRERKANYAVDAYFREALRVSEPKAPKAPRPPKQPNVQDFQFFPPRLFELLEKEILYYRKTIGYKVPRSPDLPNAAQAQKEEQLKIDEAEPLNDEELEEKEKLLTQGFTNWNKRDFNQFIKANEKWGRDDIENIAREVEGKTPEEVIEYSAVFWERCNELQDIEKIMAQIERGEARIQRRISIKKALDTKIGRYKAPFHQLRISYGTNKGKNYTEEEDRFLICMLHKLGFDKENVYDELRQCIRNSPQFRFDWFLKSRTAMELQRRCNTLITLIERENMELEEKEKAEKKKRGPKPSTQKRKMDGAPDGRGRKKKLKL

SEQ ID NO: 8071 - protein, 995 aa, Mus musculus
MEEVFDHGSPGKQKEIQEPDPTYEEKMQTDRANRFEYLLKQTELFAHFIQPAAQKTPTSPLKMKPGRPRVKKDEKQNLLSVGDYRHRRTEQEEDEELLTESSKATNVCTRFEDSPSYVKWGKLRDYQVRGLNWLISLYENGINGILADEMGLGKTLQTISLLGYMKHYRNIPGPHMVLVPKSTLHNWMSEFKKWVPTLRSVCLIGDKEQRAAFVRDVLLPGEWDVCVTSYEMLIKEKSVFKKFNWRYLVIDEAHRIKNEKSKLSEIVREFKTTNRLLLTGTPLQNNLHELWSLLNFLLPDVFNSADDFDSWFDTNNCLGDQKLVERLHMVLRPFLLRRIKADVEKSLPPKKEVKIYVGLSKMQREWYTRILMKDIDILNSAGKMDKMRLLNILMQLRKCCNHPYLFDGAEPGPPYTTDMHLVTNSGKMVVLDKLLPKLKEQGSRVLIFSQMTRVLDILEDYCMWRNYEYCRLDGQTPHDERQDSINAYNEPNSTKFVFMLSTRAGGLGINLATADVVILYDSDWNPQVDLQAMDRAHRIGQTKTVRVFRFITDNTVEERIVERAEMKLRLDSIVIQQGRLVDQNLNKIGKDEMLQMIRHGATHVFASKESEITDEDIDGILERGAKKTAEMNEKLSKMGESSLRNFTMDTESSVYNFEGEDYREKQKIAFTEWIEPPKRERKANYAVDAYFREALRVSEPKAPKAPRPPKQPNVQDFQFFPPRLFELLEKEILYYRKTIGYKVPRSPDLPNAAQAQKEEQLKIDEAEPLNDEELEEKEKLLTQGFTNWNKRDFNQFIKANEKWGRDDIENIAREVEGKTPEEVIEYSAVFWERCNELQDIEKIMAQIERGEARIQRRISIKKALDTKIGRYKAPFHQLRISYGTNKGKNYTEEEDRFLICMLHKLGFDKENVYDELRQCIRNSPQFRFDWFLKSRTAMELQRRCNTLITLIERENMELEEKEKAEKKKRGPKPSTQKRKMDGAPDGRGRKKKLKL

SEQ ID NO: 8072 - protein, 1051 aa, Mus musculus
MSSAVEPPPPPPPESAPSKPSAAGAGGSSSGNKGGPEGGAAPAGSCAAGSGPADTEMEEVFDHGSPGKQKEIQEPDPTYEEKMQTDRANRFEYLLKQTELFAHFIQPAAQKTPTSPLKMKPGRPRVKKDEKQNLLSVGDYRHCRTEQEEDEELLTERSKATNVCTRFEDSPSYVKWGKLRDYQVRGLNWLISLYENGINGILADEMGLGKTLQTISLLGYMKHYRNIPGPHMVLVPKSTLHNWMSEFKRWVPTLRSVCLIGDKEQRAAFVRDVLLPGEWDVCVTSYEMLIKEKSVFKKFNWRYLVIDEAHRIKNEKSNLSEIVREFKTTNRLLLTGTPLQNNLHELWSLLNFLLPDVFNSADDFDSWFDTNNSLGDQKLVERLHMVLRPFLLRRIKADVEKSLPPKKEVKIYVGLSKMQREWYTRILMKDIDILNSAGKMDKMRLLNILMQLRKCCNHPYLFDGAEPGPPYTTDMHLVTNSGKMVVLDKLLPKLKEQSSRVLIFSQMTRVLDILEDYCMWRNYEYCRLDGQTPHDERQDSINAYNEPNSTKFVFMLSTRAGGLGINLATADVVILYDSDWNPQVDLQAMDRAHRIGQTKTVRVFRFITDNTVEERIVERAEMKLRLDSIVIQQGRLVDQNLNKIGKDEMLQMIRHGATHVFASKESEITDEDIDGILERGAKKTAEMNEKLSKMGESSLRNFTMDTESSVYNFEGEDYREKQKIAFTEWIEPPKRERKANYAVDAYFREALRVSEPKAPKAPRPPKQPNVQDFQFFPPRLFELLEKEILYYRKTIGYKVPRSPDLPNAAQAQKEEQLKIDEAEPLNDEELEEKEKLLTQGFTNWNKRDFNQFIKANEKWGRDDIENIAREVEGKTPEEVIEYSAVFWERCNELQDIEKIMAQIERGEARIQRRISIKKALDTKIGRYKAPFHQLRISYGTNKGKNYTEEEDRFLICMLHKLGFDKENVYDELRQCIRNSPQFRFDWFLKSRTAMELQRRCNTLITLIERENMELEEKEKAEKKKRGPKPSTQKRKMDGAPDGRGRKKKLKL

SEQ ID NO: 8073 - protein, 1064 aa, Mus musculus
MEPDTATEAATVAVSDARATVVVVEDEQPGPSTFKEEGAAAAATEGTTATEKAEKKEKITFSISTQTCLLKLSKSEKEMDPEYEEKMVNMPLKAARAKRFEFLLKQTELFAHFIQPSAQKSPTSPLNMKLARPRVKKDDKQSLISVGDYRHRRTEQEEDEELLSESRKTSNVCVRFEVSPSYVKGGPLRDYQIRGLNWLISLYENGVNGILADEMGLGKTLQTIALLGYLKHYRNIPGPHMVLVPKSTLHNWMNEFKRWVPSLRVICFVGDKDVRAAFIRDEMMPGEWDVCVTSYEMVIKEKSVFKKFHWRYLVIDEAHRIKNEKSKLSEIVREFKSTNRLLLTGTPLQNNLHELWALLNFLLPDVFNSADDFDSWFDTKNCLGDQKLVERLHAVLKPFLLRRIKTDVEKSLPPKKEIKIYLGLSKMQREWYTKILMKDIDVLNSSGKMDKMRLLNILMQLRKCCNHPYLFDGAEPGPPYTTDEHIVGNSGKMVALDKLLARIKEQGSRVLIFSQMTRLLDILEDYCMWRGYEYSRLDGQTPHEEREEAIDAFNAPNSSKFIFMLSTRAGGLGINLASADVVILYDSDWNPQVDLQAMDRAHRIGQKKPVRVFRLITDNTVEERIVERAEIKLRLDSIVIQQGRLIDQQSNKLAKEEMLQMIRHGATHVFACKESELTDEDIVTILERGEKKTAEMNERMQKMGESSLRNFRMDLEQSLYKFEGEDYREKQKLGTVEWIEPPKRERKANYAVDAYFREALRVSEPKIPKAPRPPKQPNVQDFQFFPPRLFELLEKEILYYRKTIGYKVPRNPEIPNPAIAQREEQKKIDGAEPLTPQETEEKDKLLHTRFHKLGLKRDFNQFIKANEKYGRDDIDNIAREVEGKSPEEVMEYSAVFWERCNELQDIEKIMAQIERGEARIQRRISIKKALDAKIARYKAPFHQLRIQYGTSKGKNYTEEEDRFLICMLHKMGFDRENVYEELRQCVRNAPQFRFDWFIKSRTAMEFQRRCNTLISLIEKENMEIEERERAEKKKRATKTPMSQKRKAESATESSGRKDVKKVKS

SEQ ID NO: 8074 - protein, 1046 aa, Mus musculus
MEPDTATEAATVAVSDARATVVVVEDEQPGPSTFKEEGAAAAATEGTTATEKGEKKEKITSPFQLKLAAKASKSEKEMDPEYEEKMVNMPLKADRAKRFEFLLKQTELFAHFIQPSAQKSPTSPLNMKLARPRVKKDDKQSLISVGDYRHRRTEQEEDEELLSESRKTSNVCVRFEVSPSYVKGGPLRDYQIRGLNWLISLYENGVNGILADEMGLGKTLQTIALLGYLKHYRNIPGPHMVLVPKSTLHNWMNEFKRWVPSLRVICFVGDKDVRAAFIRDEMMPGEWDVCVTSYEMVIKEKSVFKKFHWRYLVIDEAHRIKNEKSKLSEIVREFKSTNRLLLTGTPLQNNLHELWALLNFLLPDVFNSADDFDSWFDTKNCLGDQKLVERLHAVLKPFLLRRIKTDVEKSLPPKKEIKIYLGLSKMQREWYTKILMKDIDVLNSSGKMDKMRLLNILMHLRKCCNHPYLFDGAEPGPPYTTDEHIVGNSGKMVALDKLLARIKEQGSRVLIFSQMTRLLDILEDYCMWRGYEYSRLDGQTPHEEREEAIDAFNAPNSSKFIFMLSTRAGGLGINLASADVVILYDSDWNPQVDLQAMDRAHRIGQKKPVRVFRLITDNTVEERIVERAEIKLRLDSIVIQQGRLIDQQSNKLAKEEMLQMIRHGATHVFACKESELTDEDIVTILERGEKKTAEMNERMQKMGESSLRNFRMDLEQSLYKFEGEDYREKQKLGTVEWIEPPKRERKANYAVDAYFREALRVSEPKIPKAPRPPKQPNVQDFQFFPPRLFELLEKEILYYRKTIGYKVPRNPEIPNPAIAQREEQKKIDGAEPLTPQETEEKDKLLTQGFTNWTKRDFNQFIKANEKYGRDDIDNIAREVEGKSPEEVMEYSAVFWERCNELQDIEKIMAQIERGEARIQRRISIKKALDAKIARYKAPFHQLRIQYGTSKGKNYTEEEDRFLICMLHKMGFDRENVYEELRQCVRNAPQFRFDWFIKSRTAMEFQRRCNTLISLIEKENMEIEERERAEKKKRATKTPMVKFSAFS

SEQ ID NO: 8075 - protein, 594 aa, Mus musculus
YKIPVPINAELRKYQQDGVNWLAFLNKYKLHGILCDDMGLGKTLQSICILAGDHCQRAQEYARSKLAECMPLPSLVVCPPTLTGHWVDEVGKFCSREYLNPLHYTGPPTERIRLQHQVKRHNLIVASYDVVRNDIDFFRNIKFNYCILDEGHVIKNGKTKLSKAVKQLTANYRIILSGTPIQNNVLELWSLFDFLMPGFLGTERQFAARYGKPILASRDARSSSREQEAGVLAMDALHRQVLPFLLRRMKEDVLQDLPPKIIQDYYCTLSPLQVQLYEDFAKSRAKCDVDETVSSAALSEETEKPKLKATGHVFQALQYLRKLCNHPALVLTPQHPEFKSTTEKLTVQNSSLHDIQHAPKLSALKQLLLDCGLGNGSSTESGTESVVAQHRILIFCQLKSMLDIVEHDLLKPHLPSVTYLRLDGSIPPGQRHSIVSRFNNDPSIDVLLLTTHVGGLGLNLTGADTVVFVEHDWNPMRDLQAMDRAHRIGQKRVVNVYRLITRGTLEEKIMGLQKFKMNIANTVISQENSSLQSMGTDQLLDLFTLDKDGKAEKADSSTSGKASMKSVLENLSDLWDAEQYDSEYNLETFMRSLE

SEQ ID NO: 8076 - protein, 1045 aa, Mus musculus
PIRKAKTKEGKGPNARRKPKGSPRVPDAKKPKPKKVAPLKIKLGGFGSKRKRSSSEDDDLDVESDFDDASINSYSVSDGSTSRSSRSRKKLRTAKKKKKGEEEVTAVDGYETDHQDYCEVCQQGGEIILCDTCPRAYHMVCLDPDMEKAPEGKWSCPHCEKEGIQWEAKEDNSEGEEILEEVGGDPEEEDDHHMEFCRVCKDGGELLCCDTCPSSYHIHCLNPPLPEIPNGEWLCPRCTCPALKGKVQKILIWKWGQPPSPTPVPRPPDADPNTPSPKPLEGRPERQFFVKWQGMSYWHCSWVSELQLELHCQVMFRNYQRKNDMDEPPSGDFGGDEEKSRKRKNKDPKFAEMEERFYRYGIKPEWMMIHRILNHSVDKKGHVHYLIKWRDLPYDQASWESEDVEIQDYDLFKQSYWNHRELMRGEEGRPGKKLKKVKLRKLERPPETPTVDPTVKYERQPEYLDATGGTLHPYQMEGLNWLRFSWAQGTDTILADEMGLGKTVQTAVFLYSLYKEGHSKGPFLVSAPLSTIINWEREFEMWAPDMYVVTYVGDKDSRAIIRENEFSFEDNAIRGGKKASRMKKEASVKFHVLLTSYELITIDMAILGSIDWACLIVDEAHRLKNNQSKFFRVLNGYSLQHKLLLTGTPLQNNLEELFHLLNFLTPERFHNLEGFLEEFADIAKEDQIKKLHDMLGPHMLRRLKADVFKNMPSKTELIVRVELSPMQKKYYKYILTRNFEALNARGGGNQVSLLNVVMDLKKCCNHPYLFPVAAMEAPKMPNGMYDGSALIRASGKLLLLQKMLKNLKEGGHRVLIFSQMTKMLDLLEDFLEHEGYKYERIDGGITGNMRQEAIDRFNAPGAQQFCFLLSTRAGGLGINLATADTVIIYDSDWNPHNDIQAFSRAHRIGQNKKVMIYRFVTRASVEERITQVAKKKMMLTHLVVRPGLGSKTGSMSKQELDDILKFGTEELFKDEATDGGGDNKEGEDSSVIHYDDKAIERLLDRNQDETEDTELQGMNEYLSSFKVAQYVVREEEMGEEEEVER

SEQ ID NO: 8077 - protein, 1617 aa, Mus musculus
MSTPDPPLGGTPRPGPSPGPGPSPGAMLGPSPGPSPGSAHSMMGPSPGPPSAGHPMPTQGPGGYPQDNMHQMHKPMESMHEKGMPDDPRYNQMKGMGMRSGAHTGMAPPPSPMDQHSQGYPSPLGGSEHASSPVPASGPSSGPQMSSGPGGAPLDGSDPQALGQQNRGPTPFNQNQLHQLRAQIMAYKMLARGQPLPDHLQMAVQGKRPMPGMQQQMPTLPPPSVSATGPGPGPGPGPGPGPGPAPPNYSRPHGMGGPNMPPPGPSGVPPGMPGQPPGGPPKPWPEGPMANAAAPTSTPQKLIPPQPTGRPSPAPPAVPPAASPVMPPQTQSPGQPAQPAPLVPLHQKQSRITPIQKPRGLDPVEILQEREYRLQARIAHRIQELENLPGSLAGDLRTKATIELKALRLLNFQRQLRQEVVVCMRRDTALETALNAKAYKRSKRQSLREARITEKLEKQQKIEQERKRRQKHQEYLNSILQHAKDFREYHRSVTGKLQKLTKAVATYHANTEREQKKENERIEKERMRRLMAEDEEGYRKLIDQKKDKRLAYLLQQTDEYVANLTELVRQHKAAQVAKEKKKKKKKKKAENAEGQTPAIGPDGEPLDETSQMSDLPVKVIHVESGKILTGTDAPKAGQLEAWLEMNPGYEVAPRSDSEESGSEEEEEEEEEEQPQPAQPPTLPVEEKKKIPDPDSDDVSEVDARHIIENAKQDVDDEYGVSQALARGLQSYYAVAHAVTERVDKQSALMVNGVLKQYQIKGLEWLVSLYNNNLNGILADEMGLGKTIQTIALITYLMEHKRINGPFLIIVPLSTLSNWAYEFDKWAPSVVKVSYKGSPAARRAFVPQLRSGKFNVLLTTYEYIIKDKHILAKIRWKYMIVDEGHRMKNHHCKLTQVLNTHYVAPRRLLLTGTPLQNKLPELWALLNFLLPTIFKSCSTFEQWFNAPFAMTGEKVDLNEEETILIIRRLHKVLRPFLLRRLKKEVEAQLPEKVEYVIKCDMSALQRVLYRHMQAKGVLLTDGSEKDKKGKGGTKTLMNTIMQLRKICNHPYMFQHIEESFSEHLGFTGGIVQGLDLYRASGKFELLDRILPKLRATNHKVLLFCQMTSLMTIMEDYFAYRGFKYLRLDGTTKAEDRGMLLKTFNEPGSEYFIFLLSTRAGGLGLNLQSADTVIIFDSDWNPHQDLQAQDRAHRIGQQNEVRVLRLCTVNSVEEKILAAAKYKLNVDQKVIQAGMFDQKSSSHERRAFLQAILEHEEQDEEEDEVPDDETVNQMIARHEEEFDLFMRMDLDRRREEARNPKRKPRLMEEDELPSWIIKDDAEVERLTCEEEEEKMFGRGSRHRKEVDYSDSLTEKQWLKTLKAIEEGTLEEIEEEVRQKKSSRKRKRDSEAGSSTPTTSTRSRDKDEESKKQKKRGRPPAEKLSPNPPNLTKKMKKIVDAVIKYKDSSSGRQLSEVFIQLPSRKELPEYYELIRKPVDFKKIKERIRNHKYRSLNDLEKDVMLLCQNAQTFNLEGSLIYEDSIVLQSVFTSVRQKIEKEDDSEGEESEEEEEGEEEGSESESRSVKVKIKLGRKEKAQDRLKGGRRRPSRGSRAKPVVSDDDSEEEQEEDRSGSGSEED

SEQ ID NO: 8078 - protein, 900 aa, Mus musculus
MASGLPRFLQALPAEHGPEPLRTRVQEPDLQQWGLTGIRLRSYQLEGVNWLVQCFHCQNGCILGDEMGLGKTCQTIALLIYLVGRLNDEGPFLVLCPLSVLSNWKEEMERFAPGLSCVTYTGDKEERARLQQDLRQESGFHVLLTTYEICLKDASFLKSFSWSVLAVDEAHRLKNQSSLLHRTLSEFSAVFRLLLTGTPIQNSLRELYSLLCVVEPDLFCREQVEDFVQRYQDIEKESKSASELHRLLQPFLLRRVKAQVATELPKKTEVVVYHGMSALQKKYYKAILMKDLDAFENETAKKVKLQNILTQLRKCVDHPYLFDGVEPEPFEVGEHLIEASGKLHLLDRLLAFLYSGGHRVLLFSQMTHMLDILQDYMDYRGYSYERVDGSVRGEERHLAIKNFGNQPIFVFLLSTRAGGVGMNLTAADTVIFVDSDFNPQNDLQAAARAHRIGQNKSVKVIRLIGRDTVEEIVYRKAASKLQLTNMVIEGGHFTPGAQKPSAEADFQLSEILKFGLDKLLSSEGSSMEDIDLKSILGETKDGQWTPDALPAAAAAGGGSLEPEEGSELESRSYENHMYLFEGRDYSKEPSKEDRKSFEQLVNLQKTLLEKTSHGGRTLRNKGSVLIPGLAEGPIKRKKILSPEELEDRRKKRQEAAAKRKRLMEEKRKEKEEAEHRKKMAWWESNGYQSFCLSSEDSELEDLEGGDESSAELAYEDLDSTSINYVSGDVTHPQAGEEDAVIVHCVDDSGRWGRGGLFTALEVRSAEPRKIYELAGKMEDLSLGDVLLFPIDDKESRDKGQDLLALVVAQHRDRTNVLSGIKMAALEEGLKKIFLAAKKKKASVHLPRIGHATKGFNWYGTERLIRKHLATRGIPTYIYYFPRSKARHSQPASSSSAPLVP

SEQ ID NO: 8079 - protein, 557 aa, Mus musculus
MGLGKTLQSICILAGDHCQRAQEYARSKLAECMPLPSLVVCPPTLTGHWVDEVGKFCSREYLNPLHYTGPPTERIRLQHQVKRHNLIVASYDVVRNDIDFFRNIKFNYCILDEGHVIKNGKTKLSKAVKQLTANYRIILSGTPIQNNVLELWSLFDFLMPGFLGTERQFAARYGKPILASRDARSSSREQEAGVLAMDALHRQVLPFLLRRMKEDVLQDLPPKIIQDYYCTLSPLQVQLYEDFAKSRAKCDVDETVSSAALSEETEKPKLKATGHVFQALQYLRKLCNHPALVLTPQHPEFKSTTEKLTVQNSSLHDIQHAPKLSALKQLLLDCGLGNGSSTESGTESVVAQHRILIFCQLKSMLDIVEHDLLKPHLPSVTYLRLDGSIPPGQRHSIVSRFNNDPSIDVLLLTTHVGGLGLNLTGADTVVFVEHDWNPMRDLQAMDRAHRIGQKRVVNVYRLITRGTLEEKIMGLQKFKMNIANTVISQENSSLQSMGTDQLLDLFTLDKDGKAEKADSSTSGKASMKSVLENLSDLWDAEQYDSEYNLETFMRSLE

SEQ ID NO: 8080 - protein, 1081 aa, Mus musculus
MNGHSDEESVRNGSGESSQSGDDCGSASGSGSGSSSGSSSDGSSSQSGSSDSDSGSDSGSQSESESDTSRENKVQAKPPKVDGAEFWKSSPSILAVQRSAMLRKQPQQAQQQRPASSNSGSEEDSSSSEDSDDSSSGAKRKKHNDEDWQMSGSGSPSQSGSDSESEEERDKSSCDGTESDYEPKNKVRSRKPQNRSKSKNGKKILGQKKRQIDSSEDEDDEDYDNDKRSSRRQATVNVSYKEDEEMKTDSDDLLEVCGEDVPQPEDEEFETIERVMDCRVGRKGATGATTTIYAVEADGDPNAGFERNKEPGDIQYLIKWKGWSHIHNTWETEETLKQQNVRGMKKLDNYKKKDQETKRWLKNASPEDVEYYNCQQELTDDLHKQYQIVERIIAHSNQKSAAGLPDYYCKWQGLPYSECSWEDGALISKKFQTCIDEYFSRNQSKTTPFKDCKVLKQRPRFVALKKQPSYIGGHEGLELRDYQLNGLNWLAHSWCKGNSCILADEMGLGKTIQTISFLNYLFHEHQLYGPFLLVVPLSTLTSWQREIQTWASQMNAVVYLGDINSRNMIRTHEWMHPQTKRLKFNILLTTYEILLKDKAFLGGLNWAFIGVDEAHRLKNDDSLLYKTLIDFKSNHRLLITGTPLQNSLKELWSLLHFIMPEKFSSWEDFEEEHGKGREYGYASLHKELEPFLLRRVKKDVEKSLPAKVEQILRMEMSALQKQYYKWILTRNYKALSKGSKGSTSGFLNIMMELKKCCNHCYLIKPPDNNEFYNKQEALQHLIRSSGKLILLDKLLIRLRERGNRVLIFSQMVRMLDILAEYLKYRQFPFQRLDGSIKGELRKQALDHFNAEGSEDFCFLLSTRAGGLGINLASADTVVIFDSDWNPQNDLQAQARAHRIGQKKQVNIYRLVTKGSVEEDILERAKKKMVLDHLVIQRMDTTGKTVLHTGSAPSSSTPFNKEELSAILKFGAEELFKEPEGEEQEPQEMDIDEILKRAETHENEPGPLSVGDELLSQFKVANFSNMDEDDIELEPERNSKNWEEIIPEEQRRRLEEEERQKELEEIYMLPRMRNCAKQVMSF

SEQ ID NO: 8081 - protein, 1711 aa, Mus musculus
MNGHSDEESVRNGSGESSQSGDDCGSASGSGSGSSSGSSSDGSSSQSGSSDSDSGSDSGSQSESESDTSRENKVQAKPPKVDGAEFWKSSPSILAVQRSAMLRKQPQQAQQQRPASSNSGSEEDSSSSEDSDDSSSGAKRKKHNDEDWQMSGSGSPSQLGSDSESEEERDKSSCDGTESDYEPKNKVRSRKPQNRSKSKNGKKILGQKKRQIDSSEDEDDEDYDNDKRSSRRQATVNVSYKEDEEMKTDSDDLLEVCGEDVPQPEDEEFETIERVMDCRVGRKGATGATTTIYAVEADGDPNAGFERNKEPGDIQYLIKWKGWSHIHNTWETEETLKQQNVRGMKKLDNYKKKDQETKRWLKNASPEDVEYYNCQQELTDDLHKQYQIVERIIAHSNQKSAAGLPDYYCKWQGLPYSECSWEDGALISKKFQTCIDEYFSRNQSKTTPFKDCKVLKQRPRFVALKKQPSYIGGHEGLELRDYQLNGLNWLAHSWCKGNSCILADEMGLGKTIQTISFLNYLFHEHQLYGPFLLVVPLSTLTSWQREIQTWASQMNAVVYLGDINSRNMIRTHEWMHPQTKRLKFNILLTTYEILLKDKAFLGGLNWAFIGVDEAHRLKNDDSLLYKTLIDFKSNHRLLITGTPLQNSLKELWSLLHFIMPEKFSSWEDFEEEHGKGREYGYASLHKELEPFLLRRVKKDVEKSLPAKVEQILRMEMSALQKQYYKWILTRNYKALSKGSKGSTSGFLNIMMELKKCCNHCYLIKPPDNNEFYNKQEALQHLIRSSGKLILLDKLLIRLRERGNRVLIFSQMVRMLDILAEYLKYRQFPFQRLDGSIKGELRKQALDHFNAEGSEDFCFLLSTRAGGLGINLASADTVVIFDSDWNPQNDLQAQARAHRIGQKKQVNIYRLVTKGSVEEDILERAKKKMVLDHLVIQRMDTTGKTVLHTGSAPSSSTPFNKEELSAILKFGAEELFKEPEGEEQEPQEMDIDEILKRAETHENEPGPLSVGDELLSQFKVANFSNMDEDDIELEPERNSKNWEEIIPEEQRRRLEEEERQKELEEIYMLPRMRNCAKQISFNGSEGRRSRSRRYSGSDSDSISERKRPKKRGRPRTIPRENIKGFSDAEIRRFIKSYKKFGGPLERLDAIARDAELVDKSETDLRRLGELVHNGCVKALKDSSSGTERAGGRLGKVKGPTFRISGVQVNAKLVIAHEDELIPLHKSIPSDPEERKQYTIPCHTKAAHFDIDWGKEDDSNLLIGIYEYGYGSWEMIKMDPDLSLTHKILPDDPDKKPQAKQLQTRADYLIKLLSRDLAKREAQRLCGAGGSKRRKTRAKKSKAMKSIKVKEEIKSDSSPLPSEKSDEDDDKLNDSKPESKDRSKKSVVSDAPVHITASGEPVPIAEESEELDQKTFSICKERMRPVKAALKQLDRPEKGLSEREQLEHTRQCLIKIGDHITECLKEYSNPEQIKQWRKNLWIFVSKFTEFDARKLHKLYKHAIKKRQESQQNSDQNSNVATTHVIRNPDMERLKENTNHDDSSRDSYSSDRHLSQYHDHHKDRHQGDSYKKSDSRKRPYSSFSNGKDHREWDHYRQDSRYYSDREKHRKLDDHRSREHRPSLEGGLKDRCHSDHRSHSDHRMHSDHRSSSEHTHHKSSRDYRYLSDWQLDHRAASSGPRSPLDQRSPYGSRSPFEHSAEHRSTPEHTWSSRKT

SEQ ID NO: 8082 - protein, 1711 aa, Mus musculus
MNGHSDEESVRNGSGESSQSGDDCGSASGSGSGSSSGSSSDGSSSQSGSSDSDSGSDSGSQSESESDTSRENKVQAKPPKVDGAEFWKSSPSILAVQRSAMLRKQPQQAQQQRPASSNSGSEEDSSSSEDSDDSSSGAKRKKHNDEDWQMSGSGSPSQLGSDSESEEERDKSSCDGTESDYEPKNKVRSRKPQNRSKSKNGKKILGQKKRQIDSSEDEDDEDYDNDKRSSRRQATVNVSYKEDEEMKTDSDDLLEVCGEDVPQPEDEEFETIERVMDCRVGRKGATGATTTIYAVEADGDPNAGFERNKEPGDIQYLIKWKGWSHIHNTWETEETLKQQNVRGMKKLDNYKKKDQETKRWLKNASPEDVEYYNCQQELTDDLHKQYQIVERIIAHSNKQSAAGLPDYYCKWQGLPYSECSWEDGALISKKFQTCIDEYFSRNQSKTTPFKDCKVLKQRPRFVALKKQPSYIGGHEGLELRDYQLNGLNWLAHSWCKGNSCILADEMGLGKTIQTISFLNYLFHEHQLYGPFLLVVPLSTLTSWQREIQTWASQMNAVVYLGDINSRNMIRTHEWMHPQTKRLKFNILLTTYEILLKDKAFLGGLNWAFIGVDEAHRLKNDDSLLYKTLIDFKSNHRLLITGTPLQNSLKELWSLLHFIMPEKFSSWEDFEEEHGKGREYGYASLHKELEPFLLRRVKKDVEKSLPAKVEQILRMEMSALQKQYYKWILTRNYKALSKGSKGSTSGFLNIMMELKKCCNHCYLIKPPDNNEFYNKQEALQHLIRSSGKLILLDKLLIRLRERGNRVLIFSQMVRMLDILAEYLKYRQFPFQRLDGSIKGELRKQALDHFNAEGSEDFCFLLSTRAGGLGINLASADTVVIFDSDWNPQNDLQAQARAHRIGQKKQVNIYRLVTKGSVEEDILERAKKKMVLDHLVIQRMDTTGKTVLHTGSAPSSSTPFNKEELSAILKFGAEELFKEPEGEEQEPQEMDIDEILKRAETHENEPGPLSVGDELLSQFKVANFSNMDEDDIELEPERNSKNWEEIIPEEQRRRLEEEERQKELEEIYMLPRMRNCAKQISFNGSEGRRSRSRRYSGSDSDSISERKRPKKRGRPRTIPRENIKGFSDAEIRRFIKSYKKFGGPLERLDAIARDAELVDKSETDLRRLGELVHNGCVKALKDSSSGTERAGGRLGKVKGPTFRISGVQVNAKLVIAHEDELIPLHKSIPSDPEERKQYTIPCHTKAAHFDIDWGKEDDSNLLIGIYEYGYGSWEMIKMDPDLSLTHKILPDDPDKKPQAKQLQTRADYLIKLLSRDLAKREAQRLCGAGGSKRRKTRAKKSKAMKSIKVKEEIKSDSSPLPSEKSDEDDDKLNDSKPESKDRSKKSVVSDAPVHITASGEPVPIAEESEELDQKTFSICKERMRPVKAALKQLDRPEKGLSEREQLEHTRQCLIKIGDHITECLKEYSNPEQIKQWRKNLWIFVSKFTEFDARKLHKLYKHAIKKRQESQQNSDQNSNVATTHVIRNPDMERLKENTNHDDSSRDSYSSDRHLSQYHDHHKDRHQGDSYKKSDSRKRPYSSFSNGKDHREWDHYRQDSRYYSDREKHRKLDDHRSREHRPSLEGGLKDRCHSDHRSHSDHRMHSDHRSSSEHTHHKSSRDYRYLSDWQLDHRAASSGPRSPLDQRSPYGSRSPFEHSAEHRSTPEHTWSSRKT

SEQ ID NO: 8083 - protein, 1021 aa, Mus musculus
MNLFNLDRFRFEKRSKIEEAPEAAPQPSQARPSSPISLSAEEENAEGEGSRANTPDSDVTEKTEDSSVPEPPDNERKASLSCFQNQRAIQEYIDLSSDTEDVSPNCSSTVQEKKFSKDTVIIVSEPSEDEESHDLPSVTRRNDSSELEDLSELEDLKDAKLQTLKELFPQRSDSDLLKLIESTSTMDGAIAAALLMFGDAGGGPRKRKLSSSSEEDDVNDDQSVKQPRGDRGEESNESAEASSNWEKQESIVLKLQKEFPNFDKQELREVLKEHEWMYTEALESLKVFAEDQDVQCASQSEVTNGKEVARNQNYSKNATKIKMKQKISVKPQNGFNKKRKKNVFNPKKAVEDSEYDSGSDAGSSLDEDYSSCEEVMEDGYKGKILHFLQVSSIAELTLIPKCSQKKAQKITELRPFNNWEALFTKMSKINGLSEDLIWNCKTVIQERDVVIRLMNKCEDISNKLTKQVTMLTGNGGGWNREQPSLLNQSLSLKPYQKVGLNWLALVHKHGLNGILADEMGLGKTIQAIAFLAYLFQEGNKGPHLIVVPASTIDNWLREVNLWCPSLNVLCYYGSQEERKQIRFNIHNKYEDYNVIVTTYNCAISSSDDRSLFRRLKLNYAIFDEGHMLKNMGSIRYQHLMTINARNRLLLTGTPVQNNLLELMSLLNFVMPHMFSSSTSEIRRMFSSKTKPADEQSIYEKERIAHAKQIIKPFILRRVKEEVLKLLPPKKDRIELCAMSEKQEQLYSGLFNRLKKSINNLEKNTEMCNVMMQLRKMANHPLLHRQYYTPEKLKEMSQLMLKEPTHCEANPDLIFEDMEVMTDFELHVLCKQYQHINSYQLDMDLILDSGKFRALGCILSELKQKGDRVVLFSQFTMMLDILEVLLKHHQHRYLRLDGKTQISERIHLIDEFNTDMDIFVFLLSTKAGGLGINLTSANVVILHDIDCNPYNDKQAEDRCHRVGQTKEVLVIKLISQGTIEESMLKINQQKLKLEQDMTTVDEADEGSMPADIATLLKTSMGL

SEQ ID NO: 8084 - protein, 836 aa, Mus musculus
MDGAIAAALLMFGDAGGGPRKRKLSSSSEEDDVNDDQSVKQPRGDRGEESNESAEASSNWEKQESIVLKLQKEFPNFDKQELREVLKEHEWMYTEALESLKVFAEDQDVQCASQSEVTNGKEVARNQNYSKNATKIKMKQKISVKPQNGFNKKRKKNVFNPKKAVEDSEYDSGSDAGSSLDEDYSSCEEVMEDGYKGKILHFLQVSSIAELTLIPKCSQKKAQKITELRPFNNWEALFTKMSKINGLSEDLIWNCKTVIQERDVVIRLMNKCEDISNKLTKQVTMLTGNGGGWNREQPSLLNQSLSLKPYQKVGLNWLALVHKHGLNGILADEMGLGKTIQAIAFLAYLFQEGNKGPHLIVVPASTIDNWLREVNLWCPSLNVLCYYGSQEERKQIRFNIHNKYEDYNVIVTTYNCAISSSDDRSLFRRLKLNYAIFDEGHMLKNMGSIRYQHLMTINARNRLLLTGTPVQNNLLELMSLLNFVMPHMFSSSTSEIRRMFSSKTKPADEQSIYEKERIAHAKQIIKPFILRRVKEEVLKLLPPKKDRIELCAMSEKQEQLYSGLFNRLKKSINNLEKNTEMCNVMMQLRKMANHPLLHRQYYTPEKLKEMSQLMLKEPTHCEANPDLIFEDMEVMTDFELHVLCKQYQHINSYQLDMDLILDSGKFRALGCILSELKQKGDRVVLFSQFTMMLDILEVLLKHHQHRYLRLDGKTQISERIHLIDEFNTDMDIFVFLLSTKAGGLGINLTSANVVILHDIDCNPYNDKQAEDRCHRVGQTKEVLVIKLISQGTIEESMLKINQQKLKLEQDMTTVDEADEGSMPADIATLLKTSMGL

SEQ ID NO: 8085 - protein, 1071 aa, Mus musculus
SRGGGSGLAGFVEAAGARCGLRGGKAGAHLCGPASSLKAVSPLRVVVPPNMNLFNLDRFRFEKRSKIEEAPEAAPQPSQARPSSPISLSAEEENAEGEGSRANTPDSDVTEKTEDSSVPEPPDNERKASLSCFQNQRAIQEYIDLSSDTEDVSPNCSSTVQEKKFSKDTVIIVSEPSEDEESHDLPSVTRRNDSSELEDLSELEDLKDAKLQTLKELFPQRSDSDLLKLIESTSTMDGAIAAALLMFGDAGGGPRKRKLSSSSEEDDVNDDQSVKQPRGDRGEESNESAEASSNWEKQESIVLKLQKEFPNFDKQELREVLKEHEWMYTEALESLKVFAEDQDVQCASQSEVTNGKEVARNQNYSKNATKIKMKQKISVKPQNGFNKKRKKNVFNPKKAVEDSEYDSGSDAGSSLDEDYSSCEEVMEDGYKGKILHFLQVSSIAELTLIPKCSQKKAQKITELRPFNNWEALFTKMSKINGLSEDLIWNCKTVIQERDVVIRLMNKCEDISNKLTKQVTMLTGNGGGWNREQPSLLNQSLSLKPYQKVGLNWLALVHKHGLNGILADEMGLGKTIQAIAFLAYLFQEGNKGPHLIVVPASTIDNWLREVNLWCPSLNVLCYYGSQEERKQIRFNIHNKYEDYNVIVTTYNCAISSSDDRSLFRRLKLNYAIFDEGHMLKNMGSIRYQHLMTINARNRLLLTGTPVQNNLLELMSLLNFVMPHMFSSSTSEIRRMFSSKTKPADEQSIYEKERIAHAKQIIKPFILRRVKEEVLKLLPPKKDRIELCAMSEKQEQLYSGLFNRLKKSINNLEKNTEMCNVMMQLRKMANHPLLHRQYYTPEKLKEMSQLMLKEPTHCEANPDLIFEDMEVMTDFELHVLCKQYQHINSYQLDMDLILDSGKFRALGCILSELKQKGDRVVLFSQFTMMLDILEVLLKHHQHRYLRLDGKTQISERIHLIDEFNTDMDIFVFLLSTKAGGLGINLTSANVVILHDIDCNPYNDKQAEDRCHRVGQTKEVLVIKLISQGTIEESMLKINQQKLKLEQDMTTVDEADEGSMPADIATLLKTSMGL

SEQ ID NO: 8086 - protein, 1136 aa, Mus musculus
RLPQRIILFLSTFVPTRSLPGCKCVRACGRRAPFGGAPACQASSSAGPRRVYFRAARRSRFGPLCSRGGGSGLAGFVEAAGARCGLRGGKAGAHLCGPASSLKAVSPLRVVVPPNMNLFNLDRFRFEKRSKIEEAPEAAPQPSQARPSSPISLSAEEENAEGEGSRANTPDSDVTEKTEDSSVPEPPDNERKASLSCFQNQRAIQEYIDLSSDTEDVSPNCSSTVQEKKFSKDTVIIVSEPSEDEESHDLPSVTRRNDSSELEDLSELEDLKDAKLQTLKELFPQRSDSDLLKLIESTSTMDGAIAAALLMFGDAGGGPRKRKLSSSSEEDDVNDDQSVKQPRGDRGEESNESAEASSNWEKQESIVLKLQKEFPNFDKQELREVLKEHEWMYTEALESLKVFAEDQDVQCASQSEVTNGKEVARNQNYSKNATKIKMKQKISVKPQNGFNKKRKKNVFNPKKAVEDSEYDSGSDAGSSLDEDYSSCEEVMEDGYKGKILHFLQVSSIAELTLIPKCSQKKAQKITELRPFNNWEALFTKMSKINGLSEDLIWNCKTVIQERDVVIRLMNKCEDISNKLTKQVTMLTGNGGGWNREQPSLLNQSLSLKPYQKVGLNWLALVHKHGLNGILADEMGLGKTIQAIAFLAYLFQEGNKGPHLIVVPASTIDNWLREVNLWCPSLNVLCYYGSQEERKQIRFNIHNKYEDYNVIVTTYNCAISSSDDRSLFRRLKLNYAIFDEGHMLKNMGSIRYQHLMTINARNRLLLTGTPVQNNLLELMSLLNFVMPHMFSSSTSEIRRMFSSKTKPADEQSIYEKERIAHAKQIIKPFILRRVKEEVLKLLPPKKDRIELCAMSEKQEQLYSGLFNRLKKSINNLEKNTEMCNVMMQLRKMANHPLLHRQYYTPEKLKEMSQLMLKEPTHCEANPDLIFEDMEVMTDFELHVLCKQYQHINSYQLDMDLILDSGKFRALGCSLSELKQKGDRVVLFSQFTMMLDILEVLLKHHQHRYLRLDGKTQISERIHLIDEFNTDMDIFVFLLSTKAGGLGINLTSANVVILHDIDCNPYNDKQAEDRCHRVGQTKEVLVIKLISQGTIEESMLKINQQKLKLEQDMTTVDEADEGSMPADIATLLKTSMGL

SEQ ID NO: 8087 - protein, 1215 aa, Mus musculus
MWEEYPDVYGVRRSNRSRQEPSRFNVKEEASSGSESGSPKRRGQRQLKKQEKWKQDPSEDEQEQGTSAESEAEQKKGKARRPVPRRTVPKPQVKKQPKIQRGKRKKQESSDDDDDDDEAPKRQTRRRAAKNVSYKEDDDFETDSDDLIEMTGEGGDEQQDNSETIEKVLDSRLGKKGATGASTTVYAVEANGDPSDDFDTEREEGEVQYLIKWKGWSYIHSTWESEDSLQQQKVKGLKKLENFKKKEDEVKQWLGKVSPEDVEYFSCQQELASELNKQYQIVERVIAVKTSKSTLGQTDFPAHSRKPAPSNEPEYLCKWMGLPYSECSWEDEALIGKKFQNCIDSFHSRNNSKTIPTRECKALKQRPRFVALKKQPAYLGGESLELRDYQLEGLNWLAHSWCKSNSVILADEMGLGKTIQTISFLSYLFHQHQLYGPFLIVVPLSTLTSWQREFEIWAPEINVVVYIGDLMSRNTIREYEWIHSQTKRLKFNALITTYEILLKDKTVLGSINWAFLGVDEAHRLKNDDSLLYKTLIDFKSNHRLLITGTPLQNSLKELWSLLHFIMPEKFEFWEDFEEDHGKGRENGYQSLHKVLEPFLLRRVKKDVEKSLPAKVEQILRVEMSALQKQYYKWILTRNYKALAKGTRGSTSGFLNIVMELKKCCNHCYLIKAPEDSERESGQEVLQSLIRSSGKLILLDKLLTRLRERGNRVLIFSQMVRMLDILAEYLTIKHYPFQRLDGSIKGEIRKQALDHFNADGSEDFCFLLSTRAGGLGINLASADTVVIFDSDWNPQNDLQAQARAHRIGQKKQVNIYRLVTKGTVEEEIIERAKKKMVLDHLVIQRMDTTGRTVLENNSGRSNSNPFNKEELTAILKFGAEDLFKEIEGEESEPQEMDIDEILRLAETRENEVSTSATDELLSQFKVANFATMEDEEELEERPHKDWDEIIPEEQRKKVEEEERQKELEEIYMLPRIRSSTKKAQTNDSDSDTESKRQAQRSSASESETDDSDDDKKPKRRGRPRSVRKDLVEGFTDAEIRRFIKAYKKFGLPLERLECIARDAELVDKSVADLKRLGELIHNSCVSAMQEYEEQLKESTSEGKGPGKRRGPTIKISGVQVNVKSIIQHEEEFEMLHKSIPVDPEEKKKYCLTCRVKAAHFDVEWGVEDDSRLLLGIYEHGYGNWELIKTDPELKLTDKLQGFPAPGRRKSTSAGML

SEQ ID NO: 8088 - protein, 1240 aa, Mus musculus
MEASQGLAEVETLSPQLAESYLRYVQEAKEAAKNGDLEESLKLFNLAKDIFPTKKVMSRIQKLQEALEQLAEEEDDDEFIDVCSSGLLLYRELYEKLFEHQKEGIAFLYSLYKDGRKGGILADDMGLGKTVQIIAFLSGMFDASLVNHVLLIMPTNLINTWVNEFAKWTPGMRVKTFHGSSKSERTRSLTRIQQRNGVVITTYQMLLNNWQQLASFNGQAFVWDYVILDEAHKIKSASTKSAVCARAIPASNRLLLTGTPVQNNLQELWSLFDFACQGSLLGTLKTFKMEYEHPIIRAREKDATPGEKALGLKISENLMEIIKPYFLRRTKEEVQTKKADNPEARLGEKNPAGEAICDMFSLARKNDLIVWIRLLPLQEEIYRKFVSLDHIKELLMETRSPLAELGVLKKLCDHPRLLSARACRLLNLGTATFSAQDENEQEDVSNMNSIDHLPDKTLIQESGKMIFLMSLLERLQDEGHQTLVFSQSIKILNIIERLLKNKHFKTLRIDGTVTHLWEREKRIQLFQQNKEYSVFLLTTQVGGVGLTLTAATRVVIFDPSWNPATDAQAVDRVYRIGQKENVVVYRLITCGTVEEKIYRRQVFKDSLIRQTTGEKKNPFRYFTKQELKELFTVGDLQKSATQMQLQCLHAAQRRSDEKLDEHIAYLHLLGIAGISDHDLMFTRDLSVKEELDMLEDSQYIHQRVQKAQFLVESESQNTVQRQTTGIEETWLKAQEFPSQQKKKGTEFNKPQPQPSRLLTKPTQVEAISSQMASITICDQSAESEPQEHSEVHDVTSLQGSHHFNSTSDAGTIASLPQGAESIGEVSTDSLLSPAKGFAAENDAMQKKGLQASPGQEAPSENLGSFHYLPRESSKASLGPNLDLQDSVVLYHRSPTANENQNLESDVPMIEISDDLSEPPSALQGAQAIEAQLELKEDDPLKSPPQYACDFNLFLEDSADTRQNLSSKFLEHVEKEKSLQSPAANSRAKSALTLSLDSSPKSDEESEVISVKTKSKTRRILSDDEDEDEEDAFKGSHTNSINISPFPFSSVKQFDASTPQSGSNPSRRFFSPKTPGEVNTSLHSRRSLASRRSLINVVLDDVEDMEERLDNSSEEESEPGLSEENNEEEALACTEEQPSGATLASGNKSSNLTMSEPTSPAPQSSPCAPEPSSSDPMPDPPQDLAVEAGNDYESLVARGKELKECGKIQEALNCLVKALDIKSADPEVMLMTLSLYKQLNI

SEQ ID NO: 8089 - protein, 1240 aa, Mus musculus
MEASQGLAEVETLSPQLAESYLRYVQEAKEAAKNGDLEESLKLFNLAKDIFPTKKVMSRIQKLQEALEQLAEEEDDDEFIDVCSSGLLLYRELYEKLFEHQKEGIAFLYSLYKDGRKGGILADDMGLGKTVQIIAFLSGMFDASLVNHVLLIMPTNLINTWVNEFAKWTPGMRVKTFHGSSKSERTRSLTRIQQRNGVVITTYQMLLNNWQQLASFNGQAFVWDYVILDEAHKIKSASTKSAVCARAIPASNRLLLTGTPVQNNLQELWSLFDFACQGSLLGTLKTFKMEYEHPIIRAREKDATPGEKALGLKISENLMEIIKPYFLRRTKEEVQTKKADNPEARLGEKNPAGEAICDMFSLARKNDLIVWIRLLPLQEEIYRKFVSLDHIKELLMETRSPLAELGVLKKLCDHPRLLSARACRLLNLGTATFSAQDENEQEDVSNMNSIDHLPDKTLIQESGKMIFLMSLLERLQDEGHQTLVFSQSIKILNIIERLLKNKHFKTLRIDGTVTHLWEREKRIQLFQQNKEYSVFLLTTQVGGVGLTLTAATRVVIFDPSWNPATDAQAVDRVYRIGQKENVVVYRLITCGTVEEKIYRRQVFKDSLIRQTTGEKKNPFRYFTKQELKELFTVGDLQKSATQMQLQCLHAAQRRSDEKLDEHIAYLHLLGIAGISDHDLMFTRDLSVKEELDMLEDSQYIHQRVQKAQFLVESESQNTVQRQTTGIEETWLKAQEFPSQQKKKGTEFNKPQPQPSRLLTKPTQVEAISSQMASITICDQSAESEPQEHSEVHDVTSLQGSHHFNSTSDAGTIASLPQGAESIGEVSTDSLLSPAKGFAAENDAMQKKGLQASPGQEAPSENLGSFHYLPRESSKASLGPNLDLQDSVVLYHRSPTANENQNLESDVPMIEISDDLSEPPSALQGAQAIEAQLELKEDDPLKSPPQYACDFNLFLEDSADTRQNLSSKFLEHVEKEKSLQSPAANSRAKSALTLSLDSSPKSDEESEVISVKTKSKTRRILSDDEDEDEEDAFKGSHTNSINISPFPFSSVKQFDASTPQSGSNPSRRFFSPKTPGEVNTSLHSRRSLASRRSLINVVLDDVEDMEERLDNSSEEESEPGLSEENNEEEALACTEEQPSGATLASGNKSSNLTMSEPTSPAPQSSPCAPEPSSSDPMPDPPQDLAVEAGNDYESLVARGKELKECGKIQESLNCLVKALDIKSADPEVMLMTLSLYKQLNI

SEQ ID NO: 8090 - protein, 808 aa, Mus musculus
MLEEEEQLEAAGLEKERKMLEEAQKSWDRESTEIRYRRLQHLLEKSNIYSKFLLTKMEQQQLEEQKKKEKLEKKKRSLKLTEGKSLVDGNGEKPVMKKKRGREDESYNISEVMSKEEILSVAKKHKDNEDESSSTTSLCVEDIQKNKDSNSMIKDRLSQTVRQNSKFFFDPVRKCNGQPVPFQQPKHFTGGVMRWYQVEGMEWLRMLWENGINGILADEMGLGKTVQCIATIALMIQRGVPGPFLVCGPLSTLPNWMAEFKRFTPEIPTLLYHGTREDRRKLVKNIHKRQGTLQIHPVVVTSFEIAMRDQNALQHCYWKYLIVDEGHRIKNMKCRLIRELKRFNADNKLLLTGTPLQNNLSELWSLLNFLLPDVFDDLKSFESWFDITSLSETAEDIIAKEREQNVLHMLHQILTPFLLRRLKSDVALEVPPKREVVVYAPLCNKQEIFYTAIVNRTIANMFGSCEKETVELSPTGRPKRRSRKSINYSELDQFPSELEKLISQIQPEVNRERTVVEGNIPIESEVNLKLRNIMMLLRKCCNHPYMIEYPIDPVTQEFKIDEELVTNSGKFLILDRMLPELKKRGHKVLVFSQMTSMLDILMDYCHLRNFIFSRLDGSMSYSEREKNIYSFNTDPDVFLFLVSTRAGGLGINLTAADTVIIYDSDWNPQSDLQAQDRCHRIGQTKPVVVYRLVTANTIDQKIVERAAAKRKLEKLIIHKNHFKGGQSGLSQSKNFLDAKELMELLKSRDYEREVKGSREKVISDEDLELLLDRSDLIDQMKASRPIKGKTGIFKILENSEDSSAECLF

SEQ ID NO: 8091 - protein, 821 aa, Mus musculus
MAEQTEPAVITPAMLEEEEQLEAAGLEKERKMLEEAQKSWDRESTEIRYRRLQHLLEKSNIYSKFLLTKMEQQQLEEQKKKEKLEKKKRSLKLTEGKSLVDGNGEKPVMKKKRGREDESYNISEVMSKEEILSVAKKHKDNEDESSSTTSLCVEDIQKNKDSNSMIKDRLSQTVRQNSKFFFDPVRKCNGQPVPFQQPKHFTGGVMRWYQVEGMEWLRMLWENGINGILADEMGLGKTVQCIATIALMIQRGVPGPFLVCGPLSTLPNWMAEFKRFTPEIPTLLYHGTREDRRKLVKNIHKRQGTLQIHPVVVTSFEIAMRDQNALQHCYWKYLIVDEGHRIKNMKCRLIRELKRFNADNKLLLTGTPLQNNLSELWSLLNFLLPDVFDDLKSFESWFDITSLSETAEDIIAKEREQNVLHMLHQILTPFLLRRLKSDVALEVPPKREVVVYAPLCNKQEIFYTAIVNRTIANMFGSCEKETVELSPTGRPKRRSRKSINYSELDQFPSELEKLISQIQPEVNRERTVVEGNIPIESEVNLKLRNIMMLLRKCCNHPYMIEYPIDPVTQEFKIDEELVTNSGKFLILDRMLPELKKRGHKVLVFSQMTSMLDILMDYCHLRNFIFSRLDGSMSYSEREKNIYSFNTDPDVFLFLVSTRAGGLGINLTAADTVIIYDSDWNPQSDLQAQDRCHRIGQTKPVVVYRLVTANTIDQKIVERAAAKRKLEKLIIHKNHFKGGQSGLSQSKNFLDAKELMELLKSRDYEREVKGSREKVISDEDLELLLDRSDLIDQMKASRPIKGKTGIFKILENSEDSSAECLF

SEQ ID NO: 8092 - protein, 685 aa, Mus musculus
DRWCPGERCLAPSLDNKKLCEASIKSITVDGNGKPFAVVLYPDFQEKTIPLQRLQEVKSTKDYSRSLIFDDEDLEKPYFPDRKIPSLASAFQLSEDGDSIPYTINRYLRDYQREGAQFLYRHYIEGRGCILGDDMGLGKTIQVISFLAAVLHKKGTREDIENNMPEFLLKSMKKKPPSTAKKMFLIVAPLSVLYNWKDELDTWGYFRVTVLHGSKKDNELLRLKQRKCEIALTTYETLRLCLEELNSLEWSAIIVDEAHRIKNPKARVTEVMKAVKCKVRIGLTGTILQNNMKELWCVMDWAVPGLLGSRIHFKKQFSDPVEHGQRHTATKRELATGRKAMHRLAKKMSGWFLRRTKTLIKGQLPKKEDRMVYCSLTDFQKAVYQTVLETEDVALILTSSQPCTCGSGQKRRKCCYKTNSRGDTVRTLCLSYLTVLQKIANHVALLQAASTSKHQETVIKRICDRVFSRFPDFVQKSKDAAFETLSDPKYSGKMKVLQQLLNHFRKQRDKVLLFSFSTKLLDVLQQYCMASGLDYRRLDGSTKSEERLKIVKEFNSSQDVNICLVSTMAGGLGLNFVGANVVILFDPTWNPANDLQAVDRAYRIGQCRDVKVLRLISLGTVEEIMYLRQVYKQQLHCVVVGSENAKRYFEAVQGSKEHRGELFGVHNLFKLRSQGSCLTRDILEV

SEQ ID NO: 8093 - protein, 1139 aa, Mus musculus
MDLVKCPEHGDACFLKTGVRDGPNKGKSFYVCRTNTCGFVQATDIPVSHCLLHEEFVVELQGLFLPQDKKEWRLFFRCARTKAEGKQWCGNVPWRQDPNRKELSVTSKPQQPSESQLHSPSQPRNPFRVLNKNQKTLERKQFVEEGERKTADKKLRENNEQLLDQRKEQKPKSNCRMEKDPSSDLVATRQSGGDREEQEEKSKFQPKTKKAEGMASKQGHGEVLQGIPKGPHMSESESRGVPNKPEPLREKETQLLVPSVPGQNPESKVQKEGHVSREPLKNGEAPSAQVAQKGLAQGPLQGPSKTWRPVPEAPAAPGLCSGMAHHATSSSEDSEDDGVSSRPGSPLLFDSTVDSKKKGSLQHSDQSVQRQMPAASGVSKKGDSSDPAAQRANLTTQLKQKKGTLAAVNIQALPDKGEKLLKQIQALEDALSALALSSDQGTKEKCSAQEPEQSNITKAAAAPLHLVPPQPLPRPLIQPASSLGLKAGRQETPEGASQCSGGHMNQHHLYNVWKITSEAIDELHRSLKSCPGETAVAEDPAGLKVPLLLHQKQALAWLLWRESQKPQGGILADDMGLGKTLTMIALILTKKNQQKSKEKERSEPVTWLSKNDSSVFTSSGTLIVCPASLIHHWKNEVEKRVTSNRLRIYLYHGPNRSRHAKVLSTYDIVITTYSLLAKEIPTTKQEGEVPGANLSVEGTSAPLLQVVWARIILDEAHNVKNPRVQTSIAVCKLQAQARWAVTGTPIQNNLLDMYSLMKFLRCSPFDEFSLWKSQVDNGSMKGGERLSILTKSLLLRRTKDQLDSTGKPLVALPARRCQLHRLKLSEDERAVYDIFLARSRSALQSYLKRQEGRGSHHGRSPDNPFSRVAQEFGSSVSQGCPAADSQRPSTVHVLSQLLRLRQCCCHLSLLKSALDPTELESEGLVLSLEEQLSALTLSKVDVSEPSPTVSLNGTCFKAELFDDTRRSTKVSSLLAELEAIQKGPGSQKSVIVSQWTSMLQVVALHLKKNRLTYATIDGSVNPKQRMDLVEAFNHSQGPQVMLISLLAGGVGLNLTGGNHLFLLDMHWNPSLEDQACDRIYRVGQKKDVVIHRFVCEGTVEEKILQLQEKKKDLAKQVLSGSEGPVTKLTLADLKILFGI

SEQ ID NO: 8094 - protein, 1138 aa, Mus musculus
MDLVKCPEHGDACFLKTGVRDGPNKGKSFYVCRTNTCGFVQATDIPVSHCLLHEEFVVELQGLFLPQDKKEWRLFFRCARTKAEGKQWCGNVPWRQDPNPKELSVTSKPQQPSESQLHSPSQPRNPFRVLNKNQKTLERKQFVEEGERKTADKKLRENNEQLLDQRKEQKPKSNSRMEKDPSSDLVATRQSGGDREEQEKSKFQPKTKKAEGMASKQGHGEVLQGIPKGPHMSESESRGVPNKPETLREKETQLLVPSVPGQNPESKVQKEGHVSREPLKNGEAPSAQVTQRGLAQGPLQGPSKTWRPVPEAPAAPELCSGMAHHATSSSEDSEDDGVSSRPGSPLLFDSTVDSQKKGSLQHSDQSVQRQMPAASGVSKKGDSSDPAAQRANLTTQLKQKKGTLAAVNIQALPDKGEKLLKQIQALEDALSALALSPEQGTKEKCSAQEPEQSNITKAAAAPLHLVPPQPLPRPLIQPASSLGLKAGRQETPEGASQCSGGHMNQHHLYNVWKITSEAIDELHRSLKSCPGETAVAEDPAGLKVPLLLHQKQALAWLLWRESQKPQGGILADDMGLGKTLTMIALILTKKNQQKSKEKERSEPVTWLSKNDSSVFTSSGTLIVCPASLIHHWKNEVEKRVTSNRLRIYLYHGPNRSRHAKVLSTYDIVITTYSLLAKEIPTTKQEGEVPGANLSVEGTSAPLLQVVWARIILDEAHNVKNPRVQTSIAVCKLQAQARWAVTGTPIQNNLLDMYSLMKFLRCSPFDEFSLWKSQVDNGSMKGGERLSILTKSLLLRRTKDQLDSTGKPLVALPARRCQLHRLKLSEDERAVYDIFLARSRSALQSYLKRQEGRGSHHGRSPDNPFSRVAQEFGSSVSQGCPAADSQRPSTVHVLSQLLRLRQCCCHLSLLKSALDPTELESEGLVLSLEEQLSALTLSKVDVSEPSPTVSLNGTCFKAELFDDTRRSTKVSSLLAELEAIQKGPGSQKSVIVSQWTSMLQVVALHLKKNRLTYATIDGSVNPKQRMDLVEAFNHSQGPQVMLISLLAGGVGLNLTGGNHLFLLDMHWNPSLEDQACDRIYRVGQKKDVVIHRFVCEGTVEEKILQLQEKKKDLAKQVLSGSEGPVTKLTLADLKILFGI

SEQ ID NO: 8095 - protein, 603 aa, Mus musculus
MLWENGINGILADEMGLGKTVQCIATIALMIQRGVPGPFLVCGPLSTLPNWMAEFKRFTPEIPTLLYHGTREDRRKLVKNIHKRQGTLQIHPVVVTSFEIAMRDQNALQHCYWKYLIVDEGHRIKNMKCRLIRELKRFNADNKLLLTGTPLQNNLSELWSLLNFLLPDVFDDLKSFESWFDITSLSETAEDIIAKEREQNVLHMLHQILTPFLLRRLKSDVALEVPPKREVVVYAPLCNKQEIFYTAIVNRTIANMFGSCEKETVELSPTGRPKRRSRKSINYSELDQFPSELEKLISQIQPEVNRERTVVEGNIPIESEVNLKLRNIMMLLRKCCNHPYMIEYPIDPVTQEFKIDEELVTNSGKFLILDRMLPELKKRGHKVLVFSQMTSMLDILMDYCHLRNFIFSRLDGSMSYSEREKNIYSFNTDPDVFLFLVSTRAGGLGINLTAADTVIIYDSDWNPQSDLQAQDRCHRIGQTKPVVVYRLVTANTIDQKIVERAAAKRKLEKLIIHKNHFKGGQSGLSQSKNFLDAKELMELLKSRDYEREVKGSREKVISDEDLELLLDRSDLIDQMKASRPIKGKTGIFKILENSEDSSAECLF

SEQ ID NO: 8096 - protein, 891 aa, Mus musculus
MKMKIQKKEKQLSKLRALNHSPMSDASVNFDYKSPSPFDCSPDQGENIEEAANHCLPHKNLYTTEEEADTLFSRKLTSHNGMVDSGGRGTGVKKKRKKKEPGEQEGTKGSKDREPKPKRKREPKEPKEPRRAKEPKRAKEPKETKQKDGVKKPRKHREASGTKEGKEKRSCTDYGSRTKSKKASREQGPTPVERKKKGKRKNETTVESLELDHSLPNPSLQSPEEPSESADSQKRRSGRQVKRRKYNEDLDFKVVDDDGETIAVLGAGRTSALSASTLAWQAEEPPEDDANIIEKILASKTVQEVHPGEPPFDLELFYVKYRNFSYLHCKWATMEELEKDPRIAQKIKRFRNKQAQMKHIFTEPDEDLFNPDYIEIDRILEVAHTKDAETGEEVTHYLVKWCSLPYEESTWELEEDVDPAKVKEFESLQILPEVKHVERPASDAWQKLETSREYRNSNRLREYQLEGMNWLLFNWYNRKNCILADEMGLGKTIQSIAFLSEIFVRGIHGPFLIIAPLSTITNWEREFRTWTEMNAIVYHGSQISRQMIQQYEMVYRDAQGNPLSGVFKFHVVITTFEMILADCPELKKIHWSCVIIDEAHRLKNRNCKLLEGLKLMALEHKVLLTGTPLQNSVEELFSLLNFLEPSQFPSETAFLEEFGDLKTEEQVKKLQSILKPMMLRRLKDDVEKNLAPKQETIIEVELTNIQKKYYRAILEKNFSFLTKGANQHNVPNLINTMMELRKCCNHPYLINGAEEKILEDFRKAHSSEASDFQLQAMIQAAGKLVLIDKLLPKLIAGGHKVLIFSQMVRCLDILEDYLIQRRYTYERIDGRVRGNLRQAAIDRFCKPDSDRFVFLLCTRAGGLGINLTAADTCIIFDSDWNPQNDLQVTIG

SEQ ID NO: 8097 - protein, 551 aa, Mus musculus
MGLGKTIQVISFLAAVLHKKGTREDIENNMPEFLLKSMKKKPPSTAKKMFLIVAPLSVLYNWKDELDTWGYFRVTVLHGSKKDNELLRLKQRKCEIALTTYETLRLCLEELNSLEWSAIIVDEAHRIKNPKARVTEVMKAVKCKVRIGLTGTVLQNNMKELWCVMDWAVPGLLGSRIHFKKQFSDPVEHGQRHTATKRELATGRKAMHRLAKKMSGWFLRRTKTLIKGQLPKKEDRMVYCSLTDFQKAVYQTVLETEDVALILTSSQPCTCGSGQKRRKCCYKTNSRGDTVRTLCLSYLTVLQKVANHVALLQAASTSKHQETVIKRICDRVFSRFPDFVQKSKDAAFETLSDPKYSGKMKVLQQLLNHFRKQRDKVLLFSFSTKLLDVLQQYCMASGLDYRRLDGSTKSEERLKIVKEFNSSQDVNICLVSTMAGGLGLNFVGANVVILFDPTWNPANDLQAVDRAYRIGQCRDVKVLRLISLGTVEEIMYLRQVYKQQLHCVVVGSENAKRYFEAVQGSKEHRGELFGVHNLFKLRSQGSCLTRDILEV

SEQ ID NO: 8098 - protein, 577 aa, Mus musculus
MEASQGLAEVETLSPQLAESYLRYVQEAKEAAKNGDLEESLKLFNLAKDIFPTKKVMSRIQKLQEALEQLAEEEDDDEFIDVCSSGLLLYRELYEKLFEHQKEGIAFLYSLYKDGRKGGILADDMGLGKTVQIIAFLSGMFDASLVNHVLLIMPTNLINTWVNEFAKWTPGMRVKTFHGSSKSERTRSLTRIQQRNGVVITTYQMLLNNWQQLASFNGQAFVWDYVILDEAHKIKSASTKSAVCARAIPASNRLLLTGTPVQNNLQELWSLFDFACQGSLLGTLKTFKMEYEHPIIRAREKDATPGEKALGLKISENLMEIIKPYFLRRTKEEVQTKKADNPEARLGEKNPAGEAICDMFSLARKNDLIVWIRLLPLQEEIYRKFVSLDHIKELLMETRSPLAELGVLKKLCDHPRLLSARACRLLNLGTATFSAQDENEQEDVSNMNSIDHLPDKTLIQESGKMIFLMSLLERLQDEGHQTLVFSQSIKILNIIERLLKNKHFKTLRIDGTVTHLWEREKRIQLFQQNKEYSVFLLTTQVGGVGLTLTAATRVVIFDPSWNPATDAQAVDRVYRIG

SEQ ID NO: 8099 - protein, 747 aa, Mus musculus
MRRSLAPSQLARRKPEDRSSDDEDWQPGTVTPKKRKSSSETQVQECFLSPFRKPLTQLLNRPPCLDSSQHEAFIRSILSKPFKVPIPNYQGPLGSRALGLKRAGVRRALHDPLEEGALVLYEPPPLSAHDQLKLDKEKLPVHVVVDPVLSKVLRPHQREGVKFLWECVTSRRIPGSHGCIMADEMGLGKTLQCITLMWTLLRQSPECKPEIEKAVVVSPSSLVKNWYNEVEKWLGGRIQPLAIDGGSKDEIDRKLEGFMNQRGARVPSPILIISYETFRLHVGVLKKGNVGLVICDEGHRLKNSENQTYQALDSLNTSRRVLISGTPIQNDLLEYFSLVHFVNSGILGTAHEFKKHFELPILKSRDAAASEADRQRGEERLRELIGIVNRCLIRRTSDILSKYLPVKIEQVVCCRLTPLQTELYKRFLRQAKPEEELREGKMSVSSLSSITSLKKLCNHPALIYDKCVAEEDGFEGTLGIFPPGYNSKAVEPQLSGKMLVLDYILAVTRSRSSDKVVLVSNYTQTLDLFEKLCRVRRYLYVRLDGTMSIKKRAKVVERFNSPSSPDFVFMLSSKAGGCGLNLIGANRLVMFDPDWNPANDEQAMARVWRDGQKKICYIYRLLSAGTIEEKIFQRQSHKKALSSCVVDEEQDVERHFSLGELKELFTLDEASLSDTHDRLHCRRCVNNRQVWPPPDGSDCTSDLAQWNHSTDKRGLQDEVLQAAWDASSTAITFVFHQRSHEEQRGLH

SEQ ID NO: 8100 - protein, 813 aa, Mus musculus
MRRSLAPSQLARRKPEDRSSDDEDWQPGTVTPKKRKSSSETQVQECFLSPFRKPLTQLLNRPPCLDSSQHEAFIRSILSKPFKVPIPNYQGPLGSRALGLKRAGVRRALHDPLEEGALVLYEPPPLSAHDQLKLDKEKLPVHVVVDPILSKVLRPHQREGVKFLWECVTSRRIPGSHGCIMADEMGLGKTLQCITLMWTLLRQSPECKPEIEKAVVVSPSSLVKNWYNEVEKWLGGRIQPLAIDGGSKDEIDRKLEGFMNQRGARVPSPILIISYETFRLHVGVLKKGNVGLVICDEGHRLKNSENQTYQALDSLKTSRRVLISGTPIQNDLLEYFSLVHFVNSGILGTAHEFKKHFELPILKSRDAAASEADRQRGEERLRELIGIVNRCLIRRTSDILSKYLPVKIEQVVCCRLTPLQTELYKRFLRQAKPEEELREGKMSVSSLSSITSLKKLCNHPALIYDKCVAEEDGFEGTLGIFPPGYNSKAVEPQLSGKMLVLDYILAVTRSRSSDKVVLVSNYTQTLDLFEKLCRVRRYLYVRLDGTMSIKKRAKVVERFNSPSSPDFVFMLSSKAGGCGLNLIGANRLVMFDPDWNPANDEQAMARVWRDGQKKICYIYRLLSAGTIEEKIFQRQSHKKALSSCVVDEEQDVERHFSLGELKELFTLDEASLSDTHDRLHCRRCVNNRQVWPPPDGSDCTSDLAQWNHSTDKRGLQDEVLQAAWDASSTAITFVFHQRSHEEQRSSLIISWSGCSCLGKDTGKGGSLPHEALLSFILWEKIIKKGCMMFAQNLFYKKNFFGLKKKKKKKGIKA

SEQ ID NO: 8101 - protein, 747 aa, Mus musculus
MRRSLAPSQLARRKPEDRSSDDEDWQPGTVTPKKRKSSSETQVQECFLSPFRKPLTQLLNRPPCLDSSQHEAFIRSILSKPFKVPIPNYQGPLGSRALGLKRAGVRRALHDPLEEGALVLYEPPPLSAHDQLKLDKEKLPVHVVVDPILSKVLRPHQREGVKFLWECVTSRRIPGSHGCIMADEMGLGKTLQCITLMWTLLRQSPECKPEIEKAVVVSPSSLVKNWYNEVEKWLGGRIQPLAIDGGSKDEIDRKLEGFMNQRGARVPSPILIISYETFRLHVGVLKKGNVGLVICDEGHRLKNSENQTYQALDSLNTSRRVLISGTPIQNDLLEYFSLVHFVNSGILGTAHEFKKHFELPILKSRDAAASEADRQRGEERLRELIGIVNRCLIRRTSDILSKYLPVKIEQVVCCRLTPLQTELYKRFLRQAKPEEELREGKMSVSSLSSITSLKKLCNHPALIYDKCVAEEDGFEGTLGIFPPGYNSKAVEPQLSGKMLVLDYVLAVTRSRSSDKVVLVSNYTQTLDLFEKLCRVRRYLYVRLDGTMSIKKRAKVVERFNSPSSPDFVFMLSSKAGGCGLNLIGANRLVMFDPDWNPANDEQAMARVWRDGQKKICYIYRLLSAGTIEEKIFQRQSHKKALSSCVVDEEQDVERHFSLGELKELFTLDEASLSDTHDRLHCRRCVNNRQVWPPPDGSDCTSDLAQWNHSTDKRGLQDEVLQAAWDASSTAITFVFHQRSHEEQRGLH

SEQ ID NO: 8102 - protein, 747 aa, Mus musculus
MRRSLAPSQLARRKPEDRSSDDEDWQPGTVTPKKRKSSSETQVQECFLSPFRKPLTQLLNRPPCLDSSQHEAFIRSILSKPFKVPIPNYQGPLGSRALGLKRVGVRRALHDPLEEGALVLYEPPPLSAHDQLKLDKEKLPVHVVVDPILSKVLRPHQREGVKFLWECVTSRRIPGSHGCIMADEMGLGKTLQCITLMWTLLRQSPECKPEIEKAVVVSPSSLVKNWYNEVEKWLGGRIQPLAIDGGSKDEIDRKLEGFMNQRGARVPSPILIISYETFRLHVGVLKKGNVGLVICDEGHRLKNSENQTYQALDSLNTSRRVLISGTPIQNDLLEYFSLVHFVNSGILGTAHEFKKHFELPILKSRDAAASEADRQRGEERLRELIGIVNRCLIRRTSDILSKYLPVKIEQVVCCRLTPLQTELYKRFLRQAKPEEELREGKMSVSSLSSITSLKKLCNHPALIYDKCVAEEDGFEGTLGIFPPGYNSKAVEPQLSGKMLVLDYILAVTRSRSSDKVVLVSNYTQTLDLFEKLCRVRRYLYVRLDGTMSIKKRAKVVERFNSPSSPDFVFMLSSKAGGCGLNLIGANRLVMFDPDWNPANDEQAMARVWRDGQKKICYIYRLLSAGTIEEKIFQRQSHKKALSSCVVDEEQDVERHFSLGELKELFTLDEASLSDTHDRLHCRRCVNNRQVWPPPDGSDCTSDLAQWNHSTDKRGLQDEVLQAAWDASSTAITFVFHQRSHEEQRGLH

SEQ ID NO: 8103 - protein, 388 aa, Mus musculus
MASGLPRFLQALPAEHGPEPLRTRVQEPDLQQWGLTGIRLRSYQLEGVNWLVQCFHCQNGCILGDEMGLGKTCQTIALLIYLVGRLNDEGPFLVLCPLSVLSNWKEEMERFAPGLSCVTYTGDKEERARLQQDLRQESGFHVLLTTYEICLKDASFLKSFSWSVLAVDEAHRLKNQSSLLHRTLSEFSAVFRLLLTGTPIQNSLRELYSLLCVVEPDLFCREQVEDFVQRYQDIEKESKSASELHRLLQPFLLRRVKAQVATELPKKTEVVVYHGMSALQKKYYKAILMKDLDAFENETAKKVKLQNILTQLRKCVDHPYLFDGVEPEPFEVGEHLIEASGKLHLLDRLLAFLYSGGHRVLLFSQMTHMLDILQDYMDYRGDSPCPLQ

SEQ ID NO: 8104 - protein, 749 aa, Mus musculus
KDKHILAKIRWKYMIVDEGHRMKNHHCKLTQVLNTHYVAPRRLLLTGTPLQNKLPELWALLNFLLPTIFKSCSTFEQWFNAPFAMTGEKVDLNEEETILIIRRLHKVLRPFLLRRLKKEVEAQLPEKVEYVIKCDMSALQRVLYRHMQAKGVLLTDGSEKDKKGKGGTKTLMNTIMQLRKICNHPYMFQHIEESFSEHLGFTGGIVQGLDLYRASGKFELLDRILPKLRATNHKVLLFCQMTSLMTIMEDYFAYRGFKYLRLDGTTKAEDRGMLLKTFNEPGSEYFIFLLSTRAGGLGLNLQSADTVIIFDSDWNPHQDLQAQDRAHRIGQQNEVRVLRLCTVNSVEEKILAAAKYKLNVDQKVIQAGMFDQKSSSHERRAFLQAILEHEEQDEEEDEVPDDETVNQMIARHEEEFDLFMRMDLDRRREEARNPKRKPRLMEEDELPSWIIKDDAEVERLTCEEEEEKMFGRGSRHRKEVDYSDSLTEKQWLKAIEEGTLEEIEEEVRQKKSSRKRKRDSEAGSSTPTTSTRSRDKDEESKKQKKRGRPPAEKLSPNPPNLTKKMKKIVDAVIKYKDSSGRQLSEVFIQLPSRKELPEYYELIRKPVDFKKIKERIRNHKYRSLNDLEKDVMLLCQNAQTFNLEGSLIYEDSIVLQSVFTSVRQKIEKEDDSEGEESEEEEEGEEEGSESESRSVKVKIKLGRKEKAQDRLKGGRRRPSRGSRAKPVVSDDDSEEEQEEDRSGSGSEED

SEQ ID NO: 8105 - protein, 498 aa, Mus musculus
MKKSKLSETVREFKTTNRLLLTGTPLQNNLHELWSLLNFLFPNVFNSADDFDSWVDTNNCLGDQKLVERLHMVLCPFLFRRIKADVEKSLPPKKEVKIYVGLSKMQREWYTRILIKDIDILNSAGKMDKMRLLNILMQLRKCCNHPYLFDGAEPGPLYTTDTHLVTNSGKMVVLDKLLPKLKEQGSRVLIFSQMTRVLDILEDYCMWRNYEYCRLDEQTPHDERQDSINAYNEPNSTKFVFMLNTRAGGLGINLATADVVILYDSDWNPQIDLQPMDHAHRIGQRKTVRVFRFITDNTVEERIVERAEMKLRLDSIVIQQGRLVDQNLNKIGKDEMLQMIRRGATHVFASKESEITDEDIDGILERGAKKTAEMNEKLSKMGERSLRNFTMDTESSVYNFEGEDYREKQKSAFTEWIEPPKRERKANYAVDAYFREALRVSEPKAPKAPRPPKQLNVQDFQFFPPGLCELLEKEILYYRKTIGYKVPWSPDLPNAAQA

SEQ ID NO: 8106 - protein, 561 aa, Mus musculus
MEELEKDPRIAQKIKRFRNKQAQMKHIFTEPDEDLFNPDDIEIDRILEVAHTKDAETGEEVTHYLVKWCSLPYEESTWELEEDVDPAKVKEFESLQILPEVKHVERPASDAWQKLETSREYRNSNRLREYQLEGMNWLLFNWYNRKNCILADEMDLGKTIQSIAFLSEIFVRGIHGPFLIIAPLSTITNWEREFRTWTEMNAIVYHGSQISRQMIQQYEMVYRDAQGNPLSGVFKFHVVLTTFEMILADCPELKKIHWSCVIIDEAHRLKNRNCKLLEGLKLMALEHKVLLTGTPLQNSVEELFSLLNFLEPSQFPSETAFLEEFGDLKTEEQVKKLQSILKPMMLRRLKDDVEKNLAPKQETIIEVELTNIQKKYYRAILEKNFSFLTKGANQHNMPNLINTMMELRKCCNHPYLINGAEEKILEDFRKAHSSEASDFQLQAMIQAAGKLVLIDKLLPKLIAGGHKVLIFSQMVRCLDILEDYLIQRRYTYERIDGRVRGNLRRQPSTGSVSQTQTALSFFCAPEREAWESISQLLIPASYLILTGTHKMTCRLRPDVIV

SEQ ID NO: 8107 - protein, 2999 aa, Mus musculus
MHHGSGPQNVQHQLQRSRSFTGSEEEQPAHPNLPPSPAAPFAPSASPSAPQSPGYQIQQLMSRSPVAGQNVNITLQNVGPVVGGNQQITLAPLPLPNPTSPGFQFGAQQRRFEHGSPSYIQVTSPMSQQVQTQSPTQPSPGPGQTLQNVRAGAPGPGLGICSSSPTGGFVDASVLVRQISLSPSSGGHFVFQEAPGLTQMAQGAQVQLQHSGAPITVRERRLSQPHAQSGGTIHHLGPQSPAAAGGTGLQPLASPNHITTASLPPQISSIIQGQLIQQQQQVLQGQPMNRSLGFERTPGVLLPGVGGPSAFGMTSPPPPTSPSRTTMPPGLSSVPLTSMGSSGMKKVPKKLEEIPPASQEMAQMRKQCLDYHYKEMEALKEVFKEYLIELFFLQHLQGNMMDFLAFKKKHYAPLQAYLRQNDLDIEEEEEEEEEEEGKSEVINDEHQSLTGSLVVGPGSATEADPFKRQQVMPPTGGMPPTPQATQLTGQKQSQQQYDPSTGPPVQNAASLHTPPPQLPARLPPASVPATALPSTLQFSQQSQMVEASTQLQIPVKTQQLNAPIPAPLPSQLPAPSSQPAQPALHVPMPGKAQMQTSQLSSQTQTVASTRPPLDSAQPCQRSLPTSSSSSSLVPVSGSGPGPSPARSSPVNRPSSATNKALSPITSRSPGVAVSAPPKPQSPAQNAASSQDGSQDKLAEQITLENQIHQRIADLRKEGLWSLRRLPKLQEAPRPKSHWDYLLEEMQWMATDFAQERRWKLAAAKKLVRTVARHHEEKKLREERGKKEEQSRLRRIAATTAREIEYFWSNIEQVVEIKLQVELEEKRKKALNLQKVSRRGKESRLKGFDTSPEHSLDLGISGRKRKASTSLTDDEVEDEEETIEEEEAHEGLVDHHTELTNLAKEAELPLIDLMKLYEGAFLPNFQWPQPEPDHEESSGEEDVEDCPSDRESRRDSVLIDSLFIMDQFKAAERMSIGKSNTKDITEVTAVAEAILPKGSARVTTAVKFSAPSLLYGALRDYQKIGLDWLAKLYRKNLNGILADEAGLGKTVQIIAFFAHLACNEGNWGPHLVVMRSCNILKWELELKRWCPGLKTLSYVGSHRELKAKRQEWTEPNNFHICITSYKQFFRGYTAFSRVHWKCLVVDEMQRVKGMTERHWEAIFKLQSQQRLLLIDVPLHNTFLELWTMVHFLIPGISRPYLSFPLKAPNEENQDYYHKMVIRLHRVTQPFILRRTKRDVEKQLTRKYEHVLKCRLSSRQKALYEDVILQPRTQEALKSGHFVSVLSVLTRLQRICNHPGLVEPRVPGSSFAAGSLQYKSASLILRVLEREFWKETDLSIFDLIGLENKITRHEAELLCKKKVTRKLMEEVFASPPPSARPAAVKLKASRLFQPVQYGQKPEGRTVAFPSTHPPRMANTNTSTATPQGQVRGRPPIATFSANPDTKGGEVVKIAQLASIAGPQSRVAQPETPVTLQFQGNKFTLSHSQLRQLTAGQPLQLQGSVLQIVSAPGQPYLRAPGPVVMQTVSQAGAVHSTLGSKPPTSGPSPAPLTPQVGVPGRVAVSAMAVGEPGLASKPASPAAGPTQEEKSRLLKERLDQIHFINERRCSQAPVYGRDLLRICSLPGRRKRPLCWSLDSNFGKGPKGVNYDMSLSKSEGDLILTLSQESLQDVLGRVACVIPPVVATPPSLWVARPPSLYSSRLRALRQCLREHTGPYHRQLQQLTALRSLQFPELRLVQFDSGKLEALAILLQKLKSEGRRVLILSQMVLMLDILEMFLNFHYLTYVRIDENANSEQRQELMRSFNRDRRIFCALLSTHSRATGINLVEADTVVFYDNDLNPVMDAKAQEWCDRIGRCKDIHIYRLVSGNSIEEKLLKNGTKDLIREVAAQGNDYSMAFLTQRTIQELFEVYSPMDDTGFPVKAEEFVVLSQEPSVSETIAPKIARPFIEALKSIECLEEDAQRSTEEAVPGSSSVAVSSDSDGSRYDEEPSQLEELADFMEQLTPIEKYALNYLELFHTTTEQEKERISEDLVMASMKDWETRNARALQEREARLQLEQEEAELLTYTREDAYTMEYVYEDADGQTEVMPLWTPPTPPQDDNDIYIDSVMCLMYETTPIPEAKLPPVYVRKERKRHKTDPSAAGRKKKQRHGEAVVPPRSLFDRATPGMLKIRREGKEQKKNLLLKQQTPFAKPLPTYVKSSGEPAQDSPDWLIGEDWALLQAVKQLLELPLNLTIVSPAHTPNWDLVSDVVNSCSRIYRSSKQCRNRYENVIIPREEGKSKNNRPLRTSQIYAQDENATHTQLYTSHFELMKMTAGKRSPPIKPLLGMNPFQKNPKHASVLAESGINYDKPLPPIQVASLRAERIAKEKKALADQQKAQQPPVTQPPPQQQQQQQQQQQQQQQQQQPPPPPQQPPPPVPQPQAASSQTPAGQPAVQPQPQPQVQAQPQPVQPQSKGQPTMTTVGSVAVLAGTIKTSVTGTSIPTGTVSGNVIVNTIAGVPAATFQSINKRLASPVAPGTLTTSGGSAPAQVVHTQQRAVGSPATATTDLVSMTTTQGVRAVTSVTASAVVTTNLTPVQTPTRSLVTQVSQATGVQLPGKTITPAAHFQLLRQQQQQQQQQQQQQQTSQVQVPQLQSQAQSPAQIKAVSKLGPEHIIKMQKQKMQLPPQPPPPQAQPGPPQQPAQVQVQTPQPPQQQQSPQLTTVTAPRPGALLTGTTVTNLQVARLTRVPTSQLQAQGQMQTQTPQPAQVALAKPPVVSVPAAVVSSPGVTTLPMNVAGISVAIGQPQKTAGQTVVAQPVNVQQLLKYKQQTAVQQQKAIQPQVAQGQAAVQQKLTTQQITTQGPQQKVAYAAQPALKTQFLTTPISQAQKLAGTQQVQTQIQVAKLPQVVQQQTPVASIQQVASASQQASPQTVTLTQATAAGQQVQMIPTVTATAQLVQQKLIQQQVVTTASASLQTPGGPSPAQLPASSDSPSQQPKLQMRVPAVRLKTPTKPPCQ

SEQ ID NO: 8108 - protein, 3035 aa, Mus musculus
MHHGSGPQNVQHQLQRSRSFTGSEEEQPAHPNLPPSPAAPFAPSASPSAPQSPGYQIQQLMSRSPVAGQNVNITLQNVGPVVGGNQQITLAPLPLPNPTSPGFQFGAQQRRFEHGSPSYIQVTSPMSQQVQTQSPTQPSPGPGQTLQNVRAGAPGPGLGICSSSPTGGFVDASVLVRQISLSPSSGGHFVFQEAPGLTQMAQGAQVQLQHSGAPITVRERRLSQPHAQSGGTIHHLGPQSPAAAGGTGLQPLASPNHITTASLPPQISSIIQGQLIQQQQQVLQGQPMNRSLGFERTPGVLLPGVGGPSAFGMTSPPPPTSPSRTTMPPGLSSVPLTSMGSSGMKKVPKKLEEIPPASQEMAQMRKQCLDYHYKEMEALKEVFKEYLIELFFLQHLQGNMMDFLAFKKKHYAPLQAYLRQNDLDIEEEEEEEEEEEGKSEVINDEHQSLTGSLVVGPGSATEADPFKRQQVMPPTEQSKRPRLEVGHPGVVFQHPGVNAGVPLQQLMPTVQGGMPPTPQATQLTGQKQSQQQYDPSTGPPVQNAASLHTPPPQLPARLPPASVPATALPSTLQFSQQSQMVEASTQLQIPVKTQQLNAPIPAPLPSQLPAPSSQPAQPALHVPMPGKAQMQTSQLSSQTQTVASTRPPLDSAQPCQRSLPTSSSSSSLVPVSGSGPGPSPARSSPVNRPSSATNKALSPITSRSPGVAVSAPPKPQSPAQNAASSQDGSQDKLAEQITLENQIHQRIADLRKEGLWSLRRLPKLQEAPRPKSHWDYLLEEMQWMATDFAQERRWKLAAAKKLVRTVARHHEEKKLREERGKKEEQSRLRRIAATTAREIEYFWSNIEQVVEIKLQVELEEKRKKALNLQKVSRRGKESRLKGFDTSPEHSLDLGISGRKRKASTSLTDDEVEDEEETIEEEEAHEGLVDHHTELTNLAKEAELPLIDLMKLYEGAFLPNFQWPQPEPDHEESSGEEDVEDCPSDRESRRDSVLIDSLFIMDQFKAAERMSIGKSNTKDITEVTAVAEAILPKGSARVTTAVKFSAPSLLYGALRDYQKIGLDWLAKLYRKNLNGILADEAGLGKTVQIIAFFAHLACNEGNWGPHLVVMRSCNILKWELELKRWCPGLKTLSYVGSHRELKAKRQEWTEPNNFHICITSYKQFFRGYTAFSRVHWKCLVVDEMQRVKGMTERHWEAIFKLQSQQRLLLIDVPLHNTFLELWTMVHFLIPGISRPYLSFPLKAPNEENQDYYHKMVIRLHRVTQPFILRRTKRDVEKQLTRKYEHVLKCRLSSRQKALYEDVILQPRTQEALKSGHFVSVLSVLTRLQRICNHPGLVEPRVPGSSFAAGSLQYKSASLILRVLEREFWKETDLSIFDLIGLENKITRHEAELLCKKKVTRKLMEEVFASPPPSARPAAVKLKASRLFQPVQYGQKPEGRTVAFPSTHPPRMANTNTSTATPQGQVRGRPPIATFSANPDTKGGEVVKIAQLASIAGPQSRVAQPETPVTLQFQGNKFTLSHSQLRQLTAGQPLQLQGSVLQIVSAPGQPYLRAPGPVVMQTVSQAGAVHSTLGSKPPTSGPSPAPLTPQVGVPGRVAVSAMAVGEPGLASKPASPAAGPTQEEKSRLLKERLDQIHFINERRCSQAPVYGRDLLRICSLPGRRKRPLCWSLDSNFGKGPKGVNYDMSLSKSEGDLILTLSQESLQDVLGRVACVIPPVVATPPSLWVARPPSLYSSRLRALRQCLREHTGPYHRQLQQLTALRSLQFPELRLVQFDSGKLEALAILLQKLKSEGRRVLILSQMVLMLDILEMFLNFHYLTYVRIDENANSEQRQELMRSFNRDRRIFCALLSTHSRATGINLVEADTVVFYDNDLNPVMDAKAQEWCDRIGRCKDIHIYRLVSGNSIEEKLLKNGTKDLIREVAAQGNDYSMAFLTQRTIQELFEVYSPMDDTGFPVKAEEFVVLSQEPSVSETIAPKIARPFIEALKSIECLEEDAQRSTEEAVPGSSSVAVSSDSDGSRYDEEPSQLEELADFMEQLTPIEKYALNYLELFHTTTEQEKERISEDLVMASMKDWETRNARALQEREARLQLEQEEAELLTYTREDAYTMEYVYEDADGQTEVMPLWTPPTPPQDDNDIYIDSVMCLMYETTPIPEAKLPPVYVRKERKRHKTDPSAAGRKKKQRHGEAVVPPRSLFDRATPGMLKIRREGKEQKKNLLLKQQTPFAKPLPTYVKSSGEPAQDSPDWLIGEDWALLQAVKQLLELPLNLTIVSPAHTPNWDLVSDVVNSCSRIYRSSKQCRNRYENVIIPREEGKSKNNRPLRTSQIYAQDENATHTQLYTSHFELMKMTAGKRSPPIKPLLGMNPFQKNPKHASVLAESGINYDKPLPPIQVASLRAERIAKEKKALADQQKAQQPPVTQPPPQQQQQQQQQQQQQQQQQQPPPPPQQPPPPVPQPQAASSQTPAGQPAVQPQPQPQVQAQPQPVQPQSKGQPTMTTVGSVAVLAGTIKTSVTGTSIPTGTVSGNVIVNTIAGVPAATFQSINKRLASPVAPGTLTTSGGSAPAQVVHTQQRAVGSPATATTDLVSMTTTQGVRAVTSVTASAVVTTNLTPVQTPTRSLVTQVSQATGVQLPGKTITPAAHFQLLRQQQQQQQQQQQQQQTSQVQVPQLQSQAQSPAQIKAVSKLGPEHIIKMQKQKMQLPPQPPPPQAQPGPPQQPAQVQVQTPQPPQQQQSPQLTTVTAPRPGALLTGTTVTNLQVARLTRVPTSQLQAQGQMQTQTPQPAQVALAKPPVVSVPAAVVSSPGVTTLPMNVAGISVAIGQPQKTAGQTVVAQPVNVQQLLKYKQQTAVQQQKAIQPQVAQGQAAVQQKLTTQQITTQGPQQKVAYAAQPALKTQFLTTPISQAQKLAGTQQVQTQIQVAKLPQVVQQQTPVASIQQVASASQQASPQTVTLTQATAAGQQVQMIPTVTATAQLVQQKLIQQQVVTTASASLQTPGGPSPAQLPASSDSPSQQPKLQMRVPAVRLKTPTKPPCQ

SEQ ID NO: 8109 - protein, 1322 aa, Mus musculus
MDQFKAAERMSIGKSNTKDITEVTAVAEAILPKGSARVTTAVKFSAPSLLYGALRDYQKIGLDWLAKLYRKNLNGILADEAGLGKTVQIIAFFAHLACNEGNWGPHLVVMRSCNILKWELELKRWCPGLKTLSYVGSHRELKAKRQEWTEPNNFHICITSYKQFFRGYTAFSRVHWKCLVVDEMQRVKGMTERHWEAIFKLQSQQRLLLIDVPLHNTFLELWTMVHFLIPGISRPYLSFPLKAPNEENQDYYHKMVIRLHRVTQPFILRRTKRDVEKQLTRKYEHVLKCRLSSRQKALYEDVILQPRTQEALKSGHFVSVLSVLTRLQRICNHPGLVEPRVPGSSFAAGSLQYKSASLILRVLEREFWKETDLSIFDLIGLENKITRHEAELLCKKKVTRKLMEEVFASPPPSARPAAVKLKASRLFQPVQYGQKPEGRTVAFPSTHPPRMANTNTSTATPQGQVRGRPPIATFSANPDTKGGEVVKIAQLASIAGPQSRVAQPETPVTLQFQGNKFTLSHSQLRQLTAGQPLQLQGSVLQIVSAPGQPYLRAPGPVVMQTVSQAGAVHSTLGSKPPTSGPSPAPLTPQVGVPGRVAVSAMAVGEPGLASKPASPAAGPTQEEKSRLLKERLDQIHFINERRCSQAPVYGRDLLRICSLPGRRKRPLCWSLDSNFGKGPKGVNYDMSLSKSEGDLILTLSQESLQDVLGRVACVIPPVVATPPSLWVARPPSLYSSRLRALRQCLREHTGPYHRQLQQLTALRSLQFPELRLVQFDSGKLEALAILLQKLKSEGRRVLILSQMVLMLDILEMFLNFHYLTYVRIDENANSEQRQELMRSFNRDRRIFCALLSTHSRATGINLVEADTVVFYDNDLNPVMDAKAQEWCDRIGRCKDIHIYRLVSGNSIEEKLLKNGTKDLIREVAAQGNDYSMAFLTQRTIQELFEVYSPMDDTGFPVKAEEFVVLSQEPSVSETIAPKIARPFIEALKSIECLEEDAQRSTEEAVPGSSSVAVSSDSDGSRYDEEPSQLEELADFMEQLTPIEKYALNYLELFHTTTEQEKERISEDLVMASMKDWETRNARALQEREARLQLEQEEAELLTYTREDAYTMEYVYEDADGQTEVMPLWTPPTPPQDDNDIYIDSVMCLMYETTPIPEAKLPPVYVRKERKRHKTDPSAAGRKKKQRHGEAVVPPRSLFDRATPGMLKIRREGNEQKKNLLLKQQTPFAKPLPTYVKSSGEPAQDSPDWLIGEDWALLQAVKQLLELPLNLTIVSPAHTPNWDLVSDVVNSCSRIYRSSKQCRNRYENVIIPREEGKLICEAN

SEQ ID NO: 8110 - protein, 746 aa, Mus musculus
MASELGAGDDGSSTELAKPLYLQYLERALRLDHFLRQTSAIFNRNISSDDSEDGLDDNNPLLPESGDPLIQVKEEPPNSLLGETSGASSSGLLNPYSLNGVLQSESKSDKGNLYNFSKLKKSRKWLKSILLSDESSEADSQSEDNDDEEEELSLSREELHNMLRLHKYKKLHQNKYSKDKELQQYQYYSAGLLSTYDPFYEQQRHLLGPKKKKFKEDKKLKAKLKKVKKKRRRDEEFSSEESPRHHHHQTKVFAKFSHDAPPPGTKKKHLSIEQLNARRRKVWLSIVKKELPKANKQKSSARNLFLTNSRKLAHQCMKEVRRAALQAQKNCKETLPRARRLTKEMLLYWKKYEKVEKEHRKRAEKEALEQRKLDEEMREAKRQQRKLNFLITQTELYAHFMSRKRDMGHDGIQEEILRKLEDSSTQRQIDIGGGVVVNITQEDYDSNHFKAQALKNAENAYHIHQARTRSFDEDAKESRAAALRAADKSGSGFGESYSLANPSIRAGEDIPQPTIFNGKLKGYQLKGMNWLANLYEQGINGILADEMGLGKTVQSIALLAHLAERENIWGPFLIISPASTLNNWHQEFTRFVPKFKVLPYWGNPHDRKVIRRFWSQKTLYTQDAPFHVVITSYQLVVQDVKYFQRVKWQYMVLDEAQALKSSSSVRWKILLQFQCRNRLLLTGTPIQNTMAELWALLHFIMPTLFDSHEEFNEWFSKDIESHAENKSAIDENQLSRLHMILKPFML

SEQ ID NO: 8111 - protein, 825 aa, Mus musculus
ESLPGSLPPDLRTKATVELKALRLLNFQRQLRQEVVACMRRDTTLETALNSKAYKRSKRQTLREARMTEKLEKQQKIEQERKRRQKHQEYLNSILQHAKDFKEYHRSVAGKIQKLSKAVATWHANTEREQKKETERIEKERMRRLMAEDEEGYRKLIDQKKDRRLAYLLQQTDEYVANLTNLVWEHKQAQAAKEKKKRRRRKKKAEENAEGGEPALGPDGEPIDESSQMSDLPVKVTHTETGKVLFGPEAPKASQLDAWLEMNPGYEVAPRSDSEESESDYEEEDEEEESSRQETEEKILLDPNSEEVSEKDAKQIIETAKQDVDDEYSMQYSARGSQSYYTVAHAISERVEKQSALLINGTLKHYQLQGLEWMVSLYNNNLNGILADEMGLGKTIQTIALITYLMEHKRLNGPYLIIVPLSTLSNWTYEFDKWAPSVVKISYKGTPAMRRSLVPQLRSGKFNVLLTTYEYIIKDKHILAKIRWKYMIVDEGHRMKNHHCKLTQVLNTHYVAPRRILLTGTPLQNKLPELWALLNFLLPTIFKSCSTFEQWFNAPFAMTGERVDLNEEETILIIRRLHKVLRPFLLRRLKKEVESQLPEKEIISSLPSIVNDKYGRKVLLYLMSPRDPAHTVPELIELLQKGDGNAHSKKDTAIRRRELLESISPALLSYLQGHTQEVVLDKSACVLVSDMLGSATGDVQPAMDAIASLAAAELHPGGKDGELHVAEHPAGHLVLKWLLEQDKKMKESGKEGCFAKTLVERVGMKNLKSWASINRGAIILSSLLQSCDQEVVNKVKGGLKPLIPTLEKNKSSSRGIQTLLEKLTA

SEQ ID NO: 8112 - protein, 582 aa, Mus musculus
MDISAPQSRADSRKDRWCPGERCLAQSLDNKKLCEASIKSITVDGNGKPFAVVLYPDFQEKTIPLQRLQEVKSTKDYSRSLIFDDKDLEKPYFPDRKIPSLASAFQLSEDGDSIPYTINRYLRDYQREGAQFLYRHYIEGRGCILGDDMGLGKTIQVISFLAAVLHKKGTREDIENNMPEFLLKSMKKKPPSTAKKMFLIVAPLSVLYNWKDELDTWGYFRVTVLHGSKKDNELLRLKQRKCEIALTTYETLRLCLEELNSLEWSAIIVDEAHRIKNPKARVTEVMKAVKCKVRIGLTGTVLQNNMKELWCVMDWAVPGLLGSRIHFKKQFSDPVEHGQRHTATKRELATGRKAMHRLAKKMSGWFLRRTKTLIKGQLPKKEDRMVYCSLTDFQKAVYQTVLETEDVALILTSSQPCTCGSGQKRRKCCYKTNSRGDTVRTLCLSYLTVLQKVANHVALLQAASTSKHQETVIKRICDRVFSRFPDFVQKSKDAAFETLSDPKYSGKMKVLQQLLNHFRKQRDKVLLFSFSTKLLDVLQQYCMASGLDYRRLDGSTKSEERLKIVKEFNSSQDVNICLVSPM

SEQ ID NO: 8113 - protein, 530 aa, Mus musculus
MWLTMPTAGSKKKAPTPQISCLTSESYTQLDFLPDKLRTKLLPFQKDGIVFALRRDGRCMVADEMGLGKTIQAIAIAYFYKEEWPLLIVVPSSLRYPWIEELEKWIPELEPEEINVVMNKTDIGRIPGSRVTVLGYGLLTTDAETLLDALNTQNFRVVIVDESHYMKSRTAARSKILLPMVQKARRAILLTGTPALGRPEELFMQIEALFPQKFGTWIEYAKRYCNAHVRYFGKRRQWDCRGASNLSELHQLLNDIMIRRLKSEVLSQLPPKVRQRIPFDLPPAAVKELNASFEEWQKLMRAPNSGAMETVMGLITRMFKQTAIAKAGAVKDYIKMLLQNDSLKFLVFAHHLSMLQACTEAVIESKSRYIRIDGSVPSSERIHLVNQFQKDPDTRVAILSIQAAGQGLTFTAASHVVFAELYWDPGHIKQAEDRAHRIGQCSSVNIHYLIANGTLDSLMWAMLNRKAQVTGSTLNGRKEKLQATEDDKEKWGFLQFAEAWTPSDSFEELKDSVFTHFQNLRLGCLEKQPE

SEQ ID NO: 8114 - protein, 1069 aa, Mus musculus
MPTAGSKKKAPTPQISCLTSESYTQLDFLPDKLRTKLLPFQKDGIVFALRRDGRCMVADEMGLGKTIQAIAIAYFYKEEWPLLIVVPSSLRYPWIEELEKWIPELEPEEINVVMNKTDIGRIPGSRVTVLGYGLLTTDAETLLDALNTQNFRVVIVDESHYMKSRTAARSKILLPMVQKARRAILLTGTPALGRPEELFMQIEALFPQKFGTWIEYAKRYCNAHVRYFGKRRQWDCRGASNLSELHQLLNDIMIRRLKSEVLSQLPPKVRQRIPFDLPPAAVKELNASFEEWQKLMRAPNSGAMETVMGLITRMFKQTAIAKAGAVKDYIKMLLQNDSLKFLVFAHHLSMLQACTEAVIESKSRYIRIDGSVPSSERIHLVNQFQKDPDTRVAILSIQAAGQGLTFTAASHVVFAELYWDPGHIKQAEDRAHRIGQCSSVNIHYLIANGTLDSLMWAMLNRKAQVTGSTLNGRKEKLQATEDDKEKWGFLQFAEAWTPSDSFEELKDSVFTHFEKEKQHDIRSFFLPKLKKRQLETTCDDPEAFKEKITVASDPRKMATSDSTADKNGCEPEAKRLKSLSTEDHSSALEEGPSLQARATSMEVVHEVKPPLASPALPEKGWQCGFCTFLNNPGLPYCEMCENPRSRAAGRNHLQDNNKNDEDAAQESTSKSDQAGLECERQCPERLEAEQSANSKEEALEGGGEDRLPSQPEIGQLNNSGTLPVRETFMFCASRNTDRIHLYTKDGKPMNCNFIPLDIKLDLWEDLPATFQLKQNRSLILRFVREWSSLTAMKQRVLRKSGQLFCSPLLASEEITKQQAKENNTRRYITKEDVAKASMNKVKSDGGHIRLITKESMTQDSSLKKIDSACVPSLNPCPADLTVEPSPSKGYIQAVDKEGRPLCLRCQHPTCQPEQTAKASAWDSRFCSLKCQEEFWIRSNNSYLRAQVFATEHGVCQHCGVDAQELFLRMRDAPKSHRKSLLNAAWTAKLPLEQLNEMLRNPGEGHFWQVDHIRPVYEGGGQCSLDNLQTLCTVCHKERTAQQAKERSQVRRLSLATKHGSDITRFLVKK

SEQ ID NO: 8115 - protein, 616 aa, Mus musculus
MPTAGSKKKAPTPQISCLTSESYTQLDFLPDKLRTKLLPFQKDGIVFALRRDGRCMVADEMGLGKTIQAIAIAYFYKEEWPLLIVVPSSLRYPWIEELEKWIPELEPEEINVVMNKTDIGRIPGSRVTVLGYGLLTTDAETLLDALNTQNFRVVIVDESHYMKSRTAARSKILLPMVQKARRAILLTGTPALGRPEELFMQIEALFPQKFGTWIEYAKRYCNAHVRYFGKRRQWDCRGASNLSELHQLLNDIMIRRLKSEVLSQLPPKVRQRIPFDLPPAAVKELNASFEEWQKLMRAPNSGAMETVMGLITRMFKQTAIAKAGAVKDYIKMLLQNDSLKFLVFAHHLSMLQACTEAVIESKSRYIRIDGSVPSSERIHLVNQFQKDPDTRVAILSIQAAGQGLTFTAASHVVFAELYWDPGHIKQAEDRAHRIGQCSSVNIHYLIANGTLDSLMWAMLNRKAQVTGSTLNGRKEKLQATEDDKEKWGFLQFAEAWTPSDSFEELKDSVFTHFEKEKQHDIRSFFLPKLKKRQLETTCDDPEAFKEKITVASDPRKMATSDSTADKNGCEPEAKRLKSLSTEDHSSALEEGPSLQARATSMEVVHGQAPIGFSSPS

SEQ ID NO: 8116 - protein, 518 aa, Mus musculus
MEASQGLAEVETLSPQLAESYLRYVQEAKEAAKNGDLEESLKLFNLAKDIFPTKKVMSRIQKLQEALEQLAEEEDDDEFIDVCSSGLLLYRELYEKLFEHQKEGIAFLYSLYKDGRKGGILADDMGLGKTVQIIAFLSGMFDASLVNHVLLIMPTNLINTWVNEFAKWTPGMRVKTFHGSSKSERTRSLTRIQQRNGVVITTYQMLLNNWQQLASFNGQAFVWDYVILDEAHKIKSASTKSAVCARAIPASNRLLLTGTPVQNNLQELWSLFDFACQGSLLGTLKTFKMEYEHPIIRAREKDATPGEKALGLKISENLMEIIKPYFLRRTKEEVQTKKADNPEARLGEKNPAGEAICDMFSLARKNDLIVWIRLLPLQEEIYRKFVSLDHIKELLMETRSPLAELGVLKKLCDHPRLLSARACRLLNLGTATFSAQDENEQEDVSNMNSIDHLPDKTLIQESGKMIFLMSLLERLQDEGHQTLVFSQSIKILNIIERLLKNKHFKTLRIDGTVTHLWE

SEQ ID NO: 8117 - protein, 1069 aa, Mus musculus
MPTAGSKKKAPTPQISCLTSESYTQLDFLPDKLRTKLLPFQKDGIVFALRRDGRCMVADEMGLGKTIQAIAIAYFYKEEWPLLIVVPSSLRYPWIEELEKWIPELEPEEINVVMNKTDIGRIPGSRVTVLGYGLLTTDAETLLDALNTQNFRVVIVDESHYMKSRTAARSKILLPMVQKARRAILLTGTPALGRPEELFMQIEALFPQKFGTWIEYAKRYCNAHVRYFGKRRQWDCRGASNLSELHQLLNDIMIRRLKSEVLSQLPPKVRQRIPFDLPPAAVKELNASFEEWQKLMRAPNSGAMETVMGLITRMFKQTAIAKAGAVKDYIKMLLQNDSLKFLVFAHHLSMLQACTEAVIESKSRYIRIDGSVPSSERIHLVNQFQKDPDTRVAILSIQAAGQGLTFTAASHVVFAELYWDPGHIKQAEDRAHRIRQCSSVNIHYLIANGTLDSLMWAMLNRKAQVTGSTLNGRKEKLQATEDDKEKWGFLQFAEAWTPSDSFEELKDSVFTHFEKEKQHDIRSFFLPKLKKRQLETTCDDPEAFKEKITVASDPRKMATSDSTADKNGCEPEAKRLKSLSTEDHSSALEEGPSLQARATSMEVVHEVKPPLASPALPEKGWQCGFCTFLNNPGLPYCEMCENPRSRAAGRNHLQDNNKNDEDAAQESTSKSDQAGLECERQCPERLEAEQSANSKEEALEGGGEDRLPSQPEIGQLNNSGTLPVRETFMFCASRNTDRIHLYTKDGKPMNCNFIPLDIKLDLWEDLPATFQLKQNRSLILRFVREWSSLTAMKQRVLRKSGQLFCSPLLASEEITKQQAKENNTRRYITKEDVAKASMNKVKSDGGHIRLITKESMTQDSSLKKIDSACVPSLNPCPADLTVEPSPSKGYIQAVDKEGRPLCLRCQHPTCQPEQTAKASAWDSRFCSLKCQEEFWIRSNNSYLRAQVFATEHGVCQHCGVDAQELFLRMRDAPKSHRKSLLNAAWTAKLPLEQLNEMLRNPGEGHFWQVDHIRPVYEGGGQCSLDNLQTLCTVCHKERTAQQAKERSQVRRLSLATKHGSDITRFLVKK

SEQ ID NO: 8118 - protein, 421 aa, Mus musculus
MYDFDSADDFDSWFDTNNCLGDQKLVERLHMVLCPFLLRRIKADVEKSLPPKKEVKIYVGLSKMQREWYTRILIKDIDILNSAGKMDKMRLLNILMQLRKCCNHPYLFDGAEPGPLFTTDMHLVTNSGKMVVLDKLLPKLKEQGSRVLIFSQMTRVLDILEDYCMWRNYEYCRLDEQTPHERQDSINAYNEPNSTKFVFMLSTRAGGLGINLATADVVILYDSDWNPQVDLQAMDYAHRIGQRKTVRVFRFITDNTVEERIVERAEMKLRLDSIVIQQGRLVDQNLNKIGKDEMLQMIRRGATHVFASKESEITDEDIDGILERGAKKTAEMNEKLSKMGESSLRNFMMDTESSVYYFEGEDYREKQKIAFTEWIEPPKRERKANYAVDAYFREALRVSLKHPRHLDLQNNQMFRISSSFL

SEQ ID NO: 8119 - protein, 377 aa, Mus musculus
MYDFDSADDFDSWFDTNNCLGDQKLVERLHMVLCPFLLRRIKADVEKSLPPKKEVKIYVGLSKMQREWYTRILIKDIDILNSAGKMDKMRLLNILMQLRKCCNHPYLFDGAEPGPLFTTDMHLVTNSGKMVVLDKLLPKLKEQGSRVLIFSQMTRVLDILEDYCMWRNYEYCRLDEQTPHERQDSINAYNEPNSTKFVFMLSTRAGGLGINLATADVVILYDSDWNPQVDLQAMDYAHRIGQRKTVRVFRFITDNTVEERIVERAEMKLRLDSIVIQQGRLVDQNLNKIGKDEMLQMIRRGATHVFASKESEITDEDIDGILERGAKKTAEMNEKLSKMGESSLRNFMMDTESSVYYFEGEDYREKQKIAFTEWIEP

SEQ ID NO: 8120 - protein, 841 aa, Mus musculus
MSYTFTRGPVWKYSQSVQYGSHENIPRLSYSTFLPHFEFQDIIPPDDFLTSDEEQDLVLFGTMRGQVVGLRYYTGVVNNNEMVALQREPNNPYDKNAIKVNNVNGNQVGHIKREIAAAVAYIMDNKLAQVEGVVPFGASNTFTMPLYMTYWGKEENRNVVLEQLKKHGFKLGPTPKTLGSSLENAWGSGRRGPSYSRPAHVAVQMTTDQLKTEFDKLFEDLKEDDRTVEMEPAEAIETPLLPHQKQALAWMIARENSKELPPFWEQRNDLYYNTITNFSVKERPENVHGGILADDMGLGKTLTAIAVILTNFDDGRPLLSKRGKKNHPGKEYKDETIKRRGSNMDKKEDGHSESSTCGEEPSISGTPEKSSCTLSQLSSVCPKRRKISVQYIENSDSEEIETSELPQKMKGKLKNVQLNTKSRVKGSSKVKEDSKFALTFFASATQRKMLKKGMSMMECSEACDTGERTRATLIICPLSVLSNWIDQFGQHVKSEVHLNFYVYYGPDRIRDSAWLSKQDIILTTYNILTHDYGTKDDSPLHSIKWLRVILDEGHAIRNPNAQQTKAVLELEAERRWVLTGTPIQNSLKDLWSLLSFLKLKPFIDREWWYRIIQRPVTTGDEGGLRRLQSLIKNITLRRTKTSKIKGKSVLELPERKVFIQHITLSEEERKIYQSVKNEGKAAIGRYFTEGTVLAHYADVLGLLLRLRQICCHTHLLTNGMSSSGPSRSDTPEELRKMLIEKMKIILSSGSDEECAICLDSLTFPVITHCAHVFCKPCICQVIHSEQPHAKCPLCRNEIHGDNLLECPPEELACDSDKESSMEWKSSSKVKSTCVNILMFHT

SEQ ID NO: 8121 - protein, 1002 aa, Mus musculus
MSYTFTRGPVWKYSQSVQYGSHENIPRLSYSTFLPHFEFQDIIPPDDFLTSDEEQDLVLFGTMRGQVVGLRYYTGVVNNNEMVALQREPNNPYDKNAIKVNNVNGNQVGHIKREIAAAVAYIMDNKLAQVEGVVPFGASNTFTMPLYMTYWGKEENRNVVLEQLKKHGFKLGPTPKTLGSSLENAWGSGRRGPSYSRPAHVAVQMTTDQLKTEFDKLFEDLKEDDRTVEMEPAEAIETPLLPHQKQALAWMIARENSKELPPFWEQRNDLYYNTITNFSVKERPENVHGGILADDMGLGKTLTAIAVILTNFDDGRPLLSKRGKKNHPGKEYKDETIKRRGSNMDKKEDGHSESSTCGEEPSISGTPEKSSCTLSQLSSVCPKRRKISVQYIENSDSEEIETSELPQKMKGKLKNVQLNTKSRVKGSSKVKEDSKFALTFFASATQRKMLKKGMSMMECSEACDTGERTRATLIICPLSVLSNWIDQFGQHVKSEVHLNFYVYYGPDRIRDSAWLSKQDIILTTYNILTHDYGTKDDSPLHSIKWLRVILDEGHAIRNPNAQQTKAVLELEAERRWVLTGTPIQNSLKDLWSLLSFLKLKPFIDREWWYRIIQRPVTTGDEGGLRRLQSLIKNITLRRTKTSKIKGKSVLELPERKVFIQHITLSEEERKIYQSVKNEGKAAIGRYFTEGTVLAHYADVLGLLLRLRQICCHTHLLTNGMSSSGPSRSDTPEELRKMLIEKMKIILSSGSDEECAICLDSLTFPVITHCAHVFCKPCICQVIHSEQPHAKCPLCRNEIHGDNLLECPPEELACDSDKESSMEWKSSSKINALMHALIELRTKDPNIKSLVVSQFTTFLSLIETPLKASGFVFTRLDGSMAQKKRVESIQRFQNTEAGSPTISTVLKAGGVGLNLCARSRVFLMDPAWNPAAEDQCFDRCHRLGQKQEVIITKFIVKDSVEENMLKIQNTKRDLAAGAFATKKTDANDMKQAKINEIRTLIDL

SEQ ID NO: 8122 - protein, 467 aa, Mus musculus
MPGSRPTCRALLAAESGGAAGCLPLARWTSPPRSPAQTPAKVISFLAAVLHKKGTREDIENNMPEFLLKSMKKKPPSTAKKMFLIVAPLSVLYNWKDELDTWGYFRVTVLHGSKKDNELLRLKQRKCEIALTTYETLRLCLEELNSLEWSAIIVDEAHRIKNPKARVTEVMKAVKCKVRIGLTGTVLQNNMKELWCVMDWAVPGLLGSRIHFKKQFSDPVEHGQRHTATKRELATGRKAMHRLAKKMSGWFLRRTKTLIKGQLPKKEDRMVYCSLTDFQKAVYQTVLETEDVALILTSSQPCTCGSGQKRRKCCYKTNSRGDTVRTLCLSYLTVLQKVANHVALLQAASTSKHQETVIKRICDRVFSRFPDFVQKSKDAAFETLSDPKYSGKMKVLQQLLNHFRKQRDKVLLFSFSTKLLDVLQQYCMASGLDYRRLDGSTKSEERLKIVKEFNSSQDVNICLVSTM

SEQ ID NO: 8123 - protein, 381 aa, Mus musculus
MEPDTATEAATVAVSDARATVVVVEDEQPGPSTFKEEGAAAAATEGTTATEKGEKKEKITSPFQLKLAAKASKSEKEMDPEYEEKMKADRAKRFEFLLKQTELFAHFIQPSAQKSPTSPLNMKLARPRVKKDDKQSLISVGDYRHRRTEQEEDEELLSESRKTSNVCVRFEVSPSYVKGGPLRDYQIRGLNWLISLYENGVNGILADEMGLGKTLQTIALLGYLKHYRNIPGPHMVLVPKSTLHNWMNEFKRWVPSLRVICFVGDKDVRAAFIRDEMMPGEWDVCVTSYEMVIKEKSVFKKFHWRYLVIDEAHRIKNEKSKLSEIVREFKSTNRLLLTGTPLQNNLHELWALLNFLLPDVFNSADVSLKQSICVRGSGAQG

SEQ ID NO: 8124 - protein, 278 aa, Mus musculus
MDKMRLLNILMQLRKCCNHPYLFDGAEPGPPYTTDMHLVTNSGKMVVLDKLLPKLKEQGSRVLIFSQMTRVLDILEDYCMWRNYEYCRLDGQTPHDERQDSINAYNEPNSTKFVFMLSTRAGGLGINLATADVVILYDSDWNPQVDLQAMDRAHRIGQTKTVRVFRFITDNTVEERIVERAEMKLRLDSIVIQQGRLVDQNLNKIGKDEMLQMIRHGATHVFASKESEITDEDIDGILERGAKKTAEMNEKLSKMGESSLRNFTMDTESSVYNFEGED

SEQ ID NO: 8125 - protein, 394 aa, Mus musculus
MKELWCVMDWAVPGLLGSRIHFKKQFSDPVEHGQRHTATKRELATGRKAMHRLAKKMSGWFLRRTKTLIKGQLPKKEDRMVYCSLTDFQKAVYQTVLETEDVALILTSSQPCTCGSGQKRRKCCYKTNSRGDTVRTLCLSYLTVLQKIANHVALLQAASTSKHQETVIKRICDRVFSRFPDFVQKSKDAAFETLSDPKYSGKMKVLQQLLNHFRKQRDKVLLFSFSTKLLDVLQQYCMASGLDYRRLDGSTKSEERLKIVKEFNSSQDVNICLVSTMAGGLGLNFVGANVVILFDPTWNPANDLQAVDRAYRIGQCRDVKVLRLISLGTVEEIMYLRQVYKQQLHCVVVGSENAKRYFEAVQGSKEHRGELFGVHNLFKLRSQGSCLTRDILEV

SEQ ID NO: 8126 - protein, 473 aa, Mus musculus
MPEKFSSWEDFEEEHGKGREYGYASLHKELEPFLLRRVKKDVEKSLPAKVEQILRMEMSALQKQYYKWILTRNYKALSKGSKGSTSGFLNIMMELKKCCNHCYLIKPPDNNEFYNKQEALQHLIRSSGKLILLDKLLIRLRERGNRVLIFSQMVRMLDILAEYLKYRQFPFQRLDGSIKGELRKQALDHFNAEGSEDFCFLLSTRAGGLGINLASADTVVIFDSDWNPQNDLQAQARAHRIGQKKQVNIYRLVTKGSVEEDILERAKKKMVLDHLVIQRMDTTGKTVLHTGSAPSSSTPFNKEELSAILKFGAEELFKEPEGEEQEPQEMDIDEILKRAETHENEPGPLSVGDELLSQFKVANFSNMDEDDIELEPERNSKNWEEIIPEEQRRRLEEEERQKELEEIYMLPRMRNCAKQISFNGSEGRRSRSRRYSGSDSDSISERKRPKKRGRPRTIPRENIKGFSDAEIRR

SEQ ID NO: 8127 - protein, 1104 aa, Mus musculus
MTDPMMDFFDDANLFGETLEGLSDDTFVQPGPVSLVDELNLGAEFEPLHIDSLNHVQGTPTHQKMADFEQLSQFDSMKFHPVNQSFGSPVEHVLSPHSQFNCSPIHPPNQPNGLFQDVADGSPMWGHQTATGLANQNGSPFHQPGHSHSLHQNKSFVAHPDFALFQASEHQTQCSSLHSQQSRSNLNPGQNSLGQAKNFLDANVSGAHRVNVNHLATAPSSQQTLPVQFSPTANPPAHFLKCSSHQEGNYNRPSPSMTSCSVSNSQQFPSHYSFSSGHVSPSSLLQSSAGLAPGHTNQALSDFAGSNSFSPHRGMKQEPTQHLLNPTPSLNSNNFQILHSSHPQGNYSNSKLSPVHMNFPDPVDAGPPVGHFNDHAETNGFSSLEENLLHHVDSHAEPFAGLDPEDLLQEGLLPQFDESPFGQDNSNHVLDHDLDRQFTSHLVSRPSDMAQTQLQYQARGWPSPLSTNHQHLHSRNHLCLQRQPPSSKKSDGSGTYTKLQNTQVRVMSEKKPRKRVESESKQEKANRIISEAIARAKERGERNIPRVMSPENFPSASVEGKEEKRGRRMKSKPKDRDNKKPKTYSKLKEKTKIGKLIITLGKKHKRRNESSDELSDAEQRSQHTFKEQHSQKRRSNRQIKRKKYAEDAEGKQSEEEVKGSLRVKRNSAPPPGEQPLQLFVENPSEEDAAIVDKILACRTVKKEVSPGVMLDIEEFFVKYKNYSYLHCEWATEQQLLKDKRIQQKIKRFKLRQAQRAHFLADMEEEPFNPDYVEVDRILEVSFCEDKDTGESVIYYLVKWCSLPYEDSTWELKEDVDLAKIEEFEQLQASRPDTRHLDRPPSNIWKKIEQSREYKNGNQLREYQLEGLNWLLFNWYNRRNCILADEMGLGKTIQSITFLYEILLTGIRGPFLIIAPLSTIANWEREFRTWTDINVVVYHGSLISRQMIQQYEMYFRDSQGRIIRGAYRFQAIITTFEMILGGCGELNAIDWRCVIIDEAHRLKNKNCKLLEGLKLMNLEHKVLLTGTPLQNTVEELFSLLHFLEPLRFPSESTFMQEFGDLKTEEQVQKLQAILKPMMLRRLKEDVEKKLAPKEETIIEVELTNI

SEQ ID NO: 8128 - protein, 482 aa, Mus musculus
MPTAGSKKKAPTPQISCLTSESYTQLDFLPDKLRTKLLPFQKDGIVFALRRDGRCMVADEMGLGKTIQAIAIAYFYKEEWPLLIVVPSSLRYPWIEELEKWIPELEPEEINVVMNKTDIGRIPGSRVTVLGYGLLTTDAETLLDALNTQNFRVVIVDESHYMKSRTAARSKILLPMVQKARRAILLTGTPALGRPEELFMQIEALFPQKFGTWIEYAKRYCNAHVRYFGKRRQWDCRGASNLSELHQLLNDIMIRRLKSEVLSQLPPKVRQRIPFDLPPAAVKELNASFEEWQKLMRAPNSGAMETVMGLITRMFKQTAIAKAGAVKDYIKMLLQNDSLKFLVFAHHLSMLQACTEAVIESKSRYIRIDGSVPSSERIHLVNQFQKDPDTRVAILSIQAAGQGLTFTAASHVVFAELYWDPGHIKQAEDRAQPNRTVQFCEYSLPYCKWYSGQPNVGNAESKGSGHREHTEWQEGETPGYGR

SEQ ID NO: 8129 - protein, 558 aa, Mus musculus
KKDVENELSDKIEILTYCQLTSRQKLLYQALKNKISIEDLLQSSMGSTQQAQNTTSSLMNLVMQFRKVCNHPELFERQETWSPFHISLKPYEISKFIYRHGQIRVFNHSRDRWLKVLLSPFAPDYIQQSLFHRKGINEGSCFSFLRFIDVSPAEMANLMLQGLLARWLALFLSLKASYRLHQLRSWAEPDGTSHQSYLRNKDFLLGVDFPLSFPNLCSCPLLKSLVFSSHCKAVSGYSDHVVHQRRSATSSLRCCLLTELPSFLCVASPRVTAVPLDSYCNDRSAEYERRVLKEGGSLAAKQCLLNGAPELATDWLSRRSQFFPEPAGGLLSIRPQNGWSFIRIPGKESLITDSGKLYALDVLLTRLKSQGHRVLIYSQMTRMIDLLEEYMVYRKHTYMRLDGSSKISERRDMVADFQTRNDIFVFLLSTRAGGLGINLTAADTVIFYDSDWNPTVDQQAMDRAHRLGQTKQVTVYRLICKGTIEERILQRAKEKSEIQRMVISGGNFKPDTLKPKEVVSLLLDDEELEKKLRLRQEEKRQQEESNRVKERKRKREKY

SEQ ID NO: 8130 - protein, 910 aa, Mus musculus
MSLPLTEEQRKKIEENRQKALARRAEKLSEQPQSAASGSSAAGPSQSKQGSLLNLLAEPSKPVGHASIFKQQNLSNSFPTDQRPHSSRCSQPSPAEETTGLWKTQGEMSTACPKPNPSPPGASNQPLLGYKSSEGQPQATWDTGASSSGPFPRDPELEAKAARPSTSRQSISDSFYVLGGKTPRTEGRPPNILQTTPQNTGFLRGACIKTGDRFRVKIGYNQELIAVFKSLPSRHYDSFTKTWDFSMSDYRALMKAVERLSTVSLKPLDEAGGSVGGQTSLPSAPSLTFVTGKCMLISRVRFEVDIGYSEAVIGLFKQMESRSYDIKTRKWSFLLEEHNKLIARSRELKQVQLDPLPKTVTLAFASQLEKTSPKLKADVPEADLSGVDAKLVSSLMPFQREGVSFAISKRGRLLLADDMGLGKTVQAICIAAFYRKEWPLLVVVPSSVRFTWEQAFLRWLPSLSPENINVVVTGKGRLTAGLVNIVSFDLLCKLERQLKTPFKVVIIDESHFLKNIKTARCRAAVPILKVAKRVILLSGTPAMSRPAELYTQIIAVKPTFFPQFHAFGLRYCDAKRLPWGWDYSGSSNLGELKLLLEEAIMLRRLKSDVLSQLPAKQRKMVVVNPGRISSRAKAALDAAAKEMTKDKTKQQQKEALLVFFNRTAEAKIPCVVEYILDLLDSGREKFLVFAHHKVILDAVAKELERKNVQHIRIDGSTPSADREAQCQRFQLSKGHTVALLSITAANMGLTFSTADLVVFAELFWNPGVLIQAEDRVHRIGQTNSVSIHYLVAKGTADDYLWPLIQEKIKVLGEAGLSETNFSEMTEATDYVHKDPKQKTIYDLFQQSFEDDGNDMEFLEAAESFELGSTSGTSGNISQDLGDLLDEDEGSPPKKSRFEFFDNWDSFSSPF

SEQ ID NO: 8131 - protein, 910 aa, Mus musculus
MSLPLTEEQRKKIEENRQKALARRAEKLSEQPQSTASGSSAAGPSQSKQGSLLNLLAEPSKPVGHASIFKQQNLSNSLPTDQRPHSSRCSQPSPAEETTGLWKTQGEMSTACPKPNPSPPGASNQPLLGYKSSEGQPQATWDTGASSSGPFPRDPELEAKAARPSTSRQSISDSFYVLGGKTPRTEGRPPNILQTTPQNTGFLRGACIKTGDRFRVKIGYNQELIAVFKSLPSRHYDSFTKTWDFSMSDYRALMKAVERLSTVSLKPLDEAGGSVGGQTSLPSAPSLTFVTGKCMLISRVRFEVDIGYSEAVIGLFKQMESRSYDIKTRKWSFLLEEHNKLIARSRELKQVQLDPLPKTVTLAFASQLEKTSPKLKADVPEADLSGVDAKLVSSLMPFQREGVSFAISKRGRLLLADDMGLGKTVQAICIAAFYRKEWPLLVVVPSSVRFTWEQAFLRWLPSLSPENINVVVTGKGRLTAGLVNIVSFDLLCKLERQLKTPFKVVIIDESHFLKNIKTARCRAAVPILKVAKRVILLSGTPAMSRPAELYTQIIAVKPTFFPQFHAFGLRYCDAKRLPWGWDYSGSSNLGELKLLLEEAIMLRRLKSDVLSQLPAKQRKMVVVNPGRISSRAKAALDAAAKEMTKDKTKQQQKEALLVFFNRTAEAKIPCVVEYILDLLDSGREKFLVFAHHKVILDAVAKELERKNVQHIRIDGSTPSADREAQCQRFQLSKGHTVALLSITAANMGLTFSTADLVVFAELFWNPGVLIQAEDRVHRIGQTNSVSIHYLVAKGTADDYLWPLIQEKIKVLGEAGLSETNFSEMTEATDYVHKDPKQKTIYDLFQQSFEDDGNDMEFLEAAESFELGSTSGTSGNISQDLGDLLDEDEGSPPKKSRFEFFDNWDSFSSPF

SEQ ID NO: 8132 - protein, 910 aa, Mus musculus
MSLPLTEEQRKKIEENRQKALARRAEKLSEQPQSAASGSSAAGPSQSKQGSLLNLLAEPSKPVGHASIFKQQNLSNSFPTDQRPHSSRCSQPSPAEETTGLWKTQGEMSTACPKPNPSPPGASNQPLLGYKSSEGQPQATWDTGASSSGPFPRDPELEAKAARPSTSRQSISDSFYVLGGKTPRTEGRPPNILQTTPQNTGFLRGACIKTGDRFRVKIGYNQELIAVFKSLPSRHYDSFTKTWDFSMSDYRALMKAVERLSTVSLKPLDEAGGSVGGQTSLPSAPSLTFVTGKCMLISRVRFEVDIGYSEAVIGLFKQMESRSYDIKTRKWSFLLEEHNKLIARSRELKQVQLDPLPKTVTLAFASQLEKTSPKLKADVPEADLSGVDAKLVSSLMPFQREGVSFAISKRGRLLLADDMGLGKTVQAICIAAFYRKEWPLLVVVPSSVRFTWEQAFLRWLPSLSPENINVVVTGKGRLTAGLVNIVSFDLLCKLERQLKTPFKVVIIDESHFLKNIKTARCRAAVPILKVAKRVILLSGTPAMSRPAELYTQIIAVKPTFFPQFHAFGLRYCDAKRLPWGWDYSGSSNLGELKLLLEEAIMLRRLKSDVLSQLPAKQRKMVVVNPGRISSRAKAALDAAAKEMTKDKTKQQQKEALLVFFNRTAEAKIPCVVEYILDLLDSGREKFLVFAHHKVILDAVAKELERKNVQHIRIDGSRPTRARELKCQRFQLSKGHTVALLSIPAANMGLTFSTADLVVFAELFWNPGVLIQAEDRVHRIGQTNSVSIHYLVAKGTADDYLWPLIQEKIKVLGEAGLSETNFSEMTEATDYVHKAPKQKTIYDLFQQSFEDDGNDMEFLEAAESFEIKNTSGTSGNISQDLGDLLDEDEGSPPKKSRFEFFDNWDSFSSPF

SEQ ID NO: 8133 - protein, 904 aa, Mus musculus
TAARSKILLPMVQKARRAILLTGTPALGRPEELFMQIEALFPQKFGTWIEYAKRYCNAHVRYFGKRRQWDCRGASNLSELHQLLNDIMIRRLKSEVLSQLPPKVRQRIPFDLPPAAVKELNASFEEWQKLMRAPNSGAMETVMGLMTRMFKQTAIAKAGAVKDYIKMLLQNDSLKFLVFAHHLSMLQACTEAVIESKSRYIRIDGSVPSSERIHLVNQFQKDPDTRVAILSIQAAGQGLTFTAASHVVFAELYWDPGHIKQAEDRAHRIGQCSSVNIHYLIANGTLDSLMWAMLNRKAQVTGSTLNGRKEKLQATEDDKEKWGFLQFAEAWTPSDSFEELKDSVFTHFEKEKQHDIRSFFLPKLKKRQLETTCDDPEAFKEKITVASDPRKMATSDSTADKNGCEPEAKRLKSLSTEDHSSALEEGPSLQARATSMEVVHEVKPPLASPALPEKGWQCGFCTFLNNPGLPYCEMCENPRSRAAGRNHLQDNNKNDEDAAQESTSKSDQAGLECERQCPERLEAEQSANSKEEALEGGGEDRLPSQPEIGQLNNSGTLPVRETFMFCASRNTDRIHLYTKDGKPMNCNFIPLDIKLDLWEDLPATFQLKQNRSLILRFVREWSSLTAMKQRVLRKSGQLFCSPLLASEEITKQQAKENNTRRYITKEDVAKASMNKVKSDGGHIRLITKESMTQDSSLKKIDSACVPSLNPCPADLTVEPSPSKGYIQAVDKEGRPLCLRCQHPTCQPEQTAKASAWDSRFCSLKCQEEFWIRSNNSYLRAQVFATEHGVCQHCGVDAQELFLRMRDAPKSHRKSLLNAAWTAKLPLEQLNEMLRNPGEGHFWQVDHIRPVYEGGGQCSLDNLQTLCTVCHKERTAQQAKERSQVRRLSLATKHGSDITRFLVKK

SEQ ID NO: 8134 - protein, 275 aa, Mus musculus
MMLLRKCCNHPYMIEYPIDPVTQEFKIDEELVTNSGKFLILDRMLPELKKRGHKVLVFSQMTSMLDILMDYCHLRNFIFSRLDGSMSYSEREKNIYSFNTDPDVFLFLVSTRAGGLGINLTAADTVIIYDSDWNPQSDLQAQDRCHRIGQTKPVVVYRLVTANTIDQKIVERAAAKRKLEKLIIHKNHFKGGQSGLSQSKNFLDAKELMELLKSRDYEREVKGSREKVISDEDLELLLDRSDLIDQMKASRPIKGKTGIFKILENSEDSSAECLF

SEQ ID NO: 8135 - protein, 173 aa, Mus musculus
MASGLPRFLQALPAEHGPEPLRTRVLEPDLQQWGLTGIRLRSYQLEGVNWLVQCFHCQNGCILGDEMGLGKTCQTIALLIYLVGRLNDEGPFLVLCPLSVLSNWKEEMERFAPGLSCVTYTGDKEERARLQQDLRQESGFHVLLTTYEICLKDASFLKSFSWSVLAVDEAHRL

SEQ ID NO: 8136 - protein, 2476 aa, Mus musculus
MTAEPMSGNKLSTLVQKLHDFLAHSSEESEETCSSPRLVMNQSTDKICGSGLNSDMMENNKEEGASTSEKSRSSGSSRSKRKPSIVTKYVESDDEKPTDENVNEKAATENSENDITMQSLPKGTVIVQPEPVLNEDKDDFKGPEFRSRSKMKADNLIKRGEDGLHGIVSCTACGQQVNHFQKDSIYRHPSLKVLICKNCFKYYMSDDISRDSDGMDEQCRWCAEGGNLICCDFCHNAFCKKCILRNLGRKELSTIMDENNQWYCYICQPEPLLDLVTACNSVFENLEQLLQQNKKKIKVDSEKTSKVCDQTSKFSPKKSSSSCNGEEKKLEESCSGSVSSTYSHSALSVPKEMIKKTTKLIETTSNMNSSYIKFLKQAADNSEMTSAMKLCQLKSFKSVLDDIKKAHLALEEDLNSEIQALDDVHKEKNTKDLKSTDAKSETKLGKGEKSYSTEKREFLKLDARSSVKAIDGEEQRAHKSTSGEHKGSGRKDGSQYEPTNTPEDLDMDIVSVPSSVPEDIFDSLESAMEVQSSADYQGDGNSGTEPELESSSVKLNVSSKDSRGNIKSKVTAKVRKELFVKLTPVSLSNSPIKGVDCQEVSQEKNGRKSSGVARSSEKCRPREEISDHENNVTILLEDSDLRRSPRVKTTPLRRQTESNPAMSNSDEESNGTMKEKQKMSGPIRKKDKRNSADCATDNPKPHKVPKAKQPVIGDQNSDSDEMLAVLKEASQMGHSSSSDTDINEPQMNHKGKTGKDDNGKRKRKNSTSGSDFDTKKGKSTETSIISKKKRQNYSESSNYDSELEREIKTMSRIGAARKSVPEKKEEDSSEDEKQGKKVVDNGGHERAKTTQEGSSADDTGDTEGRQGGSCSIAGGSIEKVRSGVEFREMLCKPGVSSDGAEKPSVKEENVNSPEDKRVSKTKEKTKHLRSRQSRKGKGGSSDGTDRFPKKEQSDESSEGEKKQSRQRPGTKGKKAPDLKGETLKREQEWDSSSDGTERLPEEEEIGPFSKGIKQSKTDTAGGEKKGKKWKDKSCEKKEELSDSVDKLPGKGDSCDSSEDKKTRNRVSLREKKRFSLPAKSPGKRPECSSSDTEKSLKGQCCDSTEKRPKRIDLRERRNSSSKRNTKEVKSASSSSDAEGSSEDNKKQKKQRTSAKKKTGNTKEKKRNSLRATPKRKQVDITSSSSDIGDDDQNSAGEESSDEQKIKPVTENLVLPSHTGFCQSSGDEALSKSVPATVDDDDDDNDPENRIAKKMLLEEIKANLSSDEDGSSDDEPDGGGKKRIGKQSEESPADDGELRREQLAVNQVNSESDSDSEESKKPRYRHRLLRHKLTLSDGESGEEKPTKPKEHKEAKGRNRRKVSSEDSEDTDFQESGVSEEVSESEDEQRPRTRSAKKAELEENQRSYKQKKKRRRIKVQEDSSSENKSHSEEDKKEGDEEDEEDEDEDEEDENDDSKSPGKGRKKIRKILKDDKLRTETQNALKEEEERRKRIAEREREREKLREVIEIEDASPTKCPITTKLVLDENEETKEPLVQVHRNMVIKLKPHQVDGVQFMWDCCCESVEKTKKSPGSGCILAHCMGLGKTLQVVSFLHTVLLCDKLDFSTALVVCPLNTALNWMNEFEKWQEGLNDNEKLEVSELATVKRPQERSYMLQRWQEDGGVMIIGYEMYRNLAQGRNVKSRKLKDIFNKALVDPGPDFVVCDEGHILKNEASAVSKAMNSIKSRRRIILTGTPLQNNLIEYHCMVNFIKENLLGSIKEFRNRFINPIQNGQCADSTMVDVRVMKKRAHILYEMLAGCVQRKDYTALTKFLPPKHEYVLAVRMTAIQCKLYQYYLDHLTGVGNSTEGGRGKAGAKLFQDFQMLSRIWTHPWCLQLDYISKENKGYFDEDSMDEFIASDSDETSKSLSSDEKKKPKGKKGKKDSSSSGSGSDNDVEVIKVWNSRSRGGGDGNMDDTGNNPSVSLKLDESKTTSTSNPSSPAPDWYKDFVTDTDAEVLEHSGKMVLLFEILRMAEEIGDKVLVFSQSLISLDLIEDFLELASREKTEDKEKPLIYKGEGKWIRNIDYYRLDGSTNAQSRKKWAEEFNDETNVRGRLFIISTKAGSLGINLVAANRVIIFDASWNPSYDIQSIFRVYRFGQTKPVYVYRFLAQGTMEDKIYDRQVTKQSLSFRVVDQQQVERHFTMNELTELYTFEPDLLDDPNSEKKKKRDTPMLPKDTILAELLQIHKEHIVGYHEHDSLLDHKEEEELTEEERKAAWAEYEAEKKGLTMRFNIPTGTNLPPVTFTSQTPYIPFNLGALSAMSNQQLEDLINQGREKVVEATNSMTAVRIQPLEDIISTVWKENMNLSEAQVQALALSRQASQELDVKRREAIYNDVLTKQQMLINCVQRILMNRRLQQQYTQQQQQQLTYQQATLSHLMMPKPPNLIMTPSNYQQIDMRGMYQSVAGGMQPPPLQRAPPPTVRSKNPGPSPGKSM

SEQ ID NO: 8137 - protein, 327 aa, Mus musculus
MVVLDKLLPKLKEQGSRVLIFSQMTRVLDILEDYCMWRNYEYCRLDEQTPHERQDSINAYNEPNSTKFVFMLSTRAGGLGINLATADVVILYDSDWNPQVDLQAMDYAHRIGQRKTVRVFRFITDNTVEERIVERAEMKLRLDSIVIQQGRLVDQNLNKIGKDEMLQMIRRGATHVFASKESEITDEDIDGILERGAKKTAEMNEKLSKMGESSLRNFTMDTESSVYNFEGEDYREKQKSAFTEWIEPPKRERKANYAVDAYFREALRVSEPKAPKAPRPPKQLNVQDFQFFPPGLCELLEKEILYYRKTIGYKVPWSPDLPNAAQA

SEQ ID NO: 8138 - protein, 1466 aa, Mus musculus
MSDESASGSDPDLDPDVELEDEEEEEEEEEVAVEEHDRDDEEGLLDDTSLEGMCGTEHAQLGEDGQRPPRCTSTTSSQSEPSEQLRHQGKILASEDPKKKRAQKPSHMRRNIRKLLREDQLEPVTKAAQQEELERRKRLEQQRKEYAAPIPTVPLEFLPEEIVLRASDGPQLPPRVLAQEVICLDSSSGSEDEKSSRDEVIELSSGEEDTLHIVDSSESVSEEDEEEEKGGTHVNDALNQHDALGRVLVNLNHPPEEENVFLAPQLARAVKPHQIGGIRFLYDNLVESLERFKTSSGFGCILAHSMGLGKTLQVISFIDVLFRHTPAKTVLAIVPVNTLQNWLAEFNMWLPAPEALPADSKPEEVQPRFFKVHILNDEHKTVASRAKVTADWVSEGGVLLMGYEMYRLLTLKKSLATSRPKKTKKRSHPVIIDLDEEDRQQEFRREFEKALCRPGPDVVICDEGHRIKNCQASTSQALKNIRSRRRVVLTGYPLQNNLIEYWCMVDFVRPDFLGTRQEFSNMFERPILNGQCIDSTPQDVRLMRYRSHVLHSLLEGFVQRRGHTVLKIHLPAKEENVILVRLSQIQRDLYTQFMDRFRDCGTSGWLGLNPLKAFCVCCKIWNHPDVLYEALQKENLANEQDLDVEELGSAGTSARCPPHGTKVKGEDSALPSSMGEATNSKFLQGVGFNPFQERGNNIVTYEWAKELLTNYQTGVLENSPKMVLLFHLIEESVKLGDKILVFSQSLSTLALIEEFLGKRDMPCLPGAEGQGTQKWVRNVSYFRLDGSTPAFERERLINQFNDPSNLTTWLFLLSTRAGCLGVNLIGANRVVVFDASWNPCHDAQAVCRVYRYGQKKPCHIYRLVADYTLEKKIYDRQISKQGMSDRVVDDLNPMLNFTRKEVENLLHFVEKEPAPQTSLDIKGIKESVLQLACLKYPHLITKEPFEHESLLLNRKDHKLTKAEKKAAKKSYEEDKRTSVPYTRPSYAQYYPASDQSLTSIPAFSQRNWQPTLKGDEKPVASVRPVQSTPIPMMPRHVPLSGGVSSASSTNTSMNFPINYLQRAGVLVQKVVTTTDIVIPGLNSSTDVQARINAGESIHIIRGTKGTYIRTSDGRIFAVRATGKPKAPEDGRMAASGSQGPSLASTSNGRHSASSPKAPDPEGLARPVSPDSPEIISELQQYADVAAARESRQSSPSISAALPGPPGQLMDNSTIPGTALGTEPCLGGHCLNSSLLVTGQPSGGRHPVLDLRGHKRKLATPSVTQESIRRRSRKGHLPAPVQPYEHGYPVSGGFAMPPVSLNHNLTTPFTSQAGENSLFMGSNPSYYQLSNLLADARLVFPVTTDPLVPAGPVSSSSTATSVTASNPSFMLNPSVPGMLPSYSLPFSQPLLSEPRMFAPFPSPGLPSNLSRGVSVYPGYMSPHAGYPAGGLLRSQVPPFDSHEVAEVGFSSNDDEDKDDDVIEVTGK

SEQ ID NO: 8139 - protein, 563 aa, Mus musculus
FQHIEESFSEHLGFTGGIVQGLDLYRASGKFELLDRILPKLRATNHKVLLFCQMTSLMTIMEDYFAYRGFKYLRLDGTTKAEDRGMLLKTFNEPGSEYFIFLLSTRAGGLGLNLQSADTVIIFDSDWNPHQDLQAQDRAHRIGQQNEVRVLRLCTVNSVEEKILAAAKYKLNVDQKVIQAGMFDQKSSSHERRAFLQAILEHEEQDEEEDEVPDDETVNQMIARHEEEFDLFMRMDLDRRREEARNPKRKPRLMEEDELPSWIIKDDAEVERLTCEEEEEKMFGRGSRHRKEVDYSDSLTEKQWLKAIEEGTLEEIEEEVRQKKSSRKRKRDSEAGSSTPTTSTRSRDKDEESKKQKKRGRPPAEKLSPNPPNLTKKMKKIVDAVIKYKDSSSGRQLSEVFIQLPSRKELPEYYELIRKPVDFKKIKERIRNHKYRSLNDLEKDVMLLCQNAQTFNLEGSLIYEDSIVLQSVFTSVRQKIEKEDDSEGEESEEEEEGEEEGSESESRSVKVKIKLGRKEKAQDRLKGGRRRPSRGSRAKPVVSDDDSEEEQEEDRSGSGSEED

SEQ ID NO: 8140 - protein, 788 aa, Mus musculus
MSLPLTEEQRKKIEENRQKALARRAEKLSEQPQSAASGSSAAGPSQSKQGSLLNLLAEPSKPVGHASIFKQQNLSNSFPTDQRPHSSRCSQPSPAEETTGLWKTQGEMSTACPKPNPSPPGASNQPLLGYKSSEGQPQATWDTGASSSGPFPRDPELEAKAARPSTSRQSISDSFYVLGGKTPRTEGRPPNILQTTPQNTGFLRGACIKTGDRFRVKIGYNQELIAVFKSLPSRHYDSFTKTWDFSMSDYRALMKAVERLSTVSLKPLDEAGGSVGGQTSLPSAPSLTFVTGKCMLISRVRFEVDIGYSEAVIGLFKQMESRSYDIKTRKWSFLLEEHNKLIARSRELKQVQLDPLPKTVTLAFASQLEKTSPKLKADVPEADLSGVDAKLVSSLMPFQREGVSFAISKRGRLLLADDMGLGKTVQAICIAAFYRKEWPLLVVVPSSVRFTWEQAFLRWLPSLSPENINVVVTGKGRLTAGLVNIVSFDLLCKLERQLKTPFKVVIIDESHFLKNIKTARCRAAVPILKVAKRVILLSGTPAMSRPAELYTQIIAVKPTFFPQFHAFGLRYCDAKRLPWGWDYSGSSNLGELKLLLEEAIMLRRLKSDVLSQLPAKQRKMVVVNPGRISSRAKAALDAAAKEMTKDKTKQQQKEALLVFFNRTAEAKIPCVVEYILDLLDSGREKFLVFAHHKVILDAVAKELERKNVQHIRIDGSTPSADREAQCQRFQLSKGHTVALLSITAANMGLTFSTADLVVFAELFWNPGVGNVARVPLGMPRAEKYKIRK

SEQ ID NO: 8141 - protein, 495 aa, Mus musculus
LMTIMEDYFAFRNFLYLRLDGTTKSEDRAALLKKFNEPGSQYFIFLLSTRAGGLGLNLQAADTVVIFDSDWNPHQDLQAQDRAHRIGQQNEVRVLRLCTVNSVEEKILAAAKYKLNVDQKVIQAGMFDQKSSSHERRAFLQAILEHEEENEEEDEVPDDETLNQMIARREEEFDLFMRMDMDRRREDARNPKRKPRLMEEDELPSWIIKDDAEVERLTCEEEEEKIFGRGSRQRRDVDYSDALTEKQWLRAIEDGNLEEMEEEVRLKKRKRRRNVDKDPVKEDVEKAKKRRGRPPAEKLSPNPPKLTKQMNAIIDTVINYKDSSGRQLSEVFIQLPSRKDLPEYYELIRKPVDFKKIKERIRNHKYRSLGDLEKDVMLLCHNAQTFNLEGSQIYEDSIVLQSVFKSARQKIAKEEESEEESNEEEEEDDEEESESEAKSVKVKIKLNKKEEKGRDTGKGKKRPNRGKAKPVVSDFDSDEEQEENEQSEASGTDNE

SEQ ID NO: 8142 - protein, 163 aa, Mus musculus
TKDPNIKSLVVSQFTTFLSLIETPLKASGFVFTRLDGSMAQKKRVESIQRFQNTEAGSPTIMLLSLKAGGVGLNLCAASRVFLMDPAWNPAAEDQCFDRCHRLGQKQEVIITKFIVKDSVEENMLKIQNTKRDLAAGAFGTKKTDANDMKQAKINEIRTLIDL

SEQ ID NO: 8143 - protein, 1471 aa, Mus musculus
MEFREACHIIPQDFHLQAMVRSAGKLVLIDKLLPKLKAGGHKVLIFSQMVRCLDILEDYLIQRRYLYERIDGRVRGNLRQAAIDRFSKPDSDRFVFLLCTRAGGLGINLTAADTCIIFDSDWNPQNDLQAQARCHRIGQSKAVKVYRLITRNSYEREMFDKASLKLGLDKAVLQSMSGRDGNITGIQQFSKKEIEDLLRKGAYAAIMEEDDEGSKFCEEDIDQILLRRTTTITIESEGKGSTFAKASFVASENRTDISLDDPNFWQKWAKKADLDMDLLNSKNNLVIDTPRVRKQTRHFSTLKDDDLVEFSDLESEDDERPRSRRHDRHHTYGRTDCFRVEKHLLVYGWGRWRDILSHGRFKRRMTERDVETICRAILVYCLLHYRGDENIKSFIWDLISPAENGKTKELQNHSGLSIPVPRGRKGKKVKSQSTFDIHKADWIRKYNPDTLFQDESYKKHLKHQCNKVLLRVRMLYYLRQEVIGDQAEKVLGGAIASEIDIWFPVVDQLEVPTTWWDSEADKSLLIGVFKHGYEKYNTMRADPALCFLEKAGRPDDKAIAAEHRVLDNFSDLVEGIDFDKDCEDPEYKPLQGPPKDPDDEGDPLMMMDEEISVIDGEEAQVTQQPGHLFWPPGSALTARLRRLVTAYQRSYKREQMKMEAAERGDRRRRRCEAAFKLKEIARREKQQRWTRREQTDFYRVVSTFGVEYDPDNMQFHWDRFRTFARLDKKTDESLTKYFHGFVAMCRQVCRLPPAAGDEPPDPNLFIEPITEERASRTLYRIELLRRLREQVLCHPLLEDRLALCQPPGLELPKWWEPVRHDGELLRGAARHGVSQTDCNIMQDPDFSFLAARMNYMQNHQAGASAASLSRCSTPLLHQQCTSRTASPSPLRPDAPVEKSPEESTVQVPNLESLTLKLEDEVVARSRLTSQDYEVRVGSSDTAPLSRSVPPVKLEDEDDSDSELDLSKLSPSSSSSSSSSSSSSSTDESEDEKEEKLTADRSRPKLYDEESLLSLTMSQDGFPNEDGEQMTPELLLLQERQRASEWPKDRVLINRIDLVCQAVLSGKWPSNRRSQEVTAGGILGPGNHLLDSPSLTPGEDGDSPVPTPRSGSAASMAEEEASAVTTAAAQFTKLRRGMDEKEFTVQIKDEEGLKLTFQKHRLMANGVMGDGHPLFHKKKGNRKKLVELEVECMEEPNHLDLDLETRIPVINKVDGTLLVGDEAPRRAELEMWLQGHPEFAVDPRFLAYMEERRKQKWQRCKKNNKAELNCLGMEPVQPANSRNGKKGHYAETAFNRVLPGPVAPENSKKRVRRTRPDLSKMMALMQGGSTGSLSLHNTFQHSSSNLQSVSSLGHSSTTSASLPFMPFVMGAAAPPHVDSSTMLHHHHHHPHPHHHHHHHPGLRTTGYPSSPATTTSGTALRLPTLQPEDDDEEEDEEDDDLSQGYDSSERDFSLIDDPMMPANSDSSEDADD

SEQ ID NO: 8144 - protein, 829 aa, Mus musculus
ERIDGGITGNMRQEAIDRFNAPGAQQFCFLLSTRAGGLGINLATADTVIIYDSDWNPHNDIQAFSRAHRIGQNKKVMIYRFVTRASVEERITQVAKKKMMLTHLVVRPGLGSKTGSMSKQELDDILKFGTEELFKDEATDGGGDNKEGEDSSVIHYDDKAIERLLDRNQDETEDTELQGMNEYLSSFKVAQYVVREEEMGEEEEVEREIIKQEESVDPDYWEKLLRHHYEQQQEDLARNLGKGKRIRKQVNYNDGSQEDRDWQDDQSDNQSDYSVASEEGDEDFDERSEAPRRPSRKGLRNDKDKPLPPLLARVGGNIEVLGFNARQRKAFLNAIMRYGMPPQDAFTTQWLVRDLRGKSEKEFKAYVSLFMRHLCEPGADGAETFADGVPREGLSRQHVLTRIGVMSLIRKKVQEFEHVNGRWSMPELAEVEENKKMSQPGSPSPKTPTPSTPGDTQPNTPAPVPPAEDGIKIEENSLKEEESTEGEKEVKSTAPEATVECAQPPAPAPATAPATATAPEDDKAPAEPPEGEEKVEKAEVKERTEEPMETEAKGTTEVEKVEEKSAVDLTPIVVEDKEEKKEEEEKKDVMLQNGETPKDLSDEKQKKNSKQRFMFNIADGGFTELHSLWQNEERAATVTKKTYEIWHRRHDYWLLAGIINHGYARWQDIQNDPRYAILNEPFKGEMNRGNFLEIKNKFLARRFKLLEQALVIEEQLRRAAYLNMSEDPSHPSMALNTRFAEVECLAESHQHLSKESMAGNKPANAVLHKVLKQLEELLSDMKADVTRLPATIARIPPVAVRLQMSERNILSRLANRAPEPPPQQVAQQQ

SEQ ID NO: 8145 - protein, 99 aa, Mus musculus
MSTAGWMNRHPHDERQDSINAYNEPNSTKFVFMLSTRAGGLGINLATADVVILYDSDWNPQVDLQPMDHAHRIGQRKTVRVFRFITDNTVEERIWNVLR

SEQ ID NO: 8146 - protein, 1651 aa, Mus musculus
IGLENKITRHEAELLCKKKVTRKLMEEVFASPPPSARPAAVKLKASRLFQPVQYGQKPEGRTVAFPSTHPPRMANTNTSTATPQGQVRGRPPIATFSANPDTKGGEVVKIAQLASIAGPQSRVAQPETPVTLQFQGNKFTLSHSQLRQLTAGQPLQLQGSVLQIVSAPGQPYLRAPGPVVMQTVSQAGAVHSTLGSKPPTSGPSPAPLTPQVGVPGRVAVSAMAVGEPGLASKPASPAAGPTQEEKSRLLKERLDQIHFINERRCSQAPVYGRDLLRICSLPGRRKRPLCWSLDSNFGKGPKGVNYDMSLSKSEGDLILTLSQESLQDVLGRVACVIPPVVATPPSLWVARPPSLYSSRLRALRQCLREHTGPYHRQLQQLTALRSLQFPELRLVQFDSGKLEALAILLQKLKSEGRRVLILSQMVLMLDILEMFLNFHYLTYVRIDENANSEQRQELMRSFNRDRRIFCALLSTHSRATGINLVEADTVVFYDNDLNPVMDAKAQEWCDRIGRCKDIHIYRLVSGNSIEEKLLKNGTKDLIREVAAQGNDYSMAFLTQRTIQELFEVYSPMDDTGFPVKAEEFVVLSQEPSVSETIAPKIARPFIEALKSIECLEEDAQRSTEEAVPGSSSVAVSSDSDGSRYDEEPSQLEELADFMEQLTPIEKYALNYLELFHTTTEQEKERISEDLVMASMKDWETRNARALQEREARLQLEQEEAELLTYTREDAYTMEYVYEDADGQTEVMPLWTPPTPPQDDNDIYIDSVMCLMYETTPIPEAKLPPVYVRKERKRHKTDPSAAGRKKKQRHGEAVVPPRSLFDRATPGMLKIRREGKEQKKNLLLKQQTPFAKPLPTYVKSSGEPAQDSPDWLIGEDWALLQAVKQLLELPLNLTIVSPAHTPNWDLVSDVVNSCSRIYRSSKQCRNRYENVIIPREEGKSKNNRPLRTSQIYAQDENATHTQLYTSHFELMKMTAGKRSPPIKPLLGMNPFQKNPKHASVLAESGINYDKPLPPIQVASLRAERIAKEKKALADQQKAQQPPVTQPPPQQQQQQQQQQQQQQQQQQPPPPPQQPPPPVPQPQAASSQTPAGQPAVQPQPQPQVQAQPQPVQPQSKGQPTMTTVGSAAVLAGTIKTSVTGTSIPTGTVSGNVIVNTIAGVPAATFQSINKRLASPVAPGTLTTSGGSAPAQVVHTQQRAVGSPATATTDLVSMTTTQGVRAVTSVTASAVVTTNLTPVQTPTRSLVTQVSQATGVQLPGKTITPAAHFQLLRQQQQQQQQQQQQQQTSQVQVPQLQSQAQSPAQIKAVSKLGPEHIIKMQKQKMQLPPQPPPPQAQPGPPQQPAQVQVQTPQPPQQQQSPQLTTVTAPRPGALLTGTTVTNLQVARLLQAQGQMQTQTPQPAQVALAKPPVVSVPAAVVSSPGVTTLPMNVAGISVAIGQPQKTAGQTVVAQPVNVQQLLKYKQQTAVQQQKAIQPQVAQGQAAVQQKLTTQQITTQGPQQKVAYAAQPALKTQFLTTPISQAQKLAGTQQVQTQIQVAKLPQVVQQQTPVASIQQVASASQQASPQTVTLTQATAAGQQVQMIPTVTATAQLVQQKLIQQQVVTTASASLQTPGGPSPAQLPASSDSPSQQPKLQMRVPAVRLKTPTKPPCQ

SEQ ID NO: 8147 - protein, 263 aa, Mus musculus
TKQQQKEALLVFFNRTAEAKIPCVVEYILDLLDSGRERFLVFAHHKVILDAVAKELERKNVQHIRIDGSTPSADREAQCQRFQLSKGHTVALLSITAANMGLTFSTADLVVFAELFWNPGVLIQAEDRVHRIGQTNSVSIHYLVAKGTADDYLWPLIQEKIKVLGEAGLSETNFSEMTEATDYVHKDPKQKTIYDLFQQSFEDDGNDMEFLEAAESFELGSTSGTSGNISQDLGDLLDEDEGSPPKKSRFEFFDNWDSFSSPF

SEQ ID NO: 8148 - protein, 186 aa, Mus musculus
MKPGRPRVKKDEKQNLLSVGDYRHCRTEQEEDEELLTERSKATNVCTRFEDSPSYVKWGKLRDYQVRGLNWLISLYENGINGILADEMGLGKTLQTISLLGYMKHYRNIPGPHMVLVPKYTLHNWISEFKRWIPTLRSVCLIGDEEQRAVFVRDVLLPGEWDVCVTSYEMLIKEKVCVQKNSAGDT

SEQ ID NO: 8149 - protein, 292 aa, Mus musculus
MLDIEEFFVKYKNYSYLHCEWATEQQLLKDKRIQQKIKRFKLRQAQRAHFLADMEEEPFNPDYVEVDRILEVSFCEDKDTGESVIYYLVKWCSLPYEDSTWELKEDVDLAKIEEFEQLQASRPDTRHLDRPPSNIWKKIEQSREYKNGNQLREYQLEGLNWLLFNWYNRRNCILADEMGLGKTIQSITFLYEILLTGIRGPFLIIAPLSTIANWEREFRTWTDINVVVYHGSLISRQMIQQYEMYFRDSQGRIIRGAYRFQAIITTFEMILGGCGELNAIDWRCVIIDEAHR

SEQ ID NO: 8150 - protein, 1022 aa, Mus sp.
GRQTPAIGPDGEPLDETSQMSDLPVKVIHVESGKILTGTDAPKAGQLEAWLEMNPGYEVAPRSDSEESGSEEEEEEEEEEQPQPAQPPTLPVEEKKKIPDPDSDDVSEVDARHIIENAKQDVDDEYGVSQALARGLQSYYAVAHAVTERVDKQSALMVNGVLKQYQIKGLEWLVSLYNNNLNGILADEMGLGKTIQTIALITYLMEHKRINGPFLIIVPLSTLSNWAYEFDKWAPSVVKVSYKGSPAARRAFVPQLRSGKFNVLLTTYEYIIKDKHILAKIRWKYMIVDEGHRMKNHHCKLTQVLNTHYVAPRRLLLTGTPLQNKLPELWALLNFLLPTIFKSCSTFEQWFNAPFAMTGEKVDLNEEETILIIRRLHKVLRPFLLRRLKKEVEAQLPEKVEYVIKCDMSALQRVLYRHMQAKGVLLTDGSEKDKKGKGGTKTLMNTIMQLRKICNHPYMFQHIEESFSEHLGFTGGIVQGLDLYRASGKFELLDRILPKLRATNHKVLLFCQMTSLMTIMEDYFAYRGFKYLRLDGTTKAEDRGMLLKTFNEPGSEYFIFLLSTRAGGLGLNLQSADTVIIFDSDWNPHQDLQAQDRAHRIGQQNEVRVLRLCTVNSVEEKILAAAKYKLNVDQKVIQAGMFDQKSSSHERRAFLQAILEHEEQDEEEDEVPDDETVNQMIARHEEEFDLFMRMDLDRRREEARNPKRKPRLMEEDELPSWIIKDDAEVERLTCEEEEEKMFGRGSRHRKEVDYSDSLTEKQWLKAIEEGTLEEIEEEVRQKKSSRKRKRDSEAGSSTPTTSTRSRDKDEESKKQKKRGRPPAEKLSPNPPNLTKKMKKIVDAVIKYKDSSSGRQLSEVFIQLPSRKELPEYYELIRKPVDFKKIKERIRNHKYRSLNDLEKDVMLLCQNAQTFNLEGSLIYEDSIVLQSVFTSVRQKIEKEDDSEGEESEEEEEGEEEGSESESRSVKVKIKLGRKEKAQDRLKGGRRRPSRGSRAKPVVSDDDSEEEQEEDRSGSGSEED

SEQ ID NO: 8151 - protein, 1929 aa, Rattus norvegicus
MASKEKENQLRISKAEKEEGRVKQTVTEALVCIYRFASMSGTDLEMKDKDDIRLLPSALGVKKRKRGPKKQKENKPGKPRKRKKLDSEEEFGSERDEYREKSESGGSEYGTGPELGLVRDGDWTQVEQKSSATLLLTWGLEDVEHVFSEEDYHTLTNYKAFSQFMRPLIAKKNPKIPMSKMMTILGAKWREFSANNPFKGKCHGLWTFSPPHSHAGPGHKRRGKSARAPDGRKKLRGKKMAPLKIKLGLLGGRRRKAGSGDEGPEPEAEESDLDSGSVHSASGRPDGPVRAKKLKRGRPGRKKKKVTGEEEVDGYETDHQDYCEVCQQGGEIILCDTCPRAYHLVCLDPELDRAPEGKWSCPHCYCRVCKDGGELLCCDACISSYHIHCLNPPLPDIPNGEWLCPRCTCPVLKGRVQKILHWRWGEPPVAVPAPQQADGDPDAPPPRVLQGRSEREFFVKWVGLSYWHCSWAKELQLEIFHLVMYRNYQRKNDMDEPPPLDYGSGEDDGKSDKRKVKDPHYAEMEEKYYRFGIKPEWMTVHRIINHSMDKKGNYHYLVKWKDLPYDQSTWEEDEMNIPEYDDHKQSYWRHRELIMGEDPAQPRKYKKKKKEIQGDGPPSSPTNDPTVKYETQPRFITATGGTLHMYQLEGLNWLRFSWAQGTDTILADEMGLGKTIQTIVFLYSLYKEGHTKGPFLVSAPLSTIINWEREFQMWAPKFYVVTYTGDKDSRAIIRENEFSFEDNAIKGGKKAFKMKREAQVKFHVLLTSYELITIDQAALGSIRWACLVVDEAHRLKNNQSKFFRVLNGYKIDHKLLLTGTPLQNNLEELFHLLNFLTPERFNNLEGFLEEFADISKEDQIKKLHDLLGPHMLRRLKADVFKNMPAKTELIVRVELSPMQKKYYKYILTRNFEALNSRGGGNQVSLLNIMMDLKKCCNHPYLFPVAAMESPKLPSGAYEGGALIKSSGKLLLLQKMLRKLKEQGHRVLIFSQMTKMLDLLEDFLDYEGYKYERIDGGITGALRQEAIDRFNAPGAQQFCFLLSTRAGGLGINLATADTVIIFDSDWNPHNDIQAFSRAHRIGQANKVMIYRFVTRASVEERITQVAKRKMMLTHLVVRPGLGSKAGSMSKQELDDILKFGTEELFKDENEGENKEEDSSVIHYDNEAIARLLDRNQDATDDTDVQNMNEYLSSFKVAQYVVREEDKIEEIEREIIKQEENVDPDYWEKLLRHHYEQQQEDLARNLGKGKRVRKQVNYNDAAQEDQDNQSEYSVGSEEEDEDFDERPEGRRQSKRQLRNEKDKPLPPLLARVGGNIEVLGFNTRQRKAFLNAVMRWGMPPQDAFTTQWLVRDLRGKTEKEFKAYVSLFMRHLCEPGADGSETFADGVPREGLSRQQVLTRIGVMSLVKKKVQEFEHINGRWSMPELMPDPSADSKRSSRASSPTKTSPTTPEASTTNSPCTSKPATPAPSEKGDGVRTLLEKDDTENPEEKPEKSSKVGEKMETEIDSPSPAPSLGERLEHRKILLEDDAPGVPGEIEPEPGYRGDREKSASEPTPGERGEEKPLDGQEHRERTEGETGDLGKRAEDVKADRELRLGPPRDEPRPNGRREEKVEKPRFMFNIADGGFTELHTLWQNEERAAISSGKLNEIWHRRHDYWLLAGIVLYPLHIHGYARWQDIQNDAQFAIINEPFKTEANKGNFLEMKNKFLARRFKLLEQALVIEEQLRRAAYLNLSQEPAHPAMALHARFAEAECLAESHQHLSKESLAGNKPANAVLHKVLNQLEELLSDMKADVTRLPATLSRIPPIAARLQMSERSILSRLASKGTEPHPTPAFPPGPYATPPGYGAAFSAAPVGALAAAGANYSQMPAGSFITATTNGPPVLVKKEKEMVGALVSDGLGLDRKEPRAGEALGPAANPPPSPPLGPPLG

SEQ ID NO: 8152 - protein, 2600 aa, Rattus norvegicus
MPGGRPPLAPRPLLASPPGHVARPLSPGSEEEDMDALLNNSLPPPHPENEDDPEEDLSEAETPKLKKKKKPKKPRDPKIPKSKRQKKEEPKSSAQLLEDWGMEDIDHVFSEEDYRTLTNYKAFSQFVRPLIAAKNPKIAVSKMMMVLGAKWREFSTNNPFKGSSGASVAAAAAAAVAVVESMVTATEVAPPPPPVEVPIRKAKTKEGKGPNARRKPKGSPRVPDAKKPKPKKVAPLKIKLGGFGSKRKRSSSEDDDLDVESDFDDASINSYSVSDGSTSRSSRSRKKLRTAKKKKKGEEEVTAVDGYETDHQDYCEVCQQGGEIILCDTCPRAYHMVCLDPDMEKAPEGKWSCPHCEKEGIQWEAKEDNSEGEEILEEVGGDPEEEDDHHMEFCRVCKDGGELLCCDTCPSSYHIHCLNPPLPEIPNGEWLCPRCTLELHCQVMFRNYQRKNDMDEPPSGDFGGDEEKSRKRKNKDPKFAEMEERFYRYGIKPEWMMIHRILNHSVDKKGHVHYLIKWRDLPYDQASWESEDVEIQDYDLFKQSYWNHRELMRGEEGRPGKKLKKVKLRKLERPPETPTVDPTVKYERQPEYLDATGGTLHPYQMEGLNWLRFSWAQGTDTILADEMGLGKTVQTAVFLYSLYKEGHSKGPFLVSAPLSTIINWEREFEMWAPDMYVVTYVGDKDSRAIIRENEFSFEDNAIRGGKKASRMKKEASVKFHVLLTSYELITIDMAILGSIDWACLIVDEAHRLKNNQSKFFRVLNGYSLQHKLLLTGTPLQNNLEELFHLLNFLTPERFHNLEGFLEEFADIAKEDQIKKLHDMLGPHMLRRLKADVFKNMPSKTELIVRVELSPMQKKYYKYILTRNFEALNARGGGNQVSLLNVVMDLKKCCNHPYLFPVAAMEAPKMPNGMYDGSALIRASGKLLLLQKMLKNLKEGGHRVLIFSQMTKMLDLLEDFLEHEGYKYERIDGGITGNMRQEAIDRFNAPGAQQFCFLLSTRAGGLGINLATADTVIIYDSDWNPHNDIQAFSRAHRIGQNKKVMIYRFVTRASVEERITQVAKKKMMLTHLVVRPGLGSKTGSMSKQELDDILKFGTEELFKDEATDGGGDNKEGEDSSVIHYDDKAIERLLDRNQDETEDTELQGMNEYLSSFKVAQYVVREEEMGEEEEVEREIIKQEESVDPDYWEKLLRHHYEQQQEDLARNLGKGKRIRKQVNYNDGSQEDRDWQDDQSDNQSDYSVASEEGDEDFDERSEAPRRPSRKGLRNDKDKPLPPLLARVGGNIEVLGFNARQRKAFLNAIMRYGMPPQDAFTTQWLVRDLRGKSEKEFKAYVSLFMRHLCEPGADGAETFADGVPREGLSRQHVLTRIGVMSLIRKKVQEFEHVNGRWSMPELAEVEENKKMSQPGSPSPKTPTPSTPGDTQPNTPAPVPPAEDGIKIEENSLKEEESTEGEKEVKPTAPEVTVEDDKAPAEPPEGEEKVEKAEVKERAEEPMETESKGTTEVEKAEEKSAVDLTPIVVEDKEEKKEEEEKKEVLLQNGETPKDLSDEKQKKNLKQRFMFNIADGGFTELHSLWQNEERAATVTKKTYEIWHRRHDYWLLAGIINHGYARWQDIQNDPRYAILNEPFKGEMNRGNFLEIKNKFLARRFKLLEQALVIEEQLRRAAYLNMSEDPSHPSMALNTRFAEVECLAESHQHLSKESMAGNKPANAVLHKVLKQLEELLSDMKADVTRLPATIARIPPVAVRLQMSERNILSRLANRAPEPPPQQVAPAAVKTQIIMGRKLDPTKKEKRGPGRKARKQKGAETELIRFLPAVCFLSLPNLLLFNNKTAGDENFKRLSSRARKRAAKRRSGSVEVPKPNKSPGIKTLPGELPKGAVQVRGKKRPAPIQNSDGDEEEDSEEEDVVTQGELWGSEDSSEDMVDDYGADSEDEEEKLLPIERAALKQKARDPADGTQWSEEDTDEDEGVTPESHPRKDDKAEGDLQINVEEEEAFTPDLQRVHKRIQDIVGVLRDFGAQREEGRSRTEYLSQLQKDLATYYSYGDFLLSKLMELFPLSELIEFLEANEVPRPITLRTNTLKTRRRDLAQALINRGVNLDPLGKWSKSGLVVYDSSVPIGATPEYLAGHYMLQGASSMLPVMALAPQEHERILDMCCAPGGKTSYIAQLMKNTGVILANDANAERLKSVVGNLHRLGVTNTIVSHYDGRQFPKVGSCPSEASSGYRALGGIAGLCSPWEAGVLLAASIGPALPSPQVVGGFDRVLLDAPCSGTGVISKDPAVKTNKDEKDIQRCAHLQKELLLSAIDSVNAASKTGGYLVYCTCSITVEENEWVVDYALKKRNVRLVPTGLDFGQEGFTRFRERRFHPTLRATRRFYPHTHNMDGFFIAKFKKFSNSIPQPHSGNSAAGTPTEPDLKGQVTPKSENSSQPTKKAHGAAKAKQQLVGQQHSKKPFQKMNGISKGPGLPTEPSVPNVQVSARPQESSLSDVKRKRAGKLKQRGPKQSAPPPKVGDLGTPAMQTPSEISATPRPKSPGKAKKREEVKQELPEQPAKGTASLKEDAAPKRLSSPTTAHHSSTRPPPAKRRKSMTKGSSQPLLS

SEQ ID NO: 8153 - protein, 1613 aa, Rattus norvegicus
MSTPDPPLGGTPRPGPSPGPGPSPGAMLGPSPGPSPGSAHSMMGPSPGPPSAGHPMPTQGPGGYPQDNMHQMHKPMESMHEKGMPDDPRYNQMKGMGMRSGAHTGMGPPPSPMDQHSQGYPSPLGGSEHASSPVPASGPSSGPQMSSGPGGAPLDGSDPQALGQQNRGPTPFNQNQLHQLRAQIMAYKMLARGQPLPDHLQMAVQGKRPMPGMQQQMPTLPPPSVSATGPGPGPGPGPGPGPGPAPPNYSRPHGMGGPNMPPPGPSGVPPGMPGQPPGGPPKPWPEGPMANAAAPTSTPQKLIPPQPTGRPSPAPPAVPPAASPVMPPQTQSPGQPAQPAPLVPLHQKQSRITPIQKPRGLDPVEILQEREYRLQARIVHRIQELENLPGSLAGDLRTKATIELKALRLLNFQRQLRQEVVVCMRRDTALETALNAKAYKRSKRQSLREARITEKLEKQQKIEQERKRRQKHQEYLNSILQHAKDFREYHRSVTGKLQKLTKAVATYHANTEREQKKENERIEKERMRRLMAEDEEGYRKLIDQKKDKRLAYLLQQTDEYVANLTELVRQHKAAQVAKEKKKKKKKKKAENAEGQTPAIGPDGEPLDETSQMSDLPVKVIHVESGKILTGTDAPKAGQLEAWLEMNPGYEVAPRSDSEESGSEEEEEEEEEEQPQPAQPPTLPVEEKKKIPDPDSDDVSEVDARHIIENAKQDVDDEYGVSQALARGLQSYYAVAHAVTERVDKQSALMVNGVLKQYQIKGLEWLVSLYNNNLNGILADEMGLGKTIQTIALITYLMEHKRINGPFLIIVPLSTLSNWAYEFDKWAPSVVKVSYKGSPAARRAFVPQLRSGKFNVLLTTYEYIIKDKHILAKIRWKYMIVDEGHRMKNHHCKLTQVLNTHYVAPRRLLLTGTPLQNKLPELWALLNFLLPTIFKSCSTFEQWFNAPFAMTGEKVDLNEEETILIIRRLHKVLRPFLLRRLKKEVEAQLPEKVEYVIKCDMSALQRVLYRHMQAKGVLLTDGSEKDKKGKGGTKTLMNTIMQLRKICNHPYMFQHIEESFSEHLGFTGGIVQGLDLYRASGKFELLDRILPKLRATNHKVLLFCQMTSLMTIMEDYFAYRGFKYLRLDGTTKAEDRGMLLKTFNEPGSEYFIFLLSTRAGGLGLNLQSADTVIIFDSDWNPHQDLQAQDRAHRIGQQNEVRVLRLCTVNSVEEKILAAAKYKLNVDQKVIQAGMFDQKSSSHERRAFLQAILEHEEQDEEEDEVPDDETVNQMIARHEEEFDLFMRMDLDRRREEARNPKRKPRLMEEDELPSWIIKDDAEVERLTCEEEEEKMFGRGSRHRKEVDYSDSLTEKQWLKAIEEGTLEEIEEEVRQKKSSRKRKRDSEAGSSTPTTSTRSRDKDEESKKQKKRGRPPAEKLSPNPPNLTKKMKKIVDAVIKYKDSSGRQLSEVFIQLPSRKELPEYYELIRKPVDFKKIKERIRNHKYRSLNDLEKDVMLLCQNAQTFNLEGSLIYEDSIVLQSVFTSVRQKIEKEDDSEGEESEEEEEGEEEGSESESRSVKVKIKLGRKEKAQDRLKGGRRRPSRGSRAKPVVSDDDSDEEQEEDRSGSGSEED

SEQ ID NO: 8154 - protein, 1613 aa, Rattus norvegicus
MSTPDPPLGGTPRPGPSPGPGPSPGAMLGPSPGPSPGSAHSMMGPSPGPPSAGHPMPTQGPGGYPQDNMHQMHKPMESMHEKGMPDDPRYNQMKGMGMRSGAHTGMGPPPSPMDQHSQGYPSPLGGSEHASSPVPASGPSSGPQMSSGPGGAPLDGSDPQALGQQNRGPTPFNQNQLHQLRAQIMAYKMLARGQPLPDHLQMAVQGKRPMPGMQQQMPTLPPPSVSATGPGPGPGPGPGPGPGPAPPNYSRPHGMGGPNMPPPGPSGVPPGMPGQPPGGPPKPWPEGPMANAAAPTSTPQKLIPPQPTGRPSPAPPAVPPAASPVMPPQTQSPGQPAQPAPLVPLHQKQSRITPIQKPRGLDPVEILQEREYRLQARIAHRIQELENLPGSLAGDLRTKATIELKALRLLNFQRQLRQEVVVCMRRDTALETALNAKAYKRSKRQSLREARITEKLEKQQKIEQERKRRQKHQEYLNSILQHAKDFREYHRSVTGKLQKLTKAVATYHANTEREQKKENERIEKERMRRLMAEDEEGYRKLIDQKKDKRLAYLLQQTDEYVANLTELVRQHKAAQVAKEKKKKKKKKKAENAEGQTPAIGPDGEPLDETSQMSDLPVKVIHVESGKILTGTDAPKAGQLEAWLEMNPGYEVAPRSDSEESGSEEEEEEEEEEQPQPAQPPTLPVEEKKKIPDPDSDDVSEVDARHIIENAKQDVDDEYGVSQALARGLQSYYAVAHAVTERVDKQSALMVNGVLKQYQIKGLEWLVSLYNNNLNGILADEMGLGKTIQTIALITYLMEHKRINGPFLIIVPLSTLSNWAYEFDKWAPSVVKVSYKGSPAARRAFVPQLRSGKFNVLLTTYEYIIKDKHILAKIRWKYMIVDEGHRMKNHHCKLTQVLNTHYVAPRRLLLTGTPLQNKLPELWALLNFLLPTIFKSCSTFEQWFNAPFAMTGEKVDLNEEETILIIRRLHKVLRPFLLRRLKKEVEAQLPEKVEYVIKCDMSALQRVLYRHMQAKGVLLTDGSEKDKKGKGGTKTLMNTIMQLRKICNHPYMFQHIEESFSEHLGFTGGIVQGLDLYRASGKFELLDRILPKLRATNHKVLLFCQMTSLMTIMEDYFAYRGFKYLRLDGTTKAEDRGMLLKTFNEPGSEYFIFLLSTRAGGLGLNLQSADTVIIFDSDWNPHQDLQAQDRAHRIGQQNEVRVLRLCTVNSVEEKILAAAKYKLNVDQKVIQAGMFDQKSSSHERRAFLQAILEHEEQDEEEDEVPDDETVNQMIARHEEEFDLFMRMDLDRRREEARNPKRKPRLMEEDELPSWIIKDDAEVERLTCEEEEEKMFGRGSRHRKEVDYSDSLTEKQWLKAIEEGTLEEIEEEVRQKKSSRKRKRDSEAGSSTPTTSTRSRDKDEESKKQKKRGRPPAEKLSPNPPNLTKKMKKIVDAVIKYKDSSGRQLSEVFIQLPSRKELPEYYELIRKPVDFKKIKERIRNHKYRSLNDLEKDVMLLCQNAQTFNLEGSLIYEDSIVLQSVFTSVRQKIEKEDDSEGEESEEEEEGEEEGSESESRSVKVKIKLGRKEKAQDRLKGGRRRPSRGSRAKPVVSDDDSDEEQEEDRSGSGSEED

SEQ ID NO: 8155 - protein, 1813 aa, Rattus norvegicus
MAVPLCRSADRHTALHCVLAKQQEVAVRSSKAGRSWRRVLIGCVSACHSASEEASASDSGSQSESEQGSDPGSGHGSESNSSSESSESQSESESESAGSKSQPVLPEAKEKPASKKERIADVKKMWEEYPDVYGVRRSNRSRQEPSRFNIKEEASSGSESGSPKRRGQRQLKKQTVPKPQVKKQPKIQRGKRKKQESSDDDDDDDEAPKRQTRRRAAKNVSYKEDDDFETDSDDLIEMTGEGVDEQQDNSETIEKVLDSRLGKKGATGASTTVYAVEANGDPSGDFDTEREEGEIQYLIKWKGWSYIHSTWESEESLQQQKVKGLKKLENFKKKEDEIKQWLGKVSPEDVEYFNCQQELASELNKQYQIVERVIAHSRKPAPSNEPEYLCKWMGLPYSECSWEDEALIGKKFQSCIDSFHSRNNSKTIPTRECKALKQRPRFVALKKQPAYLGGENLELRDYQLEGLNWLAHSWCKSNSVILADEMGLGKTIQTISFLSYLFHQHQLYGPFLIVVPLSTLTSWQREFEIWAPEVNVVVYIGDLMSRNTIREYEWIHSQTKRLKFNALITTYEILLKDKTVLGSINWAFLGVDEAHRLKNDDSLLYKTLIDFKSNHRLLITGTPLQNSLKELWSLLHFIMPEKFEFWEDFEEDHGKGRENGYQSLHKVLEPFLLRRVKKDVEKSLPAKVEQILRVEMSALQKQYYKWILTRNYKALAKGTRGSTSGFLNIVMELKKCCNHCYLIRAPEDSERETGQEVLQSLIRSSGKLILLDKLLTRLRERGNRVLIFSQMVRMLDILAEYLTIKHYPFQRLDGSIKGEIRKQALDHFNADGSEDFCFLLSTRAGGLGINLASADTVVIFDSDWNPQNDLQAQARAHRIGQKKQVNIYRLVTKGTVEEEIIERAKKKMVLDHLVIQRMDTTGRTVLENNSGRSNSNPFNKEELTAILKFGAEDLFKEIEGEESEPQEMDIDEILRLAETRENEVSTSATDELLSQFKVANFATMEDEEELEERPHKDWDEIIPEEQRKKVEEEERQKELEEIYMLPRIRSSTKKAQTNDSDSDTESKRQAQRSSASESETDDSDDDKKPKRRGRPRSVRKDLVEGFTDAEIRRFIKAYKKFGLPLERLECIARDAELVDKSVADLKRLGELVHNSCVSAMQEYEEQLKENASEGKGPGKRRGPTIKISGVQVNVKSIIQHEEEFEMLHKSIPVDPEEKKKYCLTCRVKAAHFDVEWGVEDDSRLLLGIYEHGYGNWELIKTDPELKLTDKLSALRQCSKKHFNLKRSFNLAPGIPCSWKEEIHDGWDALADEATSPSYLSCSTLLTAQILPVETDKKPQGKQLQTRVDYLLKLLRKGLEKKGTVTSGEEAKLKKRKPRVKKENKAPRLKDEHGLELSSPRHSDNPSEEGEVKVKGGDAKSSSKSKRSQGPVHITAGSEPVPIGEDEDDDLDQETFSICKERMRPVKKALKQLDKPDKGLNVQEQLEHTRSCLLKIGDRIAECLRAYSEQEHIKLWRRNLWIFVSKFTEFDARKLHKLYKMAHKKRSQEEEEQKKKDDTLGGKKPFRPEASGSSRDSLISQSHASHNLHPQKPHLPASHGPQMHGHPRDTYSHPNKRHFSNADRGDWQRERKFNYGGGNNAPWGGDRHHQYEQHWYKDHHYGDRRHMDAHRSGSYRPNNMSRKRPYEQYNSDRDHRGHRDYYDRHHHDSKRRRSDDFRPQNYHQQDFRRMSDHRPTMGYHGQGPSDHYRSFHTDKLGEYKQPMPTLHTALSDPRSPPAQKSPHDSKSPLDHRSPLERSLEQKNNPDYNWNVRKT

SEQ ID NO: 8156 - protein, 960 aa, Rattus norvegicus
MNPLSPYLNVDPRYLVQDTDEFILPTGANKTRGRFELAFFTIGGCCMTVMHQWVKEFHTWWPPFRVAIAARNRLLCPQKDLLLMQEMERLVRDIVHCHGVLITSYSYIRLMQDDISRHDWHYVILDEGHKIRNPNAAVTLACKQFRTPHRIILSGSPMQNNLRELWSLFDFTFPGKLGTLPVFMEQFSVPITMGGYSNASPVQVKTAYKCACVLRDTINPYLLRRMKSDVKMSLSLPDKNEQVLFCRLTDEQHKVYQNFIDSKAVYRILNGENQIFSGLVALRKICNHPDLFSGGPKNTSALPEDGLEEEQFGYWKRSGKMIVVESLLKIWHKQGQRVLLFSQSRQMLHILEVFLRAHKYSYLKMDGTTTIASRQPLITKYNEDTSIFVFLLTTRVGGLGVNLTGANRVIIYDPDWNPSTDTQARERAWRIGQKKQVTVYRLLTAGTIEEKIYHRQIFKQFLTNRVLKDPKQRRFFKSNDLYELFTLTSPDASQGTETSAIFAGTGSNIQTLKCHFKKRTPPVLQMDPKRKKPLVSDTSVNGATVMEEKSQGSGATGSVPSTESGPLKSDRHTDGSRASSVGFGEEADAGSTLEHLSGLSGDSPAVDHTSRLSAVASTSEKQGSSYEGECCQAQTGPVHLSEQTEGHFSKHKSKRKHDAAEEETTEKCPQPKQKAKNSRHHRDAKFEGTRVPHLVKKRRYHQQTTEQESGAKDRSSDDYVLEKLFKKSVGVHSVVKHDAIIDGSSPDYVLVEAEANRVAQDALKALRLSRQQCLGATSGVPTWTGHRGISGAPAGVKKRFGQKRNSSLPVQRPSSLTERTQNMKKEGEAHTAEHFSGKEDGASSSGAPSSSSLLARMRARNHMILPERLESDGEQLAGAAAAAAPPCSTEHDALLVDMRNFIAFQAQVDGQASTQEILQAFESKLSVAQSCVFRELLRNLCNFHRTPGGEGIWKLKPEYC

SEQ ID NO: 8157 - protein, 2688 aa, Rattus norvegicus
MDLDAAVLLAQLVCVLLEGKLSKLRALNHSPMSDASVNFDYKSPSPFDCSPDQGENIEEAANHCLPQKDFYTTEEEADTLFSRKLMSHNGMEDNGGRGTGVKKKRKKKEPGEQEGTKASKDREPKPKRKREPKEPKEPRRAKEPKRAKEPKEAKQKDGVKKPRKPREASGTKEGKEKRSCTDCGPRTKPKKASKDQGPTPVERKKKGKRKNETTVESLELDQSLPNPSLQSPEEPSESADSQKRRSGRQVKRRKYNEDLDFKVVDDDGETIAVLGAGRTSALSASTLAWQAEEPPEDDANIIEKILASKTVQEPDEDLFNPDYIEIDRILEVAHTKDAETGEEVTHYLVKWCSLPYEESTWELEEDVDPAKVKEFESLQILPEVKPVERPASDAWQKLETSREYKNSNRLREYQLEGMNWLLFNWYNRKNCILADEMGLGKTIQSIAFLSEIFVRGIHGPFLIIAPLSTITNWEREFRTWTEMNAIVYHGSQISRQMIQQYEMVYRDAQGNPLSGVFKFHVVITTFEMILADCPELKKIHWSCVVIDEAHRLKNRNCKLLEGLKLMALEHKVLLTGTPLQNSVEELFSLLNFLEPSQFPSETAFLEEFGDLKTEEQVKKLQSILKPMMLRRLKDDVEKNLAPKQETIIEVELTNIQKKYYRAILEKNFSFLTKGANQHNMPNLINTMMELRKCCNHPYLINGAEEKILEDFRKAHSSEASDFQLQAMIQAAGKLVLIDKLLPKLIAGGHKVLIFSQMVRCLDILEDYLIQRRYTYERIDGRVRGNLRQAAIDRFCKPDSDRFVFLLCTRAGGLGINLTAADTCIIFDSDWNPQNDLQAQARCHRIGQSKAVKVYRLITRNSYEREMFDKASLKLGLDKAILQDINRKGSTNGVQQLSKMEVEDLLRKGAYGALMDEEDEGSKFCEEDIDQILQRRTHTITIQSEGKGSTFAKASFVASGNRTDISLDDPNFWQKWAKIAELDTEANNEKESLVIDRPRVRKQTKHYNSFEEDELMEFSELDSDSDERPTRSRRLSDKARRYLRAECFRVEKNLLTFGWGRWKDILTHGRFKWPLNEKDMEVICRALLVYCVKHYKGDEKIKSFIWELITPSKDGQVQTLQNHSGLSAPVPRGRKGKKTKNQLLLPELKTADWLATCNPEVVLHDDGYKKHLKQHCNKVLLRVRMLYYLKAEILGEAADKAFEGTPARELDVLLPDIDYVEIPVDWWDAEADKSLLIGVFKHGYERYNAMRADPALCFLEKVGMPDEKSLSAEQGVTDGTSDIPERGNIDKEDSAEDKVDGLQKQTASPSDGSDGIFGEKKDDSQAVSSALTARLRRLVTIYQRCNRKELCRPEILGPGNQGYWVQEEVFRRTSDMDLINKEAQKRWTRREQADFYRTVSSFGVVYDQEKEAFDWTQFRAISRLDKKSDENLEHYFHSFVAMCRNVCRLPTWKDDGPPDASIYVEPITEERAAKTLYRIELLRKVREQVLTCPQLHERLQLCRPSLYLPVWWECGKHDRDLLIGTAKHGLNRTDYYIMNDPQLSFLDAYRNYAQHKRTDTQAPGSLCCLYQGNSKLYESLTYTPMSRTSESLESEPENLVKMDSRDDHLCLPEAGLPDITCENFVSKVQEVISLDHDESLLPESLENMMYGKTGLSQEPRSFQEAPSTNMQSRKKTVTVSASRDESCQLPGIEAEITSASSLMSSLEAGVAKMNIKNGKHLLVSISEEGEPCCSETGRSPESRGRLEARCLASPTLDTGHESGFVDLCSLSVYDSKRNFSSDQQLIDLLENKSLENKLILNQSDEEEEENEKETLAIVASTTEKPAVLDFTQPTASIPRGKNLSFHQDEAKKGRLEVGSKTPGPQRAFPPSANQCHCKHIERWAHGLGSEESEGEKPKAYEPDPYRSKANNTTVEGEPAIIPTEPFKLKHELLKEPWKESSEGGKSFSMYVPEGSEPKSEEMDFENKDDYEKDGACHSQDYPGKYSEEESKSSASGIAGDLGEEAQEVRAPTIAQLLQEKTLYSFSEWPKDRVIINRLDNICHVVLKGKWPCSHQYEPSGALPTPVLSSSAGSRSSLSEPEATEHSFSNGAALAAQIQKESFLAPVFTKDEQKHRRPYEFEVERDAKARSLEEYSASHGRPPIVLNGWHGESAIDLSCSSEGSPGATSPFPVSASTPKIGAISSLQGALGMDLSGILQAGLIHPVTGQIVNGSLRRDDAAMRRRRGRRKHIEGGMDLIFLKEQTLQAGILLVVRWVEIQTLSGEDQVGTAGKVQYPMLYRSPVTGVSSVEEVHEDAGQTTLNTTHPEGPGAASSASEPTAAASSQAEKAVPSKSLLDWLRQQADYSLDVPGFGASFSDKPKQRRPRCKEPGKLDIGSLGGEERVSAVPKEPGLRGFLPESKFNHTLAEPVLRDAGPRRRGRRPRNELLKAPAIVADSPSGMGPLFMNGLIAGMDLVGLQNVRNIPGIPLTGLVGFPAGFATMPTGEDVKNTLSMLPMMLPGMATVPQMFGVGGLLNTPMATTCTTTASASLASTKSGASATEKTTEDELSGRDVKADSLVEDKPGPSPFSDQSEPTITTSSPVAFNPFLIPGVSPGLIYPSMFLSPGMGMALPAMQQGRHSEMAGLETQKRKKKKTKGDNPTPEPASVCEREPGSDQNCTESSVTVSPEREHVAQAREEGLKDSNDDTN

SEQ ID NO: 8158 - protein, 1230 aa, Rattus norvegicus
MEASQGLAEVGTLSPQLAESYLRYSQEAKEAAKNGDLEEALKLFNLAKDIFPTKKVISRIQKLQEALEQLAEEEDDEFTDVCNSGLLLYRELYEKLFEHQKEGIAFLYSLYKNGRKGGILADDMGLGKTVQIIAFLSGMFDASLVNHVLLIMPTNLINTWVKEFAKWTPGMRVKTFHGSSKNERIRNLTRIQQRNGVVITTYQMLLNNWQQLASFNGQAFVWDYVILDEAHKIKSASTKSAVCARAVPASNRLLLTGTPIQNNLQELWSLFDFACQGSLLGTLKTFKMEYENPIIRAREKDATPGEKALGFKMSENLMEIIKPYFLRRTKEEVHMKKADKPEVRPGEKNSGVEDICEMLSLTRKNDLIVWIRLVPLQEEIYRKFVSLDHIKELLMETRSPLAELGVLKKLCDHPRLLSARACHLLNLGTVTFSAEDENEQEDASNMGSIDHLSDNALMQESGKMIFLMALLERLQDEGHQTLVFSQSRQILNIIERLLKNKHFKTLRIDGTVTHLWEREKRIQLFQQNKEYSVFLLTTQVGGVGLTLTAASRVVIFDPSWNPATDAQAVDRVYRIGQKENVVVYRLITCGTVEEKIYRRQVFKDSLIRQTTGDKKNPFRYFTKQELKELFTVGDLLNSATQMQLQCLHAAQRKSDEKLDEHIAYLHSLGIAGISDHDLMFTCDLSVKEELDMLEDAQYIQHRVQKAQFLVESESQNTKERPSEENWLKAQEFPSQQRKKGNKPQPQPSRLLANPTQVEAISSQMASISIYDQSTESEPQELSEAHDVTSLQGDQHHFESTSDAGTIASLPQGAESIGGVWTDSLLSPAKGFAADNEAVQKNELQASPGQEALSENLGSFHYLPRQSSKADLEPNLDVQDSVVLYHQSPTANENQNLESNEPMIEISDDLSASPSALQGAQAMEAQLELKKDPLESPPQYECDFNLFLEDSADTRQNLSSKFLEHVEKENSLQRPAGNSGEESAHNLSLDSSNKIDEESEVITVKTKNKARRILSDDEDEEDAFKDTSTNSFSVSPLTFSSVKHFDASTPQNDSNPSRRFFSPKIPDDVNTSLHPRRSLASRRSLINVVLDDMEDMEERLDTSSEEESEPELSEDSNEEAVACTEEQRSGATLASGNKHSSLTESEPTSPAPQSSPCAPEPSSSDPLLDPPQDPAVEAANDYESLVARGKELKECGKTQEALNCLVKALDIKSADPEVMRMTLSLYKQLNT

SEQ ID NO: 8159 - protein, 1249 aa, Rattus norvegicus
MNMTGSEMPNLVRNLGLLRAVEVFEESGAYKQEKTCGFAKIKSSSLKAVSLLREVLPINMNLFNLDRFRFEKRSKIEEAPEAAPQPSQPGPSSPISLSAEEENAEGEVSRANTPDSDVTEKTEDSSVPEPPDNESKASLSCFQNQRTIQEYIDLSSDSEDVSPNCSSTVQEKKFSKDTVIIVSEPSEDEESHDLPSATRRNDISELEDLSELEDLKDAKLQTLKELFPQRSDSDLLKISWLLWRPAENRISVRQICLDGSVVRPVLVVSEFLRIKENRLMALKTEDGYTGSETDFHSGKRCAYLIDSTSTMDGAIAAALLKFGDAGLVEARGLVAGQWGLGDWDSMQFRATGHAPEDLLGSKMVSVVNDSVRLIGCEDSIKLVLLHCEEGCMKLLASCGGPRKRKLSSSSEAYEEDEANDDQSLKKPRGDRREESNESAEASSNWEKQESIVLKLQKEFPNFDKQKKIMYFQELREVLKEHEWMYTEALESLKVFAEDQDVQCASQSEVTNGKEVARNQNYSKNAAKIKMKQKISMKPQNGFNKKRKKNVFNPKKAVEDSEYDSGSDAGSSLDEDYSSCEEVMEDGYKGKILHFLQDASIGELTLIPKCSQKKAQKIIELRPFNNWETLFTKMSKINGLSEDLIWNCKTVIQERDVVIRLMNKCEDISNKLTKQVTMLTGNGGGWNIEQPSLLNQSLSLKPYQKVGLNWLALVHKHGLNGILADEMGLGKTIQAIAFLAYLFQEGNKGPHLIVVPASTIVFKAKLLNPILADSYNLLCFVDNWLREVNLWCPTLNVLCYYGSQEERKQIRFNIHNKYEDYNVIVTTYNCAISSSDDRSLFRRLKLNYAIFDEGHMLKNMGSIRYQHLMTINARNRLLLTGTPVQNNLLELMSLLNFVMPHMFSSSTSEIRRMFSSKTKPADEQSIYEKERIAHAKQIIKPFILRRVKEEVLKLLPPKKDQIELCAMSEKQEQLYSGLFNRLKKSINNLEKNTEMCNVMMQLRKMANHPLLHRQYYTAEKLKEMSQLMLKEPTHCEANPDLIFEDMEVMTDFELHVLCKQYQHINSYQLDMDLILDSGKFRTLGCILSELKQKGDRVVLFSQFTMMLDILEVLLKHHQHRYLRLDGKTQISERIHLIDEFNTDMDIFVFLLSTKAGGLGINLTSANVVILHDIDCNPYNDKQAEDRCHRVGQTKEVLVIKLISQGTIEESMLKINQQKLKLEQDMTTVDEADEGSMPADIATLLKTSMGL

SEQ ID NO: 8160 - protein, 1445 aa, Rattus norvegicus
MFFHVILDNYDRWCPGERCLAPSLDNKKLCEASIKSITVDENGEPFAVVLYPDFQEKKIPLQRLQEVKSTKDHSRSLIFDDEDLEKPYFPDQKIPSLVSAFQLSEDGDSIPYTINRYLRDYQREGAQFLYRHYIKGRGCILGDDMGLGKTIQVISFLAAVLHKKGTREDIENNMPEFLLKSMKKESSSTARKMFLIVAPLSVLYNWKDELDTWGYFRVTVLHGSKKDNELTRLKQRKCEIALTTYETLRLCLEELNSLEWSAIIVDEAHRIRNPNARVTEVMKAVKCKVRIGLTGTILQNNMKELWCVMDWAVPGLLGSRIHFKKQFSDPVEHGQRHTATKRELATGRKAMHRLAKKMSGYFLRRTKTLIKGQLPKKEDRMVYSSLTDFQKAVYQTVLETEDVALILTSSQPCTCGSGQKRRKCCYKETLIKRICDQVFSRFPDFVQKSKDAAFETLSDPKYSGKMKVLDQLLNHFRKHRDKVLLFSFSTKLLDVLQQYCMASGLDYRRLDGSTKSEERLKIVKEFNSSQDVNICLVSTMAGGLGLNFIGANVVILFDPTWNPANDLQAIDRAYRIGQCRDVKVFRLISLGTVEEIMYLRQVYKQQLHCVVVGSENAKRYFEAVQGSKEHRGELFGVHNLFKLRSQGSCLTRDILEREGQVEAGIMTATTWLKGEASAQKLETPRDPDCQEPTNVCELYSDMSDEESVGKAVKHKVSGPSRTPGSSAQLTLLQCGFSKLFEAKCESVQDGDGNPVSSDGSSDEQPMCLSAKARQAACQKTWDSVCTSEHQKSDNIQTPDEKCVSDKSEKTLEQNVSSESDDETKCHSTAGHHCMGQGDTESEDSDVIFPTQDPTQRVPKNPICCKLLLGESEDSETEDPVKVNHDDGRQNSGRGNGPVSNFLYLENMTLKSVRKRKGTDDISDESDDIDMFPKSRIRKQRATASLKLKSKKENKRKHYNSPITAKDTNQVCEADGDCSSQVIEDFSSSDDSSSVSHVSFTKLNHRAETVKDGVQEVAYIHSNQNVIGSSRAENHMSRWATRDVFELKQFSQLPANVAVCSSETYKSKVNANAVIPTKKDQPPSDGHISSPLYISHPVSQKKKDVYRTNHTTFIIGETPRGIRRKQFEEMASFYKLSVKEFAEQVTSATSEEQQRMLRDFYSLQHPEVKEFFMDSASELMKSVHEKEERVRNKSKGKESLLKERPSNDSTLSCNDSTNKMSQVYNQKICEGKSVRFQNHGSHKEDTFSSGAEIKKSPVNFTQEIYSERNNHTPKDSMTLFCPDSKSEALETELEGSSGHQWDLTGAGSSRNRPCFKLRNKRVENPVSESTPTEGLLGDTSILNDLFKSHGEGPTQLPKNGPSGPVAKAKQRPKDFWDILNEQNDDSLSKLTDLAVIETLCTKAPRTTASKRKEELEASLWKANEKFLWKTFSSDVDDESISSRERE

SEQ ID NO: 8161 - protein, 2432 aa, Rattus norvegicus
MGTEFSHSPSEPFLEKPVPDMTQVSGQNAQLVKSDDYLPSIEQQPQQKKKKKKNNHIAAGDPSKGFGKDDFPGGVDNQELSRNSLDASQEETKKRKRPKVKKDPKELKEPREKKEPKTPKAPKTPKEPKERKAKTVTPKPKSSKKSSNKKPDSEASALKKKVNKGKTEGSENSDLDKTPPPSPGPEEDEDPGVQKRRSSRQVKRKRYTEDLEFKISDEEADDADAAGRDSPSNTSQSEQQESVDAEGPVVEKIMSSRLVKKQKESGEEVEVEEFYVKYKNFSYLHCQWASVEDLEKDKRIQQKIKRFKSKQGQSKFLSEIEDDLFNPDYVEVDRIMDFARSTDDRGEPVTHYLVKWCSLPYEDSTWELRQDLDQAKIEEFEKLMSREPETERVERPPADDWKKSESSREYKNNNKLREYQLEGVNWLLFNWYNMRNCILADEMGLGKTIQSITFLYEIYLKGIHGPFLVIAPLSTIPNWEREFRTWTELNVVVYHGSQASRRTIQLYEMYFKDPQGRVIKGSYKFHAIITTFEMILTDCPELRNIPWRCVVIDEAHRLKNRNCKLLEGLKMMDLEHKVLLTGTPLQNTVEELFSLLHFLEPSRFPSETTFMQEFGDLKTEEQVQKLQAILKPMMLRRLKEDVEKNLAPKEETIIEVELTNIQKKYYRAILEKNFTFLSKGAEEKILEEFKDAHNADSPDFQLQAMIQAAGKLVLIDKLLPKLKAGGHRVLIFSQMVRCLDILEDYLIQRTYPYERIDGRVRGNLRQAAIDRFSKPDSDRFVFLLCTRAGGLGINLTAADTCIIFDSDWNPQNDLQAQARCHRIGQSKSVKIYRLITRNSYEREMFDKASLKLGLDKAVLQSMSGRENATNGVQQLSKKEIEDLLRKGAYGALMDEEDEGSKFCEEDIDQILLRRTHTITIESEGKGSTFAKASFVASGNRTDISLDDPNFWQKWAKKAELDIDALNGRNNLVIDTPRVRKQTRLYSAVKEDELMEFSDLESDSEEKPCIKPRRPQDKTQGYARSECFRVEKNLLVYGWGRWTDILSHGRYKRQLTEHDVETICRAILVYCLNHYRGDENIKSFIWDLITPTADGQTRALLNHSGLSAPVPRGRKGKKVKAQSMQPVVQDADWLASCNPDALFQEDSYKKHLKHHCNKVLLRVRMLYYLRQEVIGDQAEKILEGADSSEADVWIPEPFHAEVPADWWDKEADKSLLIGVFKHGYEKYNSMRADPALCFLERVGMPDAKAIAAEQRGTDMLADGGDGGEFDREDEDPEYKPTRAPFKDEIDEFANSPPEDKEDSMEAQSTGEGPGQLVMEAWGTGEGPGQLVMEAWGTGKHSESNAELGQLYWPNTSSLTTRLRRLITAYQRSYKRQQMRQEALMKTDRRRRRPREEVRALEAEREAIISEKRQKWTRREEADFYRVVSTFGVIFDPVKQQFDWNQFRAFARLDKKSDESLEKYFSCFVAMCRRVCRMPAKPEDEPPDLASLIEPITEERASRTLYRIELLRKIREQVLHHPQLSDRLKLCQPSLDLPEWWECGRHDRDLLVGAAKHGVSRTDYHILNDPELSFLDAHKSFAQNRGASTVPSLNTLAMGFGQAPPVIASAHAHEEKVMEQAEGKAEECEHSPAKERSDGKEEEEEAGGAKDSRQECEAEASSVKGELKGVEGSGDPGSKSVSEKGSEEDEEEKLEDDDKSEESSQPEGAVSRGKTFDEESNASMSTARDETRDGFYMEDGDPSVAQLLHERTFAFSFWPKDRVMINRLDNICEAVLKGKWPINRRQMFDFQGLVPGYPPSTVDSPLQKRSFAELSMVSQASVSASEDITTSPQLSKRRRRRRKVEIEAERAAKRRNLMEMVAQLRESQVVSENGQEKVVDLSKASREATSSTSNFSSLTSKFILPNVSTPVSDAFKTQMELLQAGLSRTPTRHVLNGSLVDGEPPMKRRRGRRKNVEGLDLLFMSHKRTPLSAEDAEVTKAFEEDIETPPIRNIPSPGQLDPDTRIPVINLEDGTRLVGEEAPKNKDLVDWLKLHPMYTVDMPSYVPKNADVLFSPFQKPKQKRHRCRNPNKLDINTLTGEERVPVVNKRNGKKMGGAMAPPMKDLPRWLEENPEFAVAPDWTDIVKQSGFVPESMFDRLLTGPVVRGEGASRRGRRPKSEIARAAAAAAAVASTSGINPLLVNSLFAGMDLTSLQNLQNLQSLQLAGLMGFPPGLATAATAGGDAKGPAAVLPLMLPGMAGLPNVFGLGGLLNNPLSAATGNTTTASSQGEPEDGTSKAEEKGNDNEDENRDSEKSTDAVSAADSANGSVGAATAPAALPSNPLAFNPFLLSTMAPGLFYPSMFLPPGLGGLTLPGFPALAGLQNAVGASEEKAADKAEGGPCKDGETLEGSDAEENLDKTIESSILEDEVAQGEELDSLEGGDEIENNGNDE

SEQ ID NO: 8162 - protein, 1808 aa, Rattus norvegicus
MALTLLQWVSVARLALCEPTECSMEDSSTTDRLNFDRFDICRLLQHGASLLGSAGAEFEVQDEKSESRFWYYGLSGPFREGEVDPKERIARQRKLLQKKLGLNMGEAIGMSTEELFNDEDLDYTPTSAALVNKQSTLQAAELIDSEFRAGMSNRQKNKAKRMAKLFAKQRSRDAVETNEKSNDSTDGEPEEKRRKVANVVINQTASDAKVLIDNVPESSSFIEEVRHGAGTGLREILKAHGKSGGKMGDSTLEEMIQQHQEWLEDLVIRLLCVFALDRFGDFVSDEVVAPVRETCAQTLGVVLKHMNETGVHKTVDVLLKLLTQEQWEVRHGGLLGIKYALAVRQDVINTLLPKVLTRIIEGLQDLDDDVRAVAAASLVPVVESLVYLQTQKNSSSWLIPILSDMLRHIFQFCVLESSQEILDLIHKVWMELLSKASVQYVVAAACPWMGAWLCLMMQPSHLPIDLNMLLEVKARTKEKTGGKVRQGQMQSKEVLQEYIAGADTIMEDPATRDFVVMRARMMAAKLLGALCCCICDPGVNMVNQEIKPAESLGQLLLFHLNSKSALQRISAALVICEWAALQKECKAVTLAVQPRLLDILSEHLYYDEIAVPFTRMQNECKQFISSLADAHIEVGNRVNNNVLTIDQANDLVTTLFNEVTSTFDLNPQVLQQLDSKRHQVQMTVAETNQEWQVLQLRVHTFAACAVVSLQQLPEKLNPIIKPLMETIKKEENTLVQNYAAQYIAKLLQQCTTRTPCPNSKVIKNLCSSLCVDPYLTPCVTCPVPTQSGQENSKGSNSEKDGMHHTVTKHRGIITLYRHQKAAFAITSRRGPIPKAIKAQIADLPAGSSGNILVELDEGQKPYLVQRRGAEFALTTVVKHFGAEMALKLPHLWDAMVGPLKTMIDLNNFGVMEQLDVGIVPYIVLLVVPVLGRMSDQTDSVRFMATQCFATLIRLMPLEAGIPDPPNMSEELIQLKAKERHFLEQLLDGKKLENYKIPVPINAELRKYQQDGVNWLAFLNKYKLHGILCDDMGLGKTLQSICILAGDHCQRNIKFNYCILDEGHVIKNGKTKLSKAVKQLTANYRIILSGTPIQNNVLELWSLFDFLMPGFLGTERQFAARYGKPILASRDARSSSREQEAGVLAMDALHRQVLPFLLRRMKEDVLQDLPPKIIQDYYCTLSPLQVQLYEDFAKSRAKCDVDETVSSAALSEETEKPKLKATGHVFQLLLDCGLGNGTSSESGTESVVAQHRILIFCQLKSMLDIVEHDLLKPHLPSVTYLRLDGSIPPGQRHSIVSRFNNDPSIDVLLLTTHVGGLGLNLTGADTVVFVEHDWNPMRDLQAMDRAHRIGQKRVVNVYRLITRGTLEEKIMGLQKFKMNIANTVISQENSSLQSMGTDQLLDLFTLDKDGKAEKADSSTSGKASMKSVLENLSDLWDAEQYDSEYNLETFMRSLEFKFTRRLAADKGSGQVSMCYQEVLLQGQPLQSLSPRARHQNHFLKGLVQGSKANGHPEERAQFVLNLLLFIKQTLYSRLYKADFLKQTYTVERCNGLQRLQVAPATVTATCGVLKSLESGCTRNALTCRAGTRSPSPRIPDRFNKLLLQKKKVQTTKFKQLSDSFESSTFSHSSESVQAVLVQAPGQKPRKGYQQEQSKEQHFVQEQAFPCARTQALRVPVNYCNLTTSASLDPLLDPFRGIKSTVSLIKHSAELEEATNNRQKCAIYLEQVPGCSVYTTPALELRDASAQAAFPVHSRGRGSGEAGRAVGALEKQQQEGRQVMHGVAQCHPKKRQTKGDIAKNRWGEKDAANT

SEQ ID NO: 8163 - protein, 986 aa, Rattus norvegicus
MVGKARSSNFTLSEKLDLLNLVKPYVKILEEHTNKNSVIVEKNRCWDVIAVNYNAIGVDRPPRTAQGLRSLYKRLKEYAKQELLQQKEAQSDYKSSISEPTKKVVEMIPQISSFCLVRDRNHIQSTNLDEAAQAGTSSLQVMVDHHPVAITVEVKQEEDIKPSPALVSSPQHNDALEQQEEHELMRVAEGSVSPSLSSVDMRMTSSPSSVPRRDVFHQESGEHLRSLLRCDPQVLQMLKEEHQLILENQKKFGLYVQEKRDGLKRRQRLEEELLRAKIEVEKLRASRLRRDLPEYIHLASKEIIESKAQEEEASSLLKYFSVVWCKASKKKHKKWEGDAILIVKGRSFILKDMEGKDIGRGMGYKFKELENVEEGQTLMLGGKEIEILGTVSAEDFNSGKCFQAGSGSPAVPSSQAARKCFSNPFKSVCQSTQARRDRGNDWQNCKPRYDPYTPNALVMPRPDKSHQWAFNRSCLPTVDVVIDPHLVRHLRPHQKDGVAFLYECVMGMRAVGKCGAILADEMGLGKTLQCISLIWTLQCQGPYGGKPIVKRTLIVTPGSLVNNWRKEFQKWLGSERIKIFTVDQDHKVEEFINSAFHSVLIISYEMLLRSLDRIKTITFGLLICDEGHRLKNSGIKTTAALSSLSCEKRVILTGTPVQNDLQEFFALVDFVNPGILGSLSSYRRIYEEPIVMSREPSASKEERELGERRTTELTRLTGCFILRRTQEVINKYLPPKIENVVFCRPGALQIELYRKLLSSQSVRFCLQGLLGNSAHLICIGALKKLCNHPRLLFSFVKGKEFNSSRDENEERSLCQGLLTVFPAGYNLLQLSESESGKLQVLVKLLAAISELRPTEKVILVSNYRQTLNLLEEVCKCHGYACARLDGQTPVSQRQQIVDNFNSKYSTDFIFLLSSKAGGVGLNLIGGSHLILYDIDWNPATDIQRGGDLFSFQHEKALGHTVQLTCRVFTTTGDDSYGAMIELCRLQ

SEQ ID NO: 8164 - protein, 1371 aa, Rattus norvegicus
MGLGKTIQSITFLYEVLLTGIRGPFLIIAPLSTIANWEREFRTWTDINVVVYHGSLISRQMIQQYEMYFRDSQGRIIRGAYRFQAIITTFEMILGGCGELNAIEWRCVIIDEAHRLKNKNCKLLEGLKLMNLEHKVLLTGTPLQNTVEELFSLLHFLEPLRFPSESTFMQEFGDLKTEEQVQKLQAILKPMMLRRLKEDVEKRLAPKEETIIEVELTNIQKKYYRAILEKNFSFLSKGAGQTNVPNLVNTMMELRKCCNHPYLIKGAEEKIIGEFRDTYNPSASDFHLQAMIQSAGKLVLIDKLLPKMKAGGHKVLIFSQMVRCLDILEDYLIHKRYLYERIDGRVRGNLRQAAIDRFSKPDSDRFVFLLCTRAGGLGINLTAADTCIIFDSDWNPQNDLQAQARCHRIGQNKAVKVYRLVTRNSYEREMFDRASLKLGLDKAVLQSMSGRDSNVSGIQQLSKKEIEDLLRRGAYGAIMEEEDEGSKFCEEDIDQILLRRTKTITIESEGCGSTFAKASFVASGNRTDISLDDPNFWQKWAKKAELDLDAISGRNSLVIDTPRIRKQTRPFSATKDELAELSEAESEGEEKPKLRRPCDRSGGYGRTECFRVEKNLLVYGWGRWREILSHGRFKRQLNEHDVEVICRALLAYCLVHYRGDEKIKGFIWDLITPTEDGQTRELQNHLGLSAPVPRGRKGKKVKTQTSSFDIQKAEWLRKYNPEQLLQDEGYKKHVKHHCNKDVEDPEYKPAPAIFKDDIEVRSGSHCLKPQYSVFLIVNDQFKLTNIDDVSSPGDLVIADGEGQLMEGDKVYWPTPSALTTRLRRLITAYQRTNKNRHIQQAQPTFSVPASVMQPLYEEAALNPKMAAKIERQQRWTRREEADFYRVVSTFGVVFDPDRGQFDWTKFRALARLHKKTDNSLEKYLCAFMAMCRRVCRLPSKEELVDPNIFIQPITEERASRTLYRIELLRKVREQALRHPQLFERLKLCHPNPDLPIWWECGSHDRDLLIGAAKHGVSRTDYHILRDPELSFMAAQRSYSQSKVTHSRTSTPLLQQYQVVLSASPLTSSPRLLGAKGPLVEDVRVKSESLAEEPQSSEEESMSSMETRTRVKSEPVSPKNGVLSQAPGEQKSGGKSETDRRMVAARTEPLTPNPASKKQRVHKRGSSSSGTRTKPHQAWPGATVAYRASLSTGAGVPCHSSVDRVMINRLDSICQTVLKGKWPSARRHYDANTVASFYTTKLLDSPGAATEYSEPSVPTPPAVAVKEEHEQSPQMSKVKKHVREKEFTVKIKDEGGLKLTFQKQGLAQKRPFDGEDGAVGQQQCLPRPRELQSTSETSVVNTSKSIPASGKRDSVSSRCSCLCQITFYTHLK

SEQ ID NO: 8165 - protein, 1129 aa, Rattus norvegicus
MEPDTATEAATVAASDARATIVVLEDEQPGPSTFKEEGAAAAATEATTATEKGEKKEKITSPFQLKLAAKTSKSEKEMDPEYEEKMVNIPLKADRAKRFEFLLKQTELFAHFIQPSAQKSPTSPLNMKLARPRVKKDDKQSLISVGDYRHRRTEQEEDEELLSESRKTSNVCVRFEVSPSYVKGGPLRDYQIRGLNWLISLYENGVNGILADEMGLGKTLQTIALLGYLKHYRNFPGPHMVLVPKSTLHNWMNEFKRWVPSLRVICFVGDKDVRAAFIRDEMMPGEWDVCVTSYEMVIKEKSVFKKFHWRYLVIDEAHRIKNEKSKLSEIVREFKSTNRLLLTGTPLQNNLHELWALLNFLLPDVFNSADDFDSWFDTKNCLGDQKLVERLHAVLKPFLLRRIKTDVEKSLPPKKEIKIYLGLSKMQREWYTKILMKDIDVLNSSGKMDKMRLLNILMQLRKCCNHPYLFDGAEPGPPYTTDEHIVSNSGKMVALDKLLARIKEQGILLQSKNAKMTTTMALAWRISQCSEEEQSQHIVRSALHPAVEKRGIGNVFLVMIFEGKTGLQAGGSETDHSTGIYGMNRSTAICEFGSRVLIFSQMTRLLDILEDYCMWRGYEYCRLDGQTPHEEREEAIEAFNAPNSSKFIFMLSTRAGGLGINLASADVVILYDSDWNPQVDLQAMDRAHRIGQKKPVRVFRLITDNTVEERIVERAEIKLRLDSIVIQQGRLIDQQSNKLAKEEMLQMIRHGATHVFACKESELTDEDIVTILERGEKKTAEMNERMQKMGESSLRNFRMDLEQSLYKFEGEDYREKQKLGTVEWIEPPKRERKANYAVDAYFREALRVSEPKVPKAPRPPKQPNVQDFQFFPPRLFELLEKEILYYRKTIGYKVPRNPELPNPAIAQREEQKKIDGAEPLTPQESEEKDKLLTQGFTNWTKRDFNQFIKANEKYGRDDIDNVAREVEGKSPEEVMEYSAVFWERCNELQDIEKIMAQIERGEARIQRRISIKKALDAKIARYKAPFHQLRIQYGTSKGKNYTEEEDRFLICMLHKMGFDRENVYEELRQCVRNAPQFRFDWFIKSRTAMIFKFSDHICRKADINYISGYKCEPVFCLLILEMPVPFITV

SEQ ID NO: 8166 - protein, 332 aa, Rattus norvegicus
MGLGKTCQTIALLIYLVGRLNDEGPFLILCPLSVLSNWKEEMERFAPGLSCVTYTGDKEERARRQQDLRQESGFHVLLTTYEICLKDASFLKSFSWSVLAVDEAHRLKNQSSLLHRTLSENSLQELYSLLSVVEPDLFCREQVEDFVQCYQDIEKESKSASELHRLLRPFLLRRVKAQVATELPKKTEVVIYHGMSALQKKYYKAILMKDLDAFENETAKKVKLQNVLTQLRKCVDHPYLFDGVEPEPFEVGEHLIEASGKLHLLDRLLAFLYSGLLAFLYSGLLAFLYSGLLAFLYSGQWVYPGQAAAGFSVPWIDSGFTLDRLLAFLYPG

SEQ ID NO: 8167 - protein, 885 aa, Rattus norvegicus
MGLGKTIQAIAISYFYKEEWPLLIVVPSSLRYPWIEELEKWIPELEPEEINVITNKTDTGRIATSRVTVLGYGLLTTDAETLLEALDRQNFRVVIVDESHYMKSRTAARSKILLPMVQKAQRAILLTGTPALGRPEELFMQIEALFPQRFGTWVEYAKRYCNAHIRVRKSFTTCLRCCPAGAIQHHLGRLLIDNSMFPINVGVLRLSFLNTDTQQLYFGKRRQWDCRGASNLSELHQLLNDIMIRRLKSEVLSQLPPKVRQRIPFDLAPATVKELNASFEEWQKLMRAPDAGAMETVMGLITRMFKQTAIAKHSPVPGQCSPVPSQALVHCHSSSIAPPECSSNPSLVPVLAPLTLSSWALYMTATETGCSCAFHIASLGALRTETQFSGIVCFLASVEVVSFAGLRLRGNKGSAGAVKDYIKMLLQNDSLKFLVFAHHLSMLQACTEAVIESKARYIRIDGSVPSSERIHLVNQFQKDPDTRVAILSIQAAGQGLTFTAASHVVFAELFWDPGHIKQAEDRAHRIGQCSSVNIHYLIANGTLDSLMWAMLNRKAQVTGSTLNGRKEKLQATEDDKEKWGFLQFAEAWTPSDSFEELKDPVFTHGVKPFLYHLHPLMDLQSQSSRPFNLFLEASMLPQRSFLKQFEKEKQHDIRSFFLPKPRKRPLETSGDAAEAVKEKTTVASDPRNMATKEGTTDKNGVEPETKRLKSLSTRDHCSALEEKPSLQAKATSIDGVHEVKSPLASPALSEKRWQCGFCTFLNDPGLPYCEMCESPQGRAAGLNHRQDNNKEEKEESQKSTSKNDQARLHCVKPCSEQPEVERLARNKEETSKETSLNTRWLSAGINTIASQPINCSHHPNAALPNRSELIDRPLSAECRREGFVE

SEQ ID NO: 8168 - protein, 616 aa, Rattus norvegicus
MASELGAGDDGSCTELAKPLYLQYLERALRDDSEDGLDDNNPLLPESGDPLIQVKEEPPNSLLGETSGASSSGLLNPYSLNGVLQSESKSDKGNLYNFSKLKKSRKWLKVRAFKHMKHIQELLKRQIGVFGEKKLVWLVYSDLVAESILLSDESSEADSQSEDNDDEEEELSLSREELHNMLRLHKYKKLHQNKYSKDKELQQYQYYSAGLLSTCDPFYEQQRHLLGPKKKKFKEDKKLKAKLKKVKKKRRRDEEFSSEESPRHHHHQTKVFAKFSHDAPPPGTKKKHLSIEQLNARRRKVWLSIVKKELPKLAHQCMKEVRRAALQAQKNCKETLPRARRLTKEMLLYWKKYEKVEKEHRKRAEKEALEQRKLDEEMREAKRQQRKLNFLITQTELYAHFMSRKRDMGHDGIQEEILRKLEDSSTQRQIDIGGGVVVNITQEDYDSNHFKAQALKNAENAYHIHQARTRSFDEDAKESRAAALRAADKSGSGFGESYSLANPSIRAGEDIPQPTIFNGKLKGYQLKGMNWLANLYEQGINGILADEMGLGKTVQSIALLAHLAERENIWGPFLIISPASTLNNWHQEFTRFVPKFKGKLLLFFKISFLSLLLPPY

SEQ ID NO: 8169 - protein, 1875 aa, Rattus norvegicus
MELLCVLQEWTEPNNFHICITSYKQFFRGYTAFSRVHWKCLVVDEMQRVKGMTERHWEAIFKLQSQQRLLLIDVPLHNTFLELWTMVHFLIPGISRPYLSFPLKAPNEENQDYYHKMVIRLHRVIHLKLIYPLLHTPWQIGEKNGYYYLQVTQPFILRRTKRDVEKQLTRKYEHVLKCRLSSRQKALYEDVILQPRTQEALKSGHFVSVLSVLTRLQRICNHPGLVEPRVPGSSYAAGSLQYKSASLILRVLEREFWKETDLSMFDLIGLENKISRHEAELLYKKKVTRKLMEEVFTSPPPSARPAAVKLKASRLFQPVQYGQKPEGRTVAFPSTHPPRMANTNASTATPQGQVRGRPPIATFSANPDTKAAGPAHPSKLRAQTAVQASTPGPPLPPPQAPSLVAGQSAPPQRLVLTSQAQARLPSGEVVKIAQLASIAGPQSRVAQPETPVTLQFQGNKFTLSHSQLRQLTAGQPLQLQGSVLQIVSAPGQPYLRAPGPVVMQTVSQAGAVHSTLGSKPPTSGPSPAPLSTQVGVPGRVAVSAMAVGEPGLASKPASPAAGPTQAPVYGRDLLRICSLPGRRKRPLCWSLDSNLGKGPKGADYDTSLSKSEGDLILTLSQRQESLQDVLDRVACVIPPVVATPPSLWVERPPSLYSSRLRALRQCLREHTGPYHRQLQQLTALRSLQFPELRLVQFDSGKLEALAILLQKLKSEGRRVLILSQMVLMLDILEMFLNFHYLTYVRIDENANSEQRQELMRSFNRDRRIFCALLSTHSRATGINLVEADTVVFYDNDLNPVMDAKAQECGNSIEEKLLKNGTKDLIREVAAQGNDYSMAFLTQRTIQELFEVYSPMDDAGFPVKAEEFVVLSQEPSVSETIAPKIARPFIEALKSIECLEEDAQRSTEEAVPGSSTVAVSSDSDGSRYDEEPSQLEELADFMEQLTPIEKYALNYLELFHTTTEQEKERSSEDLVMATMKDWETRNARALQEREAQLQLEQEEAELLTYTREDAYSMEYVYEDADGQTEVMPLWTPPTPPQDDNDIYIDSVMCLMYETTPIPEAKLPPVYVRKERKRHKTDPSAVVYMPLCAFFPFRHLIGEEISLTNIAEFCSCLAAGRKKKQRHGEAVVPPRSLFDRATPGMLKIRREGKEQKKNLLLKQQTPFAKPLPTYVKSSGEPAQDSPDWLIGEDWALLQAVKQLLELPLNLTIVSPAHTPNWDLVSDVVNSCSRIYRSSKQCRNRYENVIIPREEGKLICEANPKKKAQNIYKSKNNRPLRTSQIYAQDENATHTQLYTSHFELMKMTAGKRSPPIKPLLGMNPFQKNPKHASVLAESGINYDKPLPPIQVASLRAERIAKEKKQPPPPVPQPQAASSQTPAGQPVVQPQVQAQPQPPPVQAQSKGQATMTTVGSAAVLAGTIKTSVTGTSIPTGTVSGNVIVNTIAGVPATFQSINKRLASPVAPGALTTSGGSAPAQVVHTQQRAVGSPATATTDLVSMTTTQGVRAVTSVTASAVVTTNLTPVQTPTRSLVTQEHIIKMQKQKMQLPPQPPPPQAQPGPPQQPAQVQVQTAQPPQQQQSPQLTTVTAPRPGALLTGTTVANLQVARLTRVPTSQLQAQGQMQTQTPQPAQVALAKPPVVSVPAAVVSSPGVTTLPMNVAGISVAIGQPQKTAGQTVVAQPVHVQQLLKLKQQAVQQQKAIQPQVAQGQAAVQQKLTTQQITTQGPQQKVAYAAQPALKTQFLTTPISQAQKLAGTQQVQTQIQVAKLPQVVQQQTPVASIQQVASASQQTVTLTQATAAGQQVQMIPTVTATAQVVQQKLIQQQVVTTASASLQTPGGPSPAQLPTSSDSPNQQPKLQMRVPAVRLKTPTKPPCQ

SEQ ID NO: 8170 - protein, 125 aa, Rattus norvegicus
MAQKKRVESIQCFQNTDAGSPTIMLLSLKAGGVGLNLCAASRVFLMDPAWNPAAEDQCFDRCHRLGQKQEVIITKFIVKDSVEENMLKIQNMKRELAAGAFGTKKTDADEMKQAKINEIRTLIDL

SEQ ID NO: 8171 - protein, 97 aa, Rattus norvegicus
MLQVVALHLRKNRLTYATIDGSVNPKQRMDLVEAFNHSQGPQVMLISLLAGGVGLNLTGGNHLFLLDMHWNPSLEDQACDRIYRVGQEKDVVMHRHT

SEQ ID NO: 8172 - protein, 183 aa, Rattus norvegicus
MDQFKAAERMSIGKSNTKDITEVTAVAEAILPKGSARVTTAVKFSAPSLLYGALRDYQKIGLDWLAKLYRKNLNGILADEAGLGKTVQIIAFFAHLACNEGNWGPHLVVMRSCNILKWELELKRWCPGLKTLSYVGTHRELKAKRQVVPPHCHCPLSFFVLHCWRCTQVPHFLDEACAGELCL

SEQ ID NO: 8173 - protein, 179 aa, Rattus norvegicus
MLSSKAGGCGLNLIGANRLVMFDPDWNPANDEQAMARVWRDGQKKICYIYRLLSAGTIEEKIFQRQSHKKALSSCVVDEEQDVERHFSLGELKELFTLDEASLSDTHDRLHCRRCVNNRQVWPPPDGSDCTSDLAQWNHNTDKRGLQDEVLQAAWDASSTAITFVFHQRSHEEQRGLHC

SEQ ID NO: 8174 - protein, 918 aa, Aegolius funereus
ELTDDLLKQYQIVERIIAHSNQKSAAGYPDYYCKWQGLPYSECSWEDGALIAKKFQACIDEYFSRNQSKTTPFKDCKILKQRPRFVALKKQPSYIGGHESLELRDYQLNGLNWLAHSWCKGNSCILADEMGLGKTIQTISFLNYLFHEHQLYGPFLLVVPLSTLTSWQREIQTWAPQMNSVVYLGDIISRNMIRTHEWMHPQTKRLKFNILLTTYEILLKDKSFLGGLNWVFIGVDEAHRLKNDDSLLYKTLIDFKSNHRLLITGTPLQNSLKELWSLLHFIMPEKFSSWEDFEEEHGKGREFGYASLHKELEPFLLRRVKKDVEKSLPAKVEQILRMEMSALQKQYYKWILTRNYKALSKGSKGSTSGFLNIMMELKKCCNHCYLIKPPDDNEFYNKQEALQHLIRSSGKLILLDKLLIRLRERGNRVLIFSQMVRMLDILAEYLKYRQFPFRRLDGSIKGELRKQALDHFNAEGSEDFCFLLSTRAGGLGINLASADTVVIFDSDWNPQNDLQAQARAHRIGQKKQVNIYRLVTKGSVEEDILERAKKKMVLDHLVIQRMDTTGKTVLHTGSTPSSSTPFNKEELSAILKFGAEELFKEPEGEEEEPQEMDIDEILKRAETRENEPGPLTVGDELLSQIKVANFSNMDEDDIELEPEQNFKKWEEIIPEVQRRRIEEEERQKELEEIYMLPRMRNCAKQISFNGSEGKRSRSRKYSGSDSDSISERKRPKKRGRPRTIPRENIKGFSDAEIRRFIKSYKKFGGPLERLDAIARDAELVDKSETDLRRLGELVHNGCIKALKDNSFGQERAGGRLGKVKGPTFRISGVQVNAKLVISHEEELAPLHKSIPSDPEDRKRYVIPCHTKAAHFDIDWGKEDDSNLLIGIYEYGYGSWEMIKMDPDLSLTQKILPDDPDKK

SEQ ID NO: 8175 - protein, 918 aa, Aegolius funereus
ELTDDLHKQYQIVERIIAHSNQKSAAGYPDYYCKWQGLPYSECSWEDGALIAKKFQTCIDEYFSRNQSKTTPFKDCKVLKQRPRFVALKKQPSYIGGHEGLELRDYQLNGLNWLAHSWCKGNSCILADEMGLGKTIQTISFLNYLFHEHQLYGPFLLVVPLSTLTSWQREIQTWAPQMNAVVYLGDITSRNMIRTHEWMHLQTKRLKFNILLTTYEILLKDKSFLGGLNWAFIGVDEAHRLKNDDSLLYKTLIDFKSNHRLLITGTPLQNSLKELWSLLHFIMPEKFSSWEDFEEEHGKGREYGYASLHKELEPFLLRRVKKDVEKSLPAKVEQILRMEMSALQKQYYKWILTRNYKALSKGSKGSTSGFLNIMMELKKCCNHCYLIKPPDGNEFYNKQEALQHLIRSSGKLILLDKLLIRLRERGNRVLIFSQMVRMLDILAEYLKYRQFPFQRLDGSIKGELRKQALDHFNAEGSEDFCFLLSTRAGGLGINLASADTVVIFDSDWNPQNDLQAQARAHRIGQKKQVNIYRLVTKGSVEEDILERAKKKMVLDHLVIQRMDTTGKTVLHTGSTPSSSTPFNKEELSAILKFGAEELFKEPEGEEQEPQEMDIDEILKRAETRENEPGPLTVGDELLSQFKVANFSNMDEDDIELEPERNSRNWEEIIPEVQRRRIEEEERQKELEEIYMLPRMRNCAKQISFNGSEGRRSRSRRYSGSDSDSISERKRPKKRGRPRTIPRENIKGFSDAEIRRFIKSYKKFGGPLERLDAVARDAELVDKSETDLRRLGELVHNGCIKALKDSSSGQERAGGRLGKVKGPTFRISGVQVNAKLVISHEEELAPLHKSIPSDPEERKRYVIPCHTKAAHFDIDWGKEDDSNLLIGIYEYGYGSWEMIKMDPDLSLTQKILPDDPDKK

SEQ ID NO: 8176 - protein, 1075 aa, Nostoc sp. PCC 7120
MAILHGSWILNEQESCLFIWGETWRSPQVDFNFAEISLNPLALSALELSEWLQSQHQAIAKLLPQQLEKRTSKAASSVKINLLTHSQIIALPTEISQPRKKETILISPVHSAALASESDSEVYLQTWRVEGFCLPPSAAIKLLTSLPLNITSGENAFLGGDLRFWSQIARWSLDLISRSKFLPIIQRQPNNSVSAKWQVLLDSAVDGTRLEKFAAKMPLVCRTYQEIGSGESPIYIDFPSQPQDLILGFLNSAIDTQLREMVGNQPVVETRLMASLPSAVRQWLQALIAASNSIDADAVGLERLEAALKAWTMPLQYQLASKNQFRTCFELRSPEPDETEWTLAYFLQAADDPEFLVDAATIWQNPVEQLIYQQRTIEEPQETFLRGLGLASRLYPVIAPTLDTESPQFCHLKPMQAYEFIKAVAWRFEDSGLGVILPPSLANREGWANRLGLKISAETPKKKPGRLGLQSLLNFQWHLAIGGQTISKAEFDRLVALKSPLVEINGEWVELRPQDIKTAEAFFTARKDQMALSLEDALRLSSGDTQVIEKLPVVSFEASGALQELIGALTNNQAVAPLPTPKNFQGQLRPYQERGAAWLAFLERWGLGACLADDMGLGKTIQFIAFLLHLKEQDVLEKPTLLVCPTSVLGNWEREVRKFAPTLKVLQYHGDKRPKGKAFQEAVKKHDLVITSYSLIHRDIKSLQGIPWQIIVLDEAQNVKNAEAKQSQAVRQLETTFRIALTGTPVENRLQELWSILDFLNPGYLGNKQFFQRRFAMPIEKYGDAASLNQLRALVQPFILRRLKTDRDIIQDLPDKQEMTVFCGLTGEQAALYQKAVETSLAEIESAEGLQRRGMILALLIKLKQICNHPAQYLKINTLEQHSSGKLQRLEEMLEEVLAESNTYGVAGAGRALIFTQFAEWGKLLKPHLEKQLGREIFFLYGGTSKKQREEMIDRFQHDPQGPPIMILSLKAGGVGLNLTRANHVFHFDRWWNPAVENQATDRVFRIGQTRNVQVHKFVCNGTLEEKIHDMIESKKQLAEQVVGAGEEWLTELDTDQLRNLLILDRSTVIDEEAD

SEQ ID NO: 8177 - protein, 1055 aa, Nostoc sp. PCC 7120
MKVLHGSWIPNQYSDFVQSGAFYLWVETPINNKKRTHTQVHPGHLSSLELLNFLTQTLGIKETEAQLKQRICSKYFALPTANNEPLPSPELVKYLEVEVPEEYENFQYWQVTCYETVTSVKAVIAINIIKLLKDIHFLALYNASEFQLGSDLLFWYHYTQSFRQIITKDQYIPSLKYRANAATTKKKPKQPPPGFEIYAGWEIISEQYEANIQKYIEYMPLICVAGNSTQTDKLEFFAPETLLRHFSEYLLNNLVSKTPLTAAFEKQIDDSLIHYCLYPQKHNPLKTHTALQEYQQWLGWKNRIIRTQAESPFHLCFQLHSPDAEQIDNWQMQFLVSSKKDPSLKLALADYWIMNSKTKAGVHKEFGKDFDTNLLLNLGYAARMYPKLWQGLETDSPTGMQLSLDEAFDFLKDSAWVLEDSGFKVIVPAWYTPAGRRRAKIRLKASSGRKVAATVGESKSYFGLDSLVQYQYELAIGEQTLTPQEWEQLINTKAPLVHFRGQWMELDRDKMQQLLEFWQSHGDEQPQMSLLEFMQRSAQGEDDWEIEYDAALSEIMAKLQDKSQLEPISEDLNLQGNLREYQKRGVAWLQYLEKLGLNGCLADDMGLGKSVQVIARLVQEKDSQSSPLPTLLIAPTSVVGNWQREIAKFAPHLKTMVHHGSDRLQDAAEFKSACQQHDVVISSFTLARLDEKLLNSVTWQRLVLDEAQNIKNPKAAQTKAILKLSAKHRLALTGTPVENRLLDLWSIFNFLNPGYLGKEAQFRKSFEIPIQKDNDKVKSTTLKKLVEPLILRRVKTDQSIIKDLPDKVEQKLYTNLTKEQASLYEVVVRDVEEKLQEAEGIQRKGLILSTLMKLKQICNHPRQFLQDNSEFLPERSHKLSRLVEMVDEAISEGESLLIFSQFTEVCEQIEKYLKHNLHCNTYYLHGGTSRQRREQMISDFQNPDTEASVFVLSLKAGGVGITLTKANHVFHFDRWWNPAVEDQATDRAFRIGQKKNVFVHKFVALGTLEERIDQMIEDKKKLSSAVVGSDESWLTELDNEAFKKLIALNKSTIME

SEQ ID NO: 8178 - protein, 869 aa, Nostoc sp. PCC 7120
MININYITPQDMRVCSCIETYGDGSYYGKVEYMFNEKAICALIGHPLVFWEDTPNVRVEIVKGEPELLVKKEKLGRLTLEFSPKLPPSQNILNIKETPTRIKVIEITSEHRRITEILGKDNKLNVPAIAEKQVLAAINAVSGIVTVHSDIGGGSEGAEEVPAQTLPHIHLLPANTGLKVTLLSRPFAQGGPYYRPGAGGETVIAEIDGKRLQTRRNLPEEKQLAKNAVAACPSLTRTEERDGEWLIEDPEECLELLLELQALGSSVVMAWPEGEKLRVSHQADLKDFNLSIQRQQDWFAATGELKLNQDLVLDMQQLLALLEKTPSRFIPLGDGQFLALTQAFRKRLDELRLFSEKHSKGIRFHPLATLGLEDFVDEVGKVKTDKHWKTHIQRLQEMKNLQPELPSTFGAELRDYQMDGFCWLARLAHWGVGACLADQMGLGKTVQALAVILRNAHEGPSLIIAPTSVCMNWVSEAQKFAPTLNIIQFTGANRQKLLDGLQPLDMLVCSYGLLQQEEVAQMLSGVQWQTIVLDEAQAIKNMTTKRSQAAMNLKANFKLLTTGTPIENHLGELWNLFRFINPGLLGSFESFNQRFAIPIEKYQDKQARNKLKKLIQPFLLRRTKNQVLEELPSRTEILLHVELSREEKAFYEALRRQAISKLSDSNAEAGNKHLQVLAEIMKLRRACCNPSLVMPDTELSSSKLQLFGEVLGELLENRHKALVFSQFVDHLHIIRNYLDKQGINYQYLDGSTSVSERKKRVDAFQAGNGDVFLISLKAGGTGLNLTAADYVIHTDPWWNPAVEDQASDRAHRIGQQRPVTIYRLVAKDTIEEKIVELHHHKRDLADSLLEGADMSGKISTEALLQLISEG

SEQ ID NO: 8179 - protein, 506 aa, Bombyx mori nuclear polyhedrosis virus
MDNYKLQLQKFFDQAPDNDDPNFEHQTPNLLAHQKKGIQWMINREKNGRPNGGVLADDMGLGKTLSVLMLIAKNNSVQLKTLIVCPLSLINHWVTENKKHNLNFNILKYYKSLNADTFEHYHIVVTTYDVLLAHFKLIKQNKHSSLFSTCWHRVVLDEAHIIKNCKTGVHNAACALTATNRWCITGTPIHNKHWDMYSMINFLQCRPFNDPRVWKMLNKNNDSTNRIKSIIKKIVLKRDKSEISFNIPKHTVEYVHVNFNEEEKTLYDKLKCESEEAYMKAVAARESENTLSRLQQMQHVLWLILKLRQICCHPYLAMHGRNLLETNDCFKMDYMSSKCKRVLDLVDDILNTSDDKIILVSQWVEYLKIFENFFKQKNIATLMYTGQLKVEDRILAETTFNNAADTQHRILLLSIKCGGVGLNLIGGNHIVMLEPHWNPQIELQAQDRISRMGQTKNTYVYKMLNVEDNSIEKYIKQRQDKKIAFVNTVFEETLINYEDIKKFFNL

SEQ ID NO: 8180 - protein, 606 aa, Chilo iridescent virus
MADAMNELCNLTQHLQVDDDQLSNLKLKNGYSLFPHQEKVMLWMKYRENLTKKECRKEGEKTWGVRGGIISLCMGLGKTLTALAYSFQNKASFPTLVITSKTVMHEWKTEGVEKFFDSDNIRVLYLHKSYIKNIDKISRDDIMTYDIVITTYDVCLFACKKGNYFLQCFEMGEEQSLMKNKIVAIHTRKRKDANLPNLKGTAVIYGTPWERVICDESQKFANPKTMTYKCIMAVYGKYKWCLTGTPIRNYETDIWAQLRFCGYKGVERSHDWNRNGQGLIAFKDHNLISAIFTMSYDDAQMSLPEKTENNLTVKLEGQHKEIYEGILTETREMYKKMMNDLCSFTYVLAMFTRLRQCAIAPYLITPDAKRNSKEKKNCSEWCLDKFGGAGIKSSKILKIVEIIKSVTLNDNPNCNSNPKSLQLLAKEKAYSCFGSDYIKSSNFEIMHPTKIIVFSMFTSCLDLLSEAIKEDYPNFKFVQVDGDTKNRSELFDQFKNDINTQGLFLTYKVGSEGLNLTEATHCICIEPWWTNAVHNQAKARLWRTGQTKQVYVHNVIIEGSIEEKIVEICKGKDDMAASYLEGKERIKSPVRAPKLDKFTLGKMLGI

SEQ ID NO: 8181 - protein, 458 aa, Paramecium bursaria Chlorella virus 1
MKFTGKLFSYQKEAMMWMLKRESSHRAPGGFLCLDPGMGKTILTMVTIAVHDLDHTLIVVPKNIMSQWVSEFAKFTDCTPLVVDARMNNKKEITHEMLKEHKVCITSISTFSSMIDTDDCALLSFKFDRLVIDEGHLIRNRRSKSFWAMNQIKSHIRWILTGTLINKNRNDFKSLLEFMDIFNVNLTQAAREFVYRRTKEDVGLSIPDLHIEEIRGDFETDAEKDLYAELVENGKILLRAYNAYGDGEGRMRLLEQLMRMRQCVTNPQILYANSEDEKWEGNRTKLNMLRKEIQNNPVEKTLIFCNWICEMDAIREMLHSIGHKSVTLNGKTPNSQRDVNIKSFNEDNDINFFIIQIESGGIGLNLQVATRVFINSLSWNATTEIQAIARAHRIGQTANVIVKRLIIDNTFDEHVLNLQQKKLEIASEIFDDKRIEKSLQQTRKQKNSTFKQLTNVFK

SEQ ID NO: 8182 - protein, 1209 aa, Rhodospirillum rubrum
MPGFLTADLIRARLAPKDFQRGEEYLKDGRVLKAEWVADDEISGQVAGSAGRRYVQTITLENGLGGLSIVGYCSCPVGFACKHVAAVLLTLAREAEPVVPAWDGSFGARPAQAAVSEPTLDPALAEWIAAVAGFEEVGDPEAYPPAIRHRLIYVVGPQGEGGVPQNGEGRSESRGGGRVSAEIEVTLWSIAVLKDGQMSSVERRILSADALVRSPARPAYLRPSDLALVPRLAALRAPGGGNALLLPQISGSELFAAMVASGRCRWGGPDGPTLYPGAARRAKLVWRSDGEGWQRPAIEPEAMAPEAADPETAQPDIGQPYIAQPAIPEIGALDGEAVEAPTRTDPDDASPAPEDGESGQSPEAEAWDLRALPIEPPAYVDPRSGETGPLDLGLDPRLAARLLSAPPIPPTSVDAVRSRLGALLPAAVPVLPAPIDAQPLSVAPQPILRLLALRAVPRMRGAEMPGETTQALVARPCFAYDSVILPADSSEPAPLRMVGASLMRIERDFAAEGTALRQLDRIGPLRVAEALGRVRVEGGISADRLIAPPFLPRGEERERAVDFLRDGVPDLEEAGWRIEIDPDFPVRPVVADSQDWWGGLNAVGGLEGTVGGWLSVGLGVTIDGERVDLLPALLTLLGEGEDLVEREEDELLYLPLGDGRVLPVAVRRLRPIFHALHAVAVPDERAGPGVRLSGRDLGPLALLEEAGKPLGVVWEGAEGARDIARRLAVVGLREAVAPPKGLVGSLRAYQNEGLDWLQFLRANNLGGILADDMGLGKTLQTLAHILVEKESGRLNDPVLIVAPTSVLGAWRREAAQFAPGLRLVVLHGPERAAGFSQMADQDVVVTSYALVRHDLEVLKAQPWHMLVLDEAQTIRNPQTVQYKAVAALKARHRLFLTGTPLENHLGDLWALMDLLMPGLLGDGATFRRVFRGPIEKRGDGPRRRALAVRVRPFILRRTKDEVATDLPAKTEMIDMVELEGGQRDLYEAVRLAAHKAIREVLAEKGLARGRIHILAALTRLRQVCCDPRLVKGGPRKPPPSAKLDRLEEMLRDLVDEGRRTLVFSAFPSMLALVEERLAAASIPWVSLTGETRDRDTPVTRFQSGAVPVFLISLKAGGTGLTLTAADTVIHYDPWWNPAVEAQATDRAHRIGQDKPVFVHKLVAAGTVEERILALQDRKRGLLDGLFDGEAGPSSLLSEEVIEEILRPLG

SEQ ID NO: 8183 - protein, 882 aa, Hordeum vulgare subsp. vulgare
MAATAYERRLLAAADLVLSADGKSQLPRLSSADLGVTADLKPHQLDGVHWLIRRYHLGVNVLLGDEMGLGKTLQAISLLSYLKIKSIAPGPFLVLCPLSVTDGWLSEFGKFCPTLKVIQYVGDKAHRRHIRRTMHDDVQKSSHSNELPFDVMLTSYDIALMDQDFLSQIPWLYVVIDEAQRLKNPSSVLYNVLEERFMMPRRLLLTGTPVQNNLSELWALMHFCMPSVFGPLDEFLSTFKEAGNLLSGSEANQANRQFKILKHILRAFMLRRTKALLIESGILELPPLTELTVMVPLAPLQKKIYLSVLRKELQTLLSFTGGSSRHQSLQNIVVQLRKACSHPYLFSGIEPEPYEEGEHLVQASGKLIVLDLVLEKLHRLGHRVVLFAQMTQTLDILQDFLELRNYTYERLDGSVRAEERFAAIRNFSSQPTKGVVRDDNNPSGAFIFMISTRAGGVGLNLIGADTVIFYEQDWNPQADKQALQRTHRIGQLNHVLSINLVSQRTIEEVIMRRAERKLKLSHNIFGDKDATDGKGKDFGNEANDMRSIILGLHQFDPADTAAETINEETLAKLKSMSENVIKMRTHEPSEKDDRAFEINPDLTDGSGAMITRACDSISIDPGVDEAAYLSWVERFKEASHSIEDVPVELERQRPAPEDKLLKREANKKKAEEKRLAKWKDLGYQTLGVKVPDNIPNQNISDSGSVQLVYGDCTDPSKVCAAKPAIIFSCVDNSGTWGHGGMFDALTSLSTYIPDAYHRASEVDDLHMGDLHLIELDEANCSRSLDAPLWVALAVVQSYNPKRKIPRSEISMSDLELCLSKAAFSAAQRSASIHMPRIGQRSGSQRSEWYTIERLLRKYASLHGIDIFVYYFRRPSRQQPDSD

SEQ ID NO: 8184 - protein, 1166 aa, Chlamydophila pneumoniae CWL029
MLNFRKLRRDFSANILQDGKKLFEQGAVIDAKILSMNGETVCISAQVRGLYDNIYECEIEVDRSESDTVDSNCDCSYNYDCQHIVALLFYLEQYFNEMVVAYARSADLETDHEINEEVKKELKETFVAAATKEEERKDREHQKEILREYVHAANALSANPFFLPLEYLEKDSAELAVLFVSVNEDTFAPANQPIEFQLVLRLPCRSKPFYISNIRTFLEGVLYQEPIVLNGRRFFFTMQSFNASDRKLIDLLIRYVRYPNHTTEEKLLKSAYLMPPALGVILAKMFEHQLADRGGGSLGEKESFSGLFCGNLEEPLCWSLTPAKMKFNLDFFDMPYKALLMTPVILVDDDEVQPEQTMLLESDAPGIIHHFVYHRFSPQIKRAHLRSFSRLRDIAIPEALFGSFRENALPVFQEYAEIANVHLLNSFVTLPYVDEVRAICDMSYLDGELEAKLHFLYGSLRVPAASLALQYQDVRAFISDEGILARNLVEERKMLEEVFSGFIYDERDGAFRVKSEKKIVEFMTETIPANQHRITFNCPENLSGQFIYDETIFELSFREGSDINYYEADLKVHGLLKGVPLDLLWDCISAKKRFLELPKAGQQSKGTRRGKVNSGKLPCILVLDLEKIAPVVQIFNEIGFKVLDDLVQKCPLWSLTGISLDQFEALPVNFSMSERLIEIQKQIRGEIEFDFQDVPQQIQATLRSYQTEGVHWLERLRKMHLNGILADDMGLGKTLQAIIAVTQSKLEKGSGCSLIVCPTSLVYNWKEEFRKFNPEFRTLVIDGVPSQRRKQLTALADRDVAITSYNLLQKDVELYKSFRFDYVVLDEAHHIKNRTTRNAKSVKMIQSDHRLILTGTPIENSLEELWSLFDFLMPGLLSSYDRFVGKYIRTGNYMGNKADNMVALKKKVSPFILRRMKEDVLKDLPPVSEILYHCHLTESQKELYQSYAASAKQELSRLVKQEGFERIHIHVLATLTRLKQICCHPAIFAKDAPEPGDSAKYDMLMDLLSSLVDSGHKTVVFSQYTKMLGIIKKDLESRGIPFVYLDGSTKNRLDLVNQFNEDPSLLVFLISLKAGGTGLNLVGADTVIHYDMWWNPAVENQATDRVHRIGQSRSVSSYKLVTLNTIEEKILTLQNRKKSLVKKVINSDDEVVSKLTWEEVLELLQI

SEQ ID NO: 8185 - protein, 1215 aa, Chlamydophila pneumoniae CWL029
MVLEALAIFRQDAMQHLLKHRKEIVVDFCEDSYTIRIPDEEAPEGYWLSTLKLQDIDRLTFASCSCPDGECCLHLMTAYFAVYDALGLHPLHDKFRHSFWYAVFSHFFLDSIPLQAQGEMVYTLESPHITLTIECLSEEVFQDWLRTIHASEEPTVFTNKTFLKSALYRTAKKFFFLNEEGAELTIGENSQGFPSHFSLQWQGLVFKAEILDFPTLEDIFPKLELAHTSLENVSHDISITNVTVCAEEAKVNFTLSPVIHKKDRENHPKTRIGSVEYVAKTHEMITGPKAIALPIYAIPLLADKFKDQLLSLLCYDSLEYRLRYDIRLLRDASFSFSAYLVTPGDLDNGSLIYPNYCYSPTKGLMQVVGMLSPKQAFIVKSEQVEDFLNERGHLIQEPGFQTFINERPEGHLTYNVTEQGVLLFHYDVGDPSSTEIRFGTWTYYTNQGFFLEKKNDLPIQDGLIVEPQDIPAFIVKNDAALRRLPNFFSSPPNLKDLLIEVHRQSRGKGLDLKPILVGLGESRCWLFGVFLYREDIGFSLIPTPLQGLCFLPRVIPPENVPQFLTQYAQHERILFPNPQTRPPESYELVIQSIHRPHPASPLHLQLELKTNLGSVPIGIALQGLKSKHTFLFTQAGFLDLKQNLFQFLKQFLSTQKCVIAENTVIANITDVFKLDALAPLSVTDDTIANPEDLQFFSQLKAACLPPIPQNLFSSDHQLRPYQNSGLLWMWFLYNHRLSGLLCDEMGLGKTHQATALLDIVFQSSQPSARPKFLIVCPTSVLPHWEHILSNHLPGVSIFSFHGPNKPSELPPADILLTSYGTLRQNYDKFYKIAFTIVVFDEIHMAKNKSSQIHKILCRIDAQMKLGLTGTPIENNLLEFKGLLDIILPNYLPSDALFKKLFTKRCSSEELEEIIPSQDLLLKLTRPFILRRTKKLVLPELPDKVESIIACSLSPDQEKLYMATLQREKSHIQKLETPEEPATNFLHIFALLNHLKQICDHPAVFFKDPDQYKNYESGKWNAFVKLLKESLNAGYKVVVFSQYIHMIRIITLYLEEIGIKYASIQGKSLNRKEEIETFTTDPNCQVFVGSLLAAGTGINLTAGNVVIMYDRWWNPAKENQALDRVHRIGQKNTVFIYKLITEDTLEERIHYLIEKKIRLLDKVIASQDSNILHMLNREDLLTILSYKDEHGTSDSEESPVDAPVEDDTGVLPPEDS

SEQ ID NO: 8186 - protein, 1025 aa, Ralstonia metallidurans
MVVSLCSPGKCRKGTIVSRASLRANEGRRIERSTIAPSDLPPFRSRVSQPELPVERADHDADSVADGGWQATLCALEALAGGVDEAAGTGDGRRLLWALTLDADGVVGTIEPLEQTHGARGWSKPRPVPLARVAEDDTLPQWDVRVARAIRRDASRNRRHVLDRAAAVVALVGHPAVVLSHAPTVPMEVVESAPSLEAVREGDRYVLRIVPPLREALAMEDFLPAAARQEAESLRQITVLQDGPRRLRVVRFTPAQQGAAKLIAGGLSVPADAQARLDSTLRALAGHFQIHADSSGEARERDPESRLRAEVAPVGRGISLRLVVTPLGVLGPRLAPGHGRAQLMATIGGETHVTYRDLDAEHAHVAEVFEALPFLVQQAPAGGEHTWTLDDPEDALTAIEVLPGLAGVIDLEWPRGRELRVLPADIAQLAVSVETGSEWFKLVGELRVAEGLVISLEKLVAWAHGHAGRFMPMAHGVYVALTRQLRDRLRDLAGVGDGVRDGIRVPLVAAPWLDDVLAGAGIDPDAHFRTRVKQLRAARGHDAPVPPTLVAELRPYQLEGFRWMMSLAEAGFGACLADDMGLGKTLQSLAVLLARAAGGPALVVAPTSVCGNWATEARRFAPALRVHVYADGDREAIVGQAAAHDLVIVSYNLLQQARKAFCDRHWHTVVADEAQSFKNPSSRRAQAMFALPADCRIALSGTPVENRLAELWAVMRFCVPGLLGSLARFNEHFANPIERSGARDPRQRLRRMIAPFVLRRTKAQVLDELPPRTELVIRVTPEPTEAAHYEALRRQALSEAERALLRPRKDKKAPAAMTEPEARIHVLAQLMRMRRAACDPRLVTPDVGQPGAKVRAFAELAATLAANGHKTLVFSQFVDFLQMLRQALVDAGLAWQYLDGATPAGERTRRVAAFQAGEGDVFLISLKAGGFGLNLTAADYIVIADPWWNPAAEDQAMGRAHRIGQQRPVTVYRLIAAGTIEERIVDLHQGKRALADGVLDAMDGEAIGRDVPLPDVDELVGLLRR

SEQ ID NO: 8187 - protein, 600 aa, Deinococcus radiodurans
MGWGCMARAGATNSFPRITCWEAPRSRLAVLQGLLDTDGHAGVVVEYVSVSEHLARGVVELVQSLGGVARIRQKATSHTYGGEKKTGLAWRATLKLPPELEPFRLAAKRAAYRRPTKYPPTRGIKSIEWVGHKPAQCIAVDAPDHLYVTEGYIVTHNTLQTLAHLLKEKEEGRADRPSLVIAPTSVIGNWQAEAARFTPDLKVLVLHGKDRHADFEKIPHADVVLTTYPLLPRDIDELRQHEYHLVILDEAQNIKNNKTAAAKAAGSLGARHRLALTGTPLENHLGELWSQFNFLAPGLLHDEKTFQKLYRTPIEKRGDTARQAALSARVRPFILRREKRDVARELPPKTEIPVRVTLEGDQRDLYETVRVTMQSRVREELAARGLARSTIAILDALLKLRQAVTDPRLVKLEAAREVQGNAKLDWLETNLPQMVEEGRRVLIFSGFATLLGHLEEFLKREGIPYSKITGQTKDRQKQIDAFQAGETHVFLITLKAGGVGLNLTAADTVIHYDPWWNPAAEDQATDRAYRIGQDKPVFVYKLIAAGSVEERILDLQARKAALARGVLDGGLTDATQLTVQDLDRLFAPLELEEEPEVVAS

SEQ ID NO: 8188 - protein, 918 aa, Nymphicus hollandicus
ELTDDLHKQYQIVERIIAHSNQKSEAGYPDYYCKWQGLPYSECSWEDGALIAKKFQACIDEYFSRNLSKTTPFKDCKILRQRPRFVALKKQPSYIGGHESLELRDYQLNGLNWLAHSWCKGNSCILADEMGLGKTIQTISFMNYLFHEHQLYGPFLLVVPLSTLTSWQREIQTWAPQMNAVVYLGDITSRNMIRTHEWMHPQTKRLKFNILLTTYEILLKDKSFLGGLNWVFIGVDEAHRLKNDDSLLYKTLIDFKSNHRLLITGTPLQNSLRELWSLLHFIMPEKFSSWEDFEEEHGKGREFGYASLHKELEPFLLRRVKKDVEKSLPAKVEQILRMEMSALQKQYYKWILTRNYKALSKGSKGSTSGFLNIMMELKKCCNHCYLIKPPDDNEFYNKQEALQHLIRSSGKLILLDKLLIRLRERGNRVLIFSQMVRMLDILAEYLKYRQFPFQRLDGSIKGELRKQALDHFNAEGSEDFCFLLSTRAGGLGINLASADTVVIFDSDWNPQNDLQAQARAHRIGQKKQVNIYRLVTKGSVEEDILERAKKKMVLDHLVIQRMDTTGKTVLHTGSTPSSSTPFNKEELSAILKFGAEELFKEPEGEEEEPQEMDIDEILKRAETRENEPGPITVGEELLSQFKVANFSNMDEDDIELEPEQNLRNWEEIIPEVQRRRIEEEERQKELEKIYMLPRMRNCAKQISFNGSERRHSRSRRYSGSDSDSISERKRPRKRGRPRTIPRENIKGFSDAEIRRFIKSYKKFGGPLERLDAIARDAELVDKSETDLRRLGELVHNGCIKALNDNSFVQERAAGRLGKVKGPTFRISGVQVNAKLVISHEEELAPLHKSIPSDPEERKRYVIPCHTKAAHFDIDWCKEDDSNLLIGIYEYGYGSWEMIKMDPDLSLTQKILPDDPDKK

SEQ ID NO: 8189 - protein, 918 aa, Nymphicus hollandicus
ELTDDLHKQYQIVERIIAHSNQKSAAGYPDHYCKWQGLPYSECSWEDGALIAKKFQARIDEYFSRNQSKTTPFKDCKVLKQRPRFVALKKQPLYIGGHESLELRDYQLNGLNWLAHSWCKGNSCILADEMGLGKTIQTISFLNYLFHEHQLYGPFLLVVPLSTLTSWQREIQTWASQMNAVVYLGDITSRNMIRTHEWMHPQTKRLKFNILLTTYEILLKDKSFLGGLNWAFIGVDEAHRLKNDDSLLYKTLIDFKSNHRLLITGTPLQNSLKELWSLLHFIMPEKFSSWEGFEEEHGKGREYGYASLHKELEPFLLRRVKKDVEKSLPAKVEQILRMEMSALQKQYYKWILTRNYKALSKGSKGSTSGFLNIMMELKKCCNHCYLIKPPDDNEFYNKQEALQHLIRSSGKLILLDKLLIRLRERGNRVLIFSQMVRMLDILAEYLKYRQFPFQRLDGSIKGELRKQALDHFNAEGSEDFCFLLSTRAGGLGINLASADTVVIFDSDWNPQNDLQAQARAHRIGQKKQVNIYRLVTKGSVEEDILERAKKKMVLDHLVIQRMDTTGKTVLHTGSTPSSSTPFNKEELSAILKFGAEELFKEPEGEEQEPQEMDIDEILKRAETRENEPGPLTVGDELLSQFKVANFSNMDEDDIELEPERNCRNWEEIIPEVQRRRIEEEERQKELEEIYMLPRMRNCAKQISFNGSEGRRSRSRRYSGSDSDSISERKRPKKRGRPRTIPRENIKGFSDAEIRRFIKSYKKFGGPLERLDAVARDAELVDKSEIDLRRLGELVHNGCIKALKDSSSGQERAGGRLGKVKGPTFRISGVQVNAKLVISHEEELAPLHKSIPSDPEERKRYVIPCHTKAAHFDIDWGKEDDSNLLIGIYEYGYGSWEMIKMDPDLSLTQKILPDDPDKK

SEQ ID NO: 8190 - protein, 1150 aa, Burkholderia fungorum
MSSVFFDRDRIAEWLGEHTVAKARSVGPVTHVQWHGSTLSGEVQGTQPLPYKTRVRFRTDGGSPWAQGECSCPVGRNCKHVAALLFAELDYHDEMDHVTHVRLDDEGETARGLAREPMANPGSPAGVRPELVSWLERFRARAEAADADAQKASAPRTQTLAYRLTWSRFHMRHEVVLYRARCNPDGAIVDVAEPWGNVEAALLKQPKFVSDEDLSILRGLWLGRSREDFGQFILRGTSGAEMLQKLIATGRLFVDFTPGSGHDGPIPLSRGADRAGRIEWEPLADERLRPVLRTEPRASMVLPTEPVWYVDGIANEAGIVQSSLPFQQLPDYLAMPPISLAEAPLVASVLREIAPELPLPPTHDASAIRVIDVDPVPVLTLNSHALPSAASKAGLRQAAAVELAGVSFDYDGVSINVDSSVTLVPMPGGDVIHIRRRYEAEKKRLLELRKTGLQKVPTSRVHASRLLPDTMLGLPDAEAWSAFVNDSVPELVSKGWRVTMAPEFRYNVIEIDAIEGTAHQAGDGWFDLEMGIRIGERNVRLEPLLADLFRRDRRWLSGALESIRDDEPIELKTEENKRLRLRADRLKPVVRVLVDLFDALGGSLAEGAPLRVASVDAGRLEALNGTGRWQFRGEDSIRQLAQRLQAGPGLREVPVPRGLKAELRTYQQQGLNWMQFLREQDLAGVLADDMGLGKTVQTLAHILAEKEAGRLDRPALIVVPTTLVHNWREEARRFAPELRVLVLNGPQRKERFEQIGQHELILTTYALLWRDQKVLAEHDYHLLILDEAQYVKNATTKAAQAIRGLRARHRLCLTGTPLENHLGELWSQFDFLLPGFLGSQKDFTKRWRNPIEKNGDGVRRALLARRIRPFMLRRRKDEVARELPAKTTILCSVDLEGAQRDLYETVRTAMQEKVRAAVSAQGLARSHIIVLDALLKLRQVCCDPRLVRMLKAAGDAHETHDRTDRVEKGARAMRSAKLDLLLSMLPELIEEGRRVLLFSQFTGMLSLIAEALEEAAIPYVILTGDTADRVTPVERFQQGEVPLFLISLKAGGVGLNLTAADTVIHYDPWWNPAAENQATDRAHRLGQDKPVFVYKLIAAGSIEEKIVELQEQKAGLADSILSEDAAGAAKFSDDDLDALFAPMPEIESGR

SEQ ID NO: 8191 - protein, 1064 aa, Enterococcus faecium
MKWSIPEKVIARGRQYLQEGRVLSVVPDQEENVWHAEVLGSELYMVDLDGTAKEIDYCQCPYWEEHKYCKHTVAVELYLRSKNLSRIMKKDQPMLEPVKATSEGEIIAKGFSRLKTQNNPQAVQPLIIEYQVETIETNQYHPELSILALYLRIGSLASPKKTYIVKNIYDFLQAYTEKETYTVNKQYQFRLDKRAFQKEDQKILTHLAGSAQTHQLLGTNGLQVKGKLDKRYLLLPVEQARFLLEQMNQTTRLHLQINEQNDQGIQFSDQNKPLSFKVEKFGEDYLLQALNDFDFFFMHYQWGVIQGTFYSLTKYQQTVYQTWKQLIRRLEKPEVVFKKKELPSLFKEIIPLLSEIGDVAIAPAVEEEVADIPVEFIFFFRKAKGKIQARVDFVYGEVIYSTDPKHEVSTEQAFQVLRDTVEEKRVLDLFRMYRYQKNETGYERPLPSGEELYAFFRTELSVFRQFGEVRLGRKLRELYLDAHKHQPKIEVTETGSWLDIRFDVTGIEEQEIDHVLQSLLRNDAFYTLENGQVLSFDSEEFQQTSQVLQQLRESIRTEEGTIHVPKNQGLIIQNQLEKSNATFSESFQTMVQDLIHPERYQAQLPKGLNATMRDYQKQGFRWLKMLGHYQFGGILADEMGLGKTLQTIAFLLSEKEERKSFSALIVAPASLIYNWQAEVRKFAPSLSIQVINGNKKEREELLAKDTDIRVTSYASLRQDLANYQSQKIDYLILDEAQMVKNSSTKTAQALRELAVPQRFALSGTPIENNLEELWSLFATIMPGFFPTKTKFRELAAEEIAQMIRPFILRRDKQTVLKDLPEKTEMNLYSALTEEQKTVYLAYLRQMREEITSMDSEAFKKNRIGILAGLTRLRQICCDPRLFIEDYQGGSGKLEQVKDLLVAAKENKRRVLLFSQFTGMLTILQEELAELGISTFYLRGSTKPQDRLSMVDAFNAGEKDVFLISLKAGGTGLNLTGADTVILYDLWWNPAIEEQAAGRAHRIGQKNVVEVWRMISEGTIEERMDSLQQEKRELFQKVIQGNEEQLTKLTEEDIRMILSVGEIEE

SEQ ID NO: 8192 - protein, 116 aa, Enterococcus faecium
MVDAFNAGEKDVFLISLKAGGTGLNLTGADTVILYDLWWNPAIEEQAAGRAHRIGQKNVVEVWRMISEGTIEERMDSLQQEKRELFQKVIQGNEEQLTKLTEEDIRMILSVGEIEE

SEQ ID NO: 8193 - protein, 1034 aa, Lactococcus lactis subsp. lactis
MSRMMPARVRSEGIALYAKGFLNDPIETDFKLTAEIDGEEVSYDLDGAQDSCTCAVFQQNHRYCKHIAAIEEYLKNQDKGSQETKDKEIKGAERALFGENVAFLDAVNGETQLNFNTDQYSIEVQIEDNSQLYDYFSMDYFLYFDLKLRSKNLGRSYVIKDIPYFLRALKNYSQYSLGSLHYIDLFFDNFDEASQEFLTFLLKIDSKSDEALTKSLYIKNGRYLNIPFLFLEEAMDLVSALENYQLQITGRTVNYFTFIALDNDSEIFKFKVESQQDYIELKLYSEDYHNFYDYSLLYANNVFYKLNQEQRRLLLVLDKQFAKKSQIKFSYADKDKLAQALQQLSTLGEIEAPDHFVVRPFDAKFTFDLLEDQTISLAMTFDYGSFSIDSFHDLETLEFSRDLRKEQKIFALMERLQFAKAFNSSLNIPENLSEHFFLKILPAFQKLGQIELSPTLRNMRMDEVPEIHIDSQGGLLDISFDIPQVEDGEFANVIAKLQENAEFYISESGKFYHFNEKFDRLKAALNELDDQFVIQGSSLHVNINRSFQISKIFENIGGASFSEKFKSLYQHLTHPEEFPYEKPEHIKASLRSYQETGVRWMSMLSHYNLGGILADDMGLGKTVQAITFILSNLKKDESVLITAPASLTYNWASEFEKFTDEIDFAVIDGTKAERSKEIQEKHQIYITSYGSFLKDFEDYQDKKLNYLLLDEAQVVKNYSSKTNKSLSALNVEHTFALSGTPLENRIEEIWAIFQVVMPGFLPKREKFNKMEPSVISRLIQPFIMRRKKEDVLEELPEKMEITVYNQLADDQKVIYLAQLELMQKQVLEMDSAALSRSRIEILAGITRLRQICNTPALFMDDYKGSSGKLERLRELLAQIKDSGHRPLIFSQFTKVFPHIEKLMEEQEMTAYKLTGSTPIKDRLSMVQAFNAGSRDAFLVSLKAGGVGLNLTSADVVILVDLWWNPAVEEQAIARAHRMGQKNTVEVIRLITKGTIEEKIMEIQERKKDLIANVLEGDTVDKVLSEAEIREILGV

SEQ ID NO: 8194 - protein, 1166 aa, Chlamydophila pneumoniae J138
MLNFRKLRRDFSANILQDGKKLFEQGAVIDAKILSMNGETVCISAQVRGLYDNIYECEIEVDRSESDTVDSNCDCSYNYDCQHIVALLFYLEQYFNEMVVAYARSADLETDHEINEEVKKELKETFVAAATKEEERKDREHQKEILREYVHAANALSANPFFLPLEYLEKDSAELAVLFVSVNEDTFAPANQPIEFQLVLRLPCRSKPFYISNIRTFLEGVLYQEPIVLNGRRFFFTMQSFNASDRKLIDLLIRYVRYPNHTTEEKLLKSAYLMPPALGVILAKMFEHQLADRGGGSLGEKESFSGLFCGNLEEPLCWSLTPAKMKFNLDFFDMPYKALLMTPVILVDDDEVQPEQTMLLESDAPGIIHHFVYHRFSPQIKRAHLRSFSRLRDIAIPEALFGSFRENALPVFQEYAEIANVHLLNSFVTLPYVDEVRAICDMSYLDGELEAKLHFLYGSLRVPAASLALQYQDVRAFISDEGILARNLVEERKMLEEVFSGFIYDERDGAFRVKSEKKIVEFMTETIPANQHRITFNCPENLSGQFIYDETIFELSFREGSDINYYEADLKVHGLLKGVPLDLLWDCISAKKRFLELPKAGQQSKGTRRGKVNSGKLPCILVLDLEKIAPVVQIFNEIGFKVLDDLVQKCPLWSLTGISLDQFEALPVNFSMSERLIEIQKQIRGEIEFDFQDVPQQIQATLRSYQTEGVHWLERLRKMHLNGILADDMGLGKTLQAIIAVTQSKLEKGSGCSLIVCPTSLVYNWKEEFRKFNPEFRTLVIDGVPSQRRKQLTALADRDVAITSYNLLQKDVELYKSFRLDYVVLDEAHHIKNRTTRNAKSVKMIQSDHRLILTGTPIENSLEELWSLFDFLMPGLLSSYDRFVGKYIRTGNYMGNKADNMVALKKKVSPFILRRMKEDVLKDLPPVSEILYHCHLTESQKELYQSYAASAKQELSRLVKQEGFERIHIHVLATLTRLKQICCHPAIFAKDAPEPGDSAKYDMLMDLLSSLVDSGHKTVVFSQYTKMLGIIKKDLESRGIPFVYLDGSTKNRLDLVNQFNEDPSLLVFLISLKAGGTGLNLVGADTVIHYDMWWNPAVENQATDRVHRIGQSRSVSSYKLVTLNTIEEKILTLQNRKKSLVKKVINSDDEVVSKLTWEEVLELLQI

SEQ ID NO: 8195 - protein, 1215 aa, Chlamydophila pneumoniae J138
MVLEALAIFRQDAMQHLLKHRKEIVVDFCEDSYTIRIPDEEAPEGYWLSTLKLQDIDRLTFASCSCPDGECCLHLMTAYFAVYDALGLHPLHDKFRHSFWYAVFSHFFLDSIPLQAQGEMVYTLESPHITLTIECLSEEVFQDWLRTIHASEEPTVFTNKTFLKSALYRTAKKFFFLNEEGAELTIGENSQGFPSHFSLQWQGLVFKAEILDFPTLEDIFPKLELAHTSLENVSHDISITNVTVCAEEAKVNFTLSPVIHKKDRENHPKTRIGSVEYVAKTHEMITGPKAIALPIYAIPLLADKFKDQLLSLLCYDSLEYRLRYDIRLLRDASFSFSAYLVTPGDLDNGSLIYPNYCYSPTKGLMQVVGMLSPKQAFIVKSEQVEDFLNERGHLIQEPGFQTFINERPEGHLTYNVTEQGVLLFHYDVGDPSSTEIRFGTWTYYTNQGFFLEKKNDLPIQDGLIVEPQDIPAFIVKNDAALRRLPNFFSSPPNLKDLLIEVHRQSRGKGLDLKPILVGLGESRCWLFGVFLYREDIGFSLIPTPLQGLCFLPRVIPPENVPQFLTQYAQHERILFPNPQTRPPESYELVIQSIHRPHPASPLHLQLELKTNLGSVPIGIALQGLKSKHTFLFTQAGFLDLKQNLFQFLKQFLSTQKCVIAENTVIANITDVFKLDALAPLSVTDDTIANPEDLQFFSQLKAACLPPIPQNLFSSDHQLRPYQNSGLLWMWFLYNHRLSGLLCDEMGLGKTHQATALLDIVFQSSQPSARPKFLIVCPTSVLPHWEHILSNHLPGVSIFSFHGPNKPSELPPADILLTSYGTLRQNYDKFYKIAFTIVVFDEIHMAKNKSSQIHKILCRIDAQMKLGLTGTPIENNLLEFKGLLDIILPNYLPSDALFKKLFTKRCSSEELEEIIPSQDLLLKLTRPFILRRTKKLVLPELPDKVESIIACSLSPDQEKLYMATLQREKSHIQKLETPEEPATNFLHIFALLNHLKQICDHPAVFFKDPDQYKNYESGKWNAFVKLLKESLNAGYKVVVFSQYIHMIRIITLYLEEIGIKYASIQGKSLNRKEEIETFTTDPNCQVFVGSLLAAGTGINLTAGNVVIMYDRWWNPAKEIQALDRVHRIGQKNTVFIYKLITEDTLEERIHYLIEKKIRLLDKVIASQDSNILHMLNREDLLTILSYKDEHGTSDSEESPVDAPVEDDTGVLPPEDS

SEQ ID NO: 8196 - protein, 1064 aa, Bacillus cereus
MSFTLNKSIIKEVCGETSYKRGEAYYKSNKVIVNYYDETKEICEATVKGNEDFRVTVEKAKKGDVVARCSCPSLASFQTYCQHVAAVLIQINYNQQTGGMGSVSSRNDQLTNGMFQLFADKPLRPKSKQHRFDTREILDVAFICSPVAKKSGGALLGIQLKLAKTYFINHIREFLSKVEKREAFHCSNEFTYTPDVHSFKQETDAIIQQFIKIYHNEKMYEDALEVHAKQDESMIFIPPASWNDMLSALSRAEYVQLKQNEQLFQGLHISKGLLPLHFEFTKGNNGGFTLHIDGLNRVRVMEMYNNALYDGKLYHLPMEDCMRLIELQKMMSRSNSNQFYIPENKMEHFVAKVVPGLMKLGTVRIDEVISDRVETPSLKAKLYLDRVKNRLLAGLEFHYGNVVINPLEEDGQPSVFNRDEKKEKEILDIMSESAFAKTEGGYFMHNEEAEYNFLYHIVPTLKGLVDIYATTAIKLRIHKGDTAPLIRVRRKERIDWLSFRFDIKGIPEAEIKGVLAALEEKRKYYRLANGSLLSLESKEFNEINQFVKESGIRKEFLHGEEVNVPLIRSVKWMNGLHEGNVLSLDESVQDLVESIQNPKKLKFTVPPTLHAVMREYQVYGFEWMKTLAYYRFGGILADDMGLGKTLQSIAYIDSVLPEIREKKLPILVVSPSSLVYNWFSELKKFAPHIRAVIADGNQTERRKILKDVAEFDVVITSYPLLRRDVRSYARPFHTLFLDEAQAFKNPTTQTARAVKTIQAEYRFGLTGTPVENSLEELWSIFHVVFPELLPGRKEFGDLRREDIANAVKPFVLRRLKEDVLQELPDKIEHLQSSELLPDQKRLYAAYLAKLREETLKHLDKDTLRKNKIRILAGLTRLRQICNHPALFVDDYKGSSAKLEQLLDILEECRSTGKRILIFSQFTKMLSIIGRELNRQAIPYFYLDGNTPSQERVELCNRFNEGEGDLFLISLKAGGTGLNLTGADTVILYDLWWNPAVEQQAADRAYRMGQKNTVQVIKLVAHGTIEEKMHELQESKKHLIAEVIEPGEEKLSSITEEEIRDILMI

SEQ ID NO: 8197 - protein, 634 aa, Bacillus cereus
LKLAKTYFINHIREFLSKVEKREAFHCSNEFTYTPDVHSFKQETDAIIQQFIKIYHNEKMYEDALEVHAKQDESMIFIPPASWNDMLSALSRAEYVQLKQNEQLFQGLHISKGLLPLHFEFTKGNNGGFTLHIDGLNRVRVMEMYNNALYDGKLYHLPMEDCMRLIELQKMMSRSNSNQFYIPENKMEHFVAKVVPGLMKLGTVRIDEVISDRVETPSLKAKLYLDRVKNRLLAGLEFHYGNVVINPLEEDGQPSVFNRDEKKEKEILDIMSESAFAKTEGGYFMHNEEAEYNFLYHIVPTLKGLVDIYATTAIKLRIHKGDTAPLIRVRRKERIDWLSFRFDIKGIPEAEIKGVLAALEEKRKYYRLANGSLLSLESKEFNEINQFVKESGIRKEFLHGEEVNVPLIRSVKWMNGLHEGNVLSLDESVQDLVESIQNPKKLKFTVPPTLHAVMREYQVYGFEWMKTLAYYRFGGILADDMGLGKTLQSIAYIDSVLPEIREKKLPILVVSPSSLVYNWFSELKKFAPHIRAVIADGNQTERRKILKDVAEFDVVITSYPLLRRDVRSYARPFHTLFLDEAQAFKNPTTQTARAVKTIQAEYRFGLTGTPVENSLEELWSIFHVVFPELLPGRK

SEQ ID NO: 8198 - protein, 538 aa, Bacillus cereus
IQLKLAKVYFINHIREFLSKVEKRESFHCSNEFTYTPDVHSFKQETDAIIQQLIKMYHNEKMYEDTLEVHAKQDESMIFIPPASWKDMLFSLSKAEYVQLKQNEQLFQGLQVSKGLLPLHFEFTKGNNGGFTLHIEGLNRVQVMDMYNNALYDGKLYHLHIEDCMRLIELQKMMSRSNSNQFYIPESKMEHFVAKVVPGLMKLGTVHIDEVISDRVETPSLKAKLYLDRVKNRLLAGLEFHYGNVMINPLEEDGQPSVFNRDEKKEKEILDIMSESAFAKTEGGYFMHNEEAEYNFLYHVVPTLKGLVDIYATTAIKLRISKGDAVPLIRVRRKERIDWLSFRFDIKGIPEAEIKGVLAALEEKRKYYRLANGSFLSLESKEFNEINQFIKESGIRKEFLHGEEVNVPLIRSVKWMNGLHEGNVLSLDDSVQELVENIQNPKKLKFAVPNTLNAEMRKYQVYGFEWMKTLAHYRFGGILADDMGLGKTLQSIAFIDSVLTEVREKKLPILVVSPSSLVYNWFSELKKFAPHIRAVIAD

SEQ ID NO: 8199 - protein, 867 aa, Bacillus subtilis
VSFIGTTAVLLSPWMTVELLGKNSFNSFSSVQLTEETEPLIEAASTIYEFIADGDFMPDYDAWTNGVFRWKDRDNILEGFTAEWFSAAVQDYIQYDDDLREKWEHIKEKSPAVTTFRGHFLDEEDFLEGIGWIDDQSPFTVGLRLNEPDFDGDEWKIEMFLRDKKSGAVEFFDGLKSLKKSWQAYSDKIAREQDRFHRTVPWLSFDSGTTLISEEEAWIFLSEASETLVDMGVEILLPSWWQIVRDSNMMLKAKVSSSPRGESFVGMNALLDFNWRFATNGIELTEAEFNELVASNRRLVNIRGQWVKIDPQFIKQMKRLMEKAESEGLHMSDILARELMDQQDGGLEDSDLIDTSAFAGIQFDLSKQLRSLIRKLTAAENLPEHKVSPSFKGTLRPYQKYGMNWLLFLRESGFGACLADDMGLGKTIQMIAYFLHVKESGRQKTPHLIIAPTSVLGNWQRELQTFAPDLSVALHYGPRRPKGDDFAAHYENADVVLTSYGLSHADTEELSSVTWNTICLDEAQNIKNAHTKQSRAIRKLKGLHHIALSGTPMENRLTELWSIFDFMNKGYLGSLTGFHKRYVLPIEKDRDEKRIGQLQQLIRPFLLRRTKRDEEVALNLPEKLEEKEFIPLSAEQASLYEQLVKDTFDHMTSLTGMQRKALILSMLGRLKQICDHPALYLKEEQTELLAGRSVKLEKLLELMTAIRAQNESCLIFTQYIQMGNMMKRLLEKTFGEPVQFLNGSLSKQERDTLVEKFQRKEYPTLILSLKAGGTGLNLTAANHVIHYDRWWNPAVENQATDRAYRIGQERFVHVHKMITTGTIEEKIDVMLESKQTLNDQIIQSENWITELSTQELEELFTLSATAQ

SEQ ID NO: 8200 - protein, 803 aa, Magnaporthe grisea
MTVGTATPSANKENAPRSRFPTPQSLEKLHKPFKCPGSATRRPEADRPARKRRKVDYKGADGADDTGESYTSIERLALANRDVNKYPVFKPKDKDTIFRKSFVVPLVNKNVASYNPNRPPPTLGLRQGAVFVAKALHDPSGEFAIVLYDPTVDDRPKEPEKPVEEPDKPSPSQEKLDAPLVHKSLAEILGIKKKVEGEHPRVPVVIDPRLAKVLRPHQIEGVKFMYRCVTGMIDEKANGCIMADEMGLGKTLQCITLLWTLLKQSPEAGKPAIQKAIVACPSSLVRNWANELVKWLGADAITPFAIDGKASKEELTRQLRQWAISSGRAVTRPVIIVSYETLRLNVEELKHTKIGLMLCDEGHRLKNGDSQTFTALNNLNVSRRVILSGTPIQNDLSEYFSLISFANPDLLGTRLEFRKRFELPILRGRDADASEKERVKGDECLKELLALVNKFIIRRTNDILSKYLPVKYEHVVFCNLAPFQLDLYNYFITSPDIQALLRGKGSQPLKAIGILKKLCNHPDLLNLSDDLPGSEAHWPSDYVPKESRGRDREIKPWYSGKMQVLDRMLARIRADTNDKIVLISNYTSTLDLFERLCRNRGYGSLRLDGTMNVTKRQKLVDKFNDPEGSEFVFLLSSKAGGCGLNLIGANRLVLFDPDWNPAADQQALARVWRDGQKKDCFVYRFIATGSIEEKIFQRQSHKQSLSSCVVDSAEDVERHFSLDSLKELFQYRGNTRSDTHDTFKCKRCKPDGKQYIKAPAMLYGDTSTWNHFNNEGLKPIQDLLLRQECGETEVSAVFQYISH

SEQ ID NO: 8201 - protein, 949 aa, Clostridium acetobutylicum
MKEEGKSALKMGLVTYFKGKKIDDTYHIYSRVKDKIKPLEFNTHIKINLVTKRLEVECSCDEFKEFKSKGYTLKCSHIVATSYKFLSLVSKGKKAPEKKIIKRHEEPGGESAFKLIRKKEKNFVYYELQSGFRGENRIIEPNDLREFLKQVESKKIKFKFDYIEFVVPIFNKDLPLTFNLKEKNNSIVVTTHKKLPISLSPNNDVFYFKDELYLPSERQIEKYIDIHHKLENNKQIAYRKDIDNYIKLVSHLSSISQDINIDEELKKFAATMLKYEFFVYEEKDKIYCDVLLKYGNIKINILNKKNSVLRDYKEEEKLIMKIERNSFVKHGNRFMFTGKDKELLNILKRSQDSICSLGKVTMGKELEDLKVYKFESIKGDFYKRDGYYDFSYSIGNMTEKELEHAFKAYKNKKKFYKTKENNFLDFEDSSIRGFFNTLEALRMSDNEEYGHIKLEEGKALFLYKTIKDGEFKAVNGYADIKAIEDKLSSINNREIAIPKGFKGKLREYQIKGFKWFKTLSELGFGGILADEMGLGKTIQTIAFLLSEKSKKALIVCPTSLIYNWKEEILRFAPELRVLIVHGPKRTYDMDEYDIILTSYGTLRMDIHKYKNVIFDYCIIDEAQNIKNPSAKNTIVIKRIKAYTRFALTGTPIENNLTELWSIFDFLMPGYLYSREKFEEKFVFGEEDNLESLKLLIAPFILRRTKKEVVAELPDKIEKKFIVEMTSAQRIVYAEYIKSVKAMMKNHKDGRVQIFSYLTRLRQICLDPSLILEDYNGGSGKLKTALEIIRGHEGKVLLFSQFTSALYKIEECLRKEKIKFFHLDGSTKPQDRINMVNDFNSNNAIKVFLISLKAGGTGLNLTSANLVIHFDPWWNPAVENQATDRAHRIGQKNVVEVIKLVAKGTIEEKIILLQEDKKELIDNVITGELQNSKLLGSLSKEELIELFDRE

SEQ ID NO: 8202 - protein, 1052 aa, Clostridium acetobutylicum
MFNITKDNIRKLMKPKTYKEALDLYNGNKVFNIVVNENHNDFYDANFVKINAEVMDGSGNDYTCMILFNNKTGINIIKCNCSNVKNNDICSHVGAVLIKYIDGKNNVKSDYSKRLLYGLKQSIIKREIKGKPINIEVKLHYFTETTKKSYINIRVGEDRLYVVKDVSTFLKSILENKQIKIGEKFTYYPYKYSIKKRDEELFELLFAIYHDNEDVVKDKEKSILGKNIYLTESGLSRLMIILEDRDFSILINDEGITDCYIVVDEFPKINLTIEEKEESVKLTLSGGEPISLVRGNKYVFYQGKVYKLDQYKINIYSLLIKVFSNSKVVKYYKEDRQDVLSYVYPVLKELGIAACKNVINYDYLKPKVYMDKIDENMLINIKFENNDKKLKDVNGEVYIIKILQDFGFYKDGEIIYINDSLDKMVEFMSVGLDKIQSKGYEIYYSENIKKFKVYSPHMYKGSLKVNEGNMIEVSFEIDGIDNSELYNIFEALRLKKKYYKLKEGEIVDLSNKVIKKIADMFKYMDLDYSKINQKPAILSKENAAYINRYIDEENLMFFDKDTRFERMVKLSKGLENMKVGIPNEFNSIMRDYQKRGFRWFKSLDHFGVGGILADEMGLGKTLQTIAFISSGTGHKETSIIIVPTSIVYNWKEEIEKFSKNLKTLIISGTKRERAEAIGEYYNYDVLITSYSLIRMDIEEYSKIKFKYCILDEAQYIKNKNSLITKAVKKIRAKNCFALTGTPIENCLSELWSIFDFIMPGYLLSYSKFVNKYENPIIKEKDKRALYELNRHIEPFILRRLKESVVKELPSKVEHKILIEMSQKQKEVYYAYLKNAREKIYRSIEEKGINNSKFIIFSLLTRLRQICSNPRTVVENYNGKNAKMDVLMDTIKTSIANRHRILVFSQFTSVLKSIKDKLIEKDIDVMYLDGNTKMKDRFQLADEFNKGKGEVFLISLKAGGTGLNLTGADIVVHFDPWWNPAVENQASDRAHRIGQKKNVEIIKLITRGTIEEKIYKLQQEKKKMVDNVLGDKMFSEENVLLNLDEQKIKNIFG

SEQ ID NO: 8203 - protein, 1077 aa, Clostridium acetobutylicum
MDKNELLQIFNESVAGKNQSKGQRVFENDLVSSVDIKDDEDSICIKGNVISESLFSQYSTEIQMDPTDKSIVGTYCSCADYEKNAAKKNYCCKHLIATFYSSLEELSKNTRLKKAEKRKLNKLLGIKDTLDILLGGDSSKEELKIEVYINKDRWDNRIYFELKIGLKTMTSNNLYVLKDINSFLLGIYQNIPIPYGKKLILNMKEQKLSVKDKKLVDFIQMIINIDKPFSYNRKIKKSFIDGKYVYVPDYLVREFFQVIKNHRVYLNEGFDLSTDVEIIEEKPPIEISLRDVEDDYVLSVPSGMPISLSSKNNVFLYGLGIYIPDYEYCEKIGPYFEVFNKAEEVRLSGEKEETILRKLVPDLKRLSNSISLSSNITDKIVVAKCEFKFYFDNEDGNTILTVKVKYGAFEFNIFEDFNEKVIYRDSKREIEVLETVRALRFERIKNKFLLGFGDDYAFTFFKTEIVRLQKIGEVFYSENFKGIKHISSKGISGHIKTGKYNYFEMKFKIDDIPPGETVMILRAFRDNLKYYKLKNGEFIDLEELQLKNFLKLLDSISPKKLDENNIKIPKSKSIYVDEYLEEKGIRYIKGQEELKKIREKFKEEKSLEFELPRTLKGHPREYQKKGYNWLKTLDYFGFGGILGDEMGLGKTFQVISFLLSSPGKKSLIVVPTSLVYNWIQEFERFAPSIKVAASVGTKKEREVIIENLNEFQVIITTYNLLKRDLSSYMALEFDYCILDEAQNIKNPHSQNAISVKKINAVNRFALSGTPMENSVMELWSIFDFIMPEYLYDEDRFSVRYYKKLKEEPAVIEDLNRLIKPFILRRKKKEVVKELPNKIEKIVAVDMESKQKKVYSTYAKYAVSLIEKRVEYDEFNKSKIEILSYITRLRQICLDPSVVMEDYTGGSAKINALIELLNHSIDEGHKILVFSQFTSVLKNIAERFREEKIKYSYLDGSINSKNRMNMVQDFNEGNNSVFLISLKAGGTGLNLTSADVVIHFDPWWNPAVEEQATDRAHRIGQKNIVEVIKLVAKGTIEEKIIRLQEEKKRLVDSLLSEDLSTSEVFSGLDENEIIELFK

SEQ ID NO: 8204 - protein, 670 aa, Bacteriophage RM 378
MSYIISRLTAKDRAVMGYVTYNNRFEWKGTYEERLIPKNAGWKWDPDKRVWYTTILDYASKLKGYFDEKAAQQYNLLLEEKNHKLELSSVTSSDFAVPAPTGYDYFPFQKAGVHFVTEVFKEYPGALIADEMGTGKTIQSAGVINVMNPDRVLVVCPASLKYNWERELKRWVVHEKEIIVVNGNEVDFSLKNTIYIINYDILHRISEEDYAYDLVIVDECHYIKNPKTKRSGFVKSIVKSSIEQGGKVLFLTGTPIVNRPIELYPILEMAAPKVFGNFWGYAKRYCNAYYNGYGWDFRGASNLEELQGKLRSTIMIRRLKKDVLKELPPKSRKIVPVKLNKMFAEEEIFKLAEDLQNLKNYISVLREFERVGVESADLAEAMAEFDEKMKVMFERVAEMRRFYAIHKAPFAADYIVSLVKEEEVDGLVVFAHHHDVFEIIQKVLEAKGITYARITGEENVVQRQKAVEDFQSGKVDVVLCSILAAGVGITLTRAKTAVFVELDWVPGNILQAEDRLHRIGQEAECVDIHYIVARHTLDENFADYLTRKIEIIEKALNHERMKTQLEKPVSLLDVITTSEQKQQREEEEESKTISEEERGYALELQQKLAIVAALDKDRAAQRNNVGFNRFDTRIGHFLVETPVEKWSNKMLRVAEKLVTNSRKQIYEGGV

SEQ ID NO: 8205 - protein, 914 aa, Lactobacillus gasseri
MDKFEAKKLLQKLDTIQNFLSEKDLPRLERKLDAEADNLKRNMFDDWLRSIPKSVKEIFYGKLTYDQLYSKFFPSVLHSSFSKNEIVLVFSILKSRNKMEQYQLKYSEKLSNLKVCLQFIKENDRSKFLSIFQNHDIKQKLLKAKEFAEENKNVLSNIQYKRENEWDEIAESFEDLDISLKNKRFEYLNPFVNLDTEKSKEDIIFKIIRDFLKNKILFLSEQSRNGVEESIRGIWKNLKEEELSNQLNSLPIEMLKKQIDNEQIGDVLDNFDNVGQVISLSLAEVSERYGLNMQQSAEILKQSKEILNDLKSNVYPKLTLDKLKGQRLQLLHLLNAYKNYPDEQAIEEKVVIENYRKLEEKLGNLEDIAPNRYLTNFIDSITFKYWCESEAEIYRILDGCIQVNSTFRDCLNDNLNDQEIKALFEKDSATFYALIEEITGNKKSYNPSDLPDYIVHEVQKTKLNLKGFKAHLRSYQAFGSKYIFYFQRTLLGDEMGLGKTIQALAVATHLSNQGQTHCLVISPLSVLENWKREIEKWTNIKCFVFRGDKAIKEQNLSKWEESGGILLTNYSHCRILKESRKNIDIDFAIVDEAHLIKNPATKRSKNVNALIKNCKYKLLMTGTALENRLDEMINLIDFLNESLAEKVANNLNNKTYKTDIAQVYLRRKRKEVLHELPALGLTTMWSTFNEKEQDFYDQAVSEGIAGLMKMRRAAFIDEDSQKIEQIINICVDSHENSEKVIVFSFFKNYVLKLLKKKLPFLADDIISGDLSSNQRQEVIDKFSENPNQNVLLVQIDAGGFGLNIQAANRVILCEPQWKPSTENQAISRAYRMGQNRNVMVYRLLTKESVDETMMEIIHEKEDIFNTYANDSVVADAFMNNDSDKEENEAVMKKKVFQIERDRLEKKQEVVNVSE

SEQ ID NO: 8206 - protein, 666 aa, Pseudomonas putida KT2440
MYQLPDDEAWLRFAREGLPRLREAGWDIDIHRDFAFNLQEVDDWYATIDEAPGHEWFDLELGIVVDGQRHSLLPIVLHLLRSSPELLRPSELARRSDDEPLLIDLNRGRLDAPALRVALPYGRIKAVMGTLGELYLHEDTAGPSLRMERADAARLNEIEGLPLHWEGGEHVRDLGRRLRDARDLQVEPPTGLQASLRPYQQQGLNWLQALREMGTGGILGDDMGLGKTLQALAHLLLEKQSGRLSAPALAVMPTSLIPNWLDEAQRFAPDLRVLALHGPGRSKHFTKLHEYDLVLTTYALMPRDLEQLRPQAWHVLILDEAQNIKSSSSKAALAVCELQAGQRLCLTGTPMENNLGELWSIFHFLMPGWLGDLKRFNQDYRNPIERHGDSERMAHLASRIRPFLLRRTKEQVATELPAKTEMVHWVELSDAQRDTYEAVRVAMDQKVRDEIARNGAARSQIVILDALLKLRQVCCDLRLVKGVESKGNQADKGKLGALLEMLEELLSEGRRVLLFSQFTSMLALIEQELEKRKIRYSLLTGDTRDRRTPVQQFQQGESEVFLISLKAGGVGLNLTAADTVIHFDPWWNPASENQATDRAYRIGQDKPVFVFKLITRGTVEEKIQLLQQEKAALAASLLDGGQAGQWRLGDEEIEALFAPLPGKRGR

SEQ ID NO: 8207 - protein, 1032 aa, Streptococcus pyogenes M1 GAS
MMARLIPGRVRNEGIKLYEQGLVSFQDDNKGILQIEVETYQVQYGADDEDITCQCDTFHMKHYCKHIAAVEYFLKNDQKGKLFLKQLTNQTKIKETTKKMTSFGSLFLDSLAMNEDDSVKYRLSALGSRSPFSSDYWWSLKINRLPDDRSYVIRDIKGFLQLIKKEGFYQIGKNYFEQLSWLQFDPSSQALIEFLWRLASDTDKGDNENIFPNHARHLRLPSGFFEEGIHYLTSLYDFTFEGPSQTYHHLFVRSLEAEAGLYEFKVEVHRKSIELQIAEKNVQYLFDNDYLLYQDTFYHLTLKQRKMVQAIRSLPIEADLAKHIHFDLDDHAKLAASLSDFKQIGLVEAPKSFAIRDFEVTFQFDLLNRDEISCQLMFDYGNYQVSDKASLEALPFASHLKKEEKINRSLLAFGFSPQFYSKKRLTSAKELYTFFEETVPCFERLGNVALSTAIQALQVKEMPKIAIRRNQGLLDISFDFSTIIENDIDQAVTALFQNNPYFVSQTGQLVVFDDETQKVSKSLQELRARQLKNGHLQLDGIRALQVSKLFEGMTSVHFSKELEELAYHLQHPETFSIKPLPVKAQMRDYQRNGVQWLSMLNHYGFGGILADDMGLGKTLQTLAFLASHLKSDSKVLILSPSSLIYNWFDECQKFTPQLDVVVSYGLKQIRDQIIEEGHQITITSYSSFRQDFETYQAFHYDYLILDEAQVIKNAQTKISHCLRAFNTANCFALSGTPIENKMLEIWSIFQIVLPGLLPTKKEFLKLTAEQVSRYIKPFVMRRKKEDVLPELPDLIEINYSNEMTDEQKAIYLAQLRQMQDQIRNSSDVDISRQKIEILSGITRLRQICDTPSLFMDYQGKSGKLDSLRILLTQIKENGHRALIFSQFRGMLDLAKQEMTALGLTSYQMTGSTPANERQEMTRAFNNGSKDAFLISLKAGGVGINLTGADTVILIDLWWNPAVEMQAISRAYRIGQKENVEVYRLITRGTIEEKILELQESKRNLVTTVLDGNESRASMSIEEIKEILGLNTH

SEQ ID NO: 8208 - protein, 472 aa, Xylella fastidiosa 9a5c
MNLRPYQHTMVDFILTHPRCNLFVPMGLGKTVATLTALDVLLVVEDVAPMLVIAPLRVAATTWPDEVAKFPHLRHLRVAVVVGSAAARRRALEQDADIYCINYDNLKWLAEFYQDRWPFRTVVADECSKLKGFRLRQGTRRARALAKYVHTKVERYIGLTGTPAPNGLQDLWALMWMVDRGARLGTHFKAFIDRWFRAVQIGSDPHAVRLVPAPNASKEMQDKIRDLCLSLDPQAYFDLRQPIVNTIRVVLPERARRLYKTMEQEMLIALECGAEVEAFNAASKTIKCLQLANGALYTDDTRQAWEVVHDAKLEALHEIIEEAAGMPVLVAYHFKSDVARLQRAFPKGRVLDQHPDTLRDWNAGNIPVLFVHPASAGHGLNLQDGGNILAFFGHWWDLEQYQQIIERIGPTRQAQAGHDRPVFIHHIVAAGTVDELVMARRESKREVQDLLLEAVKRRDTCKPLTSQGAITL

SEQ ID NO: 8209 - protein, 1072 aa, Listeria innocua
MEHFTAIQNKMIPYSVKQAGKKLMEDGEIIQFREKDASDHFLTYFIDQNVVEDAGSENYACSCADFQLNAICKHIYATHLKMEKEKQKAAKQDFKNRILTQESNTLLSLFQQNMAQQLEVEEDITNKIPLQTQYIIRLKPDDSSYIMTIEVKVGTERTYVVKNMNTFLAAIRDRQWLVFTKNFAYDPNEHFFLEEDKQILDKLLQISEIAKMYDTDSFYWSKSYAEEKNLTIPPSMAGELLELLTERDTTCIIMKERVEDIKYRGINVRRDNLDFIFELKKSADDKYQLEMEDLQQAIFFEAYQLLFFDGTFFIPVKEVWESLKPLIEFHKVTKNEVVQFSESQLSEVISYVLPALQKSGKLKLDDSIEDRITQQPLDCKLFIALEYGEHTLRLEYHYGNQLFDPFAITEEENEKIMIRDVEKEARVMNIIESAPVHFSGTKMVVNKQEKDLYQFYYRTIPKLAEYAEIYMEDGLEEMVEDNVRPVTTLDVSSDNDYLSVSFDFKGIPEEEVQNVLESLREKRSYHRLKNGRFLSLESENYKQMEDVLQMLEVRKKDVQPNMQVPLYRGMQIYDILGAGTQDEHHKFSRSFRELLTDITTQSEDSFSLPKGLKAELRDYQLTGFEWMKSLAKYNLGGILADDMGLGKTVQTISFLASELEENPNLKPVLIVTPASLLYNWQSELEKFAPEIPVTVLHGTKQARMAEMEEIKHGHVYLISYPSLRQDIIHFADVAFSSVIIDESQAIKNYHTKASQAVRALKRNHVFALSGTPLENSIDELWAIFQTLMPGFFPSLRKFKEIPYENIAKMIRPFLLRRLKQDVVKELPDKIETNLYSELTDEQKTIYLAYLEKIQADLEESNGNASEERIKLLAGLTRLRQICCDPSLFVENYQGESGKLLQLFDTIQTARENGKRILIFSQFTGMLAIIRRKLEEDGQPLFYMDGKTPAKTRLDMVNAFNEGENDIFLISLKAGGTGLNLVGADTVILYDLWWNPAVEEQATGRAHRIGQKRVVQVFRMITKGTIEERIFDLQKKKQALVDELIQPGEQMLGKLNTEEIKQILQLDNGRDDK

SEQ ID NO: 8210 - protein, 498 aa, Orgyia pseudotsugata multicapsid nucleopolyhedrovirus
MDTFKVQLQEFFSAGDGADDAPCLDAPNLLEHQKRGIEWMRRRERRGRPHGGVLADDMGLGKTLSVMRLIANDGDDAHKTLIVCPLSLLNHWTAEAKKHNLPLNLRQFHGGDLDESFDDAKAVAITYDTLRAHHKHYKTAGRASGLLARHWHRVVLDEAHVIKNHQTGVHAAACALSADNRWCITGTPIHNRHWDMYAIIHFLRCRPFDNVGVWRMLNRNNDTNRIKSVVNKIVLKRNKAEIALDIPQHDVQDVHVRFDEAEARVYNELKSASQRAYDDAVASADKAGGMQDVLWLLCRLRQVCCHPALTKCAAMFPEHAHIFEPAYESSKCRRALELVQRVLDTPDDKVVLVSQWVEFLQLVAGLLRRRGVPILLYTGQLRVEERTAVENQFNAADSPYRVLLMSIKCGGVGLNLTGGNHIIMLEPHWNPQIELQAQDRIHRMGQKKRTYVYKMIVDEENSIERYMKARQDKKLTFVNKVFDRTALNYEDIKKFFSL

SEQ ID NO: 8211 - protein, 1072 aa, Listeria monocytogenes EGD-e
MEHFTAIQNKMIPYSVKQAGKKLMEDGEIIQFREKDAADHFLTYFIDQNVVEDAGNENYACSCADFQLNAICKHIYATHLKMEKEKQKAAKQDFKNRILTQESNTLLSLFQQNMAQQLEVEEDNTNKTPLQTQYIIRLKPDDSSYIMTIEVKVGTERTYVVKNMNTFLAAIRDRQWLVFTKNFAYDPNEHFFLEEDKQILDKLLQISEIAKMYDTDSFYWSKSYAEEKNLTIPPSMASDLLELLTERDTTCIIMKERVEDIKYRGINVRHDNLDFIFELKKSADDKYQLEMEDLQQAIFFEAYQLLFFDGTFFIPAKEVWESLKPLMEFHKVTKNEVVQFSESQLSEVISYVLPALQKSGKLKLDDSIEDRITQQPLDCKLFIALEYGEHTLRLEYHYGNQLFDPFATSEEENEKIMIRDVEKEARVMNIIESAPVHFSGTKMVVNKQEKDLYQFYYRTIPKLAEYAEIYMEDGLEEMVEENVRPVTTLDVSGDNDYLSVSFDFKGIPEEEVQNVLESLREKRSYHRLKSGRFLSLESENYKQMEDVLQMLEVRKKDVQANMQVPLYRGMQIYDILGAGTQDEHHKFSRSFRELLTDITTQSEDSFALPKGLKAELRDYQLTGFEWMKSLAKYNLGGILADDMGLGKTVQTISFLASELEDNPNLKPVLIITPASLLYNWQSELEKFAPAIPVTVLHGTKQSRMAEMEEMKRGHVYLISYPSLRQDIVHFADVAFSSVIIDESQAIKNYHTKASQAVRALKRNHVFALSGTPLENSIDELWAIFQTLMPGFFPSLRKFKEIPYDNIAKMIRPFLLRRLKQDVVKELPDKIETNLYSELTDEQKTIYLAYLEKIQADLEASNGNAGEERIKLLAGLTRLRQICCDPSLFVENYQGESGKLLQLFDTIQTARENGKRILLFSQFTGMLGIIRQKLEEEGQPLFYMDGKTPSKTRLDMVNAFNEGENDIFLISLKAGGTGLNLVGADTVILYDLWWNPAVEEQATGRAHRIGQKRVVQVFRMITKGTIEERIFELQKKKQALVDELIQPGEQMLGKLSTEEIKQILQLDNGRDDK

SEQ ID NO: 8212 - protein, 1032 aa, Streptococcus pneumoniae TIGR4
MAKLIPGKIRIEGVALYETGKVDIIKEKNNRLYARVAEEELRYSLEDDLVFCACDFFQKRGYCVHLAALEHFLKNDERGQEILWSLEEGHEEKEAVETKVTLGGKFLDRILSPKSECAYELSAVGQVEAGTNHILWTLRIGQINSQKYYVIRDIPLFLRIVEQRKSYMIGKIYEESLSWEAFDDASQELLTFLHGLTEEGLVPDLFFQNQGRHLFFPLTFFEQGVNLLMALPHFQFDHQVDSYQTLLFQDMHADANLFAFTVTEYSDYFEMEISESPRVNVFYQGAVLFHKGQVYFLTDQQMRLLKEIKALPVGQQGKKYLQFDSSDRDKLASCLTLFIQMGTVSAPERLQIKTFAPSFYFDREEDNRIRLEIQFDYGNRQVSSRQELEELPFSSDADLEERIFQVCLAAGFEADFQSWRQALKAESVYHFFHDIIPVFEKLGHVDLSDKLEELYSLASPQVQIASKGGLLEIQFDFQNIVQEEIDQAMQALVANQDFYIDSSNQVYFFDEETKKIRQNLQELGQFELKDGTLQARKSLAYSLAHLFEGRDRVSFSQEFQNLAQDLTHPEDFPLQATQVKADLRDYQEKGIGWLQMLHHYGFGGILADDMGLGKTLQTIAFLTSQVTKESRVLILAPSGLIYNWADEFQKFAPQLDVTVVHGLKASREEILAESHQIYVTSYATFRQDSEFYQGMAFDFLFLDEAQVMKNAQTKIAQTLRQFVVPSVFALSGTPIENHLGELWSIFQIVMPGLLPSKKEFMKLPAERVAQFIKPFVMRRKKEEVLTELPDLIEVVYKNELEDQQKAIYLAQLQQMRDHLAQVSEQEFQRSRVEILSGLMRLRQICDTPALFMEDYQGASGKLDSLRDLLVQVADGGHRVLIFSQFKGMLEKIEQELPDLGLTSFKITGSTPAKERQDMTKAFNQGERDAFLISLKAGGVGLNLTGADTVILVDLWWNPAVEAQAIGRAHRMGQEETVEVYRLVTKGTIEEKIQELQEQKKHLVSQVLDGTESRGSLTLAEIREILGISEAST

SEQ ID NO: 8213 - protein, 1032 aa, Streptococcus pneumoniae R6
MAKLIPGKIRIEGVALYETGKVDIIKEKNNRLYARVAEEELRYSLEDDLVFCACDSFQKRGYCVHLAALEHFLKNDERGQEILWSLEEGHEEKEAVETKVTLGGKFLDRILSPKSECAYELSAVGQVEAGTNHILWTLRIGQINSQKYYIIRDIPLFLRIVEQRKSYMIGKIYEESLSWEAFDDASQELLTFLHGLTEEGLVPDLFFQNQGRHLFFPLTFFEQGVNLLMALPHFQFDHQVDSYQTLLFQDMHADANLFAFAVTEYSDYFEMEISESPRVNVFYQGAVLFHKGQVYFLTDQQMRLLKEIKALPVGQQGKKYLQFDSSDRDKLASCLTLFIQMGTVSAPERLQIKTFAPSFYFDREEDNRIRLEIQFDYGNRQVSSRQELEELPFSSDADLEERIFQVCLAAGFEADFQSWRQALKAESVYHFFHDIIPVFEKLGHVDLSDKLEELYSLASPQVQIASKGGLLEIQFDFQNIAQEEIDQAMQALVANQDFYIDSSNQVYFFDEETKKIRQNLQELGQFELKDGTLQARKSLAYSLAHLFEGRDRVSFSQEFQNLAQDLTHPEDFPLQATQVKADLRDYQEKGIGWLQMLHHYDFGGILADDMGLGKTLQTIAFLTSQVTKESRVLILAPSGLIYNWADEFQKFAPQLDVAVVHGLKASREEILAESHQIYVTSYATFRQDSELYQGMAFDFLFLDEAQVMKNAQTKIAQTLRQFVVPSVFALSGTPIENHLGELWSIFQIVMPGLLPSKKEFMKLPAERVAQFIKPFVMRRKKEEVLTELPDLIEVVYKNELEDQQKAIYLAQLQQMRDHLAQVSEQEFQRSRVEILSGLMRLRQICDTPALFMEDYQGASGKLDSLRDLLVQVADGGHRVLIFSQFKGMLEKIEQELPDLGLTSFKITGSTPAKERQDMTKAFNQGERDAFLISLKAGGVGLNLTGADTVILVDLWWNPAVEAQAIGRAHRMGQEETVEVYRLVTKGTIEEKIQELQEQKKHLVSQVLDGTESRGSLTLAEIREILGISEAST

SEQ ID NO: 8214 - protein, 606 aa, Invertebrate iridescent virus 6
MADAMNELCNLTQHLQVDDDQLSNLKLKNGYSLFPHQEKVMLWMKYRENLTKKECRKEGEKTWGVRGGIISLCMGLGKTLTALAYSFQNKASFPTLVITSKTVMHEWKTEGVEKFFDSDNIRVLYLHRDYIKNIDKISRDDIMTYDIVITTYDVCLFACKKGNYFLQCFEMGEEQSLMKNKIVAIHTRKRKDANLPNLKGTAVIYGTPWERVICDESQKFANPKTMTYKCIMAVYGKYKWCLTGTPIRNYETDIWAQLRFCGYKGVERSHDWNRNGQGLIAFKDHNLISAIFTMSYDDAQMSLPEKTENNLTVKLEGQHKEIYEGILTETREMYKKMMNDLCSFTYVLAMFTRLRQCAIAPYLITPDAKRNSKEKKNCSEWCLDKFGGAGIKSSKILKIVEIIKSVTLNDNPNCNSNPKSLQLLAKEKAYSCFGSDYIKSSNFEISHPTKIIVFSMFTSCLDLLSEAIKEDYPNFKFVQVDGDTKNRSELFDQFKNDINTQGLFLTYKVGSEGLNLTEATHCICIEPWWTNAVHNQAKARLWRTGQTKQVYVHNVIIEGSIEEKIVEICKGKDDMAASYLEGKERIKSPVRAPKLDKFTLGKMLGI

SEQ ID NO: 8215 - protein, 1920 aa, Anopheles gambiae str. PEST
ICRLDRLFILLESGSAAVTRKAAAKQIGEVQKLHPHELHNLLSRLLTYLHSNSWDTRIAASQAVQAILENVPQWEPKPLPNLLSAHASGSRNGHQHHRLSFDSFDLNAVLFKGARLMGSEGSEFDPLDEGEVVDLREKLARQRALLNEKLGLSSGLNLEELVTLDDVRNNGGGGGGGSNRDHHQTGATGERLVPVQEILKLSRADSVEGLSCREKNRARRKARQQQQAFQNPIAAVIGAGGGGTTTVGGGTAAGNGSNGATAPGTATIGANEPLEPDRKRIKTEKGVEPGTPGGAANSVPAAGTWTGEAVPDLTGAWVDAVDWPLDSFCSKLFLDLFSPRWETRHGSATALRELLKSHADGGGKSVYMTRAEMERQHQLWLEDATLRLLCVLALDRFGDFVSDQVVAPVRETCAQVLGTVLRQLPLAKVHQTVAILLTFVKQKEWEVRHGGLLGIKYMLVVREDLIQTFLPVIINDVLTGLFDAVDDVGAVAASTLIPIATWLPKLLSRAQVSHIVKLLWDLLLDQDELASACNSFMGLLASILSLPSASSWIQMEPMSMLVPRLWPFLSHCSSSVRRSTLQTLKTLKSRLGLNFGVKDWPPPLLQEALRHIFQRVLVEHVEDIQALAEDVWNNLVVNAELSALLHASCPYVSSWLCLAMQPVRLAFDPGSLIYAKPNQPGGGPNRERRPRQFDSFDTGGGTAACGAGHLSSSSGALHQKLFLGGAETVPLDVREKNVVRARCKAARMIGLLSRYLVLPAPGVTYTPETESPIDCYTKVLVGYLQSRSALQRLISSLVIAYWCSFDGTIQPGPSVLQERLRACLTEYVYYDEVGILFTRLLQECRDYLATLKQHRVQLAEYEQLKVLTLDQIYQIATAVGGWSADEMRTRYNLKAKVAELLEERRRSLLGSHSATALEQTTLHVSTQSSVSGAVVSLRCLPDRLNPVVKPLMESIKREECELLQRLSAKYLSDLLDQVTVRTPCPNSKIVTNLCTLLKSDAEFTPRVLCPDQELQHFDPANTDDSNPYHGILTLAKQHQRCKESGGGGGGAALDLSASSSSSAAAASSSSAATATTNAALDELLGGPSESEEMQRKHARTQRLGATAAITTICAQFGAQLPAKLPILWQLLLDKLQSRVDEPYVERLAQDVIAQDETNDFMTALQLLEVAAPYLHAALHRELFELLPKLCLLLRHPLKGVRHMVGRCLATLAAVDAASVMTMVINEVVPLLSCIESVIKRQGAAEAITCIVNRLQFEIVPYVVLLVVPLLGRMSDPDQSVRLVSTHCFATLIQLMPLDGLGTSGDGGASGRHLSDDLRQRKMKDRRFLEYLFSPKTIPDVELPVKINAELRSYQQSGVNWLWFLNRYKLHGILCDDMGLGKTLQAICILAADHHQRSLDRGCAQLPSIVICPPTLTGHWVYEVEKFLPSRFLRPLHYVGLPGNREQLRQKLGTYNLIVASYDIVRKDIEFFSSVNWNYCILDEGHIIKNGRTKSSKAIKQLVANHRLILSGTPIQNNVLELWSLFDFLMPGFLGTEKQFSTRFSRPILASRDPKSSPKEQEAGALAMEALHRQVLPFLLRRVKEDVLTDLPPKITQDLLCELSPLQERLYEDFSRMHLHSSDIRECLENIDGQMAGPANKKTHVFQALRYLQNVCNHPKLVLSPSHPEYQMIVGEFTRNGSSMDDIEHSAKLPVLKQLLLDCGIGTNEDVSVNQHRALIFCQLKAMLDIVENDLLKKHLPAVSYLRLDGSVPPSTRHHIVTKFNGDPSIDVLLLTTQVGGLGLNLTGADTVIFVEHDWNPMKDLQAMDRAHRIGQKKVVNVYRLITRKSLEEKIMGLQKFKLLTANTVVSDENASMDTMGTDQLLDLFTLADDSGKQQRAANGSNGGAAIKTVLENLPELWDDSQYHEEYDLSQFLEGLK

SEQ ID NO: 8216 - protein, 1008 aa, Anopheles gambiae str. PEST
NESNSDTTSSNTKEPDYDATLETDRGKRFEFLLKQTEIFAHFMNSAPSKSSPPKAPRGRKPKVDKNADSSDHRHRKTEQEEDEELLAETNQKAKTQFRFEESPPYIKAGEMRDYQIRGLNWMISLYENGINGILADEMGLGKTLQTISLLGYLKNIRNNPGPHIVIVPKSTLQNWVNEFGRWCPSIRAVCLIGDQETRTAFIRDVLMPGEWDVCITSYEMCIREKAVFKKFNWRYMVIDEAHRIKNEKSKLSEILREFKTANRLLLTGTPLQNNLHELWALLNFLLPDIFNSADDFDSWFDANQCMGDNSLIERLHAVLKPFLLRRLKSEVEKRLLPKKEVKIFVGLSKMQREWYTKILMKDIDVVNGAGKVEKMRLQNILMQLRKCTNHPYLFDGAEPGPPYTTDYHLLENAGKMVVLDKLLRKLQEQDSRVLIFSQMTRMLDILEDFCHWRGYQYCRLDGQTPHEDRSNMIADYNAENSTKFIFMLSTRAGGLGINLATADVVIIYDSDWNPQMDLQAMDRAHRIGQKKQVRVFRLITENTVEEKIVERAEVKLKLDKLVIQQGRLVDNKTTQLNKDEMLNIIRFGANHVFQSRDSEITDEDIDAILQKGEEKTQEQNEKLDKLGESSLRSFTLDTDNLENRSVYQFEGEDYREKQKLQTLGSWIEPPKRERKANYAVDAYFKEALRVAEPKAPKAPRPPKQPIVQDFQFFPPRLFELLDQEIYHYRKTVNYKVPKNSDLGAEANKVQREEQRKIDEAEPLTEEELVEKESLLTQGFTNWTKRDFNQFIKANEKYGRDDIENIAREVEGKSPDEVMEYSTVFWERCHELQDIDRIMGQIERGEAKIQRRASIKRALDSKMARYRAPFHQLRIAYANNKGKNYTEEEDRFLVCMLHKLGFDKENVYEELRAAVRTAPQFRFDWFLKSRTALELQRRCNTLITLIERENQELEEKERLEKKKKTGGGNAAAGGGTVGAGGGGAQKSNQKRKAETTPAANDKNKKKKKT

SEQ ID NO: 8217 - protein, 1643 aa, Anopheles gambiae str. PEST
MASPTPQNSPMPPPQAPSQSPAPSPSPHSPYQQAPPPHPGQSQGPPHMPTPGHHVPPQAGPPPGPHMSMQGPPTPHGGQPPNPHGPPPPQHPSHMNGPPPGPQGAPGHGPGGPPHHMPPSGPQHMPQHPPHPVMGHPVPPHPGMAGHPTQGPPLPPGMVPGGYPGHSMPPNAGPPPPGPMQGVGGPGPGPVMPPGAANPGMMPGSAPPPPPGQENLNALQRAIDSMEEKGLQEDPRYSQLLALRANSKQQNLNAPQLHQLRGQIMAYRLLVRHQPITSPYPNAAGGPSPQPGIPPQPSQQQQSQPPHQQQGQPQPQGPSTVPSHPGAPQTAMQGPPGKPGGPPGPPDAIGSNKPPLGTGGGMPPNQSPMPGMTMGGPPQVGHGQHHQQQQQQMQQPPHSAASHGHPQQQMLPTVGQPARPNSQGPAGGPGPRPAAQAPTMQPMPKQNRVTTVAKPAGLDPLTILQERENRLAARIALRLEELNNLPASMPEDLRMKALIELRALRVLNFQRQLRSEIVQCTRRDTTLETAVNVKAYKRTKRQGLREARATEKLEKQQKLEAERKRRQKHQEFLASVLQHGKDFKEYHRNNIAKLGRLNKAVMNYHANAEREQKKEQERIEKERMRRLMAEDEEGYRKLIDQKKDKRLAFLLSQTDEYISNLTEMVKQHKVDQKKKQDDEIQRKKQLKRHILESGDIEHLDEHCEASDCRVTVMETATGKMISGDDAPFLRDLHSWLQLHPGWEYVISDGDADDDEEESEGGKKKTPEEELSDDAKTKEVIQKAKVEDDEYKTEEQTYYSIAHTVHEKVTEQASILVNGKLKEYQIKGLEWLVSLFNNNLNGILADEMGLGKTIQTIALVTYLMEKKKNNGPYLVIVPLSTLSNWVLEFEKWAPAVGVVAYKGSPAGRRAVQNQMKATKFNVLLTTYEYVIKDKAVLAKISWKYMIIDEGHRMKNHHCKLTQVLNTHYNAPHRLLLTGTPLQNKLPELWALLNFLLPSIFKSCSTFEQWFNAPFATTGEKVELNEEETILIIRRLHKVLRPFLLRRLKKEVESQLPDKVEYIVKCDMSGLQRVLYKHMQSKGVLLTDGSEKGNKGKGGAKALMNTIVQLRKLCNHPFMFQHIEEKYCDHIGVQGTVTGPDLYRASGKFELLDRILPKLKATGHRVLLFCQMTQCMTIIEDYLSWRGFGYLRLDGTTKSEERGDLLKKFNSKNSDYFLFLLSTRAGGLGLNLQTADTVVIFDSDWNPHQDLQAQDRAHRIGQRNEVRVLRLMTVNSVEERILAAARYKLNMDEKVIQAGMFDQKSTGSERQQFLQSILHQDEMDEEEENEVPDDEMINLMISRTDDELELFKKMDAERKAEEVKPRLLDEAELPDWLVKDDEEVDRWDYEEETSILGRGSRQRKEVDYTDSLTEKEWLKAIDDGADFDEELEEEEREKKRKGRKRKGRGRDDSDDESIVSTMTKRKKGITDPKIRKQMKKVLKAVIKYTDADGRVLSKPFLKLPSRRDLPDYYEVIKKPIDIKKILARIEEAKYVDFADLENDFFLLCQNAQTYNEEASLIYEDSLELQSVFSNAKAKILDNHEEEESNEEEEEESDEEGGSVKMKLKISKGSTSSTSSAKKATPVRRKRAQKKYTISDDDDDID

SEQ ID NO: 8218 - protein, 2010 aa, Anopheles gambiae str. PEST
DEGADASLAADADDGSDEETNTKGNAQQDEDDDYEPEDNRKKKKGKKRKARSSDEKRGRKKKKRKKNDSGDESDQKQSDDGGSSAAAAAAAAAAAAAAAAAESDYESRPKRGRDRKKGSSSRSGAAAAAASEVEKKSEEKEKMPTIQEVCSSFDLTDVKIEYTEEDFENLVTFKMFQTHVRPILTKENPRVPMAKLMMLVAAKWREFCTLNPNISSEDATSGETGGREEETAAAAPPTPEYVPKSSRSRSKTENKHDDMVYDDEDEEEEEEVERERTRKSKKGKSGGGGGGGGSSSSNKKGGGGGNSRKQKVPTLKIKFGKRKNASSDEEQDASGGSERESDAEFEKMLQQSEPDTPERAKSAIGGSGGADGGAADEASDQPAVRKKAKTKIGNKSKKKNKSKKSKFPDGGEEGEHEHQDYCEVCQQGGEIILCDTCPKAYHLVCLDPELEDTPEGKWSCPTCEAEGPADEDDDEHQEFCRVCKDGGELLCCDNCPSAYHTFCLNPPLDDIPDGEWRCPRCSCPPLADKVQKILTWRWTDKPINPDEPSTSKGAAAAAGGSTRRREYFVKWHEKSYWHCDWITELQLDVHHPLMFRYYTRKNDMEEPPKLEEALDEEDNRYKRIQRMRETNCQLNETELEEKYYRYGVKPEWLMVHRVINHRTMRDGRTLYLVKWRELSYDQATWEDEEDDIAGLKMAIEYYLDLRANCSQDIGGSGSGGSGSSKKNKKKGRRRLRELEEEERTAGVKRYTPPPEKPTTDLKRKFEVQPPYLDETGMRLHPYQLEGINWLRYSWANGTDTILADEMGLGKTIQTATFLYSLYKEGHCRGPFLVAVPLSTIINWEREFETWAPDFYCITYVGDKESRAVIRENELSFEEGAVRGGKASRIRASSIKFNVLLTSYELISIDAACLGSIDWSVLVVDEAHRLKSNQSKFFKVLNAYNIAYKLLLTGTPLQNNLEELFHLLNFLNKSKFNELAEFQNEFADISKEEQVKRLHEMLGPHMLRRLKADVLKNMPTKSEFIVRVELSPLQKKYYKYILTRNYEALNPKGGGGACSLINIMMDLKKCCNHPYLFAAAAEEAQLGPGGNYELQSLTKAAGKLVLLEKMLRLLKSQGHRVLIFSQMTKMLDILEDFLEGLGYKYERIDGGITGSIRQEAIDRFNAPGAPQFCFLLSTRAGGLGINLATADTVIIYDSDWNPHNDIQAFSRAHRIGQANKVMIYRFVTRNSVEERVTQVAKRKMMLTHLVVRPGMGGKGTNFTKQELDDILRFGTEELFKEDGKDEEAIHYDDKAVAELLDRSNKGVEEKENWANEYLSSFKVASYSTKEDVEEEAETEVIKQEAENSDPAYWVKLLRHHYEQHQEDLSRTLGKGKRVRKQVNYTDGGVIQADPVKEDSTWQENVSDYNNSDYSGASDEDRDEDDEESELGRRSRRRIERKEAERDNRPLPPLLARVGGNIEVLGFNARQRKSFLNAIMRYGMPPQDAFHSQWLVRDLRGKSERIFKAYVSLFMRHLCEPGADNAETFADGVPREGLSRQHVLTRIGVMSLIRKKVQEFEHINGYYSMPELIKRPCEPVKIAVAAPAAVGAAPGASGETSKSATTSTSATPATSAAPSPAPNASASGDKEEEQQSGEKATDGGDKEKPTDSGNGTTPAEEGEKAAEVKKEVKEEGADDATDKKSAGDNKKDESSGEVSAKDEPMDTDGEKKDDKQPSATTTTTTTTIDDDDDDVVFVKDDDDDVKKPEPVQENLEVHKRAFMFNIADGGFTELHTLWINEEKAAVPGREYEIWHRRHDYWLLAGIVTHGYGRWQDIQNDIRFAIINEPFKMDVGKGNFLEIKNKFLARRFKLLEQSLVIEEQLRRAALLNLAQDPAHPAMALNARFAEVECLAESHQHLSKESLAGNKPANAVLHKVLNQLEELLSDMKSDVSRLPATLARIPPVAQRLQMSERSILSRLAATGNTVQQNPPMSQFPPGYQGTTLPGFAAAAAANFATFRPTFSVPGQPTN

SEQ ID NO: 8219 - protein, 5029 aa, Anopheles gambiae str. PEST
DAYYRYDPTAPRGMGPPGSNAGGPYARHRAPHPMQQQQPPPQSQYPSYHQPAGTDSMYSMPDHTAAGMAGMGDVVWGAQPPPPPQANPYASPMGYGLPQGPPQGPTQRQTPSGYRQHMGGYPQQDPQKLQYPTQQSMMVYGAYGPAAAAMQQHAARSAQHVYNQHQLDPSGGYGQHLVSGGQVPTSLHQLGAPQQQPPGGGGVVPGGLAPTHPSQQPSHLPPQSQQQLHQTHNSQPQQHPQQHPGLAGLGGGPQPSQQQQQQQGQHPGMVHPGAQQPNAPVAGLHGLGGPLGPQQQHPMTHGAGMPGVPGGGGGGAGGAGGPGGGGYGASAPQQQSYLPNAATKQQPTQHGGSPQYRAPFPQLSPQMSPRPPQMSPHTQMSPRPVMSPAKPPGGGPPVVTSQSPQATITSTHSPHLGAGIVAGSGGMQSPRPQTGTKLTASSSGGSVVSGPGAGVNTTLQALEQMVMPPSGATGMDGGINGSAHHGMAGPIAPPGSHMPPMHAPHAPHLHPGAHGPPPSHAQQQQISQLNDISSLIPPVSQTSMPVIPPPSAAGPSGPQAYGSLDDKGQHGVGGVDVATSVATVQQQQQPVHSLHQPHLSQPSAAQAPQQPPQLSAMQQQMQQQQQMLTQLQPGAHLPPPSATQHHAPGGPQHQQQSAMHHSTLAAMQPASGAGGSSLSHSISQQLHSPLASSNANEAPSSLGSSLMANAGAAAAGVVPSVYSHDANITPLATGESRDSIVPAPAESNTDESKSSNSNSLMSGTDFEALHHQQQNSSTAGMLLGQDNLQVGGGGAGVLDESMKDAAGLGDGSSLLDSAKQAGEETLGGYHSDAGMLQTGGNTDPSALEQQQLLLDSVASDVVGPAGLTDLQAPEVTTATKSPLETLVPTSTTTAVSDSTISPGGEPIISTSSSTGLMAGVGVQPTNVTGAPATYAQAMSGQMPQTTPGTGMYGMHQVGGVPPAGQTVTGAGDMMVPPPPPPYQTPPMMSHSQERAAIKQQMQDMYKLPMADNQEKMMRMQERLAMLQQHEADGCQGLGPQPCILMQPPHPLYPVAPTMTSAAAAAAAAMIDSPQVTSTTGRGRGRTPSSKPRKPRAKKGDKLLAQQEAAVAAATVVGQTGLITSGDETSQSNLVMPFSGAPAATGMTTPTPTTLLPVSEDSVTAGTGLPEVSPDGSSFHELMSLESSGGAIGAAGAGDLSQDNLSCSGTGDLDTSTDASGKKIKKPRKPREPKKPAKGAAAAAADGDAATSSNADGEAEVAKEDEASAPDASVKDGEDHEGGEVDGGDDQSKAAAITTTSEATEGSGSGVPMEEVTDFDDIPVSKISKTEPTKEEDEKKEAVEEGATAEPEPETPTKSKSKKSSKKSKEPGSEGGSSSSSRNRSRPSGGGSSSSRRSGGSKSSGGGSKSRSRRSRMIVTESDGEGDDLLSTPPPSPPPDMEADSSKRRSARNTQRKKYVDDVMLRFSDDESGMMSPAPSGSRKDRRSDGGSDRKEGLAPTEVALAGGEAGAVAADGSVAGVAGEASSVVGTGSEQAGDENKVSTSEGAKAAPEAVELGPDGKPIDDSSKPNANYVYVNTSEEDSMVVQYVLAVRKGRRELKPDPPPPPPKEKTPEPAEDVPMETSEETKSTEEKISPESDTANTDAEPEQKPSAEDASKAEEKMETDEQESVAVAAEKDTPAEEKEGEEKKEASADVDQQQVKEPVADAATAKESMETDAEEPHKTESVNTAAEDKTAEQPNGEPAVEEKPARVADKPEAEATEATADGVEKMEVEGESEGTEKKPEGDDAAADVVKKESAEGGESTDEKSSEAVKKEEGESASTETDEKKPEPVYIDVEEYFVKYRNFSYLHCEWRTEDELLKGDKRVGNKIKRFLMKQQQQLNIFESLDEEPFNPDFVEVDRVLDVSELVDDEGKTVKHYLVKWKSLPYEDSTWELEDDVDQLKIEQYYKFNKIPPKSEWKTKKRPHPDQWKALPESPTFKGGNKLRPYQLEGLNWLRYSWYKGNNCILADEMGLGKTIQSLTFVNSVYEYGIRGPFLVIAPLSTIPNWQREFEGWTEMNVIVYHGSATSRQMIQDYEVHYRTETGKLIRDITKFNVLITTFEMIVTDYQDLKNFTWRACVIDEAHRLKNRNCKLLEGLRQLNLEHRVLLSGTPLQNNVNELFSLLNFLEPSQFACSEEFLREFGSLKTESEVLKLQALLKPMMLRRLKDDVEKSLAPKEETIVEVELTNIQKKYYRGILEQNFSFLMKGTTSANIPNLMNTMMELRKCCIHPYLLNGAEDQIQYDYRQQHGEDAESYYKNLIVSSGKMVLIDKLLPKLRANGHRVLIFSQMVRCLDILEDYLMYKKYPFERIDGRIRGNLRQAAIDRYSKPDSDRFVFLLCTKAGGLGINLTAADTVIIYDSDWNPQNDLQAQARCHRIGQQKMVKIYRLLCRNTYEREMFDKASLKLGLDKAVLQSMNTGQNKDGTQRQLSKKEIEDLLKKGAYGAVMDDDAGDKFCEEDIDSILLRRTQVITMESEKGSTFSKASFAASANRSDINIDDPDFWNKWAKKAEIDPTACEKDETEDLVIAEPRRRTQIKRYGHDDGVMDISDESSGEQGSDGEEGGIGLKTRSKRTRGAKERKKLQQQMQHDDYVPRDRETLAVLGADEVSYGNWARSECFKVEKGLLSHGWARWTEILEQGQFKRGWREQDVEDCARVILLYCLERYQGDEKIKNFIWDLITPNEGGEQREIARNHSGLHNLVPRGRNAKGRKSTSTCTTPKRDSSNSAATGSNGGGGGSPVIAQPAGSTTPAPQCSGTADANEDASSNSSGTKAEKSAKSGSDTGGTTTPVSDPHHWSKDEKYDTETLLDINYKKHLTRHANKVLLRVRMLYYIKHEVLGDLVNQINEGANASDLPIRPPPTPDQLPCSWWNPNCCDRSLLVGTYKHGCENYRGMRADPMLCFQSHCGPGDGTVEETTIVKETDDDANSKLGDNEEDPEDGVPSETTRSASVGIESKDDLIYPNNGPRFVTTNTNLDDEESTVGTASAAPTPAPSDMNPELAWPTMQDLNTRLRRVITSYQRNYKKEELKQQQKAKLQTIVPPAGTPTLTGQTSSSPSTPSTTPGPLGAAVGGAAVSGAVGIGLGTAGSPQGKGVQQQQSLPSTSGNSGTGGLQAPTAGMPTAADFSLMLSLGLGLNPADPNQLANIDLQKLAMYLVSIVHIPNKMERREKNELVMRERERIRLEQIPKRWTRREENEFIRVLTGYGIDLQPNATVPTPDWSRFKVFAKLDKKTDENLSDFYKVFIAMCKRQAGVKLSDDEKGLEGLVDDVTEDHAKLILDRLELLSKARQIVKHPKLDENIRLCENNLDTPDWWIPGRHDRELLRAVLKYGIYRSEQLILADPDFPFYESAKKYLQQLEMQIQLQNQQLLKMQADAAAKADAAAAAAANATTVKPAASPEKMAAAAVGGDLPVKQEKDAVAPVVASMEVDGEKAVTEVVLPKVEPVAPLSPVKKEVEEVVEPIVSTTSDDKPSEEKNATMEKSPKAKENVDSSKDTVENKDKEESSEEAKKEDVPEEAAKEVVDAVEKEKSDEEPAVEKELVEAPTEKTADKEEAKAETVEAPSSPTKDTSDVVPAVNEQEKPAEPEPEQVKEAVKEVVAEAAEKSAESTDEKPAEKPAEQPAEKPVEKPVEKAVEATAEVVAVEKPVDDVVVVASTDGKEVVEAAKPPARSPSPDVIIVEDKKPVEVKAIVNLTDEERCSQQTAALKARFPDLEVFQPLMKLKHMIDTSMIVKWFRDFALERRVGHIIYCVEHGEWPVGKSYSAYTGCLGIDLDIPLYETIKRIIPVNDDVRRSASSTPDVITITTDHQNAKQISNQAAAIQQQASGIGGIGSVGANISTGSGSSVGAGGKRKRHIAIDVETERAKLHALLNNTQSPVEDDDVQEVVSSRSNARSGSSSANSNVLQPPPAHQHGPRNQMSYPKPTLIPGTSSTLTPIDLSSSLPKVNIADMIKNSSSMGGSGGAMDLSEVQDFSIGKNKKSSSSNQQLPSAAAAGKGKLNDMLSKLMKKNNVSVPIEEPPLGKEKKRRKLDEIVLGLSAAKEHKTIFGDPTPPGGSFSGSSMKKPQIPPSVSVTPASAPTSVSQQPPQKPFTITVTSVPGNPKGGQGSSGVGGGSSSASGNSAAAAAASMQAALQGMSGMSGAMSTKDSLNALFAQAAQVEQQSFLKQQQKLIQSLPANSPQRKAYEAMFAEMKQAAELSSKLGQYGSAHDAKVKNWLAEQTAVLTEQAMGMDYLSRSRGSRGSSSAQNSPQGGSSSRNPMAFNWKNLTGDEYVAVINKINGKRLTGNKAPQLKRLTQWLADNPAYEIDPKWAESITLPGGPASMSSSKGSDGGGSTAKQMRAANAAAAAAANQYGSAGGGGGGSGQQSSSGSASSSSSKKHSQSSSNAAAAAAAAAAANMQFPGLAGLNANLLSSIPGLGSFDPKNNPLLMPFGGMPGLAGLGGLGNLNNMNLFSNLAGLGGLGGAGGGMDAQSLAAMMAAAGLDPTAALGAAAAAAAGGTPTKGGSSGSKSRGKSSAAQSSAVNDGAGTSGSGGSGQQGGGSSSKNQQQQAAAAAAAAAAASSQFPFFFPNPSLLYTPLGLGGLNPYGLPGVSGTTTGTSTSTTTSRQSQSSKQNSRGGGMGSGGSSSQSASSPGGSGKGRGSSSLTAREAAQLQQLLLPHDTHLLESLTRSAGLDISAAAAAAAAAAAGQGSGSGSGGGRGGSSSSASEKQRARESAAAQQANKQALEKLERERRKILETLTAGGFPADLAAMQAAFSATGKMPSSSHSSSSSSKALDTAEFSQALFAGMAAHALSASAGGSGGAGSSGAGGRSSSPSAAKKAREHQDLKDAFEQLSKNPIELLARSLGVGPAISLIPTSSTSSSSTQSVSESKRARQEAAQLQHHLAKLDAKALLMGAGGGSGQDEMKSSSRSSRNSASASASSSEASAAALLGLDKVTLTPVAAASIAASLPSQTTISLAPSPLPGSSSSLNLSSKS

SEQ ID NO: 8220 - protein, 1912 aa, Anopheles gambiae str. PEST
TKEDKSDSENESSSGGSKSGSSSDSESESGSGSSSSSSSDNEHDASNNNNGLSRNTSGTTSTTTHNTSTGLICFFFPPRGPNTQDEDYAANKLRRKSARKKAVAAARKRPAAQPTSKAKKKKSSNNRWKSETSESDGSDGDSDDSREQRHRRKPSGAAAAAAAAAKKRSTASNAKSKAAAAAAASKKKKSNAYSSDDGSNSDDDRKRSSAATRRKNNTVSYKEESGDEPTDSDDLLEVDQEAEEAAAALAAEEEKAETIERIIGRRKGRRGATGAVTTVYAIEENGDPNVLGGEGVGREQEEEEEQFLIKWTGWSYLHCTWESEETLREQKVKGMKKLENYIKREQQLEYWRKYQAGPEDIDYYECQQELQQDLLKSYYHVERIIAQANKAEEGDSGLEYLCKWESLPYSDSTWEDAGLIRRKWQQKIVEFHEREESRRTPSKHCKAIRYRPNFKHLKQQPEYLGEERGLKLRDYQMDGLNWLILTWCKDNSVILADEMGLGKTIQTICFLYYLFKSQQLYGPFLCVVPLSTMPAWQREFGIWAPELNVVTYLGDVQSREIIRQYEWCYESTKKLKFNAILTTYEILLKDKTFLGSIGWASLLVDEAHRLKNDDSLLYKALKEFDTNHRLLITGTPLQNSLKELWALLHFIMPERFESWDDFERNYGNTTNDKSYTKLHKELEPYILRRVKKDVEKSLPAKVEQILRVEMTSIQRQYYKWILSKNFDALRKGMKGSVGTFLNIVIELKKCCNHAALTRPIEFETQRNSQQDVVQQLLKGSGKLVLLDKLLCRLKETGHRVLIFSQMVRMLDILAEYLQKRHFSFQRLDGSIKGELRKQALDHFNAEGSTDFCFLLSTRAGGLGINLATADTVIIFDSDWNPQNDLQAQARAHRIGQKNQVNIYRLVTAHSVEENIVERAKQKMVLDHLVIQRMDTTGRTVLDKNGGSNTSNPFNKDELSAILKFGAEELFKEEEDGDEELVCDIDEILRRAETRDEAPGMPGDELLSAFNVTTFDFDEDKVVSGAKPIGGAPGGGAADQDQDTKDWDEIIPKSYRELVEAEERDREIKDLYLPPRRPAVKPGGNSQHGGEPDGRKGGGKAGGKKRKGAADEDSDEALDSDGASGAEDGKAKRSRGRPSNKEKINGFSDAELRRLIKSYKKFPAPLKRLEAIACDAELQEKPLSDLRRVAQLLHDRCLQTMREIAKDAEAEAGGKHHGGGGIAAAAAGADAKKKCARAAYSSKIGGASFNVKTMMQCVEELQPLDEVIPSDAAERARWTLNIKTRPPNFDVDWGGEDDSRLLRGIYQFGIGSWEAMKMDPSLGLADKILSNDASRKPQGKHLQSRAEYLLKVLRKTLELKRGPSKPRKQRKPKEMKSALGGAGMAPVPVVSSPLRDGGDASFSCSISATIAAVAAGEDVTMGGGVAAGGNGASGAGAAALGGGGAVAPGGGAAGGAVHSNGSRAADEHAAVGSSNHATPAPDKKDKKKSKKDRQKDAKKDKKNKNTGPMHFTANNEPCALNILGDLDPTVFNECKEKMRPVKKALKTLDNPDESLSQEEQLRQTRACLLSIGDQINLCLAEYRDPEKAKEWRSNLWYFVSKFTEFDARKLFKLYKHALKRSEGSATSGGEAGGGGGGTTNSTPVKGDGSSGGKGRKAGTKKDNGHGEAGAPPGDSPDEGKGGGSSHRDRDKKWDEYGSERDRMRNVPPSSRGSAPGTPQSMRGAYPDERSPAPYPADGGAWRDHRFGPDHKRDRYDGYGSSRHSSSSGGYHRDRDRERDRDRDRDREWDRDRDRDRDRDRDRGDRAYKDKRRYPPPGSGGYSGGHGYGMSPSGGYYPPGSDSSYRYPMGSGGGGGGYPPSSRPSGTAPPVAVVMPTGAGGGVVAAPGVVVPPADYLDYRRSEYDRRPPPAANN

SEQ ID NO: 8221 - protein, 662 aa, Anopheles gambiae str. PEST
LDHSCTRSVDVTLCVKRFVKMQSPVNDSAPSSPVDENVLIEKTAFKEELSRKRQLQLEALEKKLAGFAKFSQEHSKKKAQPTNGKRKLKSIENLRKDDYDNNNNEDAIEFTETPSYMNAVMRDYQIAGLNWLISLYNNNLNGILADEMGLGKTIQSISMIGYLLNVRKLKGPFLVVVPLSTLPNWLNEFNKFLPGAKVLRAHMVGPQKTEIFRKLRASKPTWNVAITSYEFMANNRGSFTSTNFHYAIIDEGHRAKNENTIFAGVLRRCKIQSMVMLTGTPVHNNLHELWALLNLLMPLFFNSADNFDSWFKVEDCVDPKHEQTIRLKKLLKPLLLRRTKKEVTSDIPPKVHIDIYVPPTEQMCLWTHKVLHREVKLIMGSGETKEMRIASRLPHMRKVIQHPYLIPGAENLNTNLVTDEIVQFSSKMIVLDKLLARLRARGSKVLIFSQFVTVLYLLMDYLDWREYEYCMLEGHTDIAERQEQMNEFNRPDSTKFVFLLSTRAGGLGINLPAADTVIFYDMDFNPQMDFQAEDRAHRIGQQRKVHVFRLLVRGSIDELLYLHSERKRQLDEAVIRTETKPSKKLLMSAYEYQRTSLMADGLIDEAAVDTKLDELFHKMGSLTRVTASTDSGIMEDCQIIVPGVSCDLKFDTVLSTAQMIEK

SEQ ID NO: 8222 - protein, 936 aa, Anopheles gambiae str. PEST
VFVVLVGSWFENYVYCACVCVCLLCVRKKTRLAGSRKVLSTRDLQTEAFTICNQGVLLGRFISTATEIMSLRGFRKPAQNGNADGNEAGDGKLSLIPGRKRIQMMGDSDSESDASTTPIKPVPIPVVGAVKENGATKSPAALTIKEKELRLQMVRQACMDVDAMLLQSSLVSNEWDVDKAIEELKKTAVKRKIIVSPSPVKPATAETATNGKEKNQQQAKKRRVQEPNRSDDESDVDSDRPAEQVFDSDEDSDGHGGSYSHGKLSNERKNVLEFLNTAGLNEMICVKTLSMKKIELLLEQRPFKDWSNLVDKLKSHRSLQTDILNYTQEYLTRRKNIAAMMSKCKKITKKLEEAIASGSGTLVEQPGNIADGFKLAEYQLVGLNWLTIMYRHKMNAILADEMGLGKTIQIIAFLAWLKENNHQERPNLVVVPSSTMDNWEQELVKWCPELVILKYYGSQAERRMIRVDWAKNGINEVDVVLTTYHMMGASGEEKKMWRVTQFDYVVFDEAHMLKNVHSQRYQNLIRINAKYRILLTGTPLQNNLLELMSLLCFVMPKLIGSKVEDIKTLFQGKVKTNKGEGEEELSSFEKNQIDRAKLIMKPFVLRRLKKDVLAFLPPKKEVVLKTSMIDSQQEKYNEIVNEYQNATGKVKDYTEISGMSIMMDLRKLANHPLLLRYYYSDDDVRNIARKLATDPDYKGTKEDDIFYDIAYLSDFKLYEMRDKYTTLYDLQLPEKLITSSGKFRQLDELLPKMKEEGHRVLIFSQFTMMLDIMERYLKIRKHGFLRLDGSTAVTERQELIDQYTQDPDLFIFLLSTKAGGLGINLTAADTVIIHDIDFNPYNDKQAEDRAHRMGQKKPVTIYKLISEGTIEEGMLMIAQQKLQLEKDVTEQDGKNPMDDHKCMVGLLTMALGLDEKKAETILKNESPMKKPMQEEF

SEQ ID NO: 8223 - protein, 690 aa, Anopheles gambiae str. PEST
FKVVWGKISTRKHKTWEGDGTLEVSGRSAVLKDEAGKVITTASGLKIDEVTEGIQLVVGSKEVEVLEKCNENQQPRLENSSTVVSSTGEASPRIDAVPLVDTTNFSRDSSCRVQNNFKSVFTTREDEQEAVQPLIMKKPSFEHQFQHNAQNEPVVEVQVPLCVTRHLRPHQREGVAFLYECVTGLRMLEPPGCGAILADEMGLGKTLQCIALMYTLLKTGPYGKPLAKRVLIVTPSSLVDNWDREITKWLRSERIFTFIVGPNNKLKRYAQSPHIPILIISYEMLAKQIGELETVKFDLMFCDEGHRLKNSNVKAFGVLNRLECRRRVLLTGTPIQNDLQEFFSLINFVNPGAIGTYQDFKARYETPIVVSQRPGVLPQSIELGIERLNELNAITGRFVLRRTQEVINRYLPDKHEVVVFCHPSALQTQLTRTALSFYDSEKGADNAVSPLQLITILKKICNHPSLVSVQGKGDPESLVHLLAEQLPPWQRMGPTDSAKLGIVEALLEAMLAMQEKIVIVSYYSKTLDMIGGLCDHYNYKYCRLDGSTAGPDRSRIVAAFNNPANDSFILLLSAKAGGAGLNLIGASRLVLYDNDWNPANDLQAMSRVWRDGQRKPVFIYRLLTAYSIEERIFQRQISKTSLSGTVVDQRQNLSNLKLSEEELKDLFSIIDPNAEADCLTHSLLECPCAG

SEQ ID NO: 8224 - protein, 767 aa, Anopheles gambiae str. PEST
MRKSLVPQRCTPSNAVHSPFKSPLSAQKRQRECRKRLPDKGGTADQPPTPKLSVSEHELMIMKILTQPFKIPIANYVPEHSTRCLGMKRSAARRALHDPYACNALVLFSPPELTEHDKLKMDKSKIQVHVVVDPLLGNILRPHQREGVRFMYDCVTGAKGDFNGCIMADEMGLGKTLQCITLLWTLLRQSPDCKPTINKAIIVCPSSLVKNWYKEFGKWLGCRVNCLSIDGGSKEQTTKELEQYMANQSQRHGTPVLIISYETFRLYAHILNSSEVGAVLCDEGHRLKNCENLTYQALMGLKTKRRVLLSGTPIQNDLTEYYSLLHFVNPGMLGSTAEFRKQFENPILRGQDANSTDAEREKAAERLQELAALVNRCMIRRTSALLTKYLPVKFEMVVCVRMTEVQAALYKSFLQSDTIRRSVMEKNATKASLTALSNITSLKKLCNHPDLVYEKIQERADGFENAATILPDNYSPRELRPELGAKLMLLDCMLASIKTNTTDKIVLVSNYTQTLDLFEKLCRKRGYGYVRLDGTMTIKKRGKVVDQFNQPDSADFIFMLSSKAGGCGLNLIGANRLVMFDPDWNPANDEQAMARVWRDGQKKPCFIYRLLATGTIEEKIFQRQTHKKALSTTVVDNAEDGERHFTQDDLKDLFKLDEQTRSDTHDIFRCKRCTNGVQMKLPPDDSDCMSDLAHWYHCANNKGIPDDILSKSWDITRCVSFVFHHRSNSAVVEQQLAEQRRQQTLAKEQEEKEEEEEDEEDKENKGY

SEQ ID NO: 8225 - protein, 451 aa, Anopheles gambiae str. PEST
DTLADPPKLLKIELMDHQRHALAWMLWRETQKPRGGILADDMGLGKTLSMISLVLNKGRKDYYAGGTLIVCPASLMRQWEGEITNRVKRNSLAVCVHHGTQRESKPRHLAKYDVVITTYNLVSRESRAGTARGASGVYGVNWERIILDEAHVIRNHKSAMSEACCGLKGRYRWLLTGTPIQNKEMDVYALMKFLRCTPFNDLVHWKRWIDNKTAGGAMRLNTIMKSIMLRRTKKQLQERGALTSLPSKTIEIIEVQLEKDEMNVYQKVLMYSKHLFAHMHAAKDGSEVKQHQILVLLLRLRQVCCHPGLIYEMLSDSEQFGHDGRRSKIEKTMQLLEEKIFHTDDKAIIVSQWTSMLDILATHLSERNVPFVSLTGKVQVKFRNDIVLDFNKPSGKSKVMLLSLTAGGVGLNLVGANHLLLLDPHWNPQLEAQAQDRVYRVGQTKPVYIWK

SEQ ID NO: 8226 - protein, 2089 aa, Anopheles gambiae str. PEST
DISALKKLILEHKYMRLRSIKERYNEHVAELFFLQTGGNMMEYPVWRKKPPTPAFTSFVRSYKLEPLSSNLEEAGEALKQVSTHTIAFLNAVFNRPTSTGRTKHPIRCIMVFFFSCLSFQLLQQSTRALSGISTTPGSTNLGSVVTPVVVSGNGSSSSSGGDDTLTGLPQGAEIKIPGVGATPVAVSTTLPAAVAQLSQQGGTPIIPDRVGIGISPAAASAVDRKRQISSASSALGGHMIKSELLETANASPSVTTIGTNGPNVPSVRQGGSLTGGAGGVPAGTNSNGPPDQYTNKARQEVFVMQRIQELQKEGLWTEKRLPKVQEPPRPKAHWDYLLEEMVWLAADFAQERKWKKAAARKCARMVQKHFQDKALAAQRAEKAQELQLKRIAAFVAKEIKTFWSNAEKLVEYKQQTKLDERRKKALDQQLSFIVDQTEKYSQQLVEGMNKAAPVPGGAAAALLPPGSKAESLNSSRLSSPLRGSGGLAGGSDDEFCPEAESSDDDEETIAKAEAEAAAEAEDGTKDEVAALQKESEMDLDDFLKNLPKDYLENRDKIVLKKKQGATREEGEEEDGDKDFSADEDSMDDEDTIREQEKKEKNQDHKKEIDELNADNDLTIEELMAKYKNLPPAVPANDRKRRRTRSQPMYESSDDEDKEEEDDNDESEGLTGSDDDEQEEDDDDITEDESDESEEAMDAEEDAFGLKHLLDDETGSGETAATSAAAAAGSSGASSAAKSQSDKDDMLNDAAAIAESIQPKGNTLSSTSVVTPIPTLLKHSLREYQHIGLDWLVTMHDRKLNGILADEMGLGKTIQTISLLAHLACVKGNWGPHLIIVPSSVMLNWEMEFKKWCPGFKILTYYGTPKERKQKRTGWTKVNAFHVCITSYKLVIQDHQSFRRKKWKYLILDEAQNIKNFKSQRWQLLLNFQTEQRLLLTGTPLQNNLMELWSLMHFLMPHVFQSHREFKEWFSNPMTGMIEGNSEYNETIIKRLHKVLRPFLLRRLKCEVEKQMPKKYEHVVMCRLSKRQRFLYDDFMSRAKTRETLASGNLLSVINVLMQLRKVCNHPNMFEERPTISPFRMEGISIKTASLVYNMFSYDPFTQIDLSSLNLVLIQLELLLPAYVAHRAQHLCMPKRLIEEIDSTPLPPPRCPTGKLRLHVRIPDVRVQESLGGNRAGVSITTGVRVGTSPAMKTEGTKFVPLVNHEASLDKKSSLIGSGGSSSSSIQSRVIDIRRRGSSTVMMMMGGGSSAGLDSSSMVAAAGSNRSMSPGLLLRKRSDIAGGGATHQSMGGQSSAAATSAAAAAAATVSGATANRMVQNVGQKTQISSTLAATIMKQLKHSKSLAGSSGDAAARSAEAAEMDERQRTEFYLACIEESRKERRREVLELLGRINAKRCDATPIYGRDLRETLCALIEEEFRHRPDELIPFGVASSYHTRRATMARSCLSEAIKSIDQRAGELRATISNFVLFVPAVCAPTPYLQVSHPHPSKLNAEQQWEATMAEQIQPAIQLLHPIISAMSTQFPDPRLIQYDCGKLQTLDRLLKKLKSEGHRVLIFTQMTRMLDVLEAFLNYHGHIYLRLDGTTKVEQRQVLMERFNNDRRMFAFILSTRSGGVGINLTGADTVIFYDSDWNPTMDAQAQDRCHRIGQTRDVHIYRLVSEKTIEENILKKANQKRILGDLAIEGGNFTTAYFKSSTTIQDLFTVDSAEQDASARLAEVLDRDRERKERLNANLATGPGQPQPATGGEPVVDSSKSAINVFESALAAAEDDQDVQAAKFAKAEASADLDEFDETIPIDEEKVAAAGDAEGKEPELSKAEKEVQNLIKQLSPVERYAMRFVEDTEGTWTAVQLKAVEQEIEQQKRDWEANRLAEQRRNEEAARKREAEEHADLLTFSREDAKNQVNKTHPSNRVSSGGSSKHRLRTMRRNDRTSRVTTATTTAKTMTNRDGGALKNRANSRGHQVAASKYDGGSRSGGRADGGQKLTTATGRRVMASAKQQSKHHSGGVGAKHSGLGNNKAAGSILGKRKYQESAVAKGGARSQSSKAAVATAANQRRAKGATRNAKHARRNVSKASLTDDEDEDELESD

SEQ ID NO: 8227 - protein, 1207 aa, Anopheles gambiae str. PEST
DRERMFDFSTVGPERMWLKNLLLSETETESEISDVDEYIHEMLKNHLREKKIREKYNDSSQNSQYGYYSAGLLSDNDLFPDHRRTIAGKRKCKIDHGTGKTKGVRKKLKHSKKRSGVEGSSYPAEGTSMRSSISSTAGGKRGRKMRLKTPEVMNIRRRKMWQLMAKKEVGKLQRAKANNHKDTITNCRRVAALCMRVARQKAMQSQKLMKDTVWRAKRLTREMQVYWKRYDKVERETKRRMEREAEEQRKMDVEIVEAKRQQRKLNFLITQTELYAHFMSRKLGNVSAEEQLKILSQLDEESNPRLAAIDNYDCERMKQLAQKNATEAFRSERARTNQFDVLQHAEPASTSKDSPVPMEQPNLPSTTDEMPVAIKTEPNAGIAELPQPAMFQGHLKGYQLKGVAWLANLYDQGISGILADEMGLGKTVQSIAFLCHIAEHYGVWGPFLVISPASTLHNWQQEMERFVPDFNVVPYWGSPNERKILRQFWEQKHLHTKDASFHVVITSYQLVVTDYKYFNRIKWQYMVLDEAQAIKSSSSMRWKLLLGFNCRNRLLLSGTPIQNSMAELWALLHFIMPTLFDSHEEFNEWFSKDIESHAENKTGIDEKQISRLHMILKPFMLRRIKKDVENELSDKIEIMVYCPLTTRQKLLYVALKKEICIEDLLHLTTVGGGNSSSSDGQSIDRNFTSNLMNLVMQFRKVCNHPELFERRDVRSPFCMKWNYELAERPIFRRQLLMDYTVPSKRHWLHNRFYIFKALQVQSRLVMDEGGRSVPEDKSRSGLSKAIHYDDWCAPFSCARYHLIQEWMNWISVLHFKWVWRDRQSDRWTDPRYLLLEPTAERWTTRCFPWKTMDRLLFTHGSHTSSIPVYTHRDHVLHFMSETLDHRIMRSRKQQIPGQPLSLLPEIPYVPTRKRSPTVLPDEPTTMPKFLCRHYTKVLNTSGCTGTALRRMYGNRASHAVCRWSCNENALAAERQLNEHVHASYPPHGWSNIIIPDKQTLVSDAGKLAVLDSLLARLKEQGHRVLIYSQMTKMIDLLEEYMWHRKHRYMRLDGSSKISERRDMVADFQNRADIFVFLLSTRAGGLGINLTAADTVIFYDSDWNPTVDQQAMDRAHRLGQTKQVTVYRLICKGTIEERILQRAREKSEIQRMVINGDNFKPDTLKPKEVVSLLLDDEEIELKYRQKTEERRLMEDPVAKSAKDRKQKQ

SEQ ID NO: 8228 - protein, 821 aa, Anopheles gambiae str. PEST
SDSSDDAELITGDLEENKTVPDKEPKRRIRAMLTNDELAEETKKAQKEEEGRTARLKKKHEQLKKFLASYLPGPGESELVLDYDSVRKQAICVHPEIVKLLKPHQIEGIKFMYDNTYGSVDALPKHSGSGCILAHCMGLGKTLQMISLLHTVMRYPQLMTNRVLVICPKSTVMNWKEEIARWQGTIRTGYQMKVYCFPDVCTQNDKIGVLKRWYYCKSPNCGVMLIGYEAFRALINYERRKGSVGLRSAKLGLIKEYLLNPGADLVICDEGHQIKNKRSAISEAVSKIKTRRRIMLTGTPIQNNLKEYYCMVNFIKPSFLGSDKEFSNLYANPIKNGQCKDSDHQSIKIMKQRSYVLHNKLSKFVQRKEAAVLKEFLPEKFEYVLFVPLTPVQEKMYEVFLQMNDYTNNDVTGEPGRTKKFKLIADYTSLRKIWTHPKVLEKAWESANLEKNRRDAARKTATPDSDDESPDDHNDIKSGQLSVTNDWWRQYLQIADLESLFPSNKLWILFEILKHCNERGEKVLIFTAFVSVLNMVEHFMAKIHHQEENPQLSDAYAYSAFKGPWEPGKDYYRLDGKTQKSIRHQMITSFNDPQNKRTKCFLISAKAGGQGINLTGANRVIILDTSWNPSNDQQNIFRIFRLGQKRKCYVYRLIAAGTMEEKVYSRSVTKQALSFRVVDEQQIDRHYSYGELAELYTLTKVSEMTRETPILPADDILASLLRTYPNKILKYHEHDSLLENKPEQDLSEEEKKEAWAAYEREIQNNENRSYLSQLNSMGAAAAAQLGGLLGSSAYGSPMAPYYASAMGYPGAMGLPMGGAGD

SEQ ID NO: 8229 - protein, 544 aa, Anopheles gambiae str. PEST
VAPVFVRTVTCACSIVSDTRFVVETNGFNEQMIDIFKQIPSKSYEPNTKKWTFEMKDYSLLQERIATLNPHVVLGGIPKFVMQEFASGPKPKPSRICLNAIEPSLVESLLAFQKEGVAFAIDKGGRALIADEMGLGKTYQAIAVADFYQQDWPLLVCTTASTRDSWAHKIRQLLPHIPVHSIAALNSGQDYIGECRVLIASYSMMERCGEKLLDRGFGMLIFDESHTLKNFKAKCTTVAMALAKRARRVVLLSGTPALSRPVELFTQLQMLDGKFCSFKEYSTRYCAGKQSNFGWDATGQSNLAELNLLLARKFMIRRTKDEVMSELTEKNRETVVLDPSYLWTNEELEGNMSSYAADYSTSKGRQREEALIKYYSVTAEAKAPAVCAYLKEVVKENKKFIVFAHHHVMLDAIEKSLSKQNVDFIRIDGSTRSDLRGALVERFQSKATCRAAVLSLKACNAGITLTAAHLVLFAELDWNPSTLAQAESRAHRIGQADNVTVRYLLAKKTADDIIWTMLQRKQETLSRVGLCNEDFSDASSVQAP

SEQ ID NO: 8230 - protein, 1385 aa, Anopheles gambiae str. PEST
LRMKKSSLRDKRKQQPKTLRRRNGVDSGSDVDHENERMHVKQDSDTVKSSSIVKLGDNLTTAAAAATTTPTGLLENGASISGSGDSGEAAAPVEKNNSPAPDEQDAARVDSPTDDTVKTIRLVSLDKLLRPSLVGKVPEEGKGEEEKQPHESRRSSSNRAGKKNISIIELSDDSEEESLQQYVIDKSSTKSENDAGKEGVAASPPPPSSASKVSGKSAKKATSGEGRAKSSTLLPLATKELSIVVTPLPADLSTIKATHGLKEIRDHRNNVIETFVPNSSRLSNRTRKNKAAKRKKMASPEEEQQSDAVALENADTGSNSKQHRQEDDNGGSGNENQSDVEEGSKRNESDSDAPITRGRNKSKTSIPKEKKNTLITRKRRAVSDSDEEQDTGKPSTPVANGNTDKDSESGSDFEFAKRNTATSRSQRAAERSKRGRAGATKAAAPSADEASNDEEADKEKNDFQTRKKRTRIRRNSTSSSGEDGKPVSKRKKRKQTKKKNSDSEGDSPNKGRKNIRKLLKKSDLEETTKNAEQEERERKQRIAERQKLYNQVYDEKPEEACTLDQLVLDFDEETKEPLLEVDRKLVKQLKPHQANGIKFMFDACFESLEQMNQSKGSGCILAHCMGLGKTLQVVTLAHTLLASADLTGVERILVVCPLSTVLNWANEFHMWMKHVKKGTEVEVYEISKYKDNVTRANKLMEWHNEGGVMIMGYDMFRNLANPTATRIRKKVRESLQTSLIDPGPELIVCDEGHLLKNEKTSLSQAVNRISTMRRIVLTGTPIQNNMKEYYCMVQFVKPKLLGTYTEYMNRFVNPITNGQYTDSTPYDIQLMRKRAHVLHKLLDGCVQRRDYAVLAPFLPPKLEFVVSIKLTPLQSTLYKYYMENMAGKRNDDDPTLKRSSMLFNDFQNLQRIWTHPRVLRYNSDRYEIKQQRKRDLDSENESEGSMKDFIDDEDTAESTPASSDSESDVQSVHDDSSRDAKSSGDSTSNKRKATVGTRSTRNNPNFNGGDDDDVIMQKPENPTEWWMQMCPETELDNLEHSGKLVVLMEILKECEAIGDKLLVFSQSLYSLDVIEHFLSLLDENLQKDEDERDEQLSKYPGSWSLGLDYFRLDGSTSIDNRNDACKVFNDESNTRARLFLISTRAGGLGINLVAANRVVIFDVSWNPSHDIQSIFRVYRFGQSKPCYIYRFIAMGTMEEKIYERQVTKQAISKRVIDEQQIDRHYKENDLQELYRYEVETSEPRPTPNVPKDRLFAELLKRFDPLIYKYHEHDSLLENKEEETLNEEERKAAWEEFEQEKNRPPMPAYGTSGMLGIGGMGGRGVNGPVTSSTTFGFRNDVLLKLLHLKAREDNPTFNDATINAMIPYLMQQLSQQMRDGELTVRK

SEQ ID NO: 8231 - protein, 1166 aa, Anopheles gambiae str. PEST
RKVSNLRKNIKEVMDDNQLDASTLAAQRQELERLARVQEQQRIIREVQRQLALERQTNKTEQKVMQFLQGHASILKSQQPSTSSTAASGSGSGGVASTTPIRVGYVKNPFETRGRPPKNRQLLISTATTSLLTTTTTVAASTTAATSTTNLTPSVSIAPVKASSVASAVTPVGPPSTTISASASPSPSIIPVRTFEEMVDSEEELEPEEEPEDEDEDSDGEVIALPEKKEIVTIDSSSDDDCIVLSDDDEEPEDESDDDPQNSGLHVNDAYNVPDEQGRVVINVGHTDGEEDIFLAPQIARIIKPHQIGGVRFLFDNIIESIERYDSSTGFGCILAHSMGLGKTLQLVCFCDIFLRHTSSKTVLIIMPINTLQNWLNEFNTWLPEDADNSPLRNHGEVRPRNFRIHILNDSHKTLKSRSKVVLEWARNGGVLLIGYEMYRLLSQKKMTKKKKKKKGVAVELEEEKESTEEQRNMFDDIHEALVKPGPDLVVCDEGHRIKNSHASISVALKQIKSKRRVVLTGYPLQNNLLEYWCMVDFVRPNYLGTKTEFSNMFERPIQNGQCIDSTPQDIKLMRYRAHVLHSLLLGFVQRRSHSVLQTSLPQKEEYVLLIRMTEFQRKLYSVFMNEVVRTKAVPNPLKAFAVCCKIWNHPDVLYNFLKQSERDLDLELEEPEPPPVPGGVPGAVKPVEEKESPTADKDPLSTTSTTTSTTTSTTITTTTTTTTATAGTKEGKGKDAKDEIPYEWAFELMKGYIPDLLENSPKMDIFFCILEESIRLGDRLLVFSQSLLTLNLIERFLQHNKIPGTENYWAKNISYFRLDGSTVAQEREKLINEFNSNPNVHLFLVSTRAGSLGINLVGANRVVVFDASWNPCHDTQAVCRVYRYGQKKPCFVYRLVMDNCLEKKIYDRQINKQGMSDRIVDECNPDAHLSMKEITSLCYDDGEDGEMKDFSEDKDKFIDIVMQHLLESHSKKLTKAPFAHESLLIDRKEKKLSSAEKRQAQRGYELEKQAATKPQYSYTSMGTTYRAIRTSDGSIIHRPVASVRPMQAGDANKTTTTGARPTRWIAAEVWQRQGMTAQEMTLPIDVVIPTSSADKSNIVLKAGQKVMVLKSPKGIYMQLESGKIIAIRTAFKVGQSKETPPAKGGIITTTPAAATGRRTSNLSFG

SEQ ID NO: 8232 - protein, 2645 aa, Giardia lamblia ATCC 50803
MADPQYSQQLLNIDAKLQSIYDECVCEVIGRHSVDANNAFSPAIRDDLYLLHQRVLTKQATEDDNARYRPLYLEISTAYTHKLRQLSTVDPALAQYLQYQQLQATQQMAQRSQQVQQVHQPPVQQQTQQQVQQQRNASDRLSQTSYMLEFAYQTQGQHTKDILRTLRAYYDSYAQQSHMPQVVESVFAQMKLIFCYLFCMIKLSGDSTKAAEIEQAYSLLCQEKSRAGAPLFASPELYKELEEETQMFLNSKQAQAQQYSYSQGSFASDAAQPLSIFQPVKEEALSYAHFGYVLLHPATQKQLYEVLKILCAQPSASQQQYQSVKAALVKYLYIFPRKTKNCWLNLNVDLYAKICPSSQTFPSAGLYQVLDYLKVQCYSLFQCIYEISRYIVTAIQVKSSGQDLSQAAAIINNFRINMFYDFKYNLYRPPYYNELPQPDPHLNEYYAEFVQPTVESLPNIESQISLMTQGPTGDPGLPLHQPQARAETKAEPQGLGKAEQQTRLQSELQNDSHRSFLNKYRELCIQVFQVSNITKPARDSYSKVIKDYNVAYNHLLSFGNTNSAEKQNAEFAARALYNKALAIQEDMRQKEQAYYTSLQQLSAYEQSITGSDDLRAEMEQIKQSVMDMYINKAAYQKAPPPTMQQRQRASTRQLTRSTTPSITPLHSLSSEAVSTMEESSESSEASPVFDDTEDTQNQAVSDELSDVPDHDTDVEEENYIGCVLDCKRIPMTSAWLYTPSLLIKPDPDPSTIGKYDFLRPKGIQRLGRSDGGIATVRIDFLYEDLDNVNNVIEISPEEENIKRSVDSSSRMSKGVRDLERSVIKESPQGEKQRTGITKVPSKDSLDDNIVSVQNASPLTAEKADVVDNHSIIADAELLTVKDSDQNGSLPQGEYQDPESKEKDDNPEKLDEANEPDGQEGHEDLTESSDTVVTPRTEERRAAAENEHVYIFLIKWQRKAHCHATWELEDYLMHLSSYVKVKNYKKKYEKIQGFIYNKDTDDISKEDVKDKIRSQKLQIRSYMIPEKIVGMRIDTELATHYNEKLTKIFNYMRTDSELNLRYSEAFAGAFTRNVGDGKLHYYPEFNNSDSEPVAITEFNFNDPDVFCNRQLDEDGYLPSYPIAHSSDGQGLLSEASQSSAIDKISGYIYLVKWRDLPYSQVTDEYYEDLLANPYIRHEYLHKLINDFKARSDAISQTLSKESSIGYDARPILSGDPQSEVDAVICSPHPSFLIDVSDNLVLRDHQIDGVKFLLISWLQKRNVILADDLGVGKTIQTIAFISALHNHFHVPGPFLIVVPISTLSAWQMALSDWCPNMTVVTLIGTKEDREVIVTHEFYFKPEGDQAELLSGDAAERSIPEKIPRFHILLTTPQMAVKHEDDLMSFQWRLLAIDEAHSLKNSASIRTTTFSRYKTDAKLLITGTPMQNSIEELFNLLNFIEPEVFPNIDVFACRDDKSVELFKNALQSWENTISTSAPSLNSCSEILSSQQRVDTIRSTIQPYILRRVKSVVEKCIPPRKELILRIHMTPLQISCSEWLLEQNYEMLTAKSYNSVKLQNLLMQLRKVCNHPYIIHDLKLHTANLKDIVDGSGKFQVLDKLLDKLNSEGHRVLIFSQLIKTLDILERYCFYKKYKFQRLQGSMTSEQRRRAINNFNEKNSKDFIFLLSTRSGGQGINLATADTVIIFDADYNPHNDLQAAGRVHRIGQSKPVTIYRLVTRDSVEERILDIGHRKLMLDYAIIQKKNESINLTISDQPAFGNKTPITGDSSQRSSADDPTRVDTSGSQAQAELSLLNKGTLAVNQPVETFSVINEQGEVVGTDTLSSVTVTNLKSITPAANEQEEQIMRHVVRFGAEQLTKMDHNAGSQQSSTSPETNFLDIEQILSGAEEVNYEDLSQNKFGKLPGNIFQLSDLSPDKSVKENKHENDQDFWRRIKDTIAANTSNDGARQITTGPLEQLLSPGKPAVNLVQFSFLQTREIMKIVKLLRRFGTTTNAHIQQIYSMDKTIATTLVSDINLKHFCDSILELCKKSCIRRNHDPLHIAKSATSPIPFMATTINPTDLCKSHYTMLILESIVLDDKFLFPASLAPPKPSWATIYPSIIDTKLLLLTISDGFFITENDIPLMNLEEVMNTPGLEVPEDPPRGSILKRIQQLMRLVLRIPSHSAYSAIDTDNVRISLTPDLSVYDDQHFLEYYQKAQGLSSDKEQLRAEISRLVESISQVRGMNMVQAEELDDFNDYTTVNTTLRRSKNYIPQDIISELGVETAMSMSKTALHNYLERQAQNKSLLNTCFKVPNQQRSFRTCLNIIKKHVTSERRKRMTILLRDVLIALGNDRKYLLGVKVPIASSILLNDKYVHKLDSLLAEKEGAYNSTNAASTLTKCVTIPRINLEKFRPIATLTQVELAEAHTAEAKISTYAQNVNPSTLHFYIDNILAEIIATQKYKVTYLNTLKADFLAVSTSILNTIASRSWDIMLHCYEYLHDNKTYYTNIYPSEEDALYILMREFEADLANFLLKYVISIIFPSQQEPACILWYICQYFLMDAQHVSHDDSGFKISTTTWKITESSDTTMYSSMSSLSFTAEVQISFSEEKELEYKQYLIDSKAELARSVSKQELDNASYLAAESSNDSSPDEDLSVASTSNNDRHS

SEQ ID NO: 8233 - protein, 1859 aa, Giardia lamblia ATCC 50803
MDPLSRSSVAPQSCGTSALSPRELAQHLYQMYVLPQRVGPSLAYAASHAPSNETSACPAPEKPQEAKDIQQLFYDRDTWTELYHSIAIQQRELLSRIQLEALDHYGRLSMPPLSRPYDCENLSADVISSCTFEICEYLQGERALAPMEDPFPPINDDTEKFLLTCVHTSLDVMDAPVGTAPVLPTPTYSFDNLLQRPCCIDWSIFYLSSNRAEPYTEVSIADILSLPSNLVSKVPRDTSTIFVDIHRLLFQCIKHASSMLTRSFGLDSSTPPCFRTSTAATLSANEFWSLQVLTDRPQAYLLLVPSTFQSSQFSANIYLCFLSLFFTSYIGLAQLLFERVSDFSNLYTLHSISFFQSPAIEHEDQDMLTSMQFLHLPLLENFSQVFTSYNALLFLLSDTSIQSQILQTNVAVGLTALDSSVLSTLEVMTNEESLLLTLTLCKKLGTNLKNYGGFSQRLLYIDAKERYSQNISALPYPSWVQFCRGSLSWYEDYGLHSITPHACLYPLLTETPSSLISNTGKEFHYDPQLSSYCTKEALSNSTFLQRSIPLKPLRVSTLRHHDTSLKSSRTKRRTVPDVQKRSRSHDQSSDLKDIGNSHSAAWALTDALHQGSALGLNPGTTDGGILTINSLSQLAIGSTTEFKTLYNHTDEYIDSAVTLFDYTNYSFEERLQRNKAFLPPHVITATTIQNRLISYATKHMMKRLRSNKQAFAPGAELARIRRVVKDQISTYKRLLREGRDAYNRDSKIRVKLESKRAEQLQEKHQRERLDFLIRQTEQYTFDNIKSKTGVTLVNTGAEKANLDSTDLFKLKILREDLENEYTDEEEALSKAKDNPRTLNISGLNIDLKKQPTKFIGKLKKYQIIGFSWLVNRFELELNSILSDEMGLGKSVQTIAFFQHLVEKYHYHGPFLIIAPNSLLINWIKELKKFVPSLLLWPYWGTQRERMLIKRGWATTLNFGHNIDTAMEKNESVLGKSDSILHVVITSYQIAVSDIKTLAAIPWKTIVLDEAQLIKSSGTQRWRTIMKYKSRCKVLLSGTPIQNSLEELWALLHFVMPELFERKDDFAEWFSKDIESAASRLGAVKLNADQLRRLQGILAPFVLRRVKGDVEKDLGSKKEIIIKCSMSYHQARLYKTVQQQFSLDTMRSSKDDADIRNIVMQLRKICCHPDLFEHTSSVGPFMLYFFISQSRWCQGTKYLEVMKADMEGDPDDDDDRLSTVTSATGLVAAGQKQQKNLRRVSTSSQTSGLAGVSSLSSIHNGPAAQDAVLPTTSSMPLISGLSDLPGVFQLDGDQISTVDSQSSLVATGADDSLGNSKLLNARRDLIFKRTAQSDVEAFTDIFVKIGIPDIARANYIGRRINPSNACSDIELSLPSPVLLGFCSDLAQKILECTIAKYFNIWNTDVPVLRTISRFLALSVQDLGFLAYCPLLIAHNAAWPALFPMIAHFPFDTKYETRFSIVLHLYSLIGSQLMSFDRSILSSTFSSTLPSILVNPSSLLIVSPMSHLLVSDALENGQSDTSAEHFAIEKTSCVFTNTLSKEYHVRYTQRDLLALHQFKQHWLIKAANDFLESQHLNHLLVYDAIAPKVFGLQPQVHIPTIFKPMHTHDVQALLRGEELYRESTFMGSLITPQSYLPLKLYDQKYVSNSLLNCPVYSKSVLRLIKDSGKLTALDKLLHNLYKTREPVLIYCQMTKMLDLLEDYLVFRRYNYVRLDGGDAVNKRGQIVERFMTDDTIFVFLLSTRAASLGLNLTRASTVIFYENDWNPTQDAQAMDRVHRLGQKKSVVIYRLVTEGSIDEKILEKARSKEIVQELVLRGQRRDEFGNLVHVDAYDNQPSKTNVRRMTRDDYLDLLLPSKGDK

SEQ ID NO: 8234 - protein, 646 aa, Giardia lamblia ATCC 50803
MHAAGMDVEDQLFQQELQSYYDEISSLKDKLTAETNQVKQKSLELKLLDVRKRLNFFLKRTNGTKRTFEDALGELEQRADTAYEPEIKHVCIEPDQKAEATTDFTPSSDEFSQFDADTFQSGNSQEYFFDSQNDLEVERYLERIRRQTWINGELAITDLTNLTEVAPGHKLYGPLYASLRKYQQTGVRWILRLFSLNSGGLLADEPGVGKTVQTIVALSSLFLSGRLRYVLLVVPSTLQTQWLEMVRSWWPLTRCILLNRASAVAYGINESDSDIYTSFLSSLATDLRKCSSTTCTYAGKTMTIGECGTIFISSYDFAMRNASALNTFFKVLTPKSLSSQEPCIQYAIFDEVHYLKNTETIRIKALRALRISCKLGISATPVQNSLVEIYSLITFIQPNILGDYDSFLQEYDIPIRKGSMENSNYEDISLAASLAQRLANRLKPYILRRLKSDVERSLPPKVEHLVFIRLSDTQEQLYLQLLSSDEAIIKLRQLSATSRSFGEGITKLTMAKLVQLQHICDHPGLLSTAPFDDSELYESSCKLTYLMEQLTTLWSQSQDKILVFCQGRMMLNIVEKALLETASFKNAYLRMDGNIPVDARPALYIEVFYGSADSAFPPYNTRRRSRAQPYCCKSCLSLKPQLEPND

SEQ ID NO: 8235 - protein, 1276 aa, Giardia lamblia ATCC 50803
MDLSTFKGLSLPKKLSLVFQRDILPENIKEDDMKNVPSMVEISKRNRERVQDDASDELAEEASDDSAPGSSLSTKNAFAGPRHEVEVLGQPHCLSGGLLKSYQLESLQWLVSINQICTHFRAQFVSLPDDLTSLIPVGATHRRTTHYAEINAAQIGAILGDEMGLGKTIQTISLLAFSHETLKVKIPHLVIVPKSTLPQWEAEFAKWIPSFQVLTVIGDKFQREEIIKTKLINVETRPHVCLTTYDVVRLEFKELSRILWYYMILDEGHKLKDNMSQISHVLRGFTTLHKVILSGTPLQNNLHELWALLNFISPLIFNVPEDFVGLVRGELPDGSAMEPSLRGEQIGEESVTLEVNEELSEITEIATDTTTDTTNTQPVSSVLTTDESVAAKMHDVLKLFILRREKKDVESLPAKREYLINCGMTSLQRSLYKSLLAKDLGCLDKVLRSKSSTSSIGKTSLINIVMQLRKCADHPYLFNGVEPQPFKEGDHIVNVSGKMVVLDKLITRIKAINEKVLVFCQMTSMLNIIEDYLRYREYLYCRIDGSTDLETRAKYMQMFNTPTNPAFVFLLSTRAGCLGLNLTAANHVIIYQQDFNPQADLQAVARAYRLLQTKEVFVYRLLAENTVDTRIYERAQLKLGLDNLIIQTGNFANNPHIDKLLGDADLKSKTMTRNQLLDMIAVSSENLFTESQKNTEDAEEAHNYDIPEIQINDSKLDELLNTALRRKDDVSGQLNQKIKSANEIISKLASDGKLEHINTDELYQFEGMSYTKSNLKKITDFLHRERTEKEEAERLKRIAAISLIADVAEKGSGRAAKDKRQYPTMRKLKLAADVYKADIQLLPPRYYELLGKIANEISSQIEPTMNANKELEYADFARERGYVRPELPGLNQEELTEFYSFLGDGCPYLADGKEISRREFNLLLTALCDYDVELYADITGVRRVSYDKSEKLLHGGPKGPGVPPGTENSAQKALRMAVTAVAAQTRGLSASPGVRIPLVLDGAEGKLVHINRTENLLPDVIEQVGSDGKIRRIRQTLGPGLSENDRIRVIAEIPNDCPVIIDSEYCIEISGRENLDIVFLAFAEKLRTGRESALRFSKAEVVNYCNALLQNINCLDEADRIKARIDRTRKKRRAYFKRVLLLRRWIDSYTNPLYQLPVPIVVNQKRFYSDLEDRFILVMLDLFGYGCWHEIVMQIRLSPLFAFDWWFKTRTEDEIAHRAERLVRYLEQDFKQVSDDEDEYSDLPFVQQKRRGPRPKDGSDYEPDDAKPATARKRKQ

SEQ ID NO: 8236 - protein, 1367 aa, Giardia lamblia ATCC 50803
MSEASPQGIQVENLRATLADDLIPNELRDTFNGKLHFYQKETVNFLILRYNEYMRNLDNPDIKSTQQHIKKLTGFIVGHEMGLGKTVMVLFFLRCIIKHPHPVMRPQRIVIVVQKVLIPQWKQEISRWCQAIPLYTYHGSHQQRRQKLMRAKNERVCIILTTYAMISNDGEYIMSVLKDTNPSYSSLLPSVASDSSSSTSIDSISAQPITAVTPNAIGNAETGSTDQVDQELSSSSSFLDPVSEFSWMIKKRSETPGKSAAAEAAHRLKHLSLQSPSEPKPKHNNTNEIIHPSSQLPTLPASQAQTTNSTSVQGNDSNPENLMYLAPPPSSKLPKHCIDILIMDEATAIKNTATKISRGLKSIDAGFKLALTGTPVINNLGELWAIADYINPGYFGNRTQFDKNIAKPINTGELQDATARERFIAQKVRRALKAKLYPILIRRTTADLGSLDVNKITITFWIPLNEVQFILYGSALRAKAFQEIYCNSSNYTKMIYLLHLLRKVCDNPCELSTEDAGFFKGNLEKAILNIKQKATQPQARDGDYLQILEDLQISKASDQDLPQQDPPRLARSSSANDTDIPLINGQPTLSHDMEHVKRTGEMDAVDTPERAGLNEEDSSDNEQDAQEWALARSFDEYIHKSPDHYDLTVRSITALSSKYSLFMELITHIKNNNHRALIFCDYQIIFSMLEHLLSHNDIPYLRLDGTIADVSERDRICKSFNANKRYTALLISIKLGSMGLNLTGANRVILFAPAWSLQVEEQAIARAYRMGQKHNVVVYKLACINTLEEKMVVRQLQKAGIANVTLDDEKHRSVIKKTDLGNLFEFSPSKRLEGQLPENIKHHATSEHVRWTIQQALGSSWCGDEQTEADKELEFVNSLITRDFCIDVSVLDYLHSKANIDKEMDISEQASSQLGASDFDRILSVGLEASSKPEEDNSGGENHANLVFIYIESHRTNYFRSIMVAIFTYCKVRPSNLDDALNAYSKRLRDSIYTMKKNSNHTRTYIPRPFVPFVNPKNLAHVAEWQCYLAWAVLRASIHTADAEAFPPELQDFKITSRERLAFATSDPKIQELYAYFNFQLNSIISHFTIEIKGSLIAEMPDICEICSTNTVEEYVIYLHNLVVSRIKLLMSNKSTFRPTPTYPATLNIICSLCQANKIPLATLIAAYDNPQNWINSRFKQAPQIEKEKKKIPLLWGPMANEFEKVQKSTLTKLLQKMYGHINYAILDTCLLDSKPLDPAGQATTNTISLSDVTTCFEDEIVIMQANDTFSKILSQYRLMSNEVRAVILQDTYQKLCHYQTLLPDNAHHIAPAQFTNLIAVSAPNAPQHTYEPESNVSVREKLQTEAQPSGSNAKGYEDEESIDILA

SEQ ID NO: 8237 - protein, 333 aa, Giardia lamblia ATCC 50803
MHAQHFISKFSTDPQIRLFLLTTRVGGLGLNLTAANHVFLLNPNWNPTIDDQSVERCWRITQTKKVIVYKVFTGGTIEEKIFNRQIYKRLLVSRVLDNASVTSLKLFKSDLFQLFTYNQPDVPINVITKEINVSVSGAKAGEPIQDERREHREKAIRNKVAELFSDDLKKFMKQEGCHKSRVTKEFLTFLRIQQPQNYLKLIDTICEDFCNEKAYVYTSKVEDGPSTGLFAIMGYCDEDEEHSVARPKEVSKEALQTSIKEVVEIACSASSNTVTLYAIKESLQRLKSSTQKDLVDHLFSKASSEELQTHTLLELKDTVARKINLAGVVQGKK

SEQ ID NO: 8238 - protein, 2079 aa, Giardia lamblia ATCC 50803
MKTSLADLLRKPLLRHAFDPHERGSNLSGDRDRQGTVDHGQNHAHCVQTHHSSPSSASGECIKMEPAQSHKNQVDPEDRLQPRSDGPKPPQSQEAGVCLTYQLPYLSFGKRMIKVFPNLNITNAHREFMVLYEFDYRLTEFSLITYLTQKRRAFLSEVDLYAETDLGSPEDVEASQYLILANLISRPRLRGFYRPLNSYYAVNCLLYHDPQPAKTLKTSFLQSLQQQSLLNMRFAAEKREMAATLKQKMLSLTTGNFKLSIVCRHESPLIGKIFGSGLQKYMLPRSQILTTTGKQGSSGVNKYSNLPDFAFKTYTDDMINSLIYMYLRQFENVYTLEDARQKRIFLPPVFLTLLLEITRYELHVMSRLGVDPTVTLETTTNRSTVEAHEISAMLDSILARTNPSDIDPACTVNYSYLFKTDSFAESGSAEAQEALETLIESHPGFTERHKALLYQAELGLKLIEYILKNTGYENNLHFEQRLYDQVHIQYPIELTTQPVSIQHGRLKNYQLDGVKFLVSLYRSSNANLQDLQTGTGSSGCLLADDMGCGKTAQSIAFLAYLSDNRISTGMHLIISPLAVSDSWATEFQTWFPNFSILLYKGDQEQRAKYRRHILTLSKGNISVLTDYGGPAIKDKDSRTASGSAGYSSGDSGKSTNQILSNINAIVTTYEYAIKDRSFFRQIDFDVVIVDEASRVKNARGKLIDVLKKSINCRFRILLSGTPIQNNLRELFTLLGLIHPAVFCDYDRFESIFGQVFSLAHTGRNSDLHHAHHGYHGFRRRASTDSAQLEVSDMRTGASPSLSSVQMQSMQSISTTTSQAVGRRSKRQCGSTAVTFADDLGEDELDSSYSYSNKDSSEDENDNDSELSRVSSVPTEMMVPIGSTASLIGAKTASSLPELTQDLPQNAPITKDNIAEVAIQLAENIDKISGLTNSQKTFIVERLHGILKPFLLRRVKTEVLAQLPPKEEIIIRVPLSAFQLFFYNLAIANGRAMTNPDLASSLPANFIRNLDIYLRCVCNHPFTALEHDKLQLLYNFYLMKAKSFSARHKAENTDFYRQYGGAKEEASKDATASMPPNNFNVLENMYVNDQIWRVSGKLELLDNILAKLHKTSHRVLIFSQFKKVLDVLSSYLHYRQYKFVRFDGSVKDVDRNSMIRGYNREDSKDFVFLLSTRAASHGLNLQTADTVIIFDCDYNGTYDQQAQDRCYRLGQVNPVKVFKLYSNTAIESKMLSVATSKLSLATIVMDAGTYTTNAGDKTDGTAGATVTGGGARKKTKMSTQEYILEVLSANSVVPDDVHIPTSEEINRYLARNDMEFQAFQMHDIETSLYWRKRNFDEDVPRLDPEIPSVFSEQKDQIYEEMREMNLLEDKQEVVMPNMQIPSAESGGKRSHSAGADSNSTTSDYDEDDSLDEGLLASETDTGGSQQRKLVPKVLKKTQSIKKSMSRSLTAQDLSESAVFSLCMQVDKSLRDDPAFRNSIVLSSTIIQKTSVVLTPVVDTPIACFLIDHGHSSGVLFLVSTMVGMADLLRREDAYNNLGACVTQYVSSNLSSLFACFSRQSLVKQSAESVSLAQHLSSLVMAPGFSSPGNAGSGSWDSYLFLTGSESILQTAYTFPLAQQGHPLSTYQLLFTKAALFIMALKLERDVFHNDLLSYLTTDLTNAKKYTGISYSSLLFYFSSGLAVAVEEQSLCAPDLLYSKPSSESAVLNESADTTSLFLRSDRAYTDVYIKLESLPQLSGDIDVIRRGYAWYNGLSQSQRDQQPSYLQYLCNVIDHCRVGAASQDQLDPLPIYVRITTNTERLRYLYSSARSSGVTTDVLRLLYATVSFHLRIMAIFNYLIHLIDPLCAHPSEDSVDVSSTVAGDSEPESGKEDSSKALLTYRILSQFWILPSKTELPSYYHAIPYPRSLAYIYYKLITLSYLSLHEFVADMRQSFKNCLQFNERSSAFCEHAKVCNELTFQQISQHFQYCNASSVISWFTAYERRLSVVKKGYTLLSTFVGCGIYELLSLPITEGPGPFHLEMDGEKCKGLILSYGSGADMAGLCAYDILRYAIAAAKEGESGTGSTVTYPDASVRHVKK

SEQ ID NO: 8239 - protein, 1031 aa, Streptococcus pyogenes MGAS8232
MARLIPGRVRNEGIKLYEQGLVSFQDDNKGILQIEVETYQVQYGADDEDITCQCDTFHMKHYCKHIAAVEYFLKNDQKGKLFLKQLTNQTKIKETTKKITSFGSLFLDSLAMNEDDSVKYRLSALGSRSPFSSDYWWSLKINRLPDDRSYVIRDIKGFLQLIKKEGFYQIGKNCFEQLSWLQFDPSSQDLIEFLWRLASDTDKGDNENIFPNHARHLRLPSGFFEEGIHYLTSLYDFTFEGPSQTYHHLFVRSLEAEAGLYEFKVEVHRKSIELQIAEKNVQYLFDNDYLLYQDTFYHLTLKQRKMVQAIRSLPIEADLAKHIHFDLDDHAKLAASLSDFKQIGLVEAPKSFAIRDFEVTFQFDLLNRDEISCQLMFDYGNYQVSDKASLEALPFASHLKKEEKINRSLLAFGFSPQFYSKKRLTSAKELYTFFEETVPCFERLGNVALSTAIQALQVKEMPKIAIKRNQGLLDISFDFSTIIENDIDQAVTALFQNNPYFVSQTGQLVVFDDETQKVSKSLQELRARQLKNGHLQLDGIRALQVSKLFEGMTSVHFSKELEELAYHLQHPETFSIKPLPVKAQMRDYQRNGVQWLSMLNHYGFGGILADDMGLGKTLQTLAFLASHLKSDSKVLILSPSSLIYNWFDECQKFTPQLDVVVSYGLKQIRDQIIEEGHQITITSYSSFRQDFETYQAFHYDYLILDEAQVIKNAQTKISHCLRAFNTANCFALSGTPIENKMLEIWSIFQIVLPGLLPTKKEFLKLTAEQVSRYIKPFVMRRKKEDVLPELPDLIETNYSNEMTDEQKAIYLAQLRQMQDQIRNSSDVDISRQKIEILSGITRLRQICDTPSLFMNYQGKSGKLDSLRILLTQIKENGHRALIFSQFRGMLDLAKQEMTALGLTSYQMTGSTPANERQEMTRAFNNGSKDAFLISLKAGGVGINLTGADTVILIDLWWNPAVEMQAISRAYRIGQKENVEVYRLITRGTIEEKILELQESKRNLVTTVLDGNESRASMSIEEIKEILGLNTH

SEQ ID NO: 8240 - protein, 423 aa, Staphylococcus aureus phage phi 12
MGLGKTVSTLTAFSELQLLDTKKMLVIAPKQVAKDTWVDEVDKWNHLNHLKVSLVLGTPKERNDALNTEADIYVTNKENTKWLCDQYKKEWPFDMVVIDELSTFKSPKSQRFKSIKKKLPLINRFIGLTGTPSPNSLQDLWAQVYLIDRGERLESSFSRYRERYFKPTHQVSEHVFNWELRDGSEEKIYERIEDICLSMKAKDYLDMPDRVDTKQTVVLSEKERKVYAELEKNYILESEEEGTVVAQNGASLSQKLLQLSNGAVYTDDEDVRLIHDKKLDKLEEIIEESQGQPILLFYNFKHDKERILQRFKEATTLEDSNYKERWNSGDIKLLIAHPASAGHGLNLQQGGHIIVWFGLTWSLELYQQANARLYRQGQNHTTIIHHIMTDNTIDQRVYKALQNKELTQEELMKAIKARIAKHK

SEQ ID NO: 8241 - protein, 1078 aa, Methanosarcina acetivorans C2A
MIILHAGRVGKQFFLWGESPAENETPPVRRGRKPKKPVAKPYPYDSGVENLSSALELLLGSTGRKKAEEINVWIPTAGWNPIPSSPLVAEIPASKAELSLAPWTVHAYPLEAEEAIVLLCACMGKKVLAPGIISGNDLLWWADALKFAGSLVAGQKYLPGVRGGEGEYKAFWEPVFSGEDAGELARLAKQMPPAAKALALETSSVQPEILAAVAARQFIEEALDWIVRSEIGEKELAKEARKRKSFDSVHDAWVSALKSPDGLIHGEEKELLQLAFRTREWQRPLTVLTTSPFRFCFRLEEPAAEEELEETEESEAGKMDTKKGRKGIADIEVPEELWYVRYMLQSYEDPSLLIPVKEAWKPKKGSPLKRYDVKNIRQFLLSSLGQAAGISAGIASSLEAPNPSGYSLDTKEAYRFLTESAADLSQAGFGLLLPGWWTRKGTKTHLKAQANVKGKKLKAGYGLTLDKIVSFDWEIALGDRALTVRELQALAKLKAPLVKFRGQWVEVNDAEIRAALEFWKKNPHGEASLREVLKLAVGVSEKADGVDVEGLNAAGWIEELIRRLKDKTGFEELPAPDGFSGTLRPYQFRGYSWLAFLRQWGIGACLADDMGLGKTIQTLALIQHDLEQVKGQVEEKVIENAEEKVEGLKAAKPVLLVCPTSVINNWKKEAARFTPELSVMVHHGTSRKKEEEFKKEATNHSIVVSSYGLLQRDLKFLKGVSWAGVVLDEAQNIKNPETKQAKAARALEADYRIALTGTPVENNVGDLWSIMEFLNPGFLGNQAGFKRNFFIPIQAERDQEAARRLKEITGPFILRRLKTDTSIISDLPEKMEMKTYCTLTKEQASLYAAVLEDIEETMEEAEEGIQRKGIILSALTRLKQVCNHPAQFLKDNSAVPGRSGKLARLTEMLDVILENGEKALVFTQFAEMGKMLKEHLQASFGCEVLFLHGGVPRKQRDRMLERFQEGKEYLPIFVLSLKAGGTGLNLTGANHVFHFDRWWNPAVENQATDRAFRIGQTKNVEVHKFICAGTLEEKIDEIIERKVQVAENVVGTGEGWLTELSNEELKDILALREEAVGE

SEQ ID NO: 8242 - protein, 948 aa, Leptospira interrogans serovar lai str. 56601
MEEVLQLSLDFEPKSSSGYRGDFCYLTNSPESGIGKIVSSAEGKFTIEFSVSQTKKTVSENSTYLRILPGYPSSLRNVEEYSSLMNLALTAYELKLTHAFDKLSALSNSRTRLLPHQIESTYIVVNSLRPRFILADEVGLGKTIEAALVMKELIFRRGYKKVLIVAPSPLLVQWQQELKNKFNEDFKIVKRKNFHTDGEKNWRNFQHVITSIDFIKNPKYAEEILKTKWDIVIFDEAHRLRRDYHKITRAYLFAEKISKKCECLLLLTATPFRGKLEELYYLMHLIDPNILGPYHTFVNDYILGNKADLKDKISKVLLRRRKVEVGGFTKRFAKTVRIELSSVEREFYEETTNYVRREYNLAMRTQNRAIGFVMIVFQKLLDSSVFALLSALTKRKFLLENKFHHIQKMESNLEEWDLDETEDVEEFVSGLDESVQLDLQSLKRELLSLNRLILLGKKIKEDKKSIKLKETILKLQKEGHSKFIIFTQFRTTQDFLASVLSDFQVTLFHGSLSADAKEKAIVEFKTKTEILICTEAGGEGRNLQFANVLFNYDLPWSPLKIEQRIGRIHRFGQKDNVFIFNFASKDTVAERILEVLTNKIRLFEESIGSSDELLGAIEDELDFNSSFMKFVTGNKSKTEMEEEIDNRIKIAKKGFEKLGALVTPKLIDFNLQDYYSHTLEERSFNNTHLEEFVSRFTKIFPEEAGFQLLRKKPQIYEIDSPQYKGKYGTFDSELALQNDSLEFLAFGHPLIDKTVSYLIQNQKGWSTAFHSVSNKEYYVFLVEFQFTLNRTELFYFETNPNTGSVKQIETLPEELREYNYSVRPSDISSHPELPSRLEENLIRTFISLDEIVESRKKELGDQTLDLFQKEEFKIRTSNQNTLRQLEEKLMRQEAAFKWEGKPEKKSAMNRTRNEIQKVKEDFDRELRKVRNGKTIQHRFQLFQVYLPS

SEQ ID NO: 8243 - protein, 1089 aa, Fusobacterium nucleatum subsp. nucleatum ATCC 25586
MKIDLLDIETQYINNRNLNYAKKHYIELEDGIVRLEITYIDKIDSTFIEMESIIAGYENETSLTINDEGNYECSSCSCGFHNSMEPCGHVWLLAKYVIDNNLEAPYEYEKDEDREETVEKYFEKRSRLIQETIDREWFKEILKKDIIDKLSKIETSSLNLVPSIEFDELNSSRNFPKIKFKIGKDKLYTIRDIYSQIIDAIKNKEFKNFGKELKVSMHYDAFTDFSKKQLDFILKHPNNIIQFKKNMINLDENNMDDFYNTYFDSPSTEIIFQEEDFKTELVIEKNDKDYEIYLKNKFYNPKEKKKEKVQDKSDWRSYRFNYELPFTTKNFIVTKNKIYKYDKKSKIFLYMNINEYEMKLFNKLARESLILSEDKFFEIFSFFQDKLEHFNISEEYLDLIKNYSNKKAKIYLDINSEGYLIFKIEYKNHFINMNLIQIVEIFKILNPDIINNLKNYINSHQKIYEINETMIIVKKSEIDKFIEDIIPLLHTYADIYLSQSIKNFNKTRKINYSVGVKVTSNFLELDFSSTDLDKGEIIDVLNQYRAKKKYYRLKKGEIILMDQEQLEFLDDFIKDFNIKDSDLKKGNIKIPNFRAYQLNVLQNKYMDIEKNQDFNKLFEQKVIEIPSKYKKILREYQIVGVEWMLKLRAMNLGGILADDMGLGKTLQVITYLESVKRERACLIVTPASLILNWENEFNKFNSSVLTLSIYGDRKNREVLLSNLKNEVVITSYDYLKRDMDLYENIDFDTIILDEAQYIKNHKTKVAQAVKKINSKFKLALTGTPLENSLAEIWSIFDFLMNGYLFNYDYFYKNYEKAIVLQTEKRVTERLKNMVEPFILRRLKKDVLKELPEKIEETYYVDMNQEEKKLYQANLIKINETLAQNIDVNTNKIEVLAMLTKLRQICIDPRLLYEDVSSSSSKINACIELIEKSIENNQKILLFSSFTTVLDLVAQECDNLSIPYFMLTGETNKVKRKEMVENFQNEAVPLFLISLKAGGTGLNLTKASVVIHLDPWWNISAQNQATDRAHRIGQEDTVQVFNLITKNTIEEKILNLQSKKKELSDIFVENSKGSFSSLTKEQLLDLFKLE

SEQ ID NO: 8244 - protein, 892 aa, Fusobacterium nucleatum subsp. nucleatum ATCC 25586
MLVEGEDNLYLALYDSEKNLISSYSNLNQNDINNYIENLENEKEFFISWEEKESSNYLKLDKTLLEYLLEKDNFVNSNFETIAKKEIENLSLLIRDNNEIEDRLDIYVEINDNLLIKNNIVGNYIYSQGIFYKIDIEEDSQFPLIDLFQKIDKYELESYCTLILKNYKNIDLKYEDYETIISDEKTAIPQIIIEKIAFDNSLYLKINSIISTMDYEFFTKNQIEAVLTVNELEKKLEISKINLENLSSDMFEIVKVLTKLQKSIGLKSSYYIDNENFIILNEELAKEFVKKELLQLTGKYSIIGTDRLRKYNIKAVKPKISGKFSYNLDYFEGEVEVEIEGEKFSIQQLLNNYKKDEYIVLSDGTNALINREYIEKLQRVFKEEDGNKIKVSFFDMPIVQDLIDEKSFENDFMGSKDFFEGINKLAEENIDYPKLKATLRDYQKYGYKWLKYLTDNNLGACLADDMGLGKTLQAITLISKMHEEKKKKSMVIMPKSLIYNWENEIKRFSPKLKVGVYYGINRDFSSLKKVDVILTTYGTIRNDIESLLKQKIDLLVLDESQNIKNINSQTTKAVLLLNAKKRVALSGTPIENNLLELYSLFRFLNPEMFDSVQKFTNDYIVPIQKYSDTSTIEELRKKIYPFLLRRIKKEVLADLPDKIEKLVYVDMNDEHRRFYEERRKYYYSLLEKNTSSQGNFDKFFVLQAINELRHIVSSPELESKKIISSKKEVLIENVIEAIENNHKVLVFVNYLSSIESICDSLKENKIKYLKMTGQTKDRQNLVDKFQNDSRYKVFVMTLKTGGVGLNLVSADTIFIYDPWWNTTVENQAIDRAYRLGQDKTVFAYKMIMRNTIEEKILKLQEIKNKLLDDLISEDNLSTKNLSKSDIEFILGS

SEQ ID NO: 8245 - protein, 1065 aa, Xanthomonas campestris pv. campestris str. ATCC 33913
MKLRFWKGESPETIPMDAPEFSAESSGWKGTAQEKSTHPGAIYLLQLADERFALKDGAGYLIPWEKLYSLLSDSDHVSSLHLLKLPQTSRLRPAIRSHGTPTDTNFRVTLEAWIAESGEELLAERLGAVLTMPGQDLLLPQSAFTLLEAMAELAQCGEDWDADRRMLQMGKVQEAARWAGATMDRYLEHSPVVVANKLEINLKQHEAAEAQIVEVEPRPIGAPEGWLSQFDRYQSVRGRYDVTDAEGGMSHVVLSSQVREVGQQIKSMPGRRLAGKQADAFMHNPYAVLGEAAAQVISPERFAEAKRTAGIDEWELELQPADVDGSWDAVLVDSVGKSESVFVGSFHASEFDSLLEEASGSEGLGVARWKKHRVLLSGLTLESLARLRQAHFKEAVGSVIGVETLFDLAHYSDRVVGFDGKPIIVPKVQGSSPAEDWIKGAGEFVAVDPATGTATEGRLSTNDVQEFGERVDLAEREGHINVAVPGIEKEIPTPEARAWMKELTKPAGEKRIESLKNPAPAEKLSLRILHNIEELEYPSEETEQARVKDVYEAPAALRPEVALKDHQVEGVAWMQGRMRQRGDGVRGVLLADDMGLGKTLQALTLMAWYRQTAPAPKPCLIVAPVSLLENWKAEIAKFLDGRQGATLTLYGEHLALHRLSAREIGPELRELGVKKALNPGFAHGAAFVLTTYETLRDYQLSMAREKWGVLVCDEAQKIKTPSAMVTRSAKAMQADFKIACTGTPVENSLADLWCLFDFFQPGLLDSLTKFTKVFRQQIELRSEGHEQKVEVLREQISPWVLRRMKAEVADLKPKTELPCELAMSAKQRGLYAAAARRFRETVDSGEGGDTAALSLLHQLRQICANPLAAADDRSEFLSLDEHLRHSPKLAWLIEKLQEIQATGEKVIVFTEFRDIQRLIQRAIASRLSYQASIVNGSTSVEAGADDSRQIIIDAFQAKPDFGVIVLSTTAVGFGVNIQAANHVIHFTRPWNPAKEDQATDRAYRIGQEKEVFVYYPTVLGDGFESFEERVAKRLATKRKLSNDMLAPEQGLTLEEFSDLSLGFSE

SEQ ID NO: 8246 - protein, 967 aa, Xanthomonas campestris pv. campestris str. ATCC 33913
MSTLPAPSSGGVYPSGQPGSHRYSHHQGKFFAHWLTLRSRDESAVARALSAARVDMNPHQVDAALFALKSPVEAGVLLADEVGLGKTIEAGLVLAQHWAQRRRRLLLIVPATLRKQWTQELEEKFQLPSVILESKSFNAFRQLDVSNPFQIEDAIIVTSYEFAASKQKELAAVSWDLVVLDEAHKLRNLYKGKSASKRAVALNEALRGRRKVLLTATPFQNSLMELYGLVSFISDEFFGSQKAFQMQYASGRSSEARLNDLRHRLKPICHRTLRRQVQAEGGINFTKRFSITQDFTPSDEELELYDKVSAYLQDPSILAIKPTARHLVTLVVRKILASSTFAIADTLETIIGRLESNQALTAKQIEDFETVDELSDELDSDGMERQGDAPDSDALQAELFCRAQEIDRLRGYRDLAKQIQSNRKGDALLLVLGRALAMAEKLGGQRKAVIFTESRRTQEYLRVLLEEHGYAGRTVLLNGSNDDVDSRQLYADWLERHAGSTLVSGSRTADMKAAVVEAFRDHRDVLITTEAGGEGINLQFCSLLVNYDLPWNPQRVEQRIGRIHRYGQKSDVVVVNFVNRKNRADQLVFELLEKKFKLFDGVFGASDEILGAIESGVDIEQRILRIYQNCRDAAQIESEFATLQAELDESIGRREESARRMLLEHFDEDVVRNLRSRRAGMLHKINQYESQFLHLIAAERPKARISDKLVKLEEGDYAVSWPPAEEANAGLLRPDKGLGERLCRQAKERPTLPGTLHFDYAAVDAQRADVRQWLGSRGQLRVALVTIQTAEEVLEELVCSALCSDGRVVPDETAARLMEIPARFVPRHRVAEDRALPAFEAAVERVLAEANKRNESWFLQESERLDRWGEDQRLLLQQSIDEFDLQVRDAKRTLRQLETLEQKAQLKREIKRIEQQRDDAMLDFFEGRKRIERSQDVMLERVENALRTQHTVQVLFDVEWTLEHPEP

SEQ ID NO: 8247 - protein, 918 aa, Bacillus anthracis str. A2012
MINQTEVTIRLQHVSHGWFLWGEDDSGTPLSVTSWKRNAFTWHSTSFYGTFLKEATFEGKQGVMLTNAQAFEYIANQPMNSFARIQMNGPITALTKDANELWDAFTSGSFVPDMEHWPKQPSWKVQHTPIEDDTLASLFSSAVNESILQDNRSNDGWEDAKRLYEHYDFTKRQLDAALHEEDWLRKIGYIEDDLPFTIGLRLQEPQEEFEMWKLETIITPKRGAHRIYVYESIDYLPKRWHDYEERILETQEGFSKLVPWLKDGDTFRSELFETEAWNFLTEASNELLAAGITILLPSWWQNLKATKPKLRVQLKQNATQTQSFFGMNTLVNFDWRISTNGIDLSESEFFELVEQNKRLFNINGQWMRLDPAFIEEVRKLMNRADKYGLEMKDVLQQHLSNTAETEIVEEDSPFNDIEIELDGYYEELFQKLLHIGDIPKVDVPSSLHATLRPYQQHGIEWLLYLRKLGFGALLADDMGLGKSIQTITYLLYIKENNLQTGPALIVAPTSVLGNWQKEFERFAPNLRVQLHYGSNRAKGESFKDFLQSADVVLTSYALAQLDEEELSTLCWDAVILDEAQNIKNPHTKQSKAVRNLQANHKIALTGTPMENRLAELWSIFDFINHGYLGSLGQFQRRFVSPIEKDRDEGKIQQVQRFISPFLLRRTKKDQTVALNLPDKQEQKAYCPLTGEQASLYEQLVQDTLQNVEGLSGIERRGFILLMLNKLKQICNHPALYLKETEPKDIIERSMKTSTLMELIENIKDQNESCLIFTQYIGMGNMLKNVLEEHFGQRVLFLNGSVPKKERDKMIEQFQNGTYDIFILSLKAGGTGLNLTAANHVIHYDRWWNPAVENQATDRAYRIGQKRFVHVHKLITTGTLEEKIDEMLERKQSLNNAVITSDSWMTELSTDELKELLGV

SEQ ID NO: 8248 - protein, 464 aa, Bacillus anthracis str. A2012
MNVDISIDRTWQNNFLNRIDEDGPWTNWDLYHLAYETEKSLLVPTFDGLQAPKHLSHFTPLPHQLEVAQNVIEQMNGKAILADEVGLGKTIEAGLILKEYMVRGLVKKVLILVPASLVSQWAYELNTKFFIPAVAQKKSYSWEQADVIVSSIDTAKRSPHRDIVLNLEYDLIIIDEAHKLKNNKTKNYEFAQRLKKKFCLLLTATPVQNKIDEIFNLVSLLKPGHLGNQSNFEEYYASKNRSAESDEDLKALINKVMVRNRRHNTGIDWPKRHVRTIFVEFNEEEQDLYNNIENWRGQDAFTSAFSSLTLKREACSSREAVYYSLKKHVEKRQKENEHYVKDPHIDILMDKINHIPFNSKANKALELIKEIDDKVVIFTEYRASQMYLQWFLQQHGISSVPFRGGFKRGKKDWMKELFQNHAQVLIATEAGGEGINLQFCSHMINYDLPWNPMRLEQRIGRIHR

SEQ ID NO: 8249 - protein, 1089 aa, Methanosarcina mazei Goe1
MIILHAGRVGKQFFLWGESPAENETPVVRRGRKPKTPIVKPYPYDSGFENLSSALELLLGSTDRKKAEKINVWTPTIGGNPVPSSPLVAEISDSKAEPALAPCTVHAYPLEAEEAIVLLCTCMEKKVLAPGIISGNDLLWWADALKFAGSLVAGQKYLPGVRGGEGEYRAFWEPVFSGEDAGKLAKLAKQMPPAARALAPEASSMPPEMPAALAAKQFIEDSLDWIVRSEIGEKKLAKETRKRKSFDSVHDAWVSALRSPEGLIYGDENELLQLAARTREWQRPLTILTTSPFRFCFRLEEPALEEEIEETEETEEIEENEAGKRDTKKGREGIADIEVPEGLWYVRYMLQSYEDPSLLIPVKEAWKPKKGSPLKKYDVKNIRQFLLSSLGQASSISAGIASSLEAPNPSGYSLDTKEAYRFLTESAANLSQAGFGVLLPGWWTRKGTKTHLKAQANVKGKKKLQAGYGLTLDEIVSFDWEIALGDRVLTVRELQALAKLKAPLVKFRGQWVEVNDAEIRAALEFWKKNPNGEASLREVLKLAVGVSEKADGVNVEGLNATGWIGELISRLKDKTGFEELPAPNGFSGTLRPYQFRGYSWLAFLRQWGIGACLADDMGLGKTVQTLALIQHDLEQAKEKAEEKIEEPAEEKIEEKVDGRKAPKPVLLVCPTSVINNWKKEASRFTPELSVMVHHGTSRKKEEEFKKEAMNHAIVISSYGLVQRDLKFLKEVHWAGVVLDEAQNIKNPETKQAKAARALESDYRLALTGTPVENNVGDLWSIMEFLNPGFLGSQAGFKRNFFIPIQAERDQEAARRLKEITGPFILRRLKTDTSIISDLPEKMEMKTYCTLTKEQASLYAAVLEDIREAIEGAEEGIQRKGIILSALSRLKQVCNHPAQFLKDNSTIPGRSGKLARLTEMLDVVLENGEKALVFTQFAEMGKMVKEHLQASFGCEVLFLHGGVPRKQRDRMLERFQEGKEYLPIFVLSLKAGGTGLNLTGANHVFHFDRWWNPAVENQATDRAFRIGQKKNVEVHKFICAGTLEEKIDEIIERKVQVAENVVGTGEDWLTELSNDELKDILALREEAVGE

SEQ ID NO: 8250 - protein, 442 aa, Streptococcus pyogenes SSI-1
MGVRLHEYQEYAKTWIVEHPYCGLLLDMGLGKTLTTLSAIDEIQNIFSEDHKILIVAPKKVAEETWPTEIGKWHFDFTYSKVLGSEGKRIEALETEADIYLINRENVTWLVEYYKTKWPFTFVVIDELSSFKSSKSKRFRALRKVRPKVQRLVGLTGTPAPNSLIDLWPQIYLMDRGARLETSQTRFKDKYFVPDKRNGLIIYSWALRDGAEAEIYNKIEDICVSMKAKDYLKLPPRTNNVVSVKLSNMKAYKQLEADLVLEFKNKEISAANSAVLANKLLQMANGAIYDDDKATVAIHDDKLDALENVVEESQGQPILVFYQYQHDLERLKKRFPQAEELTSVDKWNSGKIPILLCHPQSAGHGLNLQKGGHIIVWFGLTWSLEYYQQANARLDRQGQTEPVIVHHIVAENTVDEKVLRILQGKEKNQNALLEAVKAQLGV

SEQ ID NO: 8251 - protein, 1084 aa, Clostridium perfringens str. 13
MLVEDLLLQRFKEETTGRNYAKGQRIINNDLVESVEIEDEEDLVAVNGIVISEQLFSKYSTKLEIDIRSRGILSTYCTCTDYEKHEFSKENYCCKHLVATFYKALGDLAKKKEFEEDKNLFSKKKENKILDLILQEETDKEELKIEVYINKNEWSNSILAEFKIGTKSMSSNKLYILKDIEQFLVAYYNRIPIKYSKVFTFDIREQKLSTKDRELIEFIESLKEIEKPIKSFLRNRDTFIEGKSIKIPNYLVRDFFRVIKNHRIYLNEGFFYRAVESEVLFEDVPIDFSLKDSKNNFELSSLNGMPKVLGDRADVFLYGTNIYIPKKDFCYKIKNYLDIFSEGKVIKIDKCEEERVFRKLIPSLRDLTENVVLSKNIMNKTVLEPVKFNFYFDKEGKEVTLTLKVKYGSYEFNIFDDCKEKIIYRDIKKEKEVIALIERFSLEEINKKFYFYLGDEYIFRFFKYDVCKLQEYGEVYYSENFKGIKSLGSKGIKGDIKPGRYNYFEFDFKIGDIPSEETREILRAFRENLKFFKLKSGEFLDLEELELKQFLKLLDSVDNGDLEKNCLEINNSRALYIANYIEEKGIRYIKGKKKLNELKSKFKNINKLSFEVPKDLKANLREYQKFGYNWLKTLEHLGLGGILGDEMGLGKTLQAITFILSNKGKKTLVVAPTSLIYNWKEEFNKFAPNLVVEVLNEGKDKREEALRDIESKDVIITTYNLLKRDLEEYKKINFDYCFIDEAQAIKNPDSQNSEAVKEVNSEYKFALTGTPMENSLMELWSIFDFVMPGYLYDRKRFTVRYYKKLNESEEVLSEIHSLIKPFILRRKKKDVIKELPDKIEKMHLVDLGEEQKKVYSIYANNALSIMEKKQDAEEFNKSKIEILSYITKLRQLALDPSVTINDYMGESAKIEALVEILNQGVEEGHKILVFSQFTSVLKNISSRLKEEKISFSYLDGSVSSKKRINMVNEFNEGENSVFLISLKAGGTGLNLTSADIVIHFDPWWNPAVENQATDRAHRMGQKNVVEVIKLIAKGTIEEKVVALQEEKKELISKIIEEGELGAGSTFNTLSEEELMDLFKVDYLG

SEQ ID NO: 8252 - protein, 1034 aa, Corynebacterium efficiens YS-314
MTSHLLHGLWIKDRGLQLWIEQVEGHRIVLPEAVPAGTFPPVVDRILEGRTFRARMNVQLRTPKGRQVALPTPTAAFTPEEAVTVLAQLSFLQAELPAATRAQRETIAADLRWIITMHQGLTRFVQAGRVTLRTVMMDNAWWPQWQLAASLSERGWLAEMNNAAPGILLKNGGRDLAGTMANELPHWIANRILSDYRDEVLPYARHEFLDALLYNRPLRKGSTTLTHALNQWKNTISSAALQLVIIVEEPPAESDYEDPMDSIWPVRLMVRSGVDAPQPIQKHSLDTGGLESLRQQFETAKTISWLLDPARDDAIPAHEHNTVPTGDWDVFLNTAEIIDFIGHDVAKLKKAGITVMLPKAWSAYETRAKVEARTPGDPADSSTQSIIGLDQLVEYDWKISVGEVELTDDEMRELVESKTGLIRLRGDWVMADQDALRRITGYMDELSKSSRKRAKAEMEEAAMQAQLAEASGAEGWQLLAARAEELRQRFNEQFSGDGTGEVTLQELREIALKAAENEPVEFTGSQWYTSLLGGTETPAPRRVDIPETVTADLREYQRRGVDWLYWMSENNLGAVLADDMGLGKTLQLLSLLAVERAEHPDREPKPTLVVCPTSVVGNWAVEAAKFVPDLKVVVHHGPQRENGEAFLEKARRADLVVTSYGVVTRDFKLLGDVTFDRVVLDEAQAIKNSSTRISKAVRSLPSRHRVALTGTPVENRLAEMRSILDFCNPGVLGSASFFRNHFAKAIERDQDDEMTERLRQLTAPFILRRLKTDTAIIDDLPEKSEQIIRVDMTAEQASLYKALVDDVQQQLSQRQGMSRKGLVLATITRIKQICNHPAHFLNDGSPLTLRGRHRSGKVEALMDLLDDAVAQERRMLIFTQYTAFGQLLAPYLSDRLGVDIPFLHGGVSKLGRDRMVARFQAGDGPPAMILSLKAGGTGLNLTAASIVVHMDRWWNPAVENQATDRAFRIGQKNNVDVYKMITAGTMEESIQDILDGKMHLASAIVGEGEGWITELNPEELAALMSYREREGADV

SEQ ID NO: 8253 - protein, 886 aa, Corynebacterium efficiens YS-314
MDRTHLQTQLTAAQQHLNRAQQAQEVLRSLELPARVHIHRKIGFGEPDQSRIVLLRDADLDWSANFYTRVALDGLGAEEQLRRYLTATAVLPGLMETARAGTGGFLRRLFNPESIRRGEAALADLTTRVADLDRQLPGITPLIDTSTTATTTQRGGVHLFPGAHPVGQRYIDAARAEIARQLGEDAPGFHQWDGHHLASVHRLVHTYASDPNSQVRLRAEAERALSQINRQRVEILLEQLPVDALRTATNHRLRFGSLDTIGISTVADVLRASESLLATAQGIGHQTARHMKAAAQTLQQEALGRNTVLIGDTPTQAAVALIRILARFEQADALSPAERERRNRVIDYIQQLPAISATDTAGWIVVGAGPDQGDAAWNRITDDLAWVSANPNLFHPQHITPPPADIWDDYLTRPAHYQGLLATLLGREIEGVDEHLDTTVLQRIRELELDTTHLRDLHLRGYQSFGARFTVVQKKVLLGDDMGLGKTIQAIAVAAHLTAAEDTFRTLVVVPASVIVNWVRECRRFTDLPVFVAHGQDKEAAVTAWADTNGILICTYAGTRSLDIPAPGLIIADEAHMIKNPQSKRSQACARLIDAADYALLMTGTPLENKVSEFVALIRYVQPELITRGMSAMSAGDFRARIAPAYLRRNQTDVLDELPERTDSIDWIELTPADRVAYDDQVRAGNWMGMRRSAMLAPKPSATSAKMKRIIELLDEAEEHGRKTLIFTFFLDILDELEHVLGARVIGRIDGSVPAARRQELVDALADAPAGSALISQITAGGVGLNIQSASQVIICEPQVKPTIEQQAVARVHRMGQTATVNVHRLIGDDTADERMLEILAGKTQIFDVYARLSDTAGTPDAVDITEAQLAASIIDAERARLGLED

SEQ ID NO: 8254 - protein, 452 aa, Staphylococcus aureus subsp. aureus MW2
MAIDFKPHSYQKYAIDKVIDNEKYGLFLDMGLGKTVSTLTAFSELQLLDTKKMLVIAPKQVAKDTWVDEVDKWNHLNHLKVSLVLGTPKERNDALNTEADIYVTNKENTKWLCDQYKKEWPFDMVVIDELSTFKSPKSQRFKSIKKKLPLINRFIGLTGTPSPNSLQDLWAQVYLIDRGERLESSFSRYRERYFKPTHQVSEHIFKWELRDGSEEKIYKQIEDICLSMKAKDYLDMPDRVDTKQTVVLSEKERKVYEELEKNYILESEEEGTVVAQNGASLSQKLLQLSNGAVYTDEEDVRLIHDKKLDKLEEIIEESQGQPILLFYNFKHDKERILQRFKEATTLEDSNYKERWNSGDIKLLIAHPASAGHGLNLQQGGHIIVWFGLTWSLELYQQANARLYRQGQNHTTIIHHIMTDNTIDQRVYKALQNKELTQEELMKAIKARIAKHK

SEQ ID NO: 8255 - protein, 1034 aa, Corynebacterium glutamicum ATCC 13032
MTSHLLHGLWIKDRGLQLWIEQVEGHRIVLPEAVEKGTFPPVVEQILDGKTFRARMNVHLRTPKGRHVELPTPTAAFTPEEAVTVFSQLSFLKAETPAATRAQRDSIAPDLWWLIVMYQGLARFVQAGRVTLRTVMMDNAWWPQWQLSASLSERGWLAEMNHAAPGILRINGGRDLAGSMSNELPHWIANAILRDYRDETMPYARHEFVEALLFNHSLRKGSTMLTHALNQWKNTITSASLQLVILVEEPPAESDYEDPMDSVWPVRLMVRTGVDAPQAIQKGSIDSGGMEQLRSQYETAKTTSMLLDPAREDAMLGHMVDIAQNGDWDIFLTTEEIVNFISHDVAKLRKAGIPVMLPKAWSTYETRAQVEARTPNDAADSSTKAIIGLDQLVEYNWRISVGDIQLSDEEMRELIDSKTGLIRLRGDWVMADQDALRRITSYMEELSKSSEKRARTEMEKVAMQAKLAEANGEEGWQLLAAKAETLRKEFNEKFSGDGQGEVTLAELREIALKAAENEPVEFTGSQWFNSLLGGTETPAPVRVDIPDTVLADLREYQRRGVDWLYWMSANNLGAVLADDMGLGKTLQLLSLLAVERAENPELERGPTLVVCPTSVVGNWAAEAAKFVPSLKVLMHHGPQRLNDADFLSQSKGMDLIITSYGVITRDFKLMGQVGFERVVLDEAQAIKNSSTRVSKAVRSLPSRHRVALTGTPVENRLSEMRSILDFCNPGVLGSASFFRNHFAKAIEREQDDTMTERLRQLTAPFILRRLKTDPNIIDDLPEKTEQIIRVDMTTEQASLYKALVEDVQKQLDERQGMSRKGLVLATITRIKQICNHPAHFLGDGSEVTLKGKHRSGKVEALMELIDTAVKEERRMLIFTQYAAFGRILAPYLSDRLGTNIPFLHGGVTKPGRDRMVAEFQSEDGPPAMILSLKAGGTGLNLTAASIVVHMDRWWNPAVENQATDRAFRIGQRKNVDVYKMITVGTMEESIQDILDGKTHLASAIVGEGEGWITELNPEELAMLMSYREKEGADD

SEQ ID NO: 8256 - protein, 892 aa, Corynebacterium glutamicum ATCC 13032
MAESNAMDRAQISALLDRAQHTINLAEQANNVLRLLKTPGTATVGDNGTLGTDTYLIPSRNITWPDNLYVNVFLDGMNAEATLTDYVASVASIPRLCQIINEGQGGMFRRLFNPTKVQAGDQAVFDLMVKLDEISSTTHEVSRMLEGVHAARTRQQQGVALFPGIHGVGERYIERAQQVLASALGIAGFGAEPWDGHTLAQARRVVQRYAQDPNSEYRLKSEAEKHLTSINELRVQILLEQLPVDALRMATDHRLRFGSLDSIHVATVADVLKTHTSILTTVQGIGAQTAGRMKAAAETLKQEALRRQNTSIGDEPTQPAMRLINVLARFDQTETITPEERARRTRVIDYVEHIPPSLDPYIVINPATPEFNNFTDDLRWIDANPNLFHPQTITTPPADIWDDYISRPAHYQGLLATLLGRDIEGADELLDATTLQKIRDLTLDKTHLTDLHLRGYQSFGARFAIIQKKTLLGDDMGLGKTVQALSAAAHLAATEKDFRTLVVVPASVIVNWTRECKRFLNLPVFIAHGDNKQDAINAWSNTNGIAICTYDGVRTMDIPAPGLVIADEAHLIKNPSTKRTQALRKLIDAAPYTLLMTGTPLENKVEEFVNLVRYIQPELITRGMSKMQAENFRERIAPAYLRRNQADVLDELPERTDSIDWIDLTPEDRSAYDDQVRQGSWMGMRRSAMLSPTPRLTSAKMQRILELFEEAEEHGRKALIFTYFLDVLDELEKHLGERVIGRISGDVPATKRQLLVDALSHSKPGSALIAQITAGGVGLNIQSASLCIICEPQVKPTIEQQAVARVHRMGQTATVQVHRLIGDETADERMLEILAGKTHVFDVYARLSETAEIPDAVDITESQLAARVIDEERARLGLTESTGPKDEETALS

SEQ ID NO: 8257 - protein, 999 aa, Thermosynechococcus elongatus BP-1
MAIFHGTWLPEPAPQFFIWAEEWRSLAQAITPWAPPAIPVYPYATQRKTPLRKTARPSATYVALPAQIQGHQLLPPPLAEVQGELLFLWQVPGWSIPASEVLEQLHQLSLHGQDSGSIGDDLRYWLHVSRWLLDLIVRGQYLPTPEGWRILLTHGGDRDRLRHFSQLMPDLCRCYQADGTALQLPPHAADLLADFLQHTLQGYLHTALADLELPKVGLAKEHGHWLAFLKTGQTPELPPPLIERLHRWQEPYREQLHLRPQWRLALQLVPPDTADGDWHLAFGLQTEGETDTMLRAAEIWQCTQEALLYQGQVLWQPQETLLRGLGLASRIYRPLDRSLQERSPVALTLHTTEVYAFLQSAIAPLEQQGVAIILPPSLRRNSAQHRLGLKIIATLPPPATNGLTIDSLMQFQWQLQLGQHPLSEADFDQLRRQGTPLVYLNGEWVLLRPQEVKAAQEFLQSPPKTQLSLAETLRIATGDTVTVAKLPILGLDTNDALQTLLDGLTGKQSLDPVPTPQEFCGELRPYQARGVAWLSFLERWRLGACLADDMGLGKTIQLLAFLLHLKETGRAYRPTLLICPTSVLGNWLRECQKFAPTLRAYVHHGSDRPKGKAFLKKVETHDLILTSYALLQRDRTTLQQVLWQHLVLDEAQNIKNANTQQSQAARELSAQFRIALTGTPLENRLLELWSIMDFLHPGYLGHRTYFQHRYVRPIERYGDTTSLNALRTYVQPFILRRLKTDRSIIQDLPEKQEMLVYCGLTLEQMQLYTAVVEDSLAAIENSQGIQRRGNILATLTKLKQICNHPAQYLKQEDYAPDRSGKLQRLIEMLQALQEVGDRALVFTQFAEFGTHLKTYLEKALQQEVFFLSGRTPKAQRELMVERFQHDPEAPRVFILSLKAGGVGLNLTRANHVFHYDRWWNPAVENQASDRVFRIGQARNVQIHKFICTGTLEEKIHEQIEQKKALAEMIVGSGEHWLTELNLDQLRQLLTLDKERLITL

SEQ ID NO: 8258 - protein, 1032 aa, Streptococcus pyogenes MGAS315
MMARLIPGRVRNEGIKLYEQGLVSFQDDNKGILQIEVETYQVQYGADDEDITCQCDTFHMKHYCKHIAAVEYFLKNDQKGKLFLKQLTNQTKIKETTKKMTSFGSLFLDSLAMNEDDSVKYRLSALGSRSPFSSDYWWSLKINRLPDDRSYVIRDIKGFLQLIKKEGFYQIGKNYFEQLSWLQFDPSSQDLIEFLWRLASDTDKGDNENIFPNHARHLRLPSGFFEEGVHYLTSLYDFTFEGPSQTYHHLFVRSLEAEAGLYEFKVEVHRKSIELQIAEKNVQYLFDNDYLLYQDTFYHLTLKQRKMVQAIRSLPIEADLAKHIHFDLDDHAKLAASLSDFKQIGLVEAPKSFAIRDFEVTFQFDLLNRDEISCQLMFDYGNYQVSDKASLEALPFASHLKKEEKINRSLLAFGFSPQFYSKKRLTSAKELYTFFEETVPCFERLGNVALSTAIQALQVKEMPKIAIKRNQGLLDISFDFSTIIENDIDQAVTALFQNNPYFVSQTGQLVVFDDETQKVSKSLQELRARQLKNGHLQLDGIRALQVSKLFEGMTSVHFSKELEELAYHLQHPETFSIKPLPVKAQMRDYQRNGVQWLSMLNHYGFGGILADDMGLGKTLQTLAFLASHLKSDSKVLILSPSSLIYNWFDECQKFTPQLDVVVSYGLKQTRDQIIEEGHQITITSYSSFRQDFETYQAFHYDYLILDEAQVIKNAQTKISHCLRAFNTANCFALSGTPIENKMLEIWSIFQIVLPGLLPTKKEFLKLTAEQVSRYIKPFVMRRKKEDVLPELPDLIETNYSNEMTDEQKAIYLAQLRQMQDQIRNSSDVDISRQKIEILSGITRLRQICDTPSLFMDYQGESGKLDSLRILLTQIKENGHRALIFSQFRGMLDLAKQEMTALGLTSYQMTGSTPANERQEMTRAFNNGSKDAFLISLKAGGVGINLTGADTVILIDLWWNPAVEMQAISRAYRIGQKENVEVYRLITRGTIEEKILELQESKRNLVTTVLDGNESRASMSIEEIKEILGLNTH

SEQ ID NO: 8259 - protein, 440 aa, Streptococcus pyogenes MGAS315
MRLHEYQEYAKTWIVEHPYCGLLLDMGLGKTLTTLSAIDEIQNIFSEDHKILIVAPKKVAEETWPTEIGKWHFDFTYSKVLGSEGKRIEALETEADIYLINRENVTWLVEYYKTKWPFTFVVIDELSSFKSSKSKRFRALRKVRPKVQRLVGLTGTPAPNSLIDLWPQIYLMDRGARLETSQTRFKDKYFVPDKRNGLIIYSWALRDGAEAEIYNKIEDICVSMKAKDYLKLPPRTNNVVSVKLSNMKAYKQLEADLVLEFKNKEISAANSAVLANKLLQMANGAIYDDDKATVAIHDDKLDALENVVEESQGQPILVFYQYQHDLERLKKRFPQAEELTSVDKWNSGKIPILLCHPQSAGHGLNLQKGGHIIVWFGLTWSLEYYQQANARLDRQGQTEPVIVHHIVAENTVDEKVLRILQGKEKNQNALLEAVKAQLGV

SEQ ID NO: 8260 - protein, 1087 aa, Clostridium thermocellum ATCC 27405
MDIFNINEKIILRHASNNETYKMGLLYNLNHRVRRFEFDNDKLVINAVVRGSEDYDVSIYFNECGDICDYECTCPAYYSYSGACKHIVAVMKMAQSELLKYKYYKYDNYGDSKKQGKNTIEDLFAFFDGLLDEHTKQEVQIEVSYEFNRDYFSSYISSVELRLGIGRLYIVKNMKEFLDHIYTNTPLEFGKNFTFDPAKHTFSEGDQKIINILMEIYENEKHLEQRLKYTYQSMPSAFFDKKVLLSTPYLLRIFDALKNRNFYAKVLDYGEKLVSIAEEDLPLDFSLSRKNNEVLLHLKESRSFVPLTEKGVYFYYNGRIYRPSEKQQKYYIPFISRLLGGKTDTLTFSAAQTERFVSEILPHIHKIGRVSIDKEIEDKLVKEELVAKIYFDKYKEGISAVINFHYGQLVVNPFSGQNYISDPDKIVVRDTESERKIIEIFEAAEFLVDKNIIYLTDENKLFEFLRNDLPRLQELAEVYYSDAFKNISVRFPPSFSGGIRINQASNMLEFSFDYGDIDKSELEHIFSSIKEKKKFYRLKDGSFLSLDLPELKSMSNLVEQLDIKVKDLSKKVIELPKYRAMYIDSLLREANMNGIERSLDFKHMVQNIKEPGDMDFEIPEKLKNILREYQKVGYKWLKTLAYYGLSGILADDMGLGKTLQVIAFILSEKNKAAAPSLVVAPTSLVYNWQEEVKKFAPELKVLVISGSVSERHEKFEKIKDADIVVTSYPLLRRDIDLYRNIKFQYCFLDEAQHIKNPNTLNARTAKQINSEMNFALTGTPIENSITELWSIFDFVMPGYLLSHSKFVKKFETPITKHSDQNALNELGRHIRPFILRRLKKDVLKDLPEKIETKIVCEMTTEQKKIYLAYLKKAKAEVAMELQTNGFEKSQIKILSLLTRLRQICCHPSLFIENYSGESGKIQALEEIMTDAFDSGHRILLFSQFTSMLEIIKQFLDQKSVEYFYLDGSTKAQDRVEMVKAFNQGTGKLFLISLKAGGTGLNLTGADMVIHFDPWWNPAVEDQASDRAHRIGQKNVVQVMKLITQGTIEDKIFELQQKKKEMIDSVIQPGETFLSKMSESEILELFEL

SEQ ID NO: 8261 - protein, 452 aa, Clostridium thermocellum ATCC 27405
MGCSAPDGNGLKSTGKTLVSIAIIGALLAAGRIKRVLIVAPLSILGVWEDEFKRFADFPYQLIVLNGTIQKKIQQLRFLTGEGVHVVVVNYESAWRMEKELANWHPDLIIADEGHKIKTHNTSVSKAMHRLGLLARYRLLLTGTVITNKAIDVFSQYKFLDPRIFGNSFYAFRNRYFNMVGYGNHTPVLKKSMEQDLMKRIHSIAFRATKAECLDLPETTDIIRHIELEPVTLKKYKELVKQSYTELSAGEVTATNILTRLLRLSQLTGGFIGSDDGGKIEQVSDAKLKALEDILESSIQEGHKLVVIARFIPEIHAICRLLEKKNIGYACIYGATKDRQEQVNRFQYDPDCMVFVGQIATAGLGITLTAASTMVFYSLDYSMSNFEQTKARIHRVGQKNGCTYIYLIAKGTVDSKILTALRNKADLAKMLIDDYRKGANPFAPEGGESYER

SEQ ID NO: 8262 - protein, 375 aa, Clostridium thermocellum ATCC 27405
MKQLNAPYNLLICQKSKIKDWEEHFKDYYNLQIIIFKNQSIESIPQNSVIIINYDLVWRRKQLQKLKDFTLILDESQYIKNETSNRAKFILSLNPANIILLSGTPTGGKYEELWSQLRLLGWNISKSSFYNHYTITEKIDVGGFKIPVVKGYKNVDRLKEKLKSYGAVFMKTEEVFDLPEQIEQVVTIENSKEYKKFKKDRVITIDGETLAGDTALTKLLYLRQLTSIYNSNKHQVLKDIFESSNDRFVIFYNFKREFEIIKNICFKIDRPISYINGDGTDLENYENKSNSITLVQYQAGASGVNLQKANRIIYFSLPLSSEFWMQSKKRIHRIGQNRTCFYYYLITENSIEEKILEVLKQRRDFTVELFEKEML

SEQ ID NO: 8263 - protein, 1038 aa, Trichodesmium erythraeum IMS101
  unsure (1)..(1038): unsure at all Xaa locations
LDNPDFLVDAKTIWENPVASLNYQGKTIKLPQETLLKGLGLASRIYPIIEPSLQEATPQYCLLTSQQAYDFIKSGSGRFIDSGLGVILPPSLANREGWASRLGLSIQATAPKMKKTEKLGLKSLLNFKWQLSIGGHKLTKAEFEKLVSQDSPLVEVNGEWVELQGQDVRAAKNFFASRKDQMSLSLEDALRLATGDTQTVEKLPVVNFEAGGQFQELLDTLTNNRSLEEVSTPENFRGELRNYQARGVSWLSFLERWGLGACLADDMGLGKCVLHDTEIYVNGMVMEAEQIWQAYAGEAEFDGEGFWTEPNKELLVNSLDETTGKIVFARIRRLYRQWVREKLRKVRLKDGSSITITCRHKLFIRDSWKNDFQVGDDVCVPAKLMWDGKPEDPDVVKFVAWQVAEGWERVNSGMFGVSQKGKDVLEGLLEVFSRLGKRYDIKINCPKVVAHGSKKNCYEFSAHSLEYRKFLEEKRYGWGKRSHEKTIPLFIMQADLDSVRVFLSNYFDAEGWVNKTVRCVEISTASSQLIQELSILLRRFGVWMKISPQQKCATNGTGVFCTYYIGTFGGNSARCFLQEIGFNDSGKQENLKSICEKIADSNVEGIPASDIVAELVEKTQLPVGSLGIQDPIYMDGCQDFSPTSLEKVINSIEDIISGAGEEEYGQLKSSKLRNKTLEAYSLLNILELEIYKTRLQKLLNQEVYYCQIESIEEMEYEGWVYDFEVSKYHNFVANNIICHNTIQTIAFLLKQQEQKALKGPTLLVCPTSVLGNWEREVKKFGPTLKAIVHHGDKRAKGKGFATAVKDTNLVITSYALLHRDEKILETIKWQSVIVDEAQNIKNPEAKQSQAARKLDASFRIALTGTPVENRLSELWSILDFLNPGYLGQKQFFQRRFAIPIEKYGDTSSLQILRSLVQPFILRRLKTDKDIIQDLPEKQENTIFCPLANEQALLYQNXXXXXXXXXXXXXXXXXXXXXXXXXXXXXXXXXXXXXXXXXXXXXXXXXXXXXXXXXXXXXXXXXXXXXXXXXXXXXXXXXX

SEQ ID NO: 8264 - protein, 153 aa, Trichodesmium erythraeum IMS101
MGKGLQPYLQKSLGREVSFLYGSTQRSKREEMIDQFQLDPQGPPVMILSLKAGGTGLNLTRANHVFHFDRWWNPAVENQATDRVFRIGQTRNVQVHKFVCTGTLEEKIHDLIESKKELAEQVVGAGEKWLTELDTDQLRNLLILDRNQVIKEE

SEQ ID NO: 8265 - protein, 653 aa, Mycobacteriophage Barnyard
MTSSTATRTLRMRMGKHSQKPLIWVTFAYDPEVTEMLKDTVQGIRWVRKDGMWTAPLDMETARDIRAVCRHFGGTLKIEPELGVWATKEKQRLANLLKPDDMVGDHDKLLPYLRQHRPEIVKAMADRKPWQIPGAAFVVSQKEVVIADQPGLGKTLQVIAALLEMQTRGAILVVAPKTAVEVTWPDEIARWIGPNENVFVINSEAKPDERKARVLRAKALAEQGERVWVLTGSSYIRIKAEFDDYGNYLRDEKKQKIVRAVGHTVADLFRMSFSAVIVDESQEVLACSTGNKKKWSAQRTGMGALDIVPGAPRIAISGTPFRGKTENIWGTLNWLAPKKYTSYWKWVRRHYGVVDNWDSGEAHMEKGDTIRDEKRFFSELRPILIRRTHAELRRQGFITGEKLYGGTPLDPNDPKSPVAVWLPLTPKQQKQYDQILKDAVITLESLAGEKDEVVVNGSLAEMVRLKQVAGSALGLDVKPELPSNKIEWIKNFLSERISAGTKTVVASQFTQFLELLSRECDKAGIRHYLYTGKTVGSERARIKHEFQSESGEMVVLLNTKSGGLSLTLDAADDVVVCDQTWIPDDQEQVENRAYGRERDHNVNIWNLCSLGTIDEDIAVLNLQREGDIFAVLDSARGVSYVKQLVSMTQDRAA

SEQ ID NO: 8266 - protein, 1394 aa, Bifidobacterium longum DJO10A
MSKGYGVFGHVPDNADDDGLLPYEDDDSGVSWGHALRRRNPWKRGDDEDADYDDGRYDIDDTDDTNGGRGIYAGKSGGVGGISGETGGILGSSGAAGSRDVTFGGTDSLSAADAVMPYRFRQGRSVWFDDEDEGHFAGSAKRAEAHAVPILALRNDVESSSSNAVLARARSIARKAATMVINPVYSENHRTGYAELDGILRGTTSPSSRYRTSVQFDLDTGEAVGGKCSCPAYGRGYGMCKHMIALAFIFCDDPQRFEGYRAGAARPSRTLIDYMEHADRQDAQAKIRRRNAVMRRFDATQGKNGANARRTKSGYGSRAGTRGGGYQGDSETVGLGQVQLVPILSFIDGVWSVEFKIGSASNGSSYVLKSIPQFVLAMANGDYADYGQKLAFIHTPDMLDDDSRPLLDVLDDAMAVRRAAEQQDRYYGHIAIDRHLTLSAPEVARLLSVREGRGVQLVLNTWFSGQPASVPVDGGEPDFLMRIARRDFNTYGPDAGYLLTGVPAVETVIDGGKNVWLLLASTNPAGAVSAMVAGSQRKSAAGCRFVRCPKRLIPLRGLLGDLFEPDGEGQVIAGDDIALFARTLLPQLVGAGLLEASEIPRELAELSPTECSLQFYLDRDEHGVQCEVKARYGDAIVPLLPDGPTVHAEGERSIPLSRGVIGRDFDAEHLAIDVVREFFTMPDQRKRVAAATHQTVNGFRTPAARKATKKFVSDAATIDRDDTTQIVRLFDEGLPALKEVGEVFTTPAFDRLIAPKPPSVKVGLSIKGNLVEISPLADEVPPDEVGALLSSYRRRQRFHQLKDGTLVKLSGANLSTLDRLASDLDLSEQQLNSGLIELPGGRAFLLDGELPDDGSDVVKDASFTEYIDDLKIIDPKSYEVPDSLKHILRPYQVEGFQWLNTLCDKGFGGILADEMGLGKSVQLIALLLSRYQRNAGEMGDGSLGPSLIVCPASLVYNWGAEFTKFAPSFNAVVVAGTKAERRTAIGRAFRADEPTVLITSYDLLRRDVDDYTANEQRFNVMALDEAQYIKNHTTKIAKAVKAVAADHRFALTGTPIENRLSELWSIFDFLMPGLLGSYKRFHERYELPISNARAADGSTAEGRAAAQVNPEAARVSRQLQSLVGVFIKRRLKSQVLTDLPDKLETTLTVRLAGEQRKLYAAHEQRLRMQLEHSEEADFNTSKIRILAELTKLRQICCDPRLLYADAKDQSAKLAAITELVETCVNEGKKALIFSQFTSFLDLIAERFDAQGLRYYTITGSTPKKKRLELVDQFNADDTPAFLISLKAGNTGLNLTGASVVIHADPWWNAAAQDQATDRAHRIGQTEDVNVYQVVAKDTIEERILELQHTKSELARQFTDASLLADEAGTGASALTEAPASIATLTKDDLLNLLG

SEQ ID NO: 8267 - protein, 880 aa, Pseudomonas syringae pv. syringae B728a
MLEDSSPQIIRTACRGSGLEIYTQTLLFKDPDRYKNYLTCKCTCPVRNDCKHCVAALLFLQDPHNRPLLQAALASHQQEMEKPVEQKPRLPERLIDDLQPRPRLILASIEFSAYEPRNGRMQRHIQHRAALAFAYGKHYAVGTTNVSILVSSLGSDLVNQKSDIIEHTDTETLRIRRQGERERQLRQELADLGFKVATRQSKALPDSAGDMYELPNDKAWLHFVLDDLPRLREQGWEIDIQEEFGFDVTPVEDWYAVIDEENERDWFDLELGIIVNGERLSLLPILINLIRSHPELMSPSAVAKRGDEEQLLVQLNHFTQSGGSPVQIALPYGRLKPVLATLGDFYWRQEGNNALRMSKADAARLTQLEDLPLTWQGGDRLRHFAERLINIKDAPVSLPDGLNATLRPYQLEGLSWMQSLRELEVGGVLADDMGLGKTLQTLAHLLMEKQAGRLDRPALAVMPTSLIPNWLDESEHFTPDLKVLALYGANRHQDAGNLQDYDLILTTYALLPRDLELLEKQPFHVLILDEAQYIKNPNSKAAQAARNLNARQRLCLSGTPLENHLGELWSLFHFLMPGWLGNSKEFNSNYRTAIEKHGNQDRLHHLNARIKPFLLRRTKEQVATELPPKTEIIHWVDLNDAQRDVYETVRLAMDKKVRDEITRKGVARSQIIILEALLKLRQVCCDLRLVNQDMPVNSKQGTSGKLNSLMEMFEELLAEGRKILLFSQFTSMLSLIEEELKQRGIAYALLTGSTRDRRTPIHDFQSGKLPIFLISLKAGGTGLNLTAADTVIHYDPWWNPAAENQATDRAYRIGQDKPVFVYKMIARGTVEEKIQRLQREKSALASGVLDGRTTGDWKLRDEDLQALFAPLPAAPKKTRK

SEQ ID NO: 8268 - protein, 650 aa, Pseudomonas syringae pv. syringae B728a
MASAQLMNKRPVLLRKAIFDGYDFGLSLSYLQGANKLLLRRRGFFIRRSDHPLNQFWRVPKDKLLDDLDVLYRELAELADGKHIESWQAFRDRITSAQSDVHRDAFTWGMKFRLAPLAEGGVILSGDFHPGAVAIAKRMRGVFLSAGKAWRVQGTPELVRSNLILELGLDEDQFEILDTLQELLADGSVKAVNEVTSISLGGHSPESTKSEEEVSDSGIYLASVPSIKNTELTSADIDKALEGFSLMDHQPAGIKHLLQRTSALLADDMGLGKTRQAVIAAGIRAQGKPVLVIVLNSLIINWQREILMVFPQAQIAMQTFDASAGWIIVNYERLGDFVMHASRFAVMVIDEAHRLKEPTAAWTRHGFDIAAQVQNRYLLTGTPVLNREAELHTLLRLSGHPIGQLPLNEFCERFAGSPEFRKTLRDEISDWMLRRRKDVLPNLKGKQRQTVPVILSQIERDEYNQIMRSDQHRFARLGALRQLLERVKVRILADLMAELDVDDKVILFCEYQESVATLREHCIKMGVGCVTLVGSDSPKKRQKAIDAFQQDPDCRVFIGTRSAAGTGYNLTAANYVFFLGLPWTPGLQDQAEDRAYRNGQLRMVVVKIPLAEDTIDQQLWQMLMDKRALASDLIDPEAEESSKKALAEIL

SEQ ID NO: 8269 - protein, 896 aa, Pseudomonas fluorescens PfO-1
MPPPLSKPLASSWVSRFKEQSLERGRRYALENRVRFVQVGDATITASCEGSGGNVYRQTIHLRESAKGTLLMVDATCTCPVHSNCKHCAAVLLQVQETLEYPAAAKDAELLEKLQAVLENRSPKSPPQVLVDNVQPVPRLWLASVEFSAFEPRNGKMQRYIQHRAALSFSYLDEYVSGQKNSDILIRQEAQTLRVKRHPDVEQSYREQLRILGFRIATRQSKALPESAGELYEMVNDSAWLTFTLNDLPKLRTQGWELLVDDEFGFDLTAVDDWYATVEQTPERDWFDLELGIIVNGERLSLLPILLNLMRSHTEILNPERLARRRDDELILVNIPQRNSEHGPLQVALPLGRLKPVLATLGEFYLQEPGETTLRLSKADATRLNSLEGIPLLWEGGEQIRSFAQRLRDIRDYSAKAPKGLNATLRPYQLEGLSWMQSLRQLEVGGILADDMGLGKTLQTLAHILSEKNAGRLDRPCMVVMPTSLIPNWLDEAAHFTPQLKVVALYGASRKKHFEHLADYDLILTTYALLPKDVERLAQQPLHVLVLDEAQYIKNPNSKAAQAARELNARQRLCLSGTPLENHLGELWSLFHFLLPGWLGDLKSFNADYRVPIEKRASEVRLQHLNGRIKPFLLRRTKEQVATELPPKTEIIHWVELNEAQRDVYETMRLAMDKKVRDEITRKGVARSQIIILEALLKLRQVCCDLRLVNDATLPARGSTSGKLDSLMEMLEELFEEGRRILLFSQFTSMLSLIEDELKKRNVAYALLTGQTRDRRTPVKEFQSGKRQIFLISLKAGGVGLNLTEADTVIHYDPWWNPATENQATDRAYRIGQEKPVFVYKMIARGTVEEKIQLLQREKSDLAAGVLDGRKAGDWKLQSDDIEALFAPLPDKFEKR

SEQ ID NO: 8270 - protein, 1394 aa, Bifidobacterium longum NCC2705
MSKGYGVFGHVPDNADDDGLLPYEDDDSGVSWGHALRRRNPWKRGDDEDADYDDGRYDIDDTDDTNGGRGIYAGKSGGVGGISGETGGILGSSGAAGSRDVTFGGTDSLSAADAVMPYRFRQGRSVWFDDEDEGHFAGSAKRAEAHAVPILALRNDVESSSSNAVLARARSIARKAATMVINPVYSENHRTGYAELDGILRGTTSPSSRYRTSVQFDLDTGEAVGGKCSCPAYGRGYGMCKHMIALAFIFCDDPQRFEGYRAGAARPSRTLIDYMEHADRQDAQAKIRRRNAVMRRFDATQGKNGANARRTKSGYGSRAGTRGGGYQGDSETVGLGQVQLVPILSFIDGVWSVEFKIGSASNGSSYVLKSIPQFVLAMANGDYADYGQKLAFIHTPDMLDDDSRPLLDVLDDAMAVRRAAEQQDRYYGHIAIDRHLTLSAPEVARLLSVREGRGVQLVLNTWFSGQPASVPVDGGEPDFLMRIARRDFNTYGPDAGYLLTGVPAVETVIDGGKNVWLLLASTNPAGAVSAMVAGSQRKSAAGCRFVRCPKRLIPLRGLLGDLFEPDGEGQVIAGDDIALFARTLLPQLVGAGLLEASEIPRELAELSPTECSLQFYLDRDEHGVQCEVKARYGDAIVPLLPDGPTVHAEGERSIPLSRGVIGRDFDAEHLAIDVVREFFTMPDQRKRVAAATHQTVNGFRTPAARKATKKFVSDAATIDRDDTTQIVRLFDEGLPALKEVGEVFTTPAFDRLIAPKPPSVKVGLSIKGNLVEISPLADEVPPDEVGALLSSYRRRQRFHQLKDGTLVKLSGANLSTLDRLASDLDLSEQQLNSGLIELPGGRAFLLDGELPDDGSDVVKDASFTEYIDDLKIIDPKSYEVPDSLKHILRPYQVEGFQWLNTLCDKGFGGILADEMGLGKSVQLIALLLSRYQRNTGEMGDGSLGPSLIVCPASLVYNWGAEFTKFAPSFNAVVVAGTKAERRTAIGRAFRADEPTVLITSYDLLRRDVDDYTANEQRFNVMALDEAQYIKNHTTKIAKAVKAVAADHRFALTGTPIENRLSELWSIFDFLMPGLLGSYKRFHERYELPISNARAADGSTAEGRAAAQVNPEAARVSRQLQSLVGVFIKRRLKSQVLTDLPDKLETTLTVRLAGEQRKLYAAHEQRLRMQLEHSEEADFNTSKIRILAELTKLRQICCDPRLLYADAKDQSAKLAAITELVETCVNEGKKALIFSQFTSFLDLIAERFDAQGLRYYTITGSTPKKKRLELVDQFNADDTPAFLISLKAGNTGLNLTGASVVIHADPWWNAAAQDQATDRAHRIGQTEDVNVYQVVAKDTIEERILELQHTKSELARQFTDASLLADEAGTGASALTEAPASIATLTKDDLLNLLG

SEQ ID NO: 8271 - protein, 1118 aa, Desulfovibrio desulfuricans G20
MINIYQSSVALKTVRFSPSTRNGLAPHAMHTRGGSCCSRHKKAAKELDHTMDRKEETTVKTMLQEFVTDTIPEYIIDGSHNILNSGGVLKLSLKKGEGYWDVEAHIQGDDFQNYSPKLSLSIGEETVNYMCNCPDSFSGVCRHVGAAALKLLASLETSDDAEPVAPKTEWRQSFRNFFSTELEPEAGKHYLIFRFHPEPGRLQVSLFRARQNKSGLSTVHNEITLEQIIRNPDWCELSPDLPAVAHQIGQYLDYHGHRIEIPDGLLTWFLWTIRNEYYLFWQETEKPCHIDSSTMRLKLQPRLAEDGLGFDVLLHREGKPPQSILDSEVTFHGQLPLWVCWRRGFYPVHTSLSSGLVQEMVQHPPAIPQEDISEFLDRVWTQLPASDLYGQEEFLEHMEPIFVPASYNPKLYLDEEGSLLTLQIQNIYETIHGEFLLPGPNPEFQTGSYPFEGHTFLLRRQQEEEAALTQKLIEMNFQPRNNRVWFLEPEEAINFLLDAYPKLIAEYRVYGEKALSRYKVRLSQPVISAKVESNEEEKWFSLDLNVEYDGQSVPIEKIWKAWTQGKRYVQLKDGSYTSLPESWLKTLGHKLRAMGLDPEKAPKKRFEQYEAPLLDNLLEDLPEVQTDSFWNALREKIHTFKEITLIEPPQGLNATLRGYQQQGLSYLNFLREYGFGGILADEMGLGKTIQTLSFIQYMVETGRTGPNLIVVPTSVLPNWDREAEKFVPGLRRLIIYGTRRENMFSHISESDLVITTYALLRRDLEELQEHEFNSLILDEAQNIKNPNTITARSVRKINAGLRICLSGTPIENNLFELWSLFEFLMPGFLGSQHSFQRGIIKPIKDGDPETLEYLRTRVKPFILRRTKSEVAKDLPPKVENVYYCALAEEQQELYGALAKKLKDQVMADVDEKGIAKSQMSILDALLKLRQICCHPRLLKLDMPGLTTNLPSGKFDAFKDMITDIVEEGHKVLVFSQFVQMLHIIRSWLQINDMPFCYLDGTSKDRFDQVDRFNDSPDIPIFLISLKAGGTGLNLTSADYVIHYDPWWNPAVENQATDRAHRIGQKNQVFAYKMICQNTVEEKILKLQDMKRGVADAIIPGQDSWKSLTRDDLEMLFDV

SEQ ID NO: 8272 - protein, 1032 aa, Streptococcus agalactiae 2603V/R
MSRMIPGRIRNQGIELYEQGLVSLISQEGNLLKAKVGDCQIEYSLVTEETKCSCDFFARKGYCQHLAALEHFLKNDPEGKAILSKVQVQQESQQETKKKTSFGSVFLDSLIINEDDTIKYQLSAQGEQNPYANDIWWTLKIRRLPDDRSYVIRDIKAFLNTVRKEAYYQIGKQYFETLSLIQFDETSQELIEFLWRLIPSHSSKIDLEFILPNQGRHLSLTRGFFEEGVTLMNALENFSFESDFHQFNHLYFKELEGEDHLYQFKVIVHRQSIELEIKEKDLKPLFANSYLFYRDTFYHLNLKQEKMVTAIRSLPIEGDLAKHIHFDLDDQDKLAAHLLDFKEIGLVDAPRSFSIHDFKVNFEFDINSQNEILLQMVFDYGNDLTVHNRQELEQLTFASHFKHEEKVFKLLEKYGFAPHFSTSHPAYSAQELYDFYTYMLPQFKKMGTVSLSAKLESYRLIERPQIDIEAKGSLLDISFDFSDLLENDVDQALVALFDNNPYFVNKSGQLVIFDEETKKVSATLQGLRARRAKNGHIELDNIAAFQLSELFANQDNVSFSQHFYQLIEDLRHPEKFKIPGLSVSASLRDYQLTGVRWLSMLDHYGFAGILADDMGLGKTLQTISFLSTKLTRDSRVLILSPSSLIYNWQDEFHKFAPDVDVAVAYGSKIRRDEIIAERHQVIITSYSSFRQDFETYSEGNYDYLILDEAQVMKNAQTKIAHSLRSFEVKNCFALSGTPIENKLLEIWSIFQIILPGLLPGKKEFLKLNPKQVARYIKPFVMRRRKEEVLPELPDLIEMNYPNEMTDSQKVIYLAQLRQIQESIQHSSDADLNRRKIEILSGITRLRQICDTPRLFMDYDGESGKLESLRQLLTQIKENGHRALIFSQFRGMLDIAEREMVAMGLTTYKITGSTPANERHEMTRAFNAGSKDAFLISLKAGGVGLNLTGADTVVLIDLWWNPAVEMQAISRAHRLGQKENVEVYRLITRGTIEEKILEMQETKKHLVTTVLDGNETHASMSVDDIREILGVSK

SEQ ID NO: 8273 - protein, 663 aa, Pseudomonas aeruginosa PAO1
MFELPGDNAWLHFMQDDLPRLRQQGWFIDIRADFAYDLTPIDAWYAEVEEADDRQWFELELGIQVAGQRVSLLPALTELIRRSPALLDPRALARHADEEQLVLRLELNPPLRVALPFGRLKPVLAALSDFYLGDPEPQRKLRLGAPDAARLADLDELPLAWEGGDNLRDFARRLRSFQARPATPPQGLRAELRPYQLEGLSWMQTLRELDSGGVLADDMGLGKTLQSLAHVLLEKQAGRLDTPALVVMPTSLIPNWLDEAERFAPDLRVLALHGAGRRRDFARIDEHDLVLTTYALLPRDAAELGKRRFHLLILDEAQNIKNATTKAAVAARELAARHRLCLTGTPLENHLGELWSLFHFLMPGWLGDARQFAQDYRTPIEKHGDEARLSHLAARLRPFLLRRTKEQVASELPPKSEFTQFVELSEAQRELYETVRLALDRKVREEIARRGLARSRIVILEALLKLRQVCCDTRLLQRQEDGARSGRALSSGKLAYLLDMLDELIAEGRRVLLFSQFTSMLALIEDALRQRGVDYVLLTGETRDRRAPVQRFQSGKVPVFLISLKAGGVGLNLTAADTVIHYDPWWNPAVENQASDRAYRIGQDKPVFVYRLIARGTVEEKIQHLQQEKAALADGLFSEGNGDGWKLDEADIDALFAPLPKAL

SEQ ID NO: 8274 - protein, 497 aa, Choristoneura fumiferana MNPV
MDNYKLQLQEFFAAGDVADDAPSLDAPNLLEHQKRGIEWMRRREKRGRPHGGVLADDMGLGKTLSMLMLIANDDLAHKTLIVCPLSLLNHWTVEAGKHNLPLDLRQFHGGNLDEPFDEPRVVVTTYDTLRAHYKHLKAEARESGLLARHWHRVVLDEAHVIKNHYTDVHAAACALNADNRWCITGTPIHNRHWDMYAIIHFLRCRPFDNVNVWRMLNRNNDTNRIKSVVNKIVLKRKKTEVTLDIPQHSVEYVHVKFDEAEKHVYDSLKNESQRAYDDAVAGGDKLRSMQDVLWLLCRLRQMCCHPALTKCSAMFKEHARIFEPAYESSKCRRVLELVQGVLDTMDDKVVLVSQWVEFLQLVAGLLRQRGVPVLLYTGTLRVEERTAVENQFNAADSRYRVLLMSIKCGGVGLNLTGGNHIIMLEPHWNPQIELQAQDRIHRMGQKKRTFVYKMLVDEENSIERYMKARQDKKLTFVNKVFDRSALNYEDIKKFFSL

SEQ ID NO: 8275 - protein, 600 aa, Mycoplasma genitalium
MKLTSNLLNYKQLHFSISDIKALKIEDRQLKIEFKAGGIDLKLIKSVLSNYYKGNAICIGEDGWYDLNDENAKALISFWSQIDLRNATCDANNNLLLAKYHLFEVVDTISKYTDVTNLLDEKTALQLKIASENQFHLSLDNNQINNLRKYQKEGVKWIRALEDNQFGGILADEMGLGKTAQVIFAMLDSYQSTKSLLPSLIIVPASLLLNWKSEFQKFAPHVKIVTANGNFKERSQVYESLKNQILLMSFNVLRSDIKWISQKKFHYVVIDEAQGIKNENSTVTKAAKKIKGNFCLALTGTPIENRLLDLWSCFDFVLPNFLGNKKQFSDQFEKEKNDESFQKLMKKTSPFILRRTKNKVLKELPKKIITDIYVELSEEHQKLYDKQKTDGLKEIKESDAKNALNILSLILKLRHICSLVKDNDVNDFEDNSKANAALNIIYEALENKRKVILFTQFLDVIDCFKQTLKNQKIDHLVFDGRKTVKNRNTIIQKFNSAKEPCVMLASLKAGGVGINLTAAEVVIHFDVWWNSAVENQATDRAHRIGQSKTVQVYRIIAKNTIEERVCQVQNQKQELVKKTLVEDVNFFKSLSHEELLKLFE

SEQ ID NO: 8276 - protein, 101 aa, Mycoplasma genitalium
LNWKSEFQKFAPHVKIVTANGNFKERSQVYESLKNQILLMSFNVLRSDIKWISQKKFHYVVIDEAQGIKNENSTVTKAAKKIKGNFCLALTGTPIENRLLD

SEQ ID NO: 8277 - protein, 899 aa, Fusobacterium nucleatum subsp. vincentii ATCC 49256
MIDVKFYMLVEGKDNLYLALYDTEKNLISSYSNLNQSKINNYIENLENEKEFFISWKEEKKSDYLKLDKTLLEYLLKEEKFVNSDFERITKKEIENISLLIRDNNEIEDRLDIYIEINDNLLTKNNIVENYIYSQGTFYKINIEEDSQFPLLDLFQKIDKYELESYGTLILKNYKNIDLKYEDYETIISNEKTAIPQIIIEKIAFDNSLYLKINSIISTMDYEFFIKNKIETVLIVNELEKKLEISKINLENLSSDMFEIVKVLTKLQKSIGLKSSYYIDNENFIILNEELAKEFVKKELLQLAGKYSIIGTDRLRKYNIKAVKPKISGRFSYNLDYFEGEVEVEIEGDKFSIQQLLNNYKKDEYIVLSDGTNALINREYIEKLQRIFKEEDGNKVKVSFFDMPIVQDMIDEKSFENDFMGSKDFFEGINKLAEENIDYPKLNATLRDYQKYGYKWLKYLTDNNLGACLADDMGLGKTLQAIALLSKVHEEKKKKSMVIMPKSLIYNWENEIKRFSPKLKVGIYYGINRDFSSLKKVDIILTTYGTIRNDIESLLKQKFDLLILDESQNIKNINSQTTKAVLLLNAKKRVALSGTPIENNLLELYSLFRFLNPEMFGSVQEFTNDYIVPIQKYSDTSTIEELRKKIYPFLLRRVKKEVLADLPDKIEKLVYVDMNDKHRRFYEERRKYYYSLLEKNTSSQGNFDKFFVLQAINELRHIVSSPELENKKIISSKKEVLIENVIEAIENNHKVLVFVNYLSSIESICDSLKENKIKYLKMTGQTKDRQNLVDKFQNDSRYKVFVMTLKTGGVGLNLVSADTIFIYDPWWNTTVENQAIDRAYRLGQDKTVFAYKMIMRNTIEEKILKLQEIKNKLLDDLISEDNLSTKNLSKSDIEFILGS

SEQ ID NO: 8278 - protein, 1030 aa, Streptococcus mutans UA159
MSKLIPGRVRNEGIHFYEKDLVSILEEKDNSLLVQVADYKIQFSLEDDLVSCPCSMFQKRGYCSHLAAVEHYLKNHPKGKNLADNLLADEQKLEERKEKTSLGSLFLDGLNMNEDDDVKYRLSAQGSQSPFSSDFWWTLKINRLPDERSYVIRDIKAFLLLVKKESYYQIGKNYYEPLSLLQFDTASQELIEFLWRILPDSNQVDTDFIMPNHARNLTFTSGFFEEGVTLLNQLYDFSFEGEHQDYHTINFAELDSSNQFYHFKIVVHRQSIELIIKEKTATFFFDNHYLLYHNTFYHLNNKQRKLVTAIRSLPLEKDLAKHIYFDFEDQAKLAASLLDFKTLGEVEAPASFDIRDFDVVFTFSLLANREILLELTFDYGQIKVSNVKGKEALPFASNFKKEKKIANLLKQYGFSQGFRSYHPPLLDEELYNFFTETLSHFERFGKVLLSPSIEALRYLEKPQIDIKTEQGLLDISFDFSTIFENDIDNALTALFENHSYFVSQSGKLIIFDEETQKVSQALQNLRAQKPHNGHLQINKFAAYQVSETLQNMDNVHFSEDFSQLVKDLRHPEDFSLPEFEVNASLREYQVRGIKWMSMLDKYGFGGILADDMGLGKTLQTLSFLTSRLDKDSKVLILSPSSLIYNWQDECQKFTPQLDVAVSYGLKAVRDEIIAENHQITITSYASFRQDFNLYNQLNFDYLILDEAQVMKNTQTKIAQSLRAFDVKNCFALSGTPIENKLLEIWSIFQIVLPGLLPTKKEFLKMEPQSVARYISPFIMRRRKEDVLPELPDLIEINYHNELIDSQKAIYLAQLRQMQDGIRHSSDSEINRQKIEILSGITRLRQICDTPKLFMNYDDDSGKLASLRELLLQIKENGHRALIFSQFRDMLDLAEKEIEALGLTSYKMTGSTPANERQEMTHAFNNGSKDTFLISLKAGGVGLNLTGADTVVLIDLWWNPAIEMQAISRAHRIGQKENVEVYRMITRGTIEEKILELQESKKNLVTTVLDGNESRASMSIEEIKEILGISS

SEQ ID NO: 8279 - protein, 1030 aa, Mycoplasma pneumoniae
MTIAEIRKFAQTTQKFVEAENLFEHGNVVLPKKYLNKARGMAEVLYNSQVIKVSFTAKDGELTCKCSCLANVDNCVHIVAVLLKYHQMLVESKRSFNLAEAFHLDCDQAEMLIENLSLEIIAGGWNFKLGFTINLDKHNPQPSVLRFYCCDATFVYFLHLENDTLHSVELSKFKPEERATLLFFDKLCKQFTVGYDRNSLLFPLAGFLKELQANTEPTIFVFNDDKIDNILFLRISKKHHGLNHVCGFSGKKVFDFVTYKQKEKQIVLRSAYLSKFTDFKFPYTINIYKLQFGEPLFFYFLIQLKRDGFKNFYFQSEDSIVKEKEYLPKLYFKVEYDPVKNKFVSDAFFKYKNHFNKGTTTVYPHRYYMAKKSDRGGFNRLLFYEEAVENFYQDQFDLGYFRKFEHLPIQDKNQIEAFKAALDDLMPVDLAEVSLSDNLLHQKPLHFALSDLEAVAVDDKQIKLSFAPSAVELKLIKRILSAYHKGNVVCIDQESWYDLKQPAAKELIQFWNQFDLRNATSDGNHIYLPKYYLFEVAKIFSQYLDIKNLFDVPTIKKIEDQNNNVFDLSLEHKKITSLRNYQQEGVKWIRGLEENKFGGILADEMGLGKTVQVIFALLDSYLKNHVNLPSLIIVPASLLLNWKSEFEKFAPQIKVKVANIPSKERGELYEKLTNEILIVSFNVLRSDVKLITKQRFHYVVIDEAQGIKNDSSSITKAAKKVKGNFCLALTGTPIENRLLDLWSCFDFVLPSFLGNKKQFTDQFEKEKTDQSFHLLMQRTSPFILRRTKSKVLKELPNKITTDIYVELNPMHQKLYEEERDRGLEEIKQIQDKSSFNILTLILKLRHLCSLPKNSQGILENSAKKEAALEIIHEAIENQRKIILFTQFIDVIDHFKDTFKEQGIEYFIFDGRKSPKSRHSIIEKFNNAKNPCVLLASLKAGGVGINLTAAEVVIHFDVWWNTAVENQATDRAHRIGQKKTVQVYRIIAKNTIEERVCQVQAEKQELVSKTLVEDVNFFESLTNEELLRLFE

SEQ ID NO: 8280 - protein, 1032 aa, Streptococcus agalactiae NEM316
MSRMIPGRIRNQGIELYEQGLVSLISQEGNLLKAKVGDCQIEYSLVTEETKCSCDFFARKGYCQHLAALEHFLKNDPEGKAILSKVQVQQESQQETKKKTSFGSVFLDSLIINEDDTIKYQLSAQGEQNPYANDIWWTLKIRRLPDDRSYVIRDIKAFLNTVRKEAYYQIGKQYFETLSLIQFDETSQELIEFLWRLIPSHSSKIDLEFILPNQGRHLSLTRGFFEEGVTLMNALENFSFESDFHQFNHLYFKELEGEDHLYQFKVIVHRQSIELEIKEKDLKPLFANSYLFYRDTFYHLNLKQEKMVTAIRSLPIEGDLAKHIHFDLDDQDKLAAHLLDFKEIGLVDAPRSFSIHDFKVNFEFDINSQNEILLQMVFDYGNDLTVHNRQELEQLTFASHFKHEEKIFKLLERYGFAPHFSTSHPAYSAQELYDFYTYMLPQFKKMGTVSLSAKLESYRLIERPQIDIEAKGSLLDISFDFSDLLENDVDQALVALFDNNPYFVNKSGQLVIFDEETKKVSATLQGLRARRAKNGHIELDNIAAFQLSELFANQDNVSFSQHFYQLIEDLRHPEKFKIPGLSVSASLRDYQLTGVRWLSMLDHYGFAGILADDMGLGKTLQTISFLSTKLTRDSRVLILSPSSLIYNWQDEFHKFAPDVDVAVAYGSKIRRDEIIAERHQVIITSYSSFRQDFETYSEGNYDYLILDEAQVMKNAQTKIAHSLRSFEVKNCFALSGTPIENKLLEIWSIFQIILPGLLPGKKEFLKLNPKQVARYIKPFVMRRRKEEVLPELPDLIEMNYPNEMTDSQKVIYLAQLRQIQESIQHSSDADLNRRKIEILSGITRLRQICDTPRLFMDYDGESGKLESLHQLLTQIKENGHRALIFSQFRGMLDIAEREMVAMGLTTYKITGSTPANERHEMTRAFNAGSKDAFLISLKAGGVGLNLTGADTVVLIDLWWNPAVEMQAISRAHRLGQKENVEVYRLITRGTIEEKILEMQETKKHLVTTVLDGNETHASMSVDDIREILGVSK

SEQ ID NO: 8281 - protein, 2066 aa, Streptococcus agalactiae NEM316
MSTFDSVTGRTNHLEAYEGLNLSEKFAILSHFDKLRNELQTPSIQLGEFDREMEAFSITLGNELLGYLEANGSPYELKRELNQAEMMAVLELSRQLVAKFSTKLEELGIDLGSFQPDQVNILLDAVGRFRLKNADIALLGGYPKASVSQLALATELLQMGLSHDKVEFFLTSQLQLEDMRQVAFAFLHESLTREEAEQFETDRFRHTSLNFREWRELLEKQEPEMVEMSDVSPLVREVLHHYPLGSRVTYKGQEFEILSIEAADMDNLIRIELQNDFSYLIEQNPVLYFQNLAEIRQVLHLSRSEIVEREEQPEEEWTLFSFMDEGTEDNEKEPEIVFESTDKVVTLDSQPAQVSETISESVPETKEVIEAEQAIAVDFSFPEDLTNFYPKTARDKVVANLVAIRLVKELESANQSATPNEQEILAKYVGWGGLANEFFDEYNPKFSKEREELKTLVSDKEYSDMKQSSLTAYYTDPLLIRQMWSKLEQDGFSGGKILDPSMGTGNFFAAMPAHLREKSELCGVELDTITGAIAKQLHSNVHIEVKGFETVAFNDNSFDLVISNVPFANIRIADNQYDKPYMIHDYFVKKSLDLVHDGGQVAIISSTGTMDKRTENILQDIRETTDFLGGVRLPDTAFKAIAGTSVTTDMLFFQKHLNKGYQADDIAFSGSVRYDKDERIWLNPYFDGEYNAQVLGRYEIKNFNGGTLSVKETTDNLIASVREALQHVKAPRVIDKTEVMINSDVIARQVIDTTIPPEIRENLEQYSYGYKGSTIYYRDNKGIRVGTKTEEISYYVDDEGNFQAWESKHSQKQIDRFNNLEVTDSTALDVYVTEEPAKRGQFKGYFKKAVFYEAPLSEKEVARIKGMVDIRNAYQEVIAIQRNYDYDKNEFNRLLGNLNRTYDSFVKRYGFLNSPVNRNLFDSDDKYSLLASLEDESLDPSGKTVIYTKSLAFEKALVRPEKMVKEVSTALDALNSSLADGRGVDFDYMASIYQTASKAALIEELGDQIIPDPESYLKGQLTYVSRQEFLSGDIVTKLEVMDLLLKQDNHDFNWAHYGNLLESVRPARVMLADIDYRIGSRWIPLAVYGKFVQEAFMGKNYDLTATEVEEVLSVSPIDGTMEFRTRFAYTYSTATDRSLGVAGSRYDSGRKIFENLLNSNQPTITKQIQEGDKKKNVTDVEKTTVLRAKEAQIQDLFQDFVASYPEAQQMIEDTYNSLYNRTVSKVYDGSRLEIDGLAQNISLRPHQKNAIQRIVEEKRALLAHEVGSGKTLTILGAGFKLKELGMVHKPLYVVPSSLTAQFGQEIMKFFPTKKVYVTTKKDFAKARRKQFVSRIITGDYDAIVIGDSQFEKIPMSQEKQVTYIQDKLEQLREIKQGSDSDYTVKEAERSIKGLENQLEELQKLDRDTFIEFENLGIDFLFVDEAHHFKNIRPITGLGNVAGITNTTSKKNVDMEMKVRQIQAEYGDRNVVFATGTPVSNSISELYTMMNYIQPDVLERYQVSNFDSWVGAFGNIENSMELAPTGDKYQPKKRFKKFVNLPELMRIYKETADIQTSDMLDLPVPEATVIAVESELTEAQKNYLEELVDRSDAIKSGSVDPSVDNMLKVIGEARKLAIDMRLIDPAYTLSDNQKIMQVVDNVERIYREGKGDKATQMIFSDIGTPKSKEEGFDVYNELKALLVDRGIPKEEIAFVHDANTDEKKNSLSRKVNSGEVRILMASTEKGGTGLNVQARMKAVHHLDVPWRPSDIQQRNGRLIRQGNQHQNVEIYHYITKGSFDNYLWATQENKLRYIKQIMTSKDPVRSAEDIDEQTMTASDFKALATGNPYLKLKMELENELTVLENQKRAFNRSKDEYRHTISYCEKNLPVMEKRLRQYDRDIEKSQATKNQEFIMRFDNQTIDNRSEAGDYLRKLITYNRSETKEVRTLATFRGFELKMATRSPGEPLSDMVSLTISGDNQYSVSLDLKSDVGTIQRINNAIDHILEDKEKTEEMTNNLKDKLAVARVEVEKVFAKEEEYQLVKAKYDVLAPLVEREADLEEIDVALSQFSSSDPCLKKDQQLVLDI

SEQ ID NO: 8282 - protein, 1070 aa, Shewanella oneidensis MR-1
MRARDYVMQGRVLSAKANADFRHIEGSVVGSETSPYRQDIRLVSVNHKLIMNGFCSCPATGHCKHMAAVLYSLLTDKTVEDQRIVQWLHLLDDADDPRLNDVESLYDDRVLYILSKDNNGVFIELRRGKLGKKGGYNKGSKIALSDVQYYMPAWIGAEDVLIINLIMSTRRHGASRLYLKAQLGAVALEKMLATERCFWEESRLALTAGDAITPQFSWQDIDSEHKQMRLVLPKRDNWELVPTEPAYYIELDYFQIGLIDTDISIEKLRLLSQMPPVPRTQVEVVSHKLIKHFSARTVPLPSAINFVELRDKLRVRLSLNMLSAASTQANATLPNTILPNTTQLKTTTLHAQAITISQPYVTLAFIYGDVVLSGNAAKEALTLVTQGGTTYQINRALDEEQVAVETLQTLGFSRFIFDIGSLSSHWRLGALPDGIREWLQFIEEDVPRLQAQGVEVLLAPEFSLKVVDTALTVELDDSKEGWFSLSLHADINGQRLPMLPLVATWLKQHGEPADDAELLLPSPNGEWLKIKASVIKPLMSIILELFEQHRGNSIALPKYRAHLLNELAQSDISLLNGERVRQLAAKLEQFTGVVAVTAPTQLQAELRPYQQQGLNWLCFLKEYQLGGILADDMGLGKTIQTLAFLLKQKQLKSAAGPHLPSLIICPTSLVGNWAKEAAKFAPSLTLAVIHGAQRGPLLARLSEFDVVVTTYPLMVRDNDYYQAQAFEHIVLDEAQQIKNAQAKVSQMIKALQSPFKLCLTGTPLENHLGELKSLMDFCLPGLLGTTAYFNKEFRNRIERYGDSEQVKVLSQRIAPFVLRRTKAEVVTELPPKTEIYQSLELEKDQRNLYESIRLSMEKKIRELFATQGVAGSHIEFLDALLKLRQACCDPRLVKLEQAQKVKNNAKLNWLSQNLPEMVQEGRKILIFSQFTSMLILIEELLQSLEIDYSKLTGQTRLRQVQIDKFQEGDTPVFLISLKAGGTGLNLTAADTVIHYDPWWNPAAERQATDRAHRIGQENPVFVYKLIAEGTVEEKIQEMQQHKQGLADSILEGKGNGAWQGSADELLSLFH

SEQ ID NO: 8283 - protein, 1093 aa, Clostridium tetani E88
MKKINKQGENIMDENRLLQIFNKETSGNNHLKGQRIINNDLVSFLDITSEDNLIYINSNVISENLFNEYNTKIEIDVRNKSIFSTFCSCKDYEKNEFRKRNYCCKHLVATFYKALRDLINHPLLNEEKLNGKNIFKRNNKNNTLSILLGDGKYKNEIKIEVYINKNEWKQNIIAEFRIGFKEKGVSKLYILKDINEFLSAYHNNFPIKYSKNFTFDIGSQRLSTKDKRLIDFIEMLKNIEGKYKYISKNTEKNIEGKYLKVPQYLVREFFEVIKNHKVYLNEGFFYRAVETEILDKAPDIDFDLKKVKENYILKVRDGMPITLDSNNSVFLYGTTIYIPNYEFCYKINPYLKVFNEMRIVTMGQEDEETILRRLVPDLNFLSNNVSLSRNIKNKIVMEKCKFNFYFDQEGKEIVLIVKVKYGNFEFNIFEDCKEKIVYRESKKEQQVILQLKALDFEEIKEKFYLRCEEEYKFRFFKSEISKLQEIGEVYYSENFKGLKSIGSNGIFGSIKAGKHDYFEMDFKIGDISPQETYNILRAFRDNLKYYKLENGEYIDLQELELNKFLKLLDVISPEEIYGNHIEIAKNKGVYLDSYLEGNKIKYIKGKKELKEIRDKFKNIEKLKFEEPTNLNGNLRDYQRIGYNWFKTLDYLGFGGILGDEMGLGKTIQAISFILSNKNSKSLIVAPTSLIYNWIDEFEKFAPSLKVVAINGTKEDREDIIKNIGNYDVAITTYNLLKRDLESYNIIEFDHCILDEAQYIKNLNSQNALAVKKIKAKTRFALTGTPIENSIMELWSIFDFIMPGYLYDEKRFSVRYNKRLKESPEVLEELNKLIKPFILRRRKNQVLGELPNKIEKTLMVTLDNEQKKVYKAYANYAMELIEKKVKDDEFKKSKIAILSYITKLRQLCLDPTVTMKDYNGGNGKMEALVDLLLQSIGEGHRILIFSQFTSVLKNIGKRIIKEGIDFSYLDGSIPSEKRMNMVRDFNDGKNSVFLISLKAGGTGLNLTSADVVIHFDPWWNPAVEDQATDRAHRIGQQNVVEVIKIIAKGTIEEKIILLQEEKKKLISELMGDELSSGENFASLTEEEILKLFEV

SEQ ID NO: 8284 - protein, 1056 aa, Oceanobacillus iheyensis HTE831
MKSIKDIDIQKLFPSAFYKRGLTYYKNDQVKDVVFDRNHNVWTATVQGSEDYFVEIGLTDMEKGSIDTFCDCPAFETFGSCKHIVASLIAISTLENNGDASIRQPNFYRSSRFIEAMSNILTPLDAVEEENYSSSEMSVEYIGSWTYDRRLQLEIKTGEQHRYVVRNVASFLDAVQDQEPFSFTKKFTYEPSIHSFLEADMEILRILHDLCKNEELYDSYTFGGRSTDRRYVTIPPYVVKDLLFKLVDRNFYIVDNVTQYKDIQLQENELPFQFYITKQDEHVVLSMSELKETIFFPLYNILFQQGVFYFPTYEQIPVLQQMEKFRFEDMNFDVPKEQTDTFLSEVIPSLQRIGDIDMDDHLSEELIKAPLQAKCYLELRDGLIIGKLEYQYGSHRIDPFQGKKDHQVMIIRDVPQEKLIMKYIEDANFRYNGKELYMDAEEEDLYHFLYHVLPYLDNYVELFLSSEFRGLFIENEPEPYTSVRMEGQSNLLEIGFNIDGINDNEVNKILQAVIERKRFFRLQSGQMMNLETEEFSSMQRLFDDMRISKEELLDGKVQMPAYRGSQLDDLIETKKHYDPHFRDLLSHLHSPEEQVYEIPENVQANLRSYQKVGYQWFKSLSQYHLGGILADDMGLGKTLQSITYLVSESNGETIGPHLIVVPSSVVYNWKNELEKFAPHLQVAVLTGNPIERHQVMSESTNKDIWITSYATLRQDIEFYQEITFQTLLLDEAQYIKNYQTKTSRAIRQIKATRRFALSGTPIENSIEELWSIFQVVLPGLMPDQRSFKQLEPKKIAAITRPFILRRLKQDVLKELPEKIESVHVSELTREQKDLYVGYLRQVQQEAVQSFKENGFQQNRMKILAGLTRLRQICCHPSMFIENYEGASGKLEQLMETIKTALDNGKRMLIFSQFTSMHEIIQERLKKEGYGYFYLHGQTSSKERVEMSERFNHGENDIFLISLKAGGTGLNLTGADTVILFDLWWNPAVEDQATGRAHRFGQKKVVQVIRLVTEGTIEEKIYDLQQRKRELIDQVIQPGETMLSSLNEDDIKELLSL

SEQ ID NO: 8285 - protein, 1051 aa, Oceanobacillus iheyensis HTE831
MYSLTKQKIRELCGDVSFKYGERLWNGNRVHMVNNQNETTATVTSTKDFQVQITWKDGEIKETKCNCPSLTSFKKDCQHIAAVLIGICETSTKSINRTDEIMRGFLQKNDSENHEYTHQGYFEKRQEIHSLFRCHILTISKNPVIAISIDINHHEVKQLSDFLLAVQQGKSYKISNAITYSPSNHYFNSNDEAIIHHLIQLNQENYVTNNFKSNDKSKLVITPTIWNKLETIFQLAVNTELIIAEANRNWILPSFSIVDNLPPLHFEIEKAASLLRITWTEFQSYVCLPSYRLFVTQQSVHILTEQEVTTIDLCDRLWRENNENSLLISLEQAEQLIPLITKIAKIDDTTGIIAKSKKPLTAKIYLDRISNRLLAGVEFHYGGVKFQPFEPSPMTLYRQEEKEEEIIQFLQDKGFAHMDGGYVLQNEKLEYEFLYHHLSDLQNQATVFATTAVRNRLSKKHFQPTIRVRHKSDRTNWLEFTFQMKGFVDQEVREVLDALEEKRPYYRLKDGSLLSLETKELEELQSFLIDSPMSSTEILEGLEKPLNEGFTIANRLEERGILEAEDSFKQMLLQIQQPDEQSYPIPKPISSLLKDYQLEGVRWMRAVADMGFGGVLADEMGLGKTIQSIAYCLSIEKERKDKKQPILIVCPTSVCYQWKQEWMTFAPDWSVMIIDGTKAERKQKKTELRNYDVWIISYGMLRNEIDWLQNQVDQFHTVIFDEAQVFKNPATHTFRTVKKLRSEHRFALTGTPLENKIEDIWSIFHVVFPELLGNIKDFSWLTNDQVIRRITPFMLRREKKDVMQELPTKVEYVERISLTEEQKQLYVSYLAKLRHPSFKHLDKETIRKNRIKILAGITRLRQICCHPSLFVRKYNDKSAKLERLKQLIKDASRANKRLLIFSQFTSMLQLIGKELRNKDILYYYIDGETPAEERVEICRAFNQGNREVCLISLKAGGTGLNLVGADTVILYDVWWNPAVEEQAIDRAHRIGQQSEVTVIRLLSEGTIEEKMYELQRKKRELMNYLVNGKSTVNYQLTDEDIQDLLFNETKD

SEQ ID NO: 8286 - protein, 556 aa, Oceanobacillus iheyensis HTE831
MDSIQVNKDEQFIIDLDEAMQREENLTSWKLFSMAYEAEKQTMSPSFKGLRSVNHLSHLQILDHQREAAEQVIEEMDGRAILADEVGLGKTIEAGLILKEYMVRGLVSKVLILVPASLVNQWEKELNDKFFIPAIAHRKNYSWVDNHVIISSIDTAKRSPNSEEILDIDYDLIIIDEAHKLKNEKTKNYQFVRELKKKYCLLLTATPVQNKLLELFNLISILKPGHLGNYQTFTEKYGKDRKRMEQDPYLKQLVQKVMIRNTRKETALQPSKRKIETVWMDFTKEFQQIYDQLVQLSFGMSSFSKITYLREFCSSREACYMSLVKFVKDIEDEEHPLKQIISDLESLEQHIKAEQMVKLIQSLGDEKVIVFTEYRATQYYLQWFLQQHGITSVPFRGGFKRGKKDWMKQLFRDHAQVLIATEAGGEGINLQFCHNMINYDLPWNPMRLEQRIGRIHRFGQEKDVQIYNLVIKNTIEEHMLSLLYEKIDLFQNVIGNLDAILAELNVKSLESEMESIYNESSSSGEVRIKLDNLTSIIEQANPSDNQMEKEQKYGNP

SEQ ID NO: 8287 - protein, 918 aa, Pseudomonas syringae pv. tomato str. DC3000
MSSILEKVLASAWTDLFNDRTLERGRDYARQKRIVLEDSSPQIIRTACRGSGLEIYTQTLLFKDPDRYKNYLTCKCTCPVRNDCKHCVAALLFLKDPQNRPLLQAALGSHQRETEQHVEQQIAQKPRLPERLIDDLQPRPRLILASIEFSAYEPRNGRMQRHIQHRAALAFAYGKHYAVGTTNVSILVSSLGSDLVNQKSDIIEHTETETLRIRRQGEKERQLRQELADLGFKVATRQSKALPDSAGDMYELPNDKAWLHFVLDDLPRLREQGWEIEIQEEFGFDVTPVDDWYAVIDEETERDWFDLELGIIVNGERLSLLPILINLIRSHPELMSPSAVAKRGDEEQLLVQLNHFTQSGGSPVQIALPYGRLKPVLATLGDFYWRQDGNNALRMSKADAARLTQLEDLPLTWQGGDRLRHFAERLINIKDAPVNLPDGLNATLRPYQLEGLSWMQSLRELEVGGVLADDMGLGKTLQTLAHLLMEKQAGRLDRPALAVMPTSLIPNWLDEAEHFTPDLKVLALYGANRHQDAGNLQDYDLILTTYALLPRDMEMLEKQPLHVLILDEAQYIKNPNSKAAQAARNLTARQRLCLSGTPLENHLGELWSLFHFLMPGWLGNSKEFNSNYRTAIEKHGNQDRLHHLNARIKPFLLRRTKEQVATELPPKTEIIHWVDLNDAQRDVYETVRLAMDKKVRDEITRKGVARSQIIILEALLKLRQVCCDLRLVNHDMPVNSKQGTSGKLNSLMEMFEELLAEGRKILLFSQFTSMLSLIEEELKQRGIAYALLTGSTRDRRTPIHDFQSGKLPIFLISLKAGGTGLNLTAADTVIHYDPWWNPAAENQATDRAYRIGQDKPVFVYKMIARGTVEEKIQRLQREKSALAAGVLDGRTTGDWKLRDEDLQALFAPLPAAPKKTRK

SEQ ID NO: 8288 - protein, 922 aa, Bacillus subtilis subsp. subtilis str. 168
MASLKEILIHVEQMEDGSFTLSAFDENEQPLPYSHMKKHLFQWHESSFYGTFLEDVSFIGTTAVLLSPWMTVELLGKNSFNSFSSVQLTEETEPLIEAASTIYEFIADGDFMPDYDAWTNGVFRWKDRDNILEGFTAEWFSAAVQDYIQYDDDLREKWEHIKEKSPAVTTFRGHFLDEEDFLEGIGWIDDQSPFTVGLRLNEPDFDGDEWKIEMFLRDKKSGAVEFFDGLKSLKKSWQAYSDKIAREQDRFHRTVPWLSFDSGTTLISEEEAWIFLSEASETLVDMGVEILLPSWWQIVRDSNMMLKAKVSSSPRGESFVGMNALLDFNWRFATNGIELTEAEFNELVASNRRLVNIRGQWVKIDPQFIKQMKRLMEKAESEGLHMSDILARELMDQQDGGLEDSDLIDTSAFAGIQFDLSKQLRSLIRKLTAAENLPEHKVSPSFKGTLRPYQKYGMNWLLFLRESGFGACLADDMGLGKTIQMIAYFLHVKESGRQKTPHLIIAPTSVLGNWQRELQTFAPDLSVALHYGPRRPKGDDFAAHYENADVVLTSYGLSHADTEELSSVTWNTICLDEAQNIKNAHTKQSRAIRKLKGLHHIALSGTPMENRLTELWSIFDFMNKGYLGSLTGFHKRYVLPIEKDRDEKRIGQLQQLIRPFLLRRTKRDEEVALNLPEKLEEKEFIPLSAEQASLYEQLVKDTFDHMTSLTGMQRKALILSMLGRLKQICDHPALYLKEEQTELLAGRSVKLEKLLELMTAIRAQNESCLIFTQYIQMGNMMKRLLEKTFGEPVQFLNGSLSKQERDTLVEKFQRKEYPTLILSLKAGGTGLNLTAANHVIHYDRWWNPAVENQATDRAYRIGQERFVHVHKMITTGTIEEKIDVMLESKQTLNDQIIQSENWITELSTQELEELFTLSATAQ

SEQ ID NO: 8289 - protein, 557 aa, Bacillus subtilis subsp. subtilis str. 168
MNTEMIYDAKWPEEFAERLKNDGPWANWELYKLSAEIQKTLAIPEFEGLRAPLYLPSFTPLPHQLEVAQKVVEKMNGKAILADEVGLGKTVEAGLILKEYMIRGLAKKILILVPASLVSQWVKELQEKFLIPAVEQKKSYVWEQCDIVVSSIDTAKRSPHREIVLSIPYDLVIIDEAHKLKNSKTKNYEFVRNLVKKYCLLLTATPIQNRIEEIFNLVSLLKPGHLGSQNHFQEEFAKKKSSLEAHEHLKDLVNKVMIRNRRHDTGLNWKQRHVETVPIQFSPSEQALYDEISRLKDSINKPASMFSIMTLQRECCSSREAVYMTLKKMLDQKEKQAPAIDEDTISVLIDRINQVTQNSKALQVVDLIKKIDDKVIIFTEYRATQIYLQWFLQQNGISSVPFRGGFKRGKKDWMKDLFRGKIQVLIATEAGGEGINLQFCNHMINYDLPWNPMRLEQRIGRIHRLGQERDVHIYNMATKHTVEEHILKLLYEKIHLFEKVVGELDDILTKIQVNNFEEHLHDILYHSATEEEMKIKMDNLTSFLSYKKQLPAEKRGS

SEQ ID NO: 8290 - protein, 943 aa, Archaeoglobus fulgidus DSM 4304
MLYPLFRVAVDSYHLFTKYQYDPVSVLAASKINLLPYQLEDFLNLLDIADSGRPVRVLIAYETGLGKTILAGLFIKEMVIRNPNTRILIVTPPNVQYQWQDELKNKFGMHVPLLTEADKQGKDPLKQKWLIASMDTLKGENWLRRVEDHRWDIVVVDELHRATIKNRRAQLIQVLRDRTKHMLALTATPHDGKEDQFVFRLSLINRNVDEQNWKEFVKKYTFRRRKRDVLDLEGRKIFPQKVYPLTIEIEPDEEEKEFYWEVEKYVRSYYKLAEEENKRSIGLVATIVGRAVSSSINAGVQVLKNRYRRLFEGFAEELEDAEDILDELKQAEEEGDDEKLEKLRMKIIESVPVRKDLVEKEKEVLERLITLGEKLLERGRDKKTERLVQVVNEHMEKGNKVIIFTQFLATLDHLERTFKEIYGENSVVTVHGGLTHEEKKNRIAKLWDSAKILIATDAAGESLNLQAANVVIHYEIPWNPVVYIQRVGRVYRYGQEKDIYIQSMLPVFKIERRVLEVILQKVETIEKDFDIGSVEIIGTIISERDIENEIWRAYVEDRIEDAGEEVSKKFDKGKSVLQKIRLVLEKAEAAKKHVRAEKLLEDRGIVEIITEEDLRKYLFYFGEAKLGEGKFYDEFTFFEIKDVRIHPEKILTEIKPSKAEILDLKDVTTLSEKELKLDNPAIRKALYIGMCQRGEAIFSGNEEGYGEIRLLKLFDFYGEPIYEIPVVVFNGSIKPFRFLQTLEPVILSDEIEKELTADLESKEIEIRDSSYISEVKEEQRLYLKERVNKVLDALSIEEEYYKRFLSDEQAKKKLQEIQEMKKKEYRRSLRIHDRLSEPIAKFWVLKPEKLTEMLHKIAEKTDDGQLLKEIESSIEDFDPELWKRKREVELAGMKLVMSCEEKWGRFPKDVSADGRGYDIESFDPNSGEKRRIEVKSFKTSQLK

SEQ ID NO: 8291 - protein, 1065 aa, Enterococcus faecalis V583
MKWSIPERIVEQGREYMQEGRVLSIVQNPEKRIWLSEVLGEELYLVELDGTAKEQDVCECQYWMEHGYCKHTVAVELALKQRGVSRIIQANQTVSFEKTNRSTAEMFTKGFAKLSKASAEVPLQPLRLEFHLDVIETNNYYPELSTIGLSLKIGLEGTKPKTYIVKNIGDFLQAYEKEMTFMVNKQHQFTLLHDSFSMEIQEILTELAAIYHTSQLLGANGIQVKGKIDKRYLLLPIDRSQSLVEKMNRTGQFILTNQTHKYRYLTFKETSLPLTFTVQKTEEQSFKLTIQNPITTFLAHYHWAIADQTVYLLTEEQEAIYTTLLQLMKRLEEPSIIYEKETVSDLFSEVLPLLEKIGRVSVEESVEELVVHHPLKAVFIFKKIKGRINARIDYHYGEVIFSTNPKYAQLPEVNQEIVRDKAKETAIKQQFQQFAYQQTTTGFEKVLPAGESLYYFFKAEVPAFRQLGEVRMGRKLRELYLDAQHHQPTIEVAEGDSWLDIRFDVTGIDETEIDAVLTSLLRNDAFYTLKSGEILAFDSEEFFHTSAILTKLRKNMHQEDNVIHVPKNQGLMIESLLEDNERAHFSDSFKKMVTDLTHPENFEAQVPKTLQATLRHYQETGYKWLKMLSHYQFGGILADEMGLGKTLQTITYLLSEKEEERLKGTALIVAPASLTYNWLAEVKRFAPTLNVQVVSGNRQERAALLQNSTEDILITSYASMRQDVQLYQEMRVGYLILDEAQMVKNSGTKTAQALKSLKVPQRFALSGTPIENNLDELWSIFQMILPGLFPGKKAFREIKPEEIAKMIQPFILRRDKKTVLADLPEKIENNMYSVLTEEQKTVYLAYLKQMQADVSQMDQATFKKNRMSILAGLTRLRQICCDPRLFIEDYTGGSGKVEQVKDFLVAAKENNRRVLLFSQFTSMLSILEKELNELGLETFYLRGSTKPQDRLTMANAFNEGEKDVFLISLKAGGTGLNLTGADTVILYDLWWNPAVEEQAAGRAHRMGQKKVVEVWRMIAEGTVEEKMNSLQQEKRELFQKVIQGNEEQLAKMTEEDIRTILSIGE

SEQ ID NO: 8292 - protein, 1027 aa, Bacteroides thetaiotaomicron VPI-5482
MEEKANTGQVIIVLTEHLTFGTLLIPYMAEKSDDGTYQLIEQAFHASPEAISRMNEAEQQAIDIASHYTEKYLMGIYSREKTVSRFLRKLSEDPERVKNNIRPFIEKKMQEMLTLIRHHNLPLYQKQVGSKLLYAHHAYHVHPHDVEIRFTFLADETNFRYQLQCYYDGQPLSLSEQKPVIVLTSSPSALLLGMELYFFPHIESVRILPFTKKKKISVPASQIEKYIDNIVIPIARYHEITTQGLNIIEETYACEAVLSLEDTIYDEQMLRLSFRYGDQSFTPDTVTEMKKIIYRNDFGEIFFFRRDSDAEEEKLRMLTDSGLQRVSDVHFKLSPDAPEKTITEWISTYREMLQQSFLLTGNMGNTPYCLDEIRIEQSCDDEPDWFELHITVVIGNLRIPFSRFRKHILEEKREFLLPDGRMILLPEEWFSKYGNLLELGTQTETGIRLKPTFVGAVQSALEENGPKNLLFKREIRNVPVPQGLNAKLRPYQQKGFSWMVQLNKQGFGGCLADDMGLGKTLQTLTLLQYIYKPLSPDAVTAPMKPVFTETTASDSQPDKECTANNPPVREQIADAEGQFSLFSFSSEDELLPDAREIREKNRPKEDDHRQEHGKNSRKPATLIVVPTSLLHNWRREAKRFTTLAIAEYNSNTAFPKGHPEKFFNHFHLIFTTYGMMRNNIDILRSYTFEYIVLDESQNIKNNDSLTFRSVIQLQGKHRIALTGTPIENSLKDLWAQFRFLQPDLLGEESTFHKQFIIPIRQGNVRMEKRLQQIIAPFILRRSKSEVAPELPPLTEETIYCAMSEKQGESYEQEKNSLRNILLQQPENKDRYHMFSILNGILRLRQLACHPQLIFPDFDGVSGKTEQIIDTFDTLRSEGHKVLIFSSFVRHLEILAEVFRQRGWKYALLTGSTNNRPSEIAHFTEQKDVQAFLISLKAGGVGLNLTQADYVFIIDPWWNPAAESQAIARAHRIGQDKQVIAYRFITQNSIEEKILQLQEDKRRLAETFITDSEALPALSNEQWADLLK

SEQ ID NO: 8293 - protein, 918 aa, Bacillus cereus ATCC 14579
MINQTEVTIRLQHVSQGWFLWGEDDSGTPLSVTSWKRHAFTWHSTSFYGTFLKEANFEGKQGVLLTNAQAFEYIANKPMNSFAHIQLNGPITALTKDANELWDAFTSGSFVPDIEHWPKQPSWKVQNTPIEDDTLASLFSAAVNESILQDNRSNDGWEDAKRLYEHYDFTKRQLETALHEEDWLRKIGYIEDDLPFTIGLRLQEPQEEFEMWKLETIVTPKRGAHRIYVYENIDSLPKRWHDYEERITETQEGFSKLIPWLKEGDTFRNELFETEAWNFLTEASNELLAAGITILLPSWWQNLKATKPKLRVQLKQNTVQTQSFFGMNTLVNFDWRISTNGIDLSESEFFELVEQNKRLFNINGQWMRLDPAFIEEVRKLMNRADKYGLEMKDVLQQHLSNTAETEIVEDDSPFTDIEIELDGYYEELFQKLLHIGDIPKVDVPTSLNATLRPYQQHGIEWLLYLRKLGFGALLADDMGLGKSIQTISYLLYIKENNLKTGPALIVAPTSVLGNWQKEFERFAPNLRVQLHYGSNRDKGNSFEDFLQSADVVLTSYALAQLDEEELTSLCWDAVILDEAQNIKNPHTKQSKAVRNLQANHKIALTGTPMENRLAELWSIFDFINHGYLGSLGQFQRRFVTPIEKDRDEGKIQQVQRFISPFLLRRTKKDQTVALNLPDKQEQKAYCPLTGEQASLYEQLVQDTLQNVEGLSGIERRGFILLMLNKLKQICNHPALYLKEEEPQNVVERSMKTKTLIELIENIKDQNESCLIFTQYIGMGNMLKRVLEEKFGQRVLFLNGSVPKKDRDKMIEEFQNGTYDIFILSLKAGGTGLNLTAANHVIHYDRWWNPAVENQATDRAYRIGQKRFVHVHKLITTGTLEEKIDEMLERKQSLNNAVITSDSWMTELSTDELKELLGV

SEQ ID NO: 8294 - protein, 1064 aa, Bacillus cereus ATCC 14579
MSFTLNKSIIKEVCGETSYKRGEAYYKSNKVIIDHYDENKEICEATVKGNEDFHVTVAKAKKGDVVAKCSCPSLASFQTYCQHVAAVLIQINYNQQIGGMSSTSSRNDQLTSGMFQLFADKPLRPKSKQHRFDTREILDIEFICTPVATRSGGALLGIQLKLAKVYFINHIREFLSKVEKRESFHCSNEFTYTPDVHSFKQETDAIIQQLIKMYHNEKMYEDTLEVHAKQDESMIFIPPASWKDMLFSLSKAEYVQLKQNEQLFQGLQVSKGLLPLHFEFTKGNNGGFTLHIEGLNRVQVMDMYNNALYDGKLYHLHIEDCMRLIELQKMMSRSNSNQFYIPESKMEHFVAKVVPGLMKLGTVHIDEVISDRVETPSLKAKLYLDRVKNRLLAGLEFHYGNVMINPLEEDGQPSVFNRDEKKEKEILDIMSESAFAKTEGGYFMHNEEAEYNFLYHVVPTLKGLVDIYATTAIKLRISKGDAVPLIRVRRKERIDWLSFRFDIKGIPEAEIKGVLAALEEKRKYYRLANGSFLSLESKEFNEINQFIKESGIRKEFLHGEEVNVPLIRSVKWMNGLHEGNVLSLDDSVQELVENIQNPKKLKFAVPNTLNAEMRKYQVYGFEWMKTLAHYRFGGILADDMGLGKTLQSIAFIDSVLTEVREKKLPILVVSPSSLVYNWFSELKKFAPHIRAVIADGIQAERRKILKDITEFDVVITSYPLLRRDIRLYARPFHTLFLDEAQAFKNPTTQTARAVKTIQAEYRFGLTGTPVENSLEELWSIFHVVFPELLPGRKEFGDLRREDIAKRVKPFVLRRLKGDVLNELPEKIEHLQSSELLPDQKSLYAAYLAKLREETLKHLDKDTLRKNKIRILAGLTRLRQICCHPALFVDDYKGSSAKFEQLLEILEECRSTGKRILIFSQFTKMLSIIGRELNRQAIPYFYLDGSTPAQDRVELCDRFNEGEGDLFLISLKAGGTGLNLTGADTVILYDLWWNPAVEQQAADRAYRMGQKNTVQVIKLVAHGTIEEKMHELQESKKNLIAEVIEPGEEKLSSITEEEIRDILMI

SEQ ID NO: 8295 - protein, 560 aa, Bacillus cereus ATCC 14579
MNVDISVDRTWQNNFLNRIDEDGPWTNWDLYHLAYETEKSLLVPTFDGLQAPKHLSHFTPLPHQLEVAQNVIEQMNGKAILADEVGLGKTIEAGLILKEYMVRGLVKKVLILVPASLVSQWAYELNTKFFIPAVAQKKSYSWEQADVIVSSIDTAKRSPHRDIVLNLEYDLIIIDEAHKLKNNKTKNYEFAQRLKKKFCLLLTATPVQNKIDEIFNLVSLLKPGHLGNQSNFEEYYASKNRSAESDEDLKALINKVMVRNRRHNTGIDWPKRHVRTIFVEFNEQEQALYNDIENWRGQDAFTSAFSSLTLKREACSSREAVYYSLKKHVEKRQKENEHYIKDPHIDVLMDKINHIPFNSKANKALELIKEIDDKVVIFTEYRASQMYLQWFLQQHGISSVPFRGGFKRGKKDWMKELFQNHAQVLIATEAGGEGINLQFCSHMINYDLPWNPMRLEQRIGRIHRLGQKNDVHIYNLATKHTVEEHILKLLYEKINLFERVIGELDEILTRINMKNIDAHIQEIFAQSKSEGEIRIKMENLTSIIDFAKRNEAEVQGYAAT

SEQ ID NO: 8296 - protein, 979 aa, Streptomyces avermitilis MA-4680
MPAATPAEITEVARCCAVFMPAEPARTGRVAFWRPDGDAPPAVAGGSVEELTVVLPGDEGVERVAVPAVLLSVRAALPVLTRARAAAHTHRATAFWGTAGVLALQLVARGLLLPGLTAGDHDAWRAGPLRAEDLDRIRDLAAAMPPEAHAVPWADTEPLRLPGPEPLLRAFLDAVADTLPRSPAAPLAAGGPAFAAREPQQVPEQRAWAADVAAGHDAGVRISLRVEVPGLASIAPGEAGSAASRAEASARPQERSSPGPEETASTGSAAVHPALRAVLQVHSVSDPALVADASAVWAGARAFGPRARMDVLLALHRAARAWAPLAPLLSAAVPDTVDLADDEAAELLGEGSRMLAAAGVDVHWPKELARPLTARAVIGPPDGGQGKDRAASDVPSFLSADALLAFSWWFALGDQQLTRAELDTLAEANRPLVRLRDQWVLVDPREVRRARAQQDRKVTPIDALSAVLTGSTEVDGRRVDVRATGWLAALRERLAAPEGQAPVAQPAALAATLRDYQLRGLGWLARMTSLGLGGCLADDMGLGKTITLIALHLHRQSDDSAAGPTLVVCPTSLMGNWQREIERFAPGTPVRRFHGSARSLDGVADGGFVLTTYGTMRLDAERLAEARWGMVVADEAQHVKNPYSATARALRTIGAHARVALTGTPVENNLSELWAILDWTTPGLLGTLGSFRTRYAQAVEGGRDPAAAERLARLLGPFLLRRRKSDPGIAPELPPKTETDRTVSLTKEQAGLYEAVVRETLAEISGADSMARRGLIVKLLTGLKQICNHPAQFLKEERPNIAGRSGKLELLDELLDTILSEGAGVLVFTQYVRMARLLERHLAARGVPSQFLHGGTPVHEREAMVHRFQEGEVPVFLLSLKAAGTGLNLTRAEHVVHYDRWWNPAVEAQATDRAYRIGQTRPVQVHRLIAEGTIEDRIADMLLRKRELADAVLGSGESALTELTDAQLADLVELRGGAR

SEQ ID NO: 8297 - protein, 950 aa, Streptomyces avermitilis MA-4680
MRSVPPLAAPESAAWARSLLNYGWAAVFLPGEPARLGRLLLWRPAGAAAAEGMAPTDIETEAAELVLPHGRSVRRRKVEGYALPVALAVAALSGAQPPHPSASAWQAAARFALRLLADGRLHPALTPAGYDTWQAGPFTAAQRRTLDALAGAFPPHAHCLPEPGPTPLRITKPSALVRRFCDAVADELVRTPAAPLAMGALPYAWRETRTVPVLHEWAEETAAAFTADVRVSLRVDVPEGRRRQFRAVLQLHTVADPALVVEAAQLWNEPAETEHLLGPRAEIETLLALRRGAHAWPPLDRLLRDAAPDQLRLTDDEAFDLLGDATDRLRAAGIDVHWPRELVKALTATAEIGQRSAPGSSAGGMLDANTLVDFRWRLSLGGDPLTEAEMDALAETRRPLVRLRDQWVVADPKLVARARRRRMEPLTPMEGLGAALTGEMERDGETFRCAAVGALGDLVARIRDPESRTPAPQPTALKATLRDYQKRGLAWLAEMCELGLGGCLADDMGLGKTITLLALHLHRQTEPATAGPTLVVCPASLLGNWQREAARFAPATPVRRYHGGDRHLKDLAGNEIVLVTYGVLRRDRETLAENAWSLIAADEAQHVKNPYAVTARELRALPGRARVALTGTPVENNLSELWALLDWTTPGLLGPLTAFRDRHARAIESGEDPQAAERLSRLVRPFLLRRRKSDPGIAPELPAKTETDRVVPLTAEQASLYEAVVRETMAKIAEAEGIARRGLVLKLLTALKQICNHPAQYLKEHSLRQSTPLNGRSGKLDLLDELVDTITAEGESVLVFTQYKQMATLLEKHLAERGVPTLFLHGGTPVTAREEMVDRFQRGEVPVFLLSLKAAGTGLNLTRATHVVHYDRWWNPAVEDQATDRAYRIGQDKPVQVHKLIAEGTVEDKVAKLLEAKRALADAVVGSGEAALTELSDADLAELVALGRQS

SEQ ID NO: 8298 - protein, 962 aa, Streptomyces avermitilis MA-4680
MTGRMGDGVVPGGAARAAGAVAVRPGVVVDASVPVRLAAVFLPAPLPRQGRVAFWDPAGGPLPPLPGTPLSDEELTVVRPHGAGVRRGTVPAVSLPLDAALPLLARSRRDPAAHPATACWGAAALHALRLVARGRLLPGLTADGLDAWRAGPLDPEDIAHLRAVAAALPYEGHAVPLPGPGPLRLPEPEALMRSFLDAVADTLPRTPAAAYTSGKPFAAREPQRLPGAHDWAAEVAAGMDAGVRVSLRLDLSAYQLFDDGEGARRAGAAVVQVHSLADPTLVVDAAALWAGEADATFGPRARVDAALAVRRAARVWPPLDRLAEQDVPDVLALSEQELSELLGVAATRLGAAGVAVHWPRDLAHDLTAAAVVRPAPGSATDGTGFFESEELLQFRWQLALGGDPLTEAEMDTLAEAHRPVVRLRDQWVLVDPALVRKARKRELGLLDPVDALSAALTGSTEVDGETVEAVPAGALAVLRDRLTAGVRPAEPPEGLQARLRDYQLRGLAWLDLMTSLGLGGCLADDMGLGKTVTVIALHLRRARSEPTLVVCPASLLGNWQREIIRFAPGVPVRRYHGPDRSLEDLDGGFVLTTYGTMRSAAPRFAEQKWGMVVADEAQHVKNPYSATAKALRTIPTPARVALTGTPVENNLSELWALLDWTTPGLLGPLKSFRARHARAVENGEDEEAVERLARLVRPFLLRRKKSDPGIVPELPPKTETDHPVPLTREQASLYEAVVRESMLAIETAEGIGRRGLVLKLLTSLKQICDHPALYLKEDAGGTAGLAARSGKLALLDELLDTLLSEDGSALVFTQYVGMARLITAHLASRAVPVELLHGGTPVPERERMVDRFQSGTTPVLVLSLKAAGTGLNLTRAGHVVHFDRWWNPAVEEQATDRAYRIGQTQPVQVHRLITEGTVEDRIAEMLEAKRALADAILGSGESSLTELTDRDLSDLVSLRRPT

SEQ ID NO: 8299 - protein, 701 aa, Streptomyces avermitilis MA-4680
MLADHARALDALRSALTPLKAELVAAELESIPVSRLKDVTEGRLRLGAVEAAGFTSVRGVYEAGRYELRQLPGVGEQTADRALAAARQIARAVAETVSVRLDVDHPEPRTTALVVALHRLVEAGPELRRALDAATRLDERLGALLPAARPAGGRLRLALAGRHRREDALAAAAETRDLVAEATARDVPLLLAQASTDLLRDPASDIEAWVDFELRSAEYYSQLAEVSEHRPDAEAGEGFLPSGVAERVHAQPLDDTHRRVSLRGYQSFGARFALAQRRVVLGDEMGLGKTVQAIAALAHLAAEGHSHFLVVCPASVLINWTREIRARSTLRALPVHGADRRDAYEEWRERGGVAVTTFDVLHSLPVPDTEKPGMLVVDEAHYVKNPDTRRAKAVTGWTAHCDRVLFLTGTPMENRVEEFRALVRHLQPALLPAVQGGGVAAGPHAFRKSVAPAYLRRNQQDVLTELPALVQVDEWEELSAADRDAYRKAVAEGNFMAMRRAAYADAEKSAKLGRLRELVAEAADNGLKVVVFSYFREVLATVQQCLGEPVLGPISGGVPAARRQRLVDAFAAIDGHAVLLAQIEAGGTGLNLQAASVVILCEPQVKPTMEHQAVARAHRMGQIRTVQVHRLLATDSVDDRLLRILKNKDRLFDAYARRSDIAEATPDAVDVSDASLARRIVEEEQQRLAARPADQPARTTS

SEQ ID NO: 8300 - protein, 1166 aa, Chlamydophila caviae GPIC
MLNFRKLRRDFTANILQDGKELFDQGAVINAKILSMNGESVCIGAQVRGLYDNVYECEIEVDRSKSDTIDSNCDCSYNYDCQHIVALLFYLEKYFNEMVVAYSQEADLETNQEINEEVKKELQETFVAAASREEERKDRAHQKEILSEYVHAANALSANPFFLPQEYLEKNSAELAVLFVASNDEVFRPNQHVEFQLVLRLPGRSKPFYISNIKTFLEGVLYQEPIILNGRRFFFTMQSFNVSDRKLIDLLIRYVRYANQAPEEKLLKSAYLTLTSLGVILAKMYEHQMADRGGGQVGEKESFSGMFCGNLEEPLYWSASAAKMKFDLDFFDTPYKALLMTPLILVDDETLQPEQAILLESNVPGIIHNNVYHHFAPQIRRAHLRSFLRLRDITIPEALFGSFRENALPVFKEYAEVSNVEVLNPFVTLPYVEDIRGVCNISYLDGELEAKLHFIYDSLTIPAASFALKYQDVHAFIRDDGILARNLVEERKITEEVFSGFIYDERDGAFHVKSEKKIVEFMTETIPNNQHRITFNCPETLSDQFIYDETVFDLSFKESSEVNTYEAELKVNGLLKGISLDLLWDCISAKKRFLELPKKGRNVKTPRRGRASSTTKLPCILVLDLEKISPVVQIFNEIGFKVLDNFVEKCPLWSLTGISPEIFKGLPVNFTMTDKLAEIQKQIRGEVAFDFQAVPEQIQATLRSYQTEGIHWLERLRKMHLNGILADDMGLGKTLQAIIAITQSRLEKGKGCSLIVCPTSLVYNWKEEFRKFNPEFKTMIVDGIPSHRRRQLAALSEYDVAITSYNLLQKDIDTYKDFVFDYVVLDEAHHIKNRTTRNAKSVKMIRSGHRLILTGTPIENSLEELWSLFDFLMPGLLSSYDRFVGKYIRTGNYMGNKTDNMVALKKKVAPFILRRMKEDVLEDLPPVSEILYHCHLTDSQKELYHSYAASAKKELSRLVKQEGFDRIHIHVLATLTRLKQICCHPAIFAKDVPEPGDSAKYDLLMDLLSSLVETGHKTVLFSQYTKMLSIIKKDLEARGVRFVYLDGSTKNRLELVNQFNEDPGLLVFLISLKAGGTGLNLVGADTVIHYDMWWNPAVENQATDRVHRIGQNRSVSSYKLVTLNTIEEKILSLQNRKKSLVKKVINSDDEVVSKLTWEEVLELLQI

SEQ ID NO: 8301 - protein, 1205 aa, Chlamydophila caviae GPIC
MVLNALAGFRQTAIDYLATNRQDIALDFSGDCYNIRIPDEDSPDGNWLSTLRFSDIDNLTFASCSCPDGDCCVHLMTAFFSAYDAHGWLPLHHKFDISFWHALFLKLFLEEAQLHADGDRQYSITSPHITLEISALSSEAFTEWLPIIHQTPEPKTYTKKTFPQSVLYRVAKQFFFFSEAGARLDLIENSQGFPTQFAMQWEGISLKGEILDFSTLENLFPKINFSQTSLPGNYSDFSITKVRVAPEESKIYFTVEPIAHDHANQPITEIGSIGYIAGSQQVILPSKETFVSIYLISLLPETLKKQILALLHYDSEERPIRYSIHFLRDSSISFSAYLDTPGDLENGKLIYPDFCYVPEKGLFTVVGLLSPQISFVIKADQVEEFLNNEGMLIREPGFEVFTDRIPEGQLTYNITQQGVLLFHYNTGNPAAIDIHYGPWTYYSGQGFFLQRKADLEIQDGLIVEADHIPNFIMKHEVVLRTIPNFFAPTPPLKNLFFEVHKETKGSGLYLKPVFQGLEEENCRLFGVFLYRENLGFNLLPTPLQPLCSLPRKIPAEQVPDFINQNSQNDKLVFTDPQLCPPVTFELVILSITRPHPSSPLHLHLELKTNIGSIPLGIVLQALKNKKAFVFTKAGFLSFQHCLFQFLKQFISAQKCLIPENTVIATVTDIFKLDALAPLSTHEHISASASDLAFFSQLKAACLPPIPQSLFSTDHKLRPYQNSGLLWLWFLYNHRLSGLLCDEMGLGKTHQATALLDIVFQSAEPTERPKFLIVCPTSVLPHWEHTLATHLPTVSIFAFHGPNKPENLPPTDVIITSYGTLRQNYAKFYKVSFTVTVFDEIHMAKNKNSQIHKILCRLDSQMKLGLTGTPIENNLLEFKGLLDIILPNYLPSDALFKKLFTKKTPAEIDDEIIPSQDLLLKLTRPFILRRTKKLVLPELPEKVESIIPCTLSPEQKKLYQSTLKREKAQIQQLESPEEQTVNYLHVFALLNHLKQICNHPAIFFKNPDKYREHESGKWNAFVRLLHESLSSGYKVVVFSQYIHMIRIIMLYLEEIGVKYASIQGKSLNRKEEIEYFTTDPECRVFVGSLLAAGTGINLTAGNVVIMYDRWWNPAKENQALDRVHRIGQKNTVFIYKLMTEDTLEERIHYLIEKKIRLLDKVISTQNSNILHMLNREDLITILSYKDERNGVDDTANIPNDEENSIF

SEQ ID NO: 8302 - protein, 802 aa, Sulfolobus solfataricus
MWIVHGVWDGKRFGIWAENNEYYRFASVNDLYSLAEALDFYPEFKNENIIFPVDSNGNPVFYDYSSASGVSSFEVTVAKARLDEVFKILRLKKVKDVLYSSSMFFWRDLLKTTLELVKSGDIVPTLNVARKRIDNSLMRETSLYKQEIIWKPLIEDNDIINVANKAPPDAFLENSERLDLIKSFIQEIIHYIVSESLSENYNIILSSILKRRTIDPYSLIQDVKKSNYTLYFALLYNDEGGKIISGLFNKDENTIITFDVIHNNEYLKRIYYDLLSSTTNMYYKLNGLFLGEVNLDAKELDDFLEIVPKLRHRGFKVFTKIKRIRPIIRINSDSYGVFSRNMLSDFDYKISIGDKDISEEEFMKLVSENRTIVELGGNLVEIDEKSLQKIKDLLYKIKSKKIDKIDILRESLLGDIEINDELLDRLRGNKSFQLLEPYNIKANLRPYQIKGFSWMRFMNKLGFGICLADDMGLGKTLQTIAVFSDAKKENELTPSLVICPLSVLKNWEEELSKFAPHLRFAVFHEDRSKIKLEDYDIILTTYAVLLRDTRLKEVEWKYIVIDEAQNIKNPQTKIFKAVKELKSKYRIALTGTPIENKVDDLWSIMTFLNPGLLGSYSEFKSKFATPIKKGDNMAKEELKAIISPFILRRTKYDKAIINDLPDKIETNVYCNLTPEQAAMYKAEVENLFNNIDSVTGIKRKGMILSTLLKLKQIVDHPALLKGGEQSVRRSGKMIRTMEIIEEALDEGDKIAIFTQFVDMGKIIRNIIEKELNTEVPFLYGELSKKERDDRECSHAVILFDII

SEQ ID NO: 8303 - protein, 124 aa, Sulfolobus solfataricus
MRTLPDDIISKFQNNPSVKFIVLSVKAGGFGINLTSANRVIHFDRWWNPAVEDQATDRVYRIGQTRNVIVHKLISVGTLEEKIDQLLAFKRSLFKDIISSGDSWITELSTEELRKVIELSVGGY

SEQ ID NO: 8304 - protein, 133 aa, Saccharomyces pastorianus
EFYANPQAKGKKTMKFNVLLTTYEYILKDRAELGGIKWQFMAVDEAHRLKNAESSLYESLNSFKAANRMLITGTPLQNNIKELAALINFLMPGRFTIDQEIDFENQDAEQEEYIHDLHRRLQPFILRRLKKDV

SEQ ID NO: 8305 - protein, 1041 aa, Mycoplasma penetrans
MKTINIADLKDFFYSPEVVKESSDFLVSTKLSDFLIEEKNSNIIVSCYIDSYSIKVKIEEEHVIDCDCSCDIYLMSKKICAHIVHVIDLYNQYVKHDFAQYRNASDVSFSVAPVIKELSNGKKKIEVEFYFEQSYKKFFINNVEELFSHDDKYYFFPLLFFNKNQIEYNSLLLLNELKNFLNSKDVTYKQKSILIDDNDLGEWIEFCSKFNILFFYQSNSFWNSTTYYLDKYNYDFNEQCKSSINNKRKFLLKTSRDLNIFHFTSKNDLFMFVHSKGKSDLYIYKYDLSYLNDVESFTELINKQISKNDFYKLYLSIKKLFSNYERIIQYLFIIKNNVSKIDPVLEVKVYYEKLLNVLAAKISFFYGDIEYPYKENETNYFKRERFLEQNLLEPLLNFFNYYNAEFSVFEIVDHQKYLDFLNWNRKVIKNDLYKIKISENLIFKPKVKKEFHVSASSFENDFLKIEWSIEGFSEEDVLKVLAAYKQKLKYVTLSDNKVINLDLDINFEKFDEDLKLLNTSIDFIDDRSILVNRLNSNYFLENFTLDNSDGLKEYVKKLYDTEIDVKNELPVNLKNILKKYQVAGYLWLKKLLHLNAGGILADEMGLGKTMQTISLLSDVYYNNKTKLPSLIVCPSSLVYNWKKELSQFAPFLKIGIIDGTQLERNEVLNNIHNYQIIVTSYHLLNKDIEVYRNMEFYLQVLDEAQKIKNHYTQFSKDTKSVNSKYKIALTGTPIENNLLELWSIFDYIMPGFLYDYKLFKSLFQDKIIAKDEEALKKLKTKISPFILRRTKEEVLKELPSKTYKIMTCEFEDKQKEMYYAELSKSQIAIRKGIEDKTINKQGAFIFSVLTKLRQICCSPKLSYENSDINGSKFNLCIDLIKDLIKNNDKILLFSQFTSMIDLIAQELKKLKINFLVLTGETNKKERMELVNEFNNKNNIKIFLISLKAGGTGLTLTSANAVIHYDPWWNLSLENQATDRAHRIGQEKNVFIYKLIVKDSIEEKILSLQESKREIINQIFDENSSNKNSININEILKVLDIE

SEQ ID NO: 8306 - protein, 1149 aa, Geobacter metallireducens
MRGRKKRMPARPGAARERIRSTAAPAVGEKVLNALRDLPAGMIYTLGAKPTVLRGLALAIEKRVKGIDWSPDGATLFAEVMDGSRHHEVRLEANGGFLTPSCDCPLWRPTGHCPHVIAALAVLKKGLVHQAITSLRLDSDYLAEVSGWLSGVEAAQPTAPAVPRLVVERGADGIQARIWLGEHPVSIHDQALPRTVRDFLWTLLNPRESGFIIERYLEAFGDDAPMALRQDDNEIPLRFDRGRVHGTLTLLEQVRGMVIARKGLEDGHPIPDTCFAAYRYYFDIPAGAVRVIDSFEGWDLWNTINYEAAEWSLDTGVSVERNSRTISLPADAFNAIGLTVTEKGLPTILERIRFYGAGGPGEPARITHNYRLRVADMNDTTALLLAEGVYGDAAIPLSAGAFSFFTSRGRSTASVPLRTKKRSSAVIAGCFAALDCVTRAELERTIRHALAGDDFLKRTVKSEAKRIITAFAAACETRETTLLAADGAWLISVAEPKVEAQLLEIPYRLFGAEIFGSSDLAGAMTVNRDALFRQFPALHNRLAEAGFDLVLQDRPVEAVTLDVTLDATRSTLDWFELRPEIRCGTGELTEQEIAEAMASGGVFRRGDSFLLINEESSRILAMLYPEAGVKKRRKAEVVRIPRLQILDWLVLRHHGVSVRLSPEDERIFASLATFEEIPSSPLPERLQATLRHYQVDAFHWLAFLYTHRFGACLADDMGLGKTIQAISLLAALHEGTLPSRVPEPRPHLIVVPPSLLFNWENELARFYPAFTVLTYRGTGRSADFTGVDIVLTSYGIIPRDIGILAEIPFHCIVFDEAQAVKNIQADTTGACRRLRGAFTLCLTGTPVENHLGEYFSVMDLAVPGLLGSYEEFRRQAGNAAAPFLETLVRRTRPFVLRRSKQMIAAELPPKIETDIYLELTPRQKALYTRTVEEVRETVLEAWRGKSPGQARIIALTAILRLRQLCLSPRLLIADSREPSPKVEFLVEQLEELFTEGHSVLVFSQFTSFLDIVEGELSRRGVHYYRLDGSTPVPERKRLVTAFQKGDEPSVFLLSLKAGGKGLNLTRATYVFHLDPWWNPAVENQASDRAHRIGQTRQVTITRLVMRHTIEEKMMELKKRKLKLYHALLEENSAGDGGGISREDFEFLLG

SEQ ID NO: 8307 - protein, 1357 aa, Azotobacter vinelandii
MSSPAVRSTLASLPDAYKALLYVLFLASPRNKSTLLEQLKRLGVRATTSRAMDGVALGEMLETLQRLKWLERGDERDFFRLNPLACNQVLLLLQSEPQWWPKLRGGLVEHAVATPGGLPVSLWRGLWLALLAGEVPELTQLLLGMEADRSELPHPCGQLLADETGRQLFARLTPGVREVLLEDYLTRANEGLVAAGETYRQGLALLDSDQAKSTELAFQLFLQALWRGDWTRFEALGRSEWVPFGGVFEYLLRGKPGEALEQIQEYIRIQRGSRKRRVELPPTLNACYCLLLLVDGDGQQHAALRQALGLGLKKGLGTAYQMFEKLFEQFQGKGVRGADPAYRVQRLEGFDGLLTAIALYWMDAPASSAWQRRLAQFRTELEEEGYAWLAAELDVLLERQFGLPPAQADWHRSLGLRPLVDLYRRQELWEHALAALAALRPGARSSAPPQPQSSHRLAWMIGSPLTPSPAIEPREQRLGAKGQWSKGRPVSLKRLLEETGSFDYLLEQDRRAIQQIQMHSDAFGIRYQLDGERALPHLVGHPALFWSDAPEVRIDLLAGSVALELRQRGAQIHLALSPEGIADCQGLFIERETPTRLVVYPLGREARQIAEIIGGGLTVPQAAKAQLMETIGSIAPLLPIHSDLPELAVNIDKVTADGKLYAHLLPLQDGLRLQLLVRPLAGGSWFRPGQGAESVLGEQDGKPLQAVRDLQAERRKLKQVLQACPALAEADSEGHEWQLAEPQAALQVLSELQALDAELLECVWPEGERMRIRARPGLRQLQLRLRQCGDWFELDGEVVVDDGRVLKLRQLLELLQSNPGRFVRLGEQDWLALGSSLRRRLDELGRLAERSGAEGLRLNSLTAPLLAELAEEVGCFEADAAWKEHLSRLESLRDYRPRVPNTLQAELRDYQLEGFDWMARLAKWGVGACLADDMGLGKTLQTLTLLLHRSAEGPQLVVAPTSVTPNWLAETTRFAPTLRLHAYRESRSLDGLGPRDLVVTSYGLLQQDAESFAAQRWTTVVLDEAQAIKNAASKRSQAAMALQADFRLVATGTPLENHLGELWNLFRFINPGLLGSREHFTQRFAGPIERGDQGARKALKALIQPFILRRLKSQVLDELPARTEVVYRVPLSDAEQHLYEAMRQQALESISQSGEEGSQSLRVLTEITRLRRFCCHPSLVLPDSDLPGSKLAAFAEIVEELLDSRHKALVFSQFVDHLSIVRKWLEERGIRYQYLDGATPAKERMARVEAFQGGDGDIFLISLKAGGTGLNLTAADYVIHLDPWWNPAVEDQASDRAHRMGQQRPVTIYRLVAENTIEERILALHGQKRDLADSLLEGGEVSAKLDAEALLRLLRGG

SEQ ID NO: 8308 - protein, 872 aa, Azotobacter vinelandii
MQPDFLRMRLEDWRDQFDPGTLQRGQDYASQGRCTLLQVAPDEIDASCRGSVTRRYRQHIRLQSRADGWRIDGRCSCPVGHNCKHVVAALLTLQRQSPPAEPKAVLPERRIDDLEPAPQLTLGSHVRLHYDTRKGRMVEQLQHRAALAFRYGDQLAFGKPAKDLLVPGATEILRIRRHSESEARHRRTLAAQGFHIALRKSEALPETVGELLELLDDESWLRWVRHDLPRLREQGWHIEMRPDFHYNLLDIDDWYLHLEPAAGQDWFDLEMGIEVQGQRLSLLPILLHAIRHSPWLLTPEALARRADDELLLVPVSRTPGVTQRVALPFGRLRPLLASLGELFFQRPDEAPQRLRLARPDAARLAALEAELPLHWQGGETLRDFARRLRDLPQQPIAAPAGLRAELRPYQLQGLAWLQALRELRVGGVLADDMGLGKTLQTLAHILLEKEAGRLSAPALIVMPTSLIPNWQDEAARFAPDLRVLALHGPRRSALFGEMGDADLLLTSYALLSRDLKALARQSYHLLILDEAQNIKNPRSKAAQAARELDARHRLCLTGTPMENHLGELWSLFHLLMPGWLGDQQAFKRNYRLPIEKHGDLARLAHLKARVRPFLLRRTKEQVAPELPPKSEITQYLDLSEAQRDRYETLRLAMDSKIRAEIERQGLARSQLLILEALLRLRQVCCDLRLLEDEAVAGCQAADSAKLSALLPMLEELSAEGRRVLLFSQFTGMLELIARELEARKIPYVQLTGATRDRRTPVEEFQAGRVPVFLISLKAGGAGLNLTAADTVIHFDPWWNPAAEAQASDRAYRIGQDKPVFVYRLIARGSVEEKIQHLQKAKAELAHGLLEGAIQGEWRMEEEDIAALFAPLE

SEQ ID NO: 8309 - protein, 188 aa, Azotobacter vinelandii
QALRELRVGGVLADDMGLGKTLQTLAHILLEKEAGRLSAPALIVMPTSLIPNWQDEAARFAPDLRVLALHGPRRSALFGEMGDADLLLTSYALLSRDLKALARQSYHLLILDEAQNIKNPRSKAAQAARELDARHRLCLTGTPMENHLGELWSLFHLLMPGWLGDQQAFKRNYRLPIEKHGDLARLAH

SEQ ID NO: 8310 - protein, 1426 aa, Plasmodium falciparum 3D7
MFRNVRDYFKSSNDVNEEKKNDVGSVHMDENTENYDKESNGFVHRDFNNGINKEDKDYEELDLKKLNVSSNDITKEGNNMNENMMNRKLNSSVEDGNDNNHDKNVHRNIGNDTHVSYDDKRKSYLDNNEENSEQMNDNMKKRKLNEISYDNNEEDEFRNKKDDSMEMNDKEKGSTNMSTINDNNNNHNDDSNNHNDDSNNHNDDSNNHNDDSNNHNDDNNNHNEDNNNHNDDNNNHNDDNNYNSEEKPNYLQEKLEQLLAQTKRYTEKLAGQRLKMNAQMKSSKKGRCLLTEKEEDFMLLKDANEEDEAIILKQPMNINGTMKPYQLEGLNWLYQLYRFKINGILADEMGLGKTLQTISLLCYLRFNKNIKKKSIIICPRSTLDNWYEEIKKWCTPMKAFKYYGNKDQRKELNRNLLHSDFDVLLTTYEIVIKDKSALYDIDWFFLVIDEAHRIKNEKSVLSSSVRFLRSENRLLITGTPLHNNLKELWSLLNFLMPKIFDNSEEFDNLFNISKISTNDNKQSEIITQLHTILKPFMLRRLKVEVEQSLPPKREIYIFVGMSKLQKKLYSDILSKNIDVLNAMTGSKNQMLNILMQLRKCCNHPYLFDGIEEPPYIEGNHLIETSGKMSLLDKLLPRLKKENSRVLLFSQMTRLLDIIDDYCRWKNYPYLRIDGSTPGDERQVRINQFNEPNSKYFIFLLSTRAGGIGINLTTADIVILFDSDYNPQMDIQAMDRAHRIGQKKRVIVYRFVTQNSVEEKIVERAAKKLKLDSLIIQKGKLNLNSAKENNKQELHDILNFGAPEVYKTQDISSISDEDIDIILADAEKRTIEIEKKLKNLENIFDLTNISLDGGLNMYNDLEKEASEESTDEEDSSGSGEETILEGSGNNDIVEENGVKKKKKKKKNINKIRRTIKKFLKNNKKNMTFLDLGERKSKWKVMNTACGRTNKKKMVLHGWRAEARGGHDFQFFNVEKLDELEKIEDKWNNYMINQEKINVLIEAQNEEKDYEKIVTFNEFLDKHAKNIYQIITLINPSLFDEHKDTKEEELLKMGTHSDVNSNDKDYKRSSFMSTDYNMKTTYLNNINSNNNNNNNNINDNVGTSINTIDDQQYFKKKILSLFESGKKLQMIKFKDRNIKNCYTQVANFIKKNFPEKINNNDTNNNKSTTLKNKKLKKGKQTKNVNVEKDIASVDIEKIKLQKQELMKQGFAKWNKAEFNKLMSGLIIYGTNEVEYIYEKYFSNSKKSMEDIKAYLTVFFRKYDQIKGGVRLFDKIKRSDLQKKIIEEENDMITEFVEKQLSEGVDSIEKLQLPSNLRYDFMEKREVLNITEEVKTENEENVLSNEELAYYDRENKILLWLLYQQGVVQIKNIHILTPYYWPEAYNFFKYATTPFENVEYRCRLIVDAIAELYAKKENVPLNNKDKRRI

SEQ ID NO: 8311 - protein, 3328 aa, Plasmodium falciparum 3D7
MNNNSNMREAVPHFTTDNKNNESENSIMKKNLTSNFMGQVNNNKNSTCSATYLNNTNNMNISKDKNYNSNINNDNASISITNSLLNNDQNMSMRPQMGMNKNCGGGLHNSYQKSLLSSYNMNNMSMNHLMNNSMNRYNSLNNNNYPHQDMNQTNMHMTNIKSALQNNNNNNNNDMKGNNMKQNGYMNNNNMNYQRNDMLMRNNSNSFNMAGNFYPYMNNNNNNNNSNNSSNNNNNNNNNSNNNNSNNNNSNNNNNSNNNSSYYGASSVMGLNSNTNNMMNNTSLNNNFNNNNNNMGAENNNKTMSLLNKTGGGSLDNNNTSHQPMKSLQSTINLNNRNINNMNNVSGNNNSNSINSNNINSNSVFNNNNSKGVGSFISNPSMNVKGISSVCNIASYRNSTSFEKTNSIIDNNMRYMNVYNKMGYNNNVNDYHQTYDNSSALNDNLNNKDKKGKEEGNGDNEKNGTSNMMNNDNNNNNNNNNNIGDSKLRKKRGESFNTKGIIGNNAESMIFKTYNKNNDMDENNNKYGMNKGNIEMMKDSSANVSKNDNIMNNLSNNNIGGTTSNPYNLYPNFNLKYPMNMDMFNNNNNNNNMSSFNMLNRNLMNSHLNNNNNNNNNNFSSMSMFNNMGDNNNNNSSSSSMLYNNMNNFNLLNAYNNNDNNNNMNMNSIGVGLNRYNAYKNMENIKNYNEALMSGNVGGAGNNNLSNLMNMNNFNNMGYLNGRSCMNDMNMRLLNNSKFLPGNMGLSNNNYMNDHQYMNNNENLYGMMYNNMDDKNNMKYSRKGSLGAKQQQQQQQQQALSTSKGKKSASQKKKKSKNATATINGLQGGEEKLKKGVSGKIGDDFIMDNNGDLVNDGNNDDNDLYVNTYVKKSTTTKSSTRKSSYYYETAEDKYNEKVRKNEKYDIFVSPNIGTIEGGRTNLRQRRKVHNYAQMEDNYFETDEEDKRVDEEKFLLRQEKQSMGGIDRVLHHRKILDYDKINSICNNPYLYINKKNKLKGNEKNSDSNDKEKSGACDDGANIGKDNNNDVNNEDVVKDETIKNETIKNETIKNETINNETINNETINNETINNETINNENVKKENLADNNNNKKNEVTNVDSNKQTNNNADNDEANAVDEFCEEEDIEDINEVEFLIKWIDKSHIHNFFCTYDYLKNFHGIKKVDNYIKKIRQSFQKRKFMTADEIEQEKIYSEIKKQIEMDAIQAERIVMHKISDITNEQVFLVKWTSCAYDQCTEETKQTLIDHGFGKLIEEYFDRESKIYGMKAMASVWNRGPLSVTKFDPYHETPFYLNEKKLRAYQLTGLNWIVSRMKRNLSVLLADEMGLGKTVQTIAVVGHMLYKEKLIGPYLVIVPQSTVDNWLNEFKSWLPQANVVCYHGNAVSRELIRTHELKKVYVPNKGYRYKFDVCITTPSILNSVSDVELLKKMPWQLMVVDEAHQLKNRQSKRFIELKQFMAESKLLLSGTPLHNNLEELWTLLHFLNPQQYTYYETFQKKYNEIENTSLIGEAKQKQLIQLQHELHEVILRRVKKDVEKSLPNKVERILRVELSPIQIEYYKNILTKNYEQLAKASGGAKNSLQNICMELKKVCNHPFLCAEPLDKDEYKERLVYSSGKICLLEKLLIRLKERGNRVLIFSQMVKMLNILSEYLTLRGFKHQRLDGTMTKEMRKKAMNHFNSKNSDDFVFLLSTKAGGLGINLTSADTVIIYDSDWNPQNDLQAGARAHRIGQTKTVQIYRLVTKDSIEQTILERAKVKMVLDTLVVQGLNKKQNDNVNYVGGETGGSSNGFTREELSKILKFGAQKLWEKNSSKYSPQKLDEDKNAIKGVDVDLDKILEEAEINENANNANKELSLNSELNALQGSSNFFNSGNSLFGNTNLVGTNGATGGSGGIADDLLSSYNNITEFKYEPPANLKSNIYNDSTKADEVDEEENDKDFWDKTIPLEERLKLKRMKEEELLVHGPRKTRAKDMRSVLYMDHGHYYNNTSSSHHNNNAHGNNNEDEDSDEFTIKYNDKNSKHLKKKRQRRTSTHITEKDKFRLYRSLLKFGNPSLRLDDIQEDAKLTKVDKNVILTELNIIVETCNEIVERVSKNEQVDDNKKEKDIVVDGVVNNDDSKTKGSNNDVADVNSKDGNKLKKGIEEENPDASLNTKDEEDNNASTTGSNNITTISCDDSNKQDDNKKKVEEEGEKDDTLINDTIGKEDEEGGTIGTVVSKRRRGSTLNSNSSSVMSHGMKTRDKASKDDDNNNNNNKNDGNNKNDDDHHKNNDDSVEDELLLNQNDDDQLHMKNNENSNDESDGGNNKAKGIDKGKKMDAYTFFIGTNRANALDLCQRLKLFEALHNFIKEQNNDNEYSFKLPLKKCEEVTGEDDENGKNNEKAQTDEKTEDENVKNNEVVENNNNDNNNNIPVDVMIDSSKDYLKLKLPDSIFKHIRDLTSKDVKSWTRTDDENLIRGIYVYGFGSFNEICADAHLNLSHMKNIKCDKIKMRCVRILRMIEEVYNNKGNEQSGGRKRRRTKNKNNANVEGVTMDGSVKKEKRKYNTNSNNNNNNNDNNNNNNNRDVDADMDVDADVDVDVDVDVDVDVDADVEYNESSSKGHLKSGALIKVDKGNNNNNSNTTSRLSSNRKGNHYSRRSGERMKFTHLLVDKNSASAIRKRRGYIKRGTASGVSSSNVVGGTVNGNFVDELNEEVEGEDAFLETQEDNELKERHKSNENNKHHHNQHYYNSKKSKKKKHANVDVSKDDKESKRKRGNNNKLNNEYDYYNYDNNEKEEDDEGGGTKFKDNEYNDDVDDDDDYDDDDDDDEIDPNLQRLPLRFPVIEKRKAKSTILKNAKNETIVCIESSDSSSSTEDKSIRSKGDEYDEEDEDEEEEEEDDENEDDDDDDVEDEDDDEESGECDKEEETGKRKRRRNSRYYKSSNKYIKDNEMLDITSVGANDEYKYEDGDNLERKKRSSKKDKKKKKNKLKEKKNKRKRKRRKIVDENEIMDKIKNLNINHMDYEQQQHCIKKLVKKCIKKYKKLLKLIKKVILLSVENGNQVNEEENQSQVVLEHEQQEDVLSSGRGRRTRTGTRTSTRTSTRRDMDYKKMEGGRRGGGGKTTSDVTTTNSYEKDENMMNKSMTKILPPEIFEKIEEFIIFIGKYIDKFCSICKDMECREKLIQASWEYVSKFVIIIMDGTNNKSSTTNSKTNSNSSSSRTKGKVNNTVKMNNSEVLRDMYKQWKDKKQVKGSDENNNNDDDDNNNNNDNVIEDEKVFIEFFYAKKASFNKNVRDRNYINNDLYSNSNELVYSKKGNKSEEPLSKVRKNELLEENNLNINDSNESINGEVED

SEQ ID NO: 8312 - protein, 1997 aa, Plasmodium falciparum 3D7
MINSDNKCMNDNKESIPKEYKTQDMIEGEKERKNKIIKEYIKNMNEEDFLYLSEHLKIRIDNEIFMSQELNDYINKHIDIICELHFKNFKRPKTHMKKVFIDLTLKLKYLRHLEYLKRKKKKDKENKSKSKKEKNNKNEKDDEMENKKEKNNKNEKDDEMENKKEKNNKNEKDDEMENKKEKNNKNEKDDEMENKKEKNNKNEKDDEMENKKEKNNKNEKDDEMENKKEKNNKNEKDDEIKENMDKVMENQLNQSNILYNKDRIRKNRNNLKDEKDVSNKNILDDNKDIVEFKLQDISSGYSETSCKSTNSIENGNSSSTSSCDDDSSFLFSCSSDCDEETSDEEILSTIHFDEKEMSTLKSLEKAKNVYFAYINKKFKKYNILDHFNMNFLERLNYYFSKLYYQNNNLKQTNEYQNRIKEFLSNEENVKKIELNQSKLRSDILNSMFGFHIINETHPMKLPIKNMNNLSYQNTKVDNIYAYKSNTNKCRVHTKLNQLYETNDNIRNMNYYKTIEYMNSENNINNMNILNEWTNFMDQNINIESISPEQHKKGNRKKKINTKKLYHHDNYNNNNNNNNNDNNNDNNNDNNNDNNNDNNNDNNNNINCIYGEHHNVKHKKRKSTSKSKHIFRSNEVSIHFNDDIKKIEHVAKKELQEYIKQIHNKSKIHNNISSLKQYMLISNWKELTKHNNYMTLLSEEKKRNSKILANLCYNQMKAIDQKRKIILEKEERERMKLLKDNDIEAYMKLIKTAKNKRLQELLDVTEQFLNNMSKCVLYQKKEAYQESSEQNFHGLINHKNEDNEKCHKNYNSKDNNNILQSVHNLTTHGQQNGYNNKKGYDTMYEHNENNTKICNYKNARENYYNISHVVKEKVKQPSILIGGELMKYQLEGLEWLVSLYNNNLHGILADEMGLGKTIQTISLFAYLKEFKNNINVKNLIIVPLSTLPNWISEFNRWCPSLNVITYRGNKLERKHIAKKLLEQTFDICITTFDLVIKEKSFLMKISWNYIVVDEGHRMKNNKSRFHVFLSEFKSKYRILLTGTPLQNNLSELWSLLNFLLPKIFSSCVDFEKWFVKSLHNEKDVYEHITEEEQLLIINRLHSVLLPFMLRRVKKDVLKSLPKKYEYNIHIELSLYQKILYKQIQTKGFKQVNHNGSITTKIFQNIVMQLRKIVNHPYLFLYDYNIDENIIKCSGKFEVLDRMLPKLLKFKHKVLIFSQMTKLMNILCDYLEFRGYKYHRLDGNIGLQERKKIIDQFNNNVEYKKDEGKQPNCEMPGNENMNMSGNENMNMSVNENMNMSVNENMNMSGNENMNMSGNENMNMSGNENMNMSGNENMNMSGNENMNMSGNENMNMSGNENIKMISSQNEKDTSSQSVKISELKKEEINDFQIMDDKNVNGGNQDAMIFILSTRSGSLGLNLQTADTVIIFDSDFNPHQDIQAMCRCHRIGQKNVVKVFRFITLSGVEELVFKKAQHKLSINDKVIQAGLFNKIYNDEDRQNKLKDIIQRNQKNDMTTHPTNPLLLNYYMKRNEEELEYFLDFDKRYFGEQYFSLLNTLNVENVDSGQFTYMSEDEKEENETYLSSIIKKEKKEEEGEDDEENQRDRNKEEDQDEDKDDDKDKDKDKDKEEEEEKKRKHILNNNNNNGIQNGSSINEGVKEKILDEYCNNNTKCVKVSNERLIFKRKHDTDDLQCEDEKIKENEECDVDNIIQNKNNKRLKMECQKDDKDDDINSNIHMDEKKKIYMSSEKDDTTKEYSDTHDPYINDKMQVKDEEDYYGFILKEENQNDIEKILIKSNKLINKDELPAYLFYDDTNDSPDKINLKRSRKVININLMQEEKLTEKQFLKLIDSSSPNLLSSVEKDLGRNKKDIVKSDMEHNNDITTLEEVKDREEIKEEHLETTKNISSLNINDLEINKTLTNENVHSTKKSPYNMRSSKRRSDTSSTYMETSIKKRNDKDIHICLKKGKKRNNSMEHTKQECHVDDENKKRVKKRKSSQ

SEQ ID NO: 8313 - protein, 906 aa, Plasmodium falciparum 3D7
MEVFNFGKYNGKTFEEVFEKHKSYVTWVKSLESPSGSLLDFKNYVLQKEGKKNSSNMANNNHYNNEKNSNNNYSNNMYENNVRSPNIYNEQYTNNNKMKENYDRNANMNNNEICTNNNRINENNVKSPHYYNNEKNINNYSHECNRSKIAYKHNYSENRNSYNNFEKSSVDTNYTNEEKKKFHNMNSSEYRNYEEKVMSDINNAYNQPEEKKEFDIIVAFEIFSDDSFKIVQKDNNNKKFVSFRNFISKDLFKIISELNPTLKKINNYTCITFEAEKYEYVLNNLKEKCTILGGVHTIPNFLLKCFKNYTKFSEPQRISEITANILTNTMCSYTKQHYDKLDHLLGEKLSVELRNFQREGVFFGLKKNGRVLIGDEMGLGKTLQALALMAFYKDDWPFIVVCPSSIRFQWKDQALRWLSHLIREEHICVVKNGKTDIPSNTKMIIISYELITKNDKYQDKYKSIICDESHYLKNSLSKRTKVITPIIKNAKRCVLLSGTPALNKPSELYEQISSIMPNFFNYHEFCDRYCFKDKNLYTKKIEYVGCKHTEELHLFLTNTIMIRRLKKDVLKELPDKLRSKIPVEIPQKELSEILNYYKKLESKKNINFHDIDNIHLSNWSNSKSEDGDDENLSISHLFKITGYAKVKAIKEYISYLIDADIKFLLFCHHKLVMDEVETFLKEQKCSYIRVDGLTPMEKREIYIKNFQNDDNVKIALLSITACGMGLNLTAANTVVFGELFWVPGQIIQAEDRAHRIGTAHDVVNIHYLIAQNTIDEIVWKIINRKWNTLTTALNGIEDSLNVKEVNKFDKFMVDLTNDTNKSYPTSLVTTPKVRRKSSEHGTFHNSSPKKKNRDIRDFFTANKCNESVEKSWNNNINKRSYHDSPMNDSPNTTLKFLSKKYKTEIN

SEQ ID NO: 8314 - protein, 1647 aa, Plasmodium falciparum 3D7
MAKKIDELFSKKERYLKEIIESNCIYVKDLNHWVGTNYIARLKLKKELLKVTPKLLINKTRSRASRCRVCGFSIEKDNLRIGYPTKDPRGDYGYISCWVHIECSKKILYSCLYIEENENVLKGYLHEYKNHNCSGEHYNKYEIYIYNNLQWDLFFGGIENINEEELSKLKEMAKPYEIKNDLKCRNSFEMLINEENEKINSLDYLNVEKKITNYNLIIPKELKYDLLQYQKEGIYWMINQEMSNVKGGILADEMGMGKTIQAITLILCQKLNKLKEIKKDERSDDHDKVGYKNDDEEDEKKKKKKKSHMLHGDIYKEDILSFEERDTKHEKSIKEIDIKKSYKNSSSILYCKNSTSDDLKVKEESDCSVILIESDDTQNEKMNHKNDVMAENKIDTENVLNVKKIKNIKKECVNNKKIKNNNNNNNKSNFKKNDFINKLKGQTLIIAPVAAVMQWKSEIEKFVDENILNVYVYHGNSKIISDEELIKYDIVITSYAVVEVNFRKIVNKHKQPCEYCGRLYLPNNLDIHKKYFCGPTAVRTEKLKKRKKKNKDTALVAMKKFDETFVPTPRNVLLEIMANSKKELEDEKKKNIEISNKSLNHNNTKKNKGKKNNQIKQRNAQKDSNIDVIVLSSDSCKEKSSSSENSVYSPLSRKTSSRIIDLSNLGFDKETMEQVIESLSEGGKKKKNVKNVKNVNSVKNVKSVKNHRDVKWNVVIKNMLENFLYNVDMNDKCKHVLIKIYVTNTTIQNTELEKLNMGELKVVLITMGKHIFGTKVELINRILVSAKYIRKELYDENTETEEKDTSGVHNEDGDTSMGVTNQKGKDKFCKERKIKKEDEKSSIEKKRKTVDVISVGGDVKRDMSLNKRRNTTNRGTTMKIKGETREYASNKGKNNNDDDNNNSYYSDAKSYTSESSDESYQGDICSKKKEPKKNTKSIRRSQRKSYCKSSLESEKKEESDNSYNTNDYNDCDDCDDCDDYNNCDDNNYCDDCDDSSNSFDSYDSIIVRKSKMSKEKKKRENMKIFDESALHQIYWNRIILDEAHRIKNRNTSTTQSILNLKCCGYRWCLTGTPLQNRISELYSLIRFIEFYPYAYYFCSKKDCKCLLLNYEMRDNKYCYFCNHSRINHFNYFNKRILKPIQSFGYRGEGLSGMSYLKNEVLDKILLRRTKGERKSDINLKPLIIKIRKDKLSKEEKDFYESLYKQTSTQFNTYVNSNTVLHNYAHIFDLLSRLRQAADHPYLIIFGNSFLSDPSGKFIKKNTTIIPAISNDYVCGICLENVQKRNNISTKCNHNFHKSCLKQYIESFEMENADQQEEEKEDSNFKNSNMIKYNTYDIGQREGMNNVKSTNSCKYDIVINDDIHNNINKLETHENDNLITSKDLLKNKKSLEKKSKSISVVKFKNKDGYINLLSNDENVKDYPLGCPVCYIPLTVDFNLLVDKEENEEDEIIICKEETTYINKSFINRINTQEYRSSTKIEAVYEEVQNVINNTDDKCLIFSQYCSMLDLIEYHLKKHNIVCSKLLGYMSMISRNNILYNFNQDKQLRVLLISLKAGGEGLNLQVANRIFIVDPWWNPAAELQAIQRAHRIGQTKTVYAIRFIIENTVEEKIIQLQNKKQLVFDSTIGDSGNAMQKLSKEDLAFLFHS

SEQ ID NO: 8315 - protein, 1446 aa, Plasmodium falciparum 3D7
MTSSNYFKNDSKVYKESDKISNYNYDSDVIEIISLNDNDTINSNTQNSSYFSKDVKKNIEYNKNKEMSSDIEIIEDIGNYKYEKIKLEKLKEHQLNSKKAEFIRNKGVYFEYYLGCIETESIILSSEVCEIKDDKNVIISYEISPKSTKRSYSPMYTLKINNNYDISNDYIRIIGRNIPMNNKKVKKKKVSNNKKKNSASSNDGYNEQNYDTNKIISADQKFVEYDKCKSEVLKDIYEGYSCIRIKHNNRDISKLKSNLSKTLSVLLVLNAIRIEIKLEKISQSELKFGGSLKTFVHVILYPDAFKIDSHKFHEYNSLIKYSVNNMFKELKIIPLRLAKNIDEETLETYNVNKDELLKSVSPLKSIIINYNNKNDQVMNKSGETSTGFCTPHKALGYIESKKTIGTKEEEEIIDSLSENEIEEKNEEATNLVFVEEKFRGGYLLEDFEEIYPNEYYFKPMLKTYQAEGVWWMYTRENPPEYTKKLERQKSNINEIIIDDVIKIPTQKNDIVIKSREEIYKNVNNQRKVINIVDITNICKNENYEQKFKGKLENDKLEIKDENIKCDLKVKGETENFETNIKNEHLYIKTEGKEEISNDTIKCKETMDNVKLEESSDYENADDDIRNREPLNPLWEEHAFIPNIKIYEKDKLVCILKYFYVNKLTGAFSLTYPQFVPPFRGGILADEMGLGKTIQSIGLITHDIYHNKLYSKNNNLENKKNFTYLIENTIKGVHFKRGGTLVIAPLALIYQWKEEIERHTKEGFVTCYIYYGTSKDISSEELSGYSVVLTTYSTLVSEYKNTLNKKFSNKAENNNNSTYTNKESFFKDVSSSTTKKKMNNFFMKTVLNSGNKNNDNIFFFDKKKTNTMLYNMKEYPLYNITWRRIIIDEAHVIKNKNSIQSVAVWKLRGERNWCLTGTPIQNSIFDIFPLFRFLGIKPYGTIEWWNKEIVDYVNKNKLNLALDVVRKISSPILLRRTKKSKTKNGNSIISLPKKNIHLEKLEFSLEEEDFYRAIFYRSKTKFDTYMHDGNVLSHYSHVLQLLLRLRQCCSHPLLLFSKPFFEEWNKDDMNDALKNKTDKEDNGDDLKKSEYMNNTDVKKVFKSENNKMDEEIEYNNPSFSKVDHSNENNIGNNLIYNFILGSTKSKNIDDDYSKELEILKNGNVMQCCICLEDATYPLISKCLHIMCKKCADDYFHLTQIADKKCPQCDNYISLKSLKTLQENKSPLDELLKKMKKDNFVYSTKLKKLFEHVQNDMQNELHIVVFSQWIGFLKIIEKLLNLYNIANKIYDGSLTFEQRKATLNWFNIQKGKIYQPGVGFIKPSYVIPVENFAGKVLLCSLKAGGVGLNLTVSSKVYLMDLWWNPAIEDQAFERVHRIGQLKEVNIYKFVLEKTVEERILQIHQSKQYTANQILTQEGNKLNTEMNMVPQKLGMDDFILMFKDWNTDE

SEQ ID NO: 8316 - protein, 1055 aa, Arabidopsis thaliana
MARNSNSDEAFSSEEEEERVKDNEEEDEEELEAVARSSGSDDDEVAAADESPVSDGEAAPVEDDYEDEEDEEKAEISKREKARLKEMQKLKKQKIQEMLESQNASIDADMNNKGKGRLKYLLQQTELFAHFAKSDGSSSQKKAKGRGRHASKITEEEEDEEYLKEEEDGLTGSGNTRLLTQPSCIQGKMRDYQLAGLNWLIRLYENGINGILADEMGLGKTLQTISLLAYLHEYRGINGPHMVVAPKSTLGNWMNEIRRFCPVLRAVKFLGNPEERRHIREDLLVAGKFDICVTSFEMAIKEKTALRRFSWRYIIIDEAHRIKNENSLLSKTMRLFSTNYRLLITGTPLQNNLHELWALLNFLLPEIFSSAETFDEWFQISGENDQQEVVQQLHKVLRPFLLRRLKSDVEKGLPPKKETILKVGMSQMQKQYYKALLQKDLEAVNAGGERKRLLNIAMQLRKCCNHPYLFQGAEPGPPYTTGDHLITNAGKMVLLDKLLPKLKERDSRVLIFSQMTRLLDILEDYLMYRGYLYCRIDGNTGGDERDASIEAYNKPGSEKFVFLLSTRAGGLGINLATADVVILYDSDWNPQVDLQAQDRAHRIGQKKEVQVFRFCTESAIEEKVIERAYKKLALDALVIQQGRLAEQKTVNKDELLQMVRYGAEMVFSSKDSTITDEDIDRIIAKGEEATAELDAKMKKFTEDAIQFKMDDSADFYDFDDDNKDENKLDFKKIVSDNWNDPPKRERKRNYSESEYFKQTLRQGAPAKPKEPRIPRMPQLHDFQFFNIQRLTELYEKEVRYLMQTHQKNQLKDTIDVEEPEGGDPLTTEEVEEKEGLLEEGFSTWSRRDFNTFLRACEKYGRNDIKSIASEMEGKTEEEVERYAKVFKERYKELNDYDRIIKNIERGEARISRKDEIMKAIGKKLDRYRNPWLELKIQYGQNKGKLYNEECDRFMICMIHKLGYGNWDELKAAFRTSSVFRFDWFVKSRTSQELARRCDTLIRLIEKENQEFDERERQARKEKKLAKSATPSKRPLGRQASESPSSTKKRKHLSMR

SEQ ID NO: 8317 - protein, 1057 aa, Arabidopsis thaliana
MARNSNSDEAFSSEEEEERVKDNEEEDEEELEAVARSSGSDDDEVAAADESPVSDGEAAPVEDDYEDEEDEEKAEISKREKARLKEMQKLKKQKIQEMLESQNASIDADMNNKGKGRLKYLLQQTELFAHFAKSDGSSSQKKAKGRGRHASKITEEEEDEEYLKEEEDGLTGSGNTRLLTQPSCIQGKMRDYQLAGLNWLIRLYENGINGILADEMGLGKTLQTISLLAYLHEYRGINGPHMVVAPKSTLGNWMNEIRRFCPVLRAVKFLGNPEERRHIREDLLVAGKFDICVTSFEMAIKEKTALRRFSWRYIIIDEAHRIKNENSLLSKTMRLFSTNYRLLITGTPLQNNLHELWALLNFLLPEIFSSAETFDEWFQISGENDQQEVVQQLHKVLRPFLLRRLKSDVEKGLPPKKETILKVGMSQMQKQYYKALLQKDLEAVNAGGERKRLLNIAMQLRKCCNHPYLFQGAEPGPPYTTGDHLITNAGKMVLLDKLLPKLKERDSRVLIFSQMTRLLDILEDYLMYRGYLYCRIDGNTGGDERDASIEAYNKPGSEKFVFLLSTRAGGLGINLATADVVILYDSDWNPQVDLQAQDRAHRIGQKKEVQVFRFCTESAIEEKVIERAYKKLALDALVIQQGRLAEQKSKSVNKDELLQMVRYGAEMVFSSKDSTITDEDIDRIIAKGEEATAELDAKMKKFTEDAIQFKMDDSADFYDFDDDNKDENKLDFKKIVSDNWNDPPKRERKRNYSESEYFKQTLRQGAPAKPKEPRIPRMPQLHDFQFFNIQRLTELYEKEVRYLMQTHQKNQLKDTIDVEEPEGGDPLTTEEVEEKEGLLEEGFSTWSRRDFNTFLRACEKYGRNDIKSIASEMEGKTEEEVERYAKVFKERYKELNDYDRIIKNIERGEARISRKDEIMKAIGKKLDRYRNPWLELKIQYGQNKGKLYNEECDRFMICMIHKLGYGNWDELKAAFRTSSVFRFDWFVKSRTSQELARRCDTLIRLIEKENQEFDERERQARKEKKLAKSATPSKRPLGRQASESPSSTKKRKHLSMR

SEQ ID NO: 8318 - protein, 1055 aa, Arabidopsis thaliana
MARNSNSDEAFSSEEEEERVKDNEEEDEEELEAVARSSGSDDDEVAAADESPVSDGEAAPVEDDYEDEEDEEKAEISKREKARLKEMQKLKKQKIQEMLESQNASIDADMNNKGKGRLKYLLQQTELFAHFAKSDGSSSQKKAKGRGRHASKITEEEEDEEYLKEEEEGLTGSGNTRLLTQPSCIQGKMRDYQLAGLNWLIRLYENGINGILADEMGLGKTLQTISLLAYLHEYRGINGPHMVVAPKSTLGNWMNEIRRFCPVLRAVKFLGNPEERRHIREDLLVAGKFDICVTSFEMAIKEKTALRRFSWRYIIIDEAHRIKNENSLLSKTMRLFSTNYRLLITGTPLQNNLHELWALLNFLLPEIFSSAETFDEWFQISGENDQQEVVQQLHKVLRPFLLRRLKSDVEKGLPPKKETILKVGMSQMQKQYYKALLQKDLEAVNAGGERKRLLNIAMQLRKCCNHPYLFQGAEPGPPYTTGDHLITNAGKMVLLDKLLPKLKERDSRVLIFSQMTRLLDILEDYLMYRGYLYCRIDGNTGGDERDASIEAYNKPGSEKFVFLLSTRAGGLGINLATADVVILYDSDWNPQVDLQAQDRAHRIGQKKEVQVFRFCTESAIEEKVIERAYKKLALDALVIQQGRLAEQKTVNKDELLQMVRYGAEMVFSSKDSTITDEDIDRIIAKGEEATAELDAKMKKFTEDAIQFKMDDSADFYDFDDDNKDENKLDFKKIVSDNWNDPPKRERKRNYSESEYFKQTLRQGAPAKPKEPRIPRMPQLHDFQFFNIQRLTELYEKEVRYLMQTHQKNQLKDTIDVEEPEGGDPLTTEEVEEKEGLLEEGFSTWSRRDFNTFLRACEKYGRNDIKSIASEMEGKTEEEVERYAKVFKERYKELNDYDRIIKNIERGEARISRKDEIMKAIGKKLDRYRNPWLELKIQYGQNKGKLYNEECDRFMICMIHKLGYGNWDELKAAFRTSSVFRFDWFVKSRTSQELARRCDTLIRLIEKENQEFDERERQARKEKKLAKSATPSKRPLGRQASESPSSTKKRKHLSMR

SEQ ID NO: 8319 - protein, 1041 aa, Arabidopsis thaliana
MVKQLQEQEENDPVEKTKSLISALNYLSRDLLLPSHLYASVSSIYHASVSDLSPSPPLRGNSYTPNRGDLMSEFEDALLQQRLNYESGSRLAELKETRYKNRIHNRLSQLEGLPSNRGEDLQEKCLLELYGLKLQELQCRVRGEVSAEYWLRLNCADPERQLYDWGMMRLPRRMYGVGDSFVMEADDQFRNKRDAERLLRLEEEEKNLIETTQRKFFAEVLNAVREFQLQIQASHRRCKQRNDGVQAWHGKQRQRATRAEKLRIMALKSDDQEEYMKLAKEIQRQKDAKLSENTKLLKGSESDLSDVDAPEDVLPAQDIEIIDSDNNDDSNDLLEGERQFNLAIHSIQEKVTKQPSLLQGGELRSYQLEGLQWMVSLYNNDYNGILADEMGLGKTIQTIALIAYLLESKDLHGPHLILAPKAVLPNWENEFALWAPSISAFLYDGSKEKRTEIRARIAGGKFNVLITHYDLIMRDKAFLKKIDWNYMIVDEGHRLKNHECALAKTLGTGYRIKRRLLLTGTPIQNSLQELWSLLNFLLPHIFNSIHNFEEWFNTPFAECGSASLTDEEELLIINRLHHVIRPFLLRRKKSEVEKFLPGKTQVILKCDMSAWQKLYYKQVTDVGRVGLHSGNGKSKSLQNLTMQLRKCCNHPYLFVGADYNMCKKPEIVRASGKFELLDRLLPKLKKAGHRILLFSQMTRLIDLLEIYLSLNDYMYLRLDGSTKTDQRGILLKQFNEPDSPYFMFLLSTRAGGLGLNLQTADTIIIFDSDWNPQMDQQAEDRAHRIGQKKEVRVFVLVSIGSIEEVILERAKQKMGIDAKVIQAGLFNTTSTAQDRREMLEEIMSKGTSSLGEDVPSEREINRLAARTEEEFWMFEQMDEERRKKENYKTRLMEEKEVPEWAYTSETQEDKTNAKNHFGSLTGKRKRKEAVYSDSLSDLQWMKAMESEDEDASKVSQKRKRTDTKTRMSNGSKAEAVLSESDEEKEEEEEERKEESGKESEEENEKPLHSWKTNKKKRSRYPVMTSSPNSRGKGSSKGSKRN

SEQ ID NO: 8320 - protein, 1132 aa, Arabidopsis thaliana
MVAQQLQERCGGTSQEDPVETTKSLICALNYISRDLPLPPHLFTAVSSIYHGASSSSLSDSDVSPPLPTSPPANKAPYGADLMGEFEDALLKQRPDCESGSRLIQLLDNRNKSHIQRRLSELEGGCFVLTLCVFESELPSTRGEDLQAKCLLELYGLKLRELQGKVRTAVSSEFWLRLNCADVSSQVFDWGMMRLPRPFYGVGDPFAMEADDQFRKKRDAELSIFVIGIADVLKVFVQRLSRLEEEEKNLIETAKRKFFAEVLNAVREFQLQIQATQKRRRQRNDGVQAWHGRQRQRATRAEKLRLMALKSDDQEAYMKLVKESKNERLTTLLEETNKLLANLGAAVQRQKDAKLPEGIDLLKDSESDLSELDAPRSEPLQDLLPDQDIDITESDNNDDSNDLLEGQRQYNSAIHSIQEKVTEQPSLLEGGELRSYQLEGLQWMVSLFNNNLNGILADEMGLGKTIQTISLIAYLLENKGVPGPYLIVAPKAVLPNWVNEFATWVPSIAAFLYDGRLEERKAIREKIAGEGKFNVLITHYDLIMRDKAFLKKIEWYYMIVDEGHRLKNHESALAKTLLTGYRIKRRLLLTGTPIQNSLQELWSLLNFLLPHIFNSVQNFEEWFNAPFADRGNVSLTDEEELLIIHRLHHVIRPFILRRKKDEVEKFLPGKTQVILKCDMSAWQKVYYKQVTDMGRVGLQTGSGKSKSLQNLTMQLRKCCNHPYLFVGGDYNMWKKPEIVRASGKFELLDRLLPKLRKAGHRILLFSQMTRLIDVLEIYLTLNDYKYLRLDGTTKTDQRGLLLKQFNEPDSPYFMFLLSTRAGGLGLNLQTADTVIIFDSDWNPQMDQQAEDRAHRIGQKKEVRVFVLVSVGSVEEVILERAKQKMGIDAKVIQAGLFNTTSTAQDRREMLEEIMRKGTSSLGTDVPSEREINRLAARSEDEFWMFERMDEERRRKENYRARLMQEQEVPEWAYTTQTQEEKLNNGKFHFGSVTGKRKRKEIVYSDTLSELQWLKAVESGEDLSKLSMRYNRREENASNTKTSTSKKVIESIQTVSDGTSEEDEEEQEEERAKEMSGKQRVDKSEEEEEEGEEENDGKAIFKWNTHKKKRSRYSFTCSSSDSRAQSSNGSRRK

SEQ ID NO: 8321 - protein, 764 aa, Arabidopsis thaliana
MVSLRSRKVIPASEMVSDGKTEKDASGDSPTSVLNEEENCEEKSVTVVEEEILLAKNGDSSLISEAMAQEEEQLLKLREDEEKANNAGSAVAPNLNETQFTKLDELLTQTQLYSEFLLEKMEDITINGIESESQKAEPEKTGRGRKRKAASQYNNTKAKRAVAAMISRSKEDGETINSDLTEEETVIKLQNELCPLLTGGQLKSYQLKGVKWLISLWQNGLNGILADQMGLGKTIQTIGFLSHLKGNGLDGPYLVIAPLSTLSNWFNEIARFTPSINAIIYHGDKNQRDELRRKHMPKTVGPKFPIVITSYEVAMNDAKRILRHYPWKYVVIDEGHRLKNHKCKLLRELKHLKMDNKLLLTGTPLQNNLSELWSLLNFILPDIFTSHDEFESWFDFSEKNKNEATKEEEEKRRAQVVSKLHGILRPFILRRMKCDVELSLPRKKEIIMYATMTDHQKKFQEHLVNNTLEAHLGENAIRGQGWKGKLNNLVIQLRKNCNHPDLLQGQIDGSYLYPPVEEIVGQCGKFRLLERLLVRLFANNHKVLIFSQWTKLLDIMDYYFSEKGFEVCRIDGSVKLDERRRQIKDFSDEKSSCSIFLLSTRAGGLGINLTAADTCILYDSDWNPQMDLQAMDRCHRIGQTKPVHVYRLSTAQSIETRVLKRAYSKLKLEHVVIGQGQFHQERAKSSTPLEEEDILALLKEDETAEDKLIQTDISDADLDRLLDRSDLTITAPGETQAAEAFPVKGPGWEVVLPSSGGMLSSLNS

SEQ ID NO: 8322 - protein, 2049 aa, Arabidopsis thaliana
MAQQQSSRLNRLLTLLDTGSTQATRLTAAKQIGDIAKSHPQDLSSLLRKVLHHLRSKKWDTRVAAAHAIGAIVLNVKHPSLSELLNSLATKLGEAGISDNVDEVVAFRNLQSKILANAPFRSFEMNKVLEFGALLASGGQEYDILNDNSKNPRDRVARQKKNLRRRLGLDMCEQFMDVNEMIRDEDLIEQKSNVPANGVGNRLYANCSPHHIQQFVSRMVPRVNSRRPSARELNLLKRKAKISSKDQAKGSCEVADVEMSSSHVASTSKRILSDSLDSSKADIGNEDDIEPDGDGKWPFHSFVEQLILDMFDPAWEIRHGSVMALREILMLHGGSAGVSTEEFSSDNGFELKDVLNKVTREREIDLNMQVSENELEPLRKRPKIEDPSKSFIDNTVLEVIGGDYDINVKDEDAEFLLPPVKVNGQTDCSSTKLEPQSSMDDSTSHSEINHVAEVNNHFEDKSFIEEPVIPKQQEENLEVLDLVKQARHSWIKNFEFLQDCTIRFLCVLSLDRFGDYISDQVVAPVREACAQALGATFKYMNPSLIYETLNILLQMQRRPEWEIRHGSLLGIKYLVAVRQEMLQDLLGYILPACKAGLEDSDDDVRAVAADALIPAAAAIVSLRGQTLLSIVMLLWDILLELDDLSPSTSSIMNLLAEIYSQDDMTLVMHEELSLGEEQNIELNEMGHIESIGERRDVKESPYALSGLAPRLWPFTRHDITSVRFSAIRTLERLLEAGCRKNISGQSKSSFWPSSILGDTLRIVFQNLLLESTEEILECSERVWRLLVQCPVDDLEDTAKFYMASWIELAATPYGSTLDATKMFWPVAPPRKSHFKAAAKMKAVKLENEASSILGFDYARSSASLEKQEDASARSTKIIVGSDMEMSVTRTRVVTASALGIFASRLREGSMQFVVDPLSSTLTSMSGVQRQVGSIVLISWFRETKCKAPSDGSGSLPGFPSPLKKWLLDLLACADPAFPTKDIFLPYAELSRTYTKMRNEASQLLHTVETCHCFDKLLSTNKLNVESVTADETIDFASTLDLWNKESAGNESLEKQVFEDVESSRQQLLSTAGYLKCVQSNLHITVTSLVAAAVVWMSEFPARLNPIILPLMASIKREQEQILQQIAAEALAELIAYCVDRKPSPNDKLIKNICSLTCMDPSETPQASIISSMDIVDDMDFLSSRSNTGKQKAKVVLASGEDRSKVEGFITRRGSELALKHLSLKFGGSLFDKLPKLWECLTEVLVPEIPSDQQKIDLKIESISDPQVVRSIAPVMEETLKPRLLSLLPCIFKCVRHSHVAVRLAASRCVMTMAKSMTTDVMAAVVESAIPMLGDLTCISGRQGAGMLIGLLVQGLGVELVPYSPLLVVPLLRCMSDVDSSVRQSVTRSFAALVPMLPLARGVPPPVGLSKDLSSNAEDAKFLEQLLDNSHIDDYKLCTELKVQLRRYQQEGINWLGFLKRFKLHGILCDDMGLGKTLQASAIVASDAAERRGSTDELDVFPSIIVCPSTLVGHWAFEIEKYIDLSLLSVLQYVGSAQDRVSLREQFNNHNVIITSYDVVRKDVDYLTQFSWNYCILDEGHIIKNAKSKITAAVKQLKAQHRLILSGTPIQNNIMELWSLFDFLMPGFLGTERQFQASYGKPLLAARDPKCSAKDAEAGVLAMEALHKQVMPFLLRRTKEEVLSDLPEKIIQDRYCDLSPVQLKLYEQFSGSSAKQEISSIIKVDGSADSGNADVAPTKASTHVFQALQYLLKLCSHPLLVLGDKVTEPVASDLAAMINGCSDIITELHKVQHSPKLVALQEILEECGIGSDASSSDGTLSVGQHRVLIFAQHKALLDIIEKDLFQAHMKSVTYMRLDGSVVPEKRFEIVKAFNSDPTIDVLLLTTHVGGLGLNLTSADTLVFMEHDWNPMRDHQFANIELNKLWQAMDRAHRLGQKRVVNVHRLIMRGTLEEKVMSLQKFKVSVANTVINAENASMKTMNTDQLLDLFASAETSKKGGGSSKKGSEDNDQIAGTGKGMKAILGNLEELWDQSQYTEEYNLSQFLTKLNG

SEQ ID NO: 8323 - protein, 1384 aa, Arabidopsis thaliana
MSSLVERLRIRSDRKPVYNLDDSDDDDFVPKKDRTFEQVEAIVRTDAKENACQACGESTNLVSCNTCTYAFHAKCLVPPLKDASVENWRCPECVSPLNEIDKILDCEMRPTKSSEQGSSDAEPKPIFVKQYLVKWKGLSYLHCSWVPEKEFQKAYKSNHRLKTRVNNFHRQMESFNNSEDDFVAIRPEWTTVDRILACREEDGELEYLVKYKELSYDECYWESESDISTFQNEIQRFKDVNSRTRRSKDVDHKRNPRDFQQFDHTPEFLKGLLHPYQLEGLNFLRFSWSKQTHVILADEMGLGKTIQSIALLASLFEENLIPHLVIAPLSTLRNWEREFATWAPQMNVVMYFGTAQARAVIREHEFYLSKDQKKIKKKKSGQISSESKQKRIKFDVLLTSYEMINLDSAVLKPIKWECMIVDEGHRLKNKDSKLFSSLTQYSSNHRILLTGTPLQNNLDELFMLMHFLDAGKFGSLEEFQEEFKDINQEEQISRLHKMLAPHLLRRVKKDVMKDMPPKKELILRVDLSSLQKEYYKAIFTRNYQVLTKKGGAQISLNNIMMELRKVCCHPYMLEGVEPVIHDANEAFKQLLESCGKLQLLDKMMVKLKEQGHRVLIYTQFQHMLDLLEDYCTHKKWQYERIDGKVGGAERQIRIDRFNAKNSNKFCFLLSTRAGGLGINLATADTVIIYDSDWNPHADLQAMARAHRLGQTNKVMIYRLINRGTIEERMMQLTKKKMVLEHLVVGKLKTQNINQEELDDIIRYGSKELFASEDDEAGKSGKIHYDDAAIDKLLDRDLVEAEEVSVDDEEENGFLKAFKVANFEYIDENEAAALEAQRVAAESKSSAGNSDRASYWEELLKDKFELHQAEELNALGKRKRSRKQLVSIEEDDLAGLEDVSSDGDESYEAESTDGEAAGQGVQTGRRPYRRKGRDNLEPTPLMEGEGRSFRVLGFNQSQRAIFVQTLMRYGAGNFDWKEFVPRLKQKTFEEINEYGILFLKHIAEEIDENSPTFSDGVPKEGLRIEDVLVRIALLILVQEKVKFVEDHPGKPVFPSRILERFPGLRSGKIWKEEHDKIMIRAVLKHGYGRWQAIVDDKELGIQELICKELNFPHISLSAAEQAGLQGQNGSGGSNPGAQTNQNPGSVITGNNNASADGAQVNSMFYYRDMQRRLVEFVKKRVLLLEKAMNYEYAEEYYGLGGSSSIPTEEPEAEPKIADTVGVSFIEVDDEMLDGLPKTDPITSEEIMGAAVDNNQARVEIAQHYNQMCKLLDENARESVQAYVNNQPPSTKVNESFRALKSINGNINTILSITSDQSKSHEDDTKPDLNNVEMKDTAEETKPLRGGVVDLNVVEGEENIAEASGSVDVKMEEAKEEEKPKNMVVD

SEQ ID NO: 8324 - protein, 3571 aa, Arabidopsis thaliana
MTSSSHNIELEAAKFLHKLIQDSKDEPAKLATKLYVILQHMKTSGKENTMPYQVISRAMDTVVNQHGLDIEALKSSCLPHPGGTQTEDSGSAHLAGSSQAVGVSNEGKATLVENEMTKYDAFTSGRQLGGSNSASQTFYQGSGTQSNRSFDRESPSNLDSTSGISQPHNRSETMNQRDVKSSGKRKRGESSLSWDQNMDNSQIFDSHKIDDQTGEVSKIEMPGNSGDIRNLHVGLSSDAFTTPQCGWQSSEATAIRPAIHKEPGNNVAGEGFLPSGSPFREQQLKQLRAQCLVFLALRNGLVPKKLHVEIALRNTFREEDGFRGELFDPKGRTHTSSDLGGIPDVSALLSRTDNPTGRLDEMDFSSKETERSRLGEKSFANTVFSDGQKLLASRIPSSQAQTQVAVSHSQLTFSPGLTKNTPSEMVGWTGVIKTNDLSTSAVQLDEFHSSDEEEGNLQPSPKYTMSQKWIMGRQNKRLLVDRSWSLKQQKADQAIGSRFNELKESVSLSDDISAKTKSVIELKKLQLLNLQRRLRSEFVYNFFKPIATDVEHLKSYKKHKHGRRIKQLEKYEQKMKEERQRRIRERQKEFFGGLEVHKEKLEDLFKVRRERLKGFNRYAKEFHKRKERLHREKIDKIQREKINLLKINDVEGYLRMVQDAKSDRVKQLLKETEKYLQKLGSKLKEAKLLTSRFENEADETRTSNATDDETLIENEDESDQAKHYLESNEKYYLMAHSIKENINEQPSSLVGGKLREYQMNGLRWLVSLYNNHLNGILADEMGLGKTVQVISLICYLMETKNDRGPFLVVVPSSVLPGWQSEINFWAPSIHKIVYCGTPDERRKLFKEQIVHQKFNVLLTTYEYLMNKHDRPKLSKIHWHYIIIDEGHRIKNASCKLNADLKHYVSSHRLLLTGTPLQNNLEELWALLNFLLPNIFNSSEDFSQWFNKPFQSNGESSALLSEEENLLIINRLHQVLRPFVLRRLKHKVENELPEKIERLIRCEASAYQKLLMKRVEDNLGSIGNAKSRAVHNSVMELRNICNHPYLSQLHSEEVNNIIPKHFLPPIVRLCGKLEMLDRMLPKLKATDHRVLFFSTMTRLLDVMEDYLTLKGYKYLRLDGQTSGGDRGALIDGFNKSGSPFFIFLLSIRAGGVGVNLQAADTVILFDTDWNPQVDLQAQARAHRIGQKKDVLVLRFETVNSVEEQVRASAEHKLGVANQSITAGFFDNNTSAEDRKEYLESLLRESKKEEDAPVLDDDALNDLIARRESEIDIFESIDKQRKENEMETWNTLVHGPGSDSFAHIPSIPSRLVTEDDLKLLYETMKLNDVPMVAKESTVGMKRKDGSMGGLDTHQYGRGKRAREVRSYEEKLTEEEFEKLCQTESPDSPQGKGEGSERSLANDTSNIPVENSSDTLLPTSPTQAITVQPMEPVRPQSHTLKEETQPIKRGRGRPKRTDKALTPVSLSAVSRTQATGNAISSAATGLDFVSSDKRLEAASHPTSSLALTSPDLSGPPGFQSLPASPAPTPIRGRGRGRSRGRGAGRGRRVEGVLHGSNSSITQRTETATSLASDAEATKFALPRSASEIVSRVPKANEGSTSNPDQVSPVHSATTALRSDKAADKDLDAPPGFDSGSHVQTLNVLENSSERKAFAVKKRPLIQGVSSQHPGPNKQPLDLPVSTSSTLLGGGPVQNQNAVSSVCDGSKSPSEGRTYTALQGVTTAPSDATLPMSSQPSDATLPMSSQPVGSTVEAQEANVPSLPAALPAKRRVRNLPSRGETPKRQGKRRGQPLPATDASSARSTGLTPQIEVKVGNLSGTKAKFDAVAKEQPHFSQSVAPDIHSSGSLSQEIRRDTSGTGGSARKQTADVTDVARVMKEIFSETSLLKHKVGEPSATTRTNVPDAQSPGEMNLHTVETHKAEDSSGLKNQEALYNLSKADKLVSDIPHPVPGDLTTSGSVANKDVDIGSSKVAAENELVKIPGGDVDSSVIQLSLGNTLTAKSSLEKCTADQLLGEKLSQEGETTPASDGETCHLAEETASSLSYVRSEPTASASTTAEPLPTDKLEKNISFQDEVKTLNGDKREAILLSSEEQTNVNSKIETNSEELQASRTDEVPHVDGKSVDVANQTVKEDEAKHSVEIQSSMLEPDELPNAGQKGHSSIDLQPLVLVTSNENAMSLDDKDYDPISKSADIEQDPEESVFVQGVGRPKVGTADTQMEDTNDAKLLVGCSVESEEKEKTLQSLIPGDDADTEQDPEESVSDQRPKVGSAYTQMEDTDEAKLLMGCSVESEEKEKTLQSHIPGDDADTEKNPEESVSVQGVDRPKVGTTDTQMEDTNDAKLLVGCSVASEEKEKTLQSHIPGDDADTEQNPEESVSVQGVNRPKVGNANTQMEDTDEAKVLVGCSVESEEKEKTLQSHIPGDDADTEQNPEESVSNFDRPKDGTADTHMEDIDDAKLLVGCSVESEEKEKSLQSHMPSDDAVLHAPFENTKDSKGDDLHGESLVSCPTMEVMEQKGFESETHARTDSGGIDRGNEVSENMSDGVKMNISSVQVPDASHDLNVSQDQTDIPLVGGIDPEHVQENVDVPASPHGAAPNIVIFQSEGHLSPSILPDDVAGQLESMSNDEKTNISSEQVPDVSHDLKVSQDQTDIPPVGGIVPENLQEIVDVPASPHGVVPDVVVSQSEEIQSPSILPDDVPGQPDDGNCEKMDTMQNNTSIDIGITSGKTCQPSSSTQPEDENRNSLSHCEPSEVVEQRDSRDQVCIGSVESQVEISSAILENRSADIQPPQSILVDQKDIEESKEPGIESADVSLHQLADIQAEPSNLVDQMDIEESKEPGTESADVSLHQLADIQPGPSILVDQMDTEKSKEPGTESADVSLHQLADIQPGPSILVDQMDTEKSKEPGTESADVSLHQLADIQPGPSILVDQMDTEEFKNPDVSLHQLADIEPSLSISAVQKNIEDKDQSHVETAGSELVDVSAECSTEPQVQLPPSSEPVGDMHVHLGASKSEIVAEGTDFSSSLPKTEEENAKSQLADTEPSSSLTAVQKNIEDQVETAGCEFVVVSTGCSTEPQVQLPPSAEPVVAEGTEFPSSLLMTGVDNSSHLMTGVDNAKTHLADVVPSSSPTTMEKNIEAQDQDQVTTGGCGLVDVLTECSSEPQLQLPPSAEPVISEGTELATLPLTEEENADSQLANIEPSSSPSVVEKNIEAQDQDQVKTAGCELVSTGCSSEPQVHLPPSAEPDGDIHVHLKETEKSESMVVVGEGTAFPSSLPVTEEGNAESQLADTEPFTSPTVVEKNIKDQEQVETTGCGLVDDSTGCSSEPQVQLPPSAEPMEGTHMHLEETKKSETVVTEIQLADIDPSFSLIVVQTNIEDQDQIETGGCDLINVPSGCSTEPQIQLSSSAEPEEGMHIHLEAAMNSETVVTEGSELPSSLPMTEDENADGQLAEVEPSVSLTVEQTNIEEKDHIETAECELVDVSPGCSSQPEVKFPPSPDAVGGMDVHLETVVTEDTDSNSSLPKTEEKDAENPSDRLDGESDGTTVATVEGTCVESNSLVAEESNIEVPKDNEDV

SEQ ID NO: 8325 - protein, 1187 aa, Arabidopsis thaliana
MEEDEDQFLLSSLGVTSANPEDLEQKILDEATKKPDNDEGGSVEEKSTQLEGTNLLSSSQNELLNKLRAVKFEIDAVASTVENVDEIAAEKGLKKDDESDLQGLHSGSALQHALATDRLRSLKKRKIQLEKELTGLHGQSASSSADHGNLLRDLVKEKPSLKRKLKEIRKPSRRDGKKVKVVSFREDTDFDAVFDGASAGFVETERDELVRKGILTPFHKLDGFERRLQQPGPSNSRNLPEGDDENEDSSIIDRAVQSMSLAAKARPTTKLLDAEDLPKLEPPTAPFRRLRKLYKTPNSPDNEAKKRKAGKKSKKTRPLPEKKWRKRISREDSSLQGSGDGRRILTTSSCEEEELDDFDDADDNERSSVQLEGGLNIPECIFRKLFDYQRVGVQWLWELHCQRAGGIIGDEMGLGKTIQVLSFLGSLHFSKMYKPSIIICPVTLLRQWRREAQKWYPDFHVEILHDSAQDSGHGKGQGKASESDYDSESSVDSDHEPKSKNTKKWDSLLNRVLNSESGLLITTYEQLRLQGEKLLNIEWGYAVLDEGHRIRNPNSDITLVCKQLQTVHRIIMTGAPIQNKLTELWSLFDFVFPGKLGVLPVFEAEFSVPITVGGYANASPLQVSTAYRCAVVLRDLIMPYLLRRMKADVNAHLTKKTEHVLFCSLTVEQRSTYRAFLASSEVEQIFDGNRNSLYGIDVMRKICNHPDLLEREHSHQNPDYGNPERSGKMKVVAEVLKVWKQQGHRVLLFSQTQQMLDILESFLVANEYSYRRMDGLTPVKQRMALIDEFNNSEDMFVFVLTTKVGGLGTNLTGANRVIIFDPDWNPSNDMQARERAWRIGQKKDVTVYRLITRGTIEEKVYHRQIYKHFLTNKILKNPQQRRFFKARDMKDLFILKDDGDSNASTETSNIFSQLAEEINIVGVQSDKKPESDTQLALHKTAEGSSEQTDVEMTDKTGEAMDEETNILKSLFDAHGIHSAVNHDAIMNANDEEEKMRLEHQASQVAQRAAEALRQSRMLRSRESISVPTWTGRSGCAGAPSSVRRRFGSTVNSRLTQTGDKPSAIKNGISAGLSSGKAPSSAELLNRIRGSREQAIGVGLEQPQSSFPSSSGSSSRVGSLQPEVLIRKICSFVQQKGGSADTTSIVNHFRDIVSFNDKQLFKNLLKEIATLEKDQNRSFWVLKSEYKD

SEQ ID NO: 8326 - protein, 3574 aa, Arabidopsis thaliana
MTSSSHNIELEAAKFLHKLIQDSKDEPAKLATKLYVILQHMKTSGKENTMPYQVISRAMDTVVNQHGLDIEALKSSCLPHPGGTQTEDSGSAHLAGSSQAVGVSNEGKATLVENEMTKYDAFTSGRQLGGSNSASQTFYQGSGTQSNRSFDRESPSNLDSTSGISQPHNRSETMNQRDVKSSGKRKRGESSLSWDQNMDNSQIFDSHKIDDQTGEVSKIEMPGNSGDIRNLHVGLSSDAFTTPQCGWQSSEATAIRPAIHKEPGNNVAGEGFLPSGSPFREQQLKQLRAQCLVFLALRNGLVPKKLHVEIALRNTFREEDGFRGELFDPKGRTHTSSDLGGIPDVSALLSRTDNPTGRLDEMDFSSKETERSRLGEKSFANTVFSDGQKLLASRIPSSQAQTQVAVSHSQLTFSPGLTKNTPSEMVGWTGVIKTNDLSTSAVQLDEFHSSDEEEGNLQPSPKYTMSQKWIMGRQNKRLLVDRSWSLKQQKADQAIGSRFNELKESVSLSDDISAKTKSVIELKKLQLLNLQRRLRSEFVYNFFKPIATDVEHLKSYKKHKHGRRIKQLEKYEQKMKEERQRRIRERQKEFFGGLEVHKEKLEDLFKVRRERLKGFNRYAKEFHKRKERLHREKIDKIQREKINLLKINDVEGYLRMVQDAKSDRVKQLLKETEKYLQKLGSKLKEAKLLTSRFENEADETRTSNATDDETLIENEDESDQAKHYLESNEKYYLMAHSIKENINEQPSSLVGGKLREYQMNGLRWLVSLYNNHLNGILADEMGLGKTVQVISLICYLMETKNDRGPFLVVVPSSVLPGWQSEINFWAPSIHKIVYCGTPDERRKLFKEQIVHQKFNVLLTTYEYLMNKHDRPKLSKIHWHYIIIDEGHRIKNASCKLNADLKHYVSSHRLLLTGTPLQNNLEELWALLNFLLPNIFNSSEDFSQWFNKPFQSNGESSAEEALLSEEENLLIINRLHQVLRPFVLRRLKHKVENELPEKIERLIRCEASAYQKLLMKRVEDNLGSIGNAKSRAVHNSVMELRNICNHPYLSQLHSEEVNNIIPKHFLPPIVRLCGKLEMLDRMLPKLKATDHRVLFFSTMTRLLDVMEDYLTLKGYKYLRLDGQTSGGDRGALIDGFNKSGSPFFIFLLSIRAGGVGVNLQAADTVILFDTDWNPQVDLQAQARAHRIGQKKDVLVLRFETVNSVEEQVRASAEHKLGVANQSITAGFFDNNTSAEDRKEYLESLLRESKKEEDAPVLDDDALNDLIARRESEIDIFESIDKQRKENEMETWNTLVHGPGSDSFAHIPSIPSRLVTEDDLKLLYETMKLNDVPMVAKESTVGMKRKDGSMGGLDTHQYGRGKRAREVRSYEEKLTEEEFEKLCQTESPDSPQGKGEGSERSLANDTSNIPVENSSDTLLPTSPTQAITVQPMEPVRPQSHTLKEETQPIKRGRGRPKRTDKALTPVSLSAVSRTQATGNAISSAATGLDFVSSDKRLEAASHPTSSLALTSPDLSGPPGFQSLPASPAPTPIRGRGRGRSRGRGAGRGRRVEGVLHGSNSSITQRTETATSLASDAEATKFALPRSASEIVSRVPKANEGSTSNPDQVSPVHSATTALRSDKAADKDLDAPPGFDSGSHVQTLNVLENSSERKAFAVKKRPLIQGVSSQHPGPNKQPLDLPVSTSSTLLGGGPVQNQNAVSSVCDGSKSPSEGRTYTALQGVTTAPSDATLPMSSQPSDATLPMSSQPVGSTVEAQEANVPSLPAALPAKRRVRNLPSRGETPKRQGKRRGQPLPATDASSARSTGLTPQIEVKVGNLSGTKAKFDAVAKEQPHFSQSVAPDIHSSGSLSQEIRRDTSGTGGSARKQTADVTDVARVMKEIFSETSLLKHKVGEPSATTRTNVPDAQSPGEMNLHTVETHKAEDSSGLKNQEALYNLSKADKLVSDIPHPVPGDLTTSGSVANKDVDIGSSKVAAENELVKIPGGDVDSSVIQLSLGNTLTAKSSLEKCTADQLLGEKLSQEGETTPASDGETCHLAEETASSLSYVRSEPTASASTTAEPLPTDKLEKNISFQDEVKTLNGDKREAILLSSEEQTNVNSKIETNSEELQASRTDEVPHVDGKSVDVANQTVKEDEAKHSVEIQSSMLEPDELPNAGQKGHSSIDLQPLVLVTSNENAMSLDDKDYDPISKSADIEQDPEESVFVQGVGRPKVGTADTQMEDTNDAKLLVGCSVESEEKEKTLQSLIPGDDADTEQDPEESVSDQRPKVGSAYTQMEDTDEAKLLMGCSVESEEKEKTLQSHIPGDDADTEKNPEESVSVQGVDRPKVGTTDTQMEDTNDAKLLVGCSVASEEKEKTLQSHIPGDDADTEQNPEESVSVQGVNRPKVGNANTQMEDTDEAKVLVGCSVESEEKEKTLQSHIPGDDADTEQNPEESVSNFDRPKDGTADTHMEDIDDAKLLVGCSVESEEKEKSLQSHMPSDDAVLHAPFENTKDSKGDDLHGESLVSCPTMEVMEQKGFESETHARTDSGGIDRGNEVSENMSDGVKMNISSVQVPDASHDLNVSQDQTDIPLVGGIDPEHVQENVDVPASPHGAAPNIVIFQSEGHLSPSILPDDVAGQLESMSNDEKTNISSEQVPDVSHDLKVSQDQTDIPPVGGIVPENLQEIVDVPASPHGVVPDVVVSQSEEIQSPSILPDDVPGQPDDGNCEKMDTMQNNTSIDIGITSGKTCQPSSSTQPEDENRNSLSHCEPSEVVEQRDSRDQVCIGSVESQVEISSAILENRSADIQPPQSILVDQKDIEESKEPGIESADVSLHQLADIQAEPSNLVDQMDIEESKEPGTESADVSLHQLADIQPGPSILVDQMDTEKSKEPGTESADVSLHQLADIQPGPSILVDQMDTEKSKEPGTESADVSLHQLADIQPGPSILVDQMDTEEFKNPDVSLHQLADIEPSLSISAVQKNIEDKDQSHVETAGSELVDVSAECSTEPQVQLPPSSEPVGDMHVHLGASKSEIVAEGTDFSSSLPKTEEENAKSQLADTEPSSSLTAVQKNIEDQVETAGCEFVVVSTGCSTEPQVQLPPSAEPVVAEGTEFPSSLLMTGVDNSSHLMTGVDNAKTHLADVVPSSSPTTMEKNIEAQDQDQVTTGGCGLVDVLTECSSEPQLQLPPSAEPVISEGTELATLPLTEEENADSQLANIEPSSSPSVVEKNIEAQDQDQVKTAGCELVSTGCSSEPQVHLPPSAEPDGDIHVHLKETEKSESMVVVGEGTAFPSSLPVTEEGNAESQLADTEPFTSPTVVEKNIKDQEQVETTGCGLVDDSTGCSSEPQVQLPPSAEPMEGTHMHLEETKKSETVVTEIQLADIDPSFSLIVVQTNIEDQDQIETGGCDLINVPSGCSTEPQIQLSSSAEPEEGMHIHLEAAMNSETVVTEGSELPSSLPMTEDENADGQLAEVEPSVSLTVEQTNIEEKDHIETAECELVDVSPGCSSQPEVKFPPSPDAVGGMDVHLETVVTEDTDSNSSLPKTEEKDAENPSDRLDGESDGTTVATVEGTCVESNSLVAEESNIEVPKDNEDV

SEQ ID NO: 8327 - protein, 3529 aa, Arabidopsis thaliana
MTSSSHNIELEAAKFLHKLIQDSKDEPAKLATKLYVILQHMKTSGKENTMPYQVISRAMDTVVNQHGLDIEALKSSCLPHPGGTQTEDSGSAHLAGSSQAVGVSNEGKATLVENEMTKYDAFTSGRQLGGSNSASQTFYQGSGTQSNRSFDRESPSNLDSTSGISQPHNRSETMNQRDVKSSGKRKRGESSLSWDQNMDNSQIFDSHKIDDQTGEVSKIEMPGNSGDIRNLHVGLSSDAFTTPQCGWQSSEATAIRPAIHKEPGNNVAGEGFLPSGSPFREQQLKQLRAQCLVFLALRNGLVPKKLHVEIALRNTFREEDGFRGELFDPKGRTHTSSDLGGIPDVSALLSRTDNPTGRLDEMDFSSKETERSRLGEKSFANTVFSDGQKLLASRIPSSQAQTQVAVSHSQLTFSPGLTKNTPSEMVGWTGVIKTNDLSTSAVQLDEFHSSDEEEGNLQPSPKYTMSQKWIMGRQNKRLLVDRSWSLKQQKADQAIGSRFNELKESVSLSDDISAKTKSVIELKKLQLLNLQRRLRSEFVYNFFKPIATDVEHLKSYKKHKHGRRIKQLEKYEQKMKEERQRRIRERQKEFFGGLEVHKEKLEDLFKVRRERLKGFNRYAKEFHKRKERLHREKIDKIQREKINLLKINDVEGYLRMVQDAKSDRVKQLLKETEKYLQKLGSKLKEAKLLTSRFENEADETRTSNATDDETLIENEDESDQAKHYLESNEKYYLMAHSIKENINEQPSSLVGGKLREYQMNGLRWLVSLYNNHLNGILADEMGLGKTVQVISLICYLMETKNDRGPFLVVVPSSVLPGWQSEINFWAPSIHKIVYCGTPDERRKLFKEQIVHQKFNVLLTTYEYLMNKHDRPKLSKIHWHYIIIDEGHRIKNASCKLNADLKHYVSSHRLLLTGTPLQNNLEELWALLNFLLPNIFNSSEDFSQWFNKPFQSNGESSAEEALLSEEENLLIINRLHQVLRPFVLRRLKHKVENELPEKIERLIRCEASAYQKLLMKRVEDNLGSIGNAKSRAVHNSVMELRNICNHPYLSQLHSEEVNNIIPKHFLPPIVRLCGKLEMLDRMLPKLKATDHRVLFFSTMTRLLDVMEDYLTLKGYKYLRLDGQTSGGDRGALIDGFNKSGSPFFIFLLSIRAGGVGVNLQAADTVILFDTDWNPQVDLQAQARAHRIGQKKDVLVLRFETVNSVEEQVRASAEHKLGVANQSITAGFFDNNTSAEDRKEYLESLLRESKKEEDAPVLDDDALNDLIARRESEIDIFESIDKQRKENEMETWNTLVHGPGSDSFAHIPSIPSRLVTEDDLKLLYETMKLNDVPMVAKESTVGMKRKDGSMGGLDTHQYGRGKRAREVRSYEEKLTEEEFEKLCQTESPDSPQGKGEGSERSLANDTSNIPVENSSDTLLPTSPTQAITVQPMEPVRPQSHTLKEETQPIKRGRGRPKRTDKALTPVSLSAVSRTQATGNAISSAATGLDFVSSDKRLEAASHPTSSLALTSPDLSGPPGFQSLPASPAPTPIRGRGRGRSRGRGAGRGRRVEGVLHGSNSSITQRTETATSLASDAEATKFALPRSASEIVSRVPKANEGSTSNPDQVSPVHSATTALRSDKAADKDLDAPPGFDSGSHVQTLNVLENSSERKAFAVKKRPLIQGVSSQHPGPNKQPLDLPVSTSSTLLGGGPVQNQNAVSSVCDGSKSPSEGRTYTALQGVTTAPSDATLPMSSQPSDATLPMSSQPVGSTVEAQEANVPSLPAALPAKRRVRNLPSRGETPKRQGKRRGQPLPATDASSARSTGLTPQIEVKVGNLSGTKAKFDAVAKEQPHFSQSVAPDIHSSGSLSQEIRRDTSGTGGSARKQTADVTDVARVMKEIFSETSLLKHKVGEPSATTRTNVPDAQSPGEMNLHTVETHKAEDSSGLKNQEALYNLSKADKLVSDIPHPVPGDLTTSGSVANKDVDIGSSKVAAENELVKIPGGDVDSSVIQLSLGNTLTAKSSLEKCTADQLLGEKLSQEGETTPASDGETCHLAEETASSLSYVRSEPTASASTTAEPLPTDKLEKNISFQDEVKTLNGDKREAILLSSEEQTNVNSKIETNSEELQASRTDEVPHVDGKSVDVANQTVKEDEAKHSVEIQSSMLEPDELPNAGQKGHSSIDLQPLVLVTSNENAMSLDDKDYDPISKSADIEQDPEESVFVQGVGRPKVGTADTQMEDTNDAKLLVGCSVESEEKEKTLQSLIPGDDADTEQDPEESVSDQRPKVGSAYTQMEDTDEAKLLMGCSVESEEKEKTLQSHIPGDDADTEKNPEESVSVQGVDRPKVGTTDTQMEDTNDAKLLVGCSVASEEKEKTLQSHIPGDDADTEQNPEESVSVQGVNRPKVGNANTQMEDTDEAKVLVGCSVESEEKEKTLQSHIPGDDADTEQNPEESVSNFDRPKDGTADTHMEDIDDAKLLVGCSVESEEKEKSLQSHMPSDDAVLHAPFENTKDSKGDDLHGESLVSCPTMEVMEQKGFESETHARTDSGGIDRGNEVSENMSDGVKMNISSVQVPDASHDLNVSQDQTDIPLVGGIDPEHVQENVDVPASPHGAAPNIVIFQSEGHLSPSILPDDVAGQLESMSNDEKTNISSEQVPDVSHDLKVSQDQTDIPPVGGIVPENLQEIVDVPASPHGVVPDVVVSQSEEIQSPSILPDDVPGQPDDGNCEKMDTMQNNTSIDIGITSGKTCQPSSSTQPEDENRNSLSHCEPSEVVEQRDSRDQVCIGSVESQVEISSAILENRSADIQPPQSILVDQKDIEESKEPGIESADVSLHQLADIQAEPSNLVDQMDIEESKEPGTESADVSLHQLADIQPGPSILVDQMDTEKSKEPGTESADVSLHQLADIQPGPSILVDQMDTEKSKEPGTESADVSLHQLADIQPGPSILVDQMDTEEFKNPDVSLHQLADIEPSLSISAVQKNIEDKDQSHVETAGSELVDVSAECSTEPQVQLPPSSEPVGDMHVHLGASKSEIVAEGTDFSSSLPKTEEENAKSQLADTEPSSSLTAVQKNIEDQVETAGCEFVVVSTGCSTEPQVQLPPSAEPVVAEGTEFPSSLLMTGVDNSSHLMTGVDNAKTHLADVVPSSSPTTMEKNIEAQDQDQVTTGGCGLVDVLTECSSEPQLQLPPSAEPVISEGTELATLPLTEEENADSQLANIEPSSSPSVVEKNIEAQDQDQVKTAGCELVSTGCSSEPQVHLPPSAEPDGDIHVHLKETEKSESMVVVGEGTAFPSSLPVTEEGNAESQLADTEPFTSPTVVEKNIKDQEQVETTGCGLVDDSTGCSSEPQVQLPPSAEPMEGGCDLINVPSGCSTEPQIQLSSSAEPEEGMHIHLEAAMNSETVVTEGSELPSSLPMTEDENADGQLAEVEPSVSLTVEQTNIEEKDHIETAECELVDVSPGCSSQPEVKFPPSPDAVGGMDVHLETVVTEDTDSNSSLPKTEEKDAENPSDRLDGESDGTTVATVEGTCVESNSLVAEESNIEVPKDNEDV

SEQ ID NO: 8328 - protein, 1359 aa, Arabidopsis thaliana
MSSLVERLRIRSDRKPVYNLDDSDDDDFVPKKDRTFEQVEAIVRTDAKENACQACGESTNLVSCNTCTYAFHAKCLVPPLKDASVENWRCPECVSPLNEIDKILDCEMRPTKSSEQGSSDAEPKPIFVKQYLVKVPEKEFQKAYKSNHRLKTRVNNFHRQMESFNNSEDDFVAIRPEWTTVDRILACREEDGELEYLVKYKELSYDECYWESESDISTFQNEIQRFKDVNSRTRRSKDVDHKRNPRDFQQFDHTPEFLKDVMIYLFPAIEGLLHPYQLEGLNFLRFSWSKQTHVILADEMGLGKTIQSIALLASLFEENLIPHLVIAPLSTLRNWEREFATWAPQMNVVMYFGTAQARAVIREHEFYLSKDQKKIKKKKSGQISSESKQKRIKFDVLLTSYEMINLDSAVLKPIKWECMIVDEGHRLKNKDSKLFSSLTQYSSNHRILLTGTPLQNNLDELFMLMHFLDAGKFGSLEEFQEEFKDINQEEQISRLHKMLAPHLLRRVKKDVMKDMPPKKELILRVDLSSLQKEYYKAIFTRNYQVLTKKGGAQISLNNIMMELRKVCCHPYMLEGVEPVIHDANEAFKQLLESCGKLQLLDKMMVKLKEQGHRVLIYTQFQHMLDLLEDYCTHKKWQYERIDGKVGGAERQIRIDRFNAKNSNKFCFLLSTRAGGLGINLATADTVIIYDSDWNPHADLQAMARAHRLGQTNKVMIYRLINRGTIEERMMQLTKKKMVLEHLVVGKLKTQNINQEELDDIIRYGSKELFASEDDEAGKSGKIHYDDAAIDKLLDRDLVEAEEVSVDDEEENGFLKAFKVANFEYIDENEAAALEAQRVAAESKSSAGNSDRASYWEELLKDKFELHQAEELNALGKRKRSRKQLVSIEEDDLAGLEDVSSDGDESYEAESTDGEAAGQGVQTGRRPYRRKGRDNLEPTPLMEGEGRSFRVLGFNQSQRAIFVQTLMRYGILFLKHIAEEIDENSPTFSDGVPKEGLRIEDVLVRIALLILVQEKVKFVEDHPGKPVFPSRILERFPGLRSGKIWKEEHDKIMIRAVLKHGYGRWQAIVDDKELGIQELICKELNFPHISLSAAEQAGLQGQNGSGGSNPGAQTNQNPGSVITGNNNASADGAQVNSMFYYRDMQRRLVEFVKKRVLLLEKAMNYEYAEEYYGLGGSSSIPTEEPEAEPKIADTVGVSFIEVDDEMLDGLPKTDPITSEEIMGAAVDNNQARVEIAQHYNQMCKLLDENARESVQAYVNNQPPSTKVNESFRALKSINGNINTILSITSDQSKSHEDDTKPDLNNVEMKDTAEETKPLRGGVVDLNVVEGEENIAEASGSVDVKMEEAKEEEKPKNMVVD

SEQ ID NO: 8329 - protein, 3574 aa, Arabidopsis thaliana
MTSSSHNIELEAAKFLHKLIQDSKDEPAKLATKLYVILQHMKTSGKENTMPYQVISRAMDTVVNQHGLDIEALKSSCLPHPGGTQTEDSGSAHLAGSSQAVGVSNEGKATLVENEMTKYDAFTSGRQLGGSNSASQTFYQGSGTQSNRSFDRESPSNLDSTSGISQPHNRSETMNQRDVKSSGKRKRGESSLSWDQNMDNSQIFDSHKIDDQTGEVSKIEMPGNSGDIRNLHVGLSSDAFTTPQCGWQSSEATAIRPAIHKEPGNNVAGEGFLPSGSPFREQQLKQLRAQCLVFLALRNGLVPKKLHVEIALRNTFREEDGFRGELFDPKGRTHTSSDLGGIPDVSALLSRTDNPTGRLDEMDFSSKETERSRLGEKSFANTVFSDGQKLLASRIPSSQAQTQVAVSHSQLTFSPGLTKNTPSEMVGWTGVIKTNDLSTSAVQLDEFHSSDEEEGNLQPSPKYTMSQKWIMGRQNKRLLVDRSWSLKQQKADQAIGSRFNELKESVSLSDDISAKTKSVIELKKLQLLNLQRRLRSEFVYNFFKPIATDVEHLKSYKKHKHGRRIKQLEKYEQKMKEERQRRIRERQKEFFGGLEVHKEKLEDLFKVRRERLKGFNRYAKEFHKRKERLHREKIDKIQREKINLLKINDVEGYLRMVQDAKSDRVKQLLKETEKYLQKLGSKLKEAKLLTSRFENEADETRTSNATDDETLIENEDESDQAKHYLESNEKYYLMAHSIKENINEQPSSLVGGKLREEQMNGLRWLVSLYNNHLNGILADEMGLGKTVQVISLICYLMETKNDRGPFLVVVPSSVLPGWQSEINFWAPSIHKIVYCGTPDERRKLFKEQIVHQKFNVLLTTYEYLMNKHDRPKLSKIHWHYIIIDEGHRIKNASCKLNADLKHYVSSHRLLLTGTPLQNNLEELWALLNFLLPNIFNSSEDFSQWFNKPFQSNGESSAEEALLSEEENLLIINRLHQVLRPFVLRRLKHKVENELPEKIERLIRCEASAYQKLLMKRVEDNLGSIGNAKSRAVHNSVMELRNICNHPYLSQLHSEEVNNIIPKHFLPPIVRLCGKLEMLDRMLPKLKATDHRVLFFSTMTRLLDVMEDYLTLKGYKYLRLDGQTSGGDRGALIDGFNKSGSPFFIFLLSIRAGGVGVNLQAADTVILFDTDWNPQVDLQAQARAHRIGQKKDVLVLRFETVNSVEEQVRASAEHKLGVANQSITAGFFDNNTSAEDRKEYLESLLRESKKEEDAPVLDDDALNDLIARRESEIDIFESIDKQRKENEMETWNTLVHGPGSDSFAHIPSIPSRLVTEDDLKLLYETMKLNDVPMVAKESTVGMKRKDGSMGGLDTHQYGRGKRAREVRSYEEKLTEEEFEKLCQTESPDSPQGKGEGSERSLANDTSNIPVENSSDTLLPTSPTQAITVQPMEPVRPQSHTLKEETQPIKRGRGRPKRTDKALTPVSLSAVSRTQATGNAISSAATGLDFVSSDKRLEAASHPTSSLALTSPDLSGPPGFQSLPASPAPTPIRGRGRGRSRGRGAGRGRRVEGVLHGSNSSITQRTETATSLASDAEATKFALPRSASEIVSRVPKANEGSTSNPDQVSPVHSATTALRSDKAADKDLDAPPGFDSGSHVQTLNVLENSSERKAFAVKKRPLIQGVSSQHPGPNKQPLDLPVSTSSTLLGGGPVQNQNAVSSVCDGSKSPSEGRTYTALQGVTTAPSDATLPMSSQPSDATLPMSSQPVGSTVEAQEANVPSLPAALPAKRRVRNLPSRGETPKRQGKRRGQPLPATDASSARSTGLTPQIEVKVGNLSGTKAKFDAVAKEQPHFSQSVAPDIHSSGSLSQEIRRDTSGTGGSARKQTADVTDVARVMKEIFSETSLLKHKVGEPSATTRTNVPDAQSPGEMNLHTVETHKAEDSSGLKNQEALYNLSKADKLVSDIPHPVPGDLTTSGSVANKDVDIGSSKVAAENELVKIPGGDVDSSVIQLSLGNTLTAKSSLEKCTADQLLGEKLSQEGETTPASDGETCHLAEETASSLSYVRSEPTASASTTAEPLPTDKLEKNISFQDEVKTLNGDKREAILLSSEEQTNVNSKIETNSEELQASRTDEVPHVDGKSVDVANQTVKEDEAKHSVEIQSSMLEPDELPNAGQKGHSSIDLQPLVLVTSNENAMSLDDKDYDPISKSADIEQDPEESVFVQGVGRPKVGTADTQMEDTNDAKLLVGCSVESEEKEKTLQSLIPGDDADTEQDPEESVSDQRPKVGSAYTQMEDTDEAKLLMGCSVESEEKEKTLQSHIPGDDADTEKNPEESVSVQGVDRPKVGTTDTQMEDTNDAKLLVGCSVASEEKEKTLQSHIPGDDADTEQNPEESVSVQGVNRPKVGNANTQMEDTDEAKVLVGCSVESEEKEKTLQSHIPGDDADTEQNPEESVSNFDRPKDGTADTHMEDIDDAKLLVGCSVESEEKEKSLQSHMPSDDAVLHAPFENTKDSKGDDLHGESLVSCPTMEVMEQKGFESETHARTDSGGIDRGNEVSENMSDGVKMNISSVQVPDASHDLNVSQDQTDIPLVGGIDPEHVQENVDVPASPHGAAPNIVIFQSEGHLSPSILPDDVAGQLESMSNDEKTNISSEQVPDVSHDLKVSQDQTDIPPVGGIVPENLQEIVDVPASPHGVVPDVVVSQSEEIQSPSILPDDVPGQPDDGNCEKMDTMQNNTSIDIGITSGKTCQPSSSTQPEDENRNSLSHCEPSEVVEQRDSRDQVCIGSVESQVEISSAILENRSADIQPPQSILVDQKDIEESKEPGIESADVSLHQLADIQAEPSNLVDQMDIEESKEPGTESADVSLHQLADIQPGPSILVDQMDTEKSKEPGTESADVSLHQLADIQPGPSILVDQMDTEKSKEPGTESADVSLHQLADIQPGPSILVDQMDTEEFKNPDVSLHQLADIEPSLSISAVQKNIEDKDQSHVETAGSELVDVSAECSTEPQVQLPPSSEPVGDMHVHLGASKSEIVAEGTDFSSSLPKTEEENAKSQLADTEPSSSLTAVQKNIEDQVETAGCEFVVVSTGCSTEPQVQLPPSAEPVVAEGTEFPSSLLMTGVDNSSHLMTGVDNAKTHLADVVPSSSPTTMEKNIEAQDQDQVTTGGCGLVDVLTECSSEPQLQLPPSAEPVISEGTELATLPLTEEENADSQLANIEPSSSPSVVEKNIEAQDQDQVKTAGCELVSTGCSSEPQVHLPPSAEPDGDIHVHLKETEKSESMVVVGEGTAFPSSLPVTEEGNAESQLADTEPFTSPTVVEKNIKDQEQVETTGCGLVDDSTGCSSEPQVQLPPSAEPMEGTHMHLEETKKSETVVTEIQLADIDPSFSLIVVQTNIEDQDQIETGGCDLINVPSGCSTEPQIQLSSSAEPEEGMHIHLEAAMNSETVVTEGSELPSSLPMTEDENADGQLAEVEPSVSLTVEQTNIEEKDHIETAECELVDVSPGCSSQPEVKFPPSPDAVGGMDVHLETVVTEDTDSNSSLPKTEEKDAENPSDRLDGESDGTTVATVEGTCVESNSLVAEESNIEVPKDNEDV

SEQ ID NO: 8330 - protein, 1339 aa, Arabidopsis thaliana
MTSSSHNIELEAAKFLHKLIQDSKDEPAKLATKLYVILQHMKTSGKENTMPYQVISRAMDTVVNQHGLDIEALKSSCLPHPGGTQTEDSGSAHLAGSSQAVGVSNEGKATLVENEMTKYDAFTSGRQLGGSNSASQTFYQGSGTQSNRSFDRESPSNLDSTSGISQPHNRSETMNQRDVKSSGKRKRGESSLSWDQNMDNSQIFDSHKIDDQTGEVSKIEMPGNSGDIRNLHVGLSSDAFTTPQCGWQSSEATAIRPAIHKEPGNNVAGEGFLPSGSPFREQQLKQLRAQCLVFLALRNGLVPKKLHVEIALRNTFREEDGFRGELFDPKGRTHTSSDLGGIPDVSALLSRTDNPTGRLDEMDFSSKETERSRLGEKSFANTVFSDGQKLLASRIPSSQAQTQVAVSHSQLTFSPGLTKNTPSEMVGWTGVIKTNDLSTSAVQLDEFHSSVLLTNLIDNSSNMDIWHIADEEEGNLQPSPKYTMSQKWIMGRQNKRLLVDRSWSLKQQKADQAIGSRFNELKESVSLSDDISAKTKSVIELKKLQLLNLQRRLRSEFVYNFFKPIATDVEHLKSYKKHKHGRRIKQLEKYEQKMKEERQRRIRERQKEFFGGLEVHKEKLEDLFKVRRERLKGFNRYAKEFHKRKERLHREKIDKIQREKINLLKINDVEGYLRMVQDAKSDRVKQLLKETEKYLQKLGSKLKEAKLLTSRFENEADETRTSNATDDETLIENEDESDQAKASYISAFFHLFLMVMIHTIQHYLESNEKYYLMAHSIKENINEQPSSLVGGKLREYQMNGLRWLVSLYNNHLNGILADEMGLGKTVQMGLGKTVQVISLICYLMETKNDRGPFLVVVPSSVLPGWQSEINFWAPSIHKIVYCGTPDERRKLFKEQIVHQKFNVLLTTYEYLMNKHDRPKLSKIHWHYIIIDEGHRIKNASCKLNADLKHYVSSHRLLLTGTPLQNNLEELWALLNFLLPNIFNSSEDFSQWFNKPFQSNGESSALLSEEENLLIINRLHQVLRPFVLRRLKHKVENELPEKIERLIRCEASAYQKLLMKRVEDNLGSIGNAKSRAVHNSVMELRNICNHPYLSQLHSEEHFLPPIVRLCGKLEMLDRMLPKLKATDHRVLFFSTMTRLLDVMEDYLTLKGYKYLRLDGQTSGGDRGALIDGFNKSGSPFFIFLLSIRAGGVGVNLQAADTVILFDTDWNPQVDLQAQARAHRIGQKKDVLVLRFETVNSVEEQVRASAEHKLGVANQSITAGFFDNNTSAEDRKEYLESLLRESKKEEDAPVLDDDALNDLIARRESEIDIFESIDKQRKENEMVCLFLLTLFSGYIVL

SEQ ID NO: 8331 - protein, 1090 aa, Arabidopsis thaliana
MAENTASHRRKPRSLNDRHYSILQDLSAPPRQPPSSSHGEDEETKKSMIKLAGRRRLCKALPKEDEADGYDDPDLVDFYSPVKGETSLDSAGIGNKFTSWDESKEANTELAGEPNFSIITDFCSPSPQLKQKEEMQGDGGRNEIMGILDDLTSKLGTMSIQKKKDSQSNDFDACGVKSQVDKFDFEDAKSSFSLLSDLSKSSPDVVTTYNAGVNSIKDKQGKSGFAIREEQTSKEFSREWEERISNVGKQNSYSGRHFDDNSEDNRQGYNLDRGKSQCKEVDQSMKTTRHIEVSEKIRTVGRSNAAKLRDLDEDDDDDDCLILSGKKAAEMKINKPARSYNAKRHGYDERSLEDEGSITLTGLNLSYTLPGKIATMLYPHQREGLNWLWSLHTQGKGGILGDDMGLGKTMQICSFLAGLFHSKLIKRALVVAPKTLLPHWMKELATVGLSQMTREYYGTSTKAREYDLHHILQGKGILLTTYDIVRNNTKALQGDDHYTDEDDEDGNKWDYMILDEGHLIKNPNTQRAKSLLEIPSSHRIIISGTPIQNNLKELWALFNFSCPGLLGDKNWFKQNYEHYILRGTDKNATDREQRIGSTVAKNLREHIQPFFLRRLKSEVFGDDGATSKLSKKDEIVVWLRLTACQRQLYEAFLNSEIVLSAFDGSPLAALTILKKICDHPLLLTKRAAEDVLEGMDSTLTQEEAGVAERLAMHIADNVDTDDFQTKNDSISCKLSFIMSLLENLIPEGHRVLIFSQTRKMLNLIQDSLTSNGYSFLRIDGTTKAPDRLKTVEEFQEGHVAPIFLLTSQVGGLGLTLTKADRVIVVDPAWNPSTDNQSVDRAYRIGQTKDVIVYRLMTSATVEEKIYRKQVYKGGLFKTATEHKEQIRYFSQQDLRELFSLPKGGFDVSPTQQQLYEEHYNQIKLDEKLESHVKFLETLGIAGVSHHSLLFSKTAPIQAIQKDEEEQIRRETALLLGRASASISQDTVINGADYAFKPKDVNLDKRINISPVDDKELSESVIKARLNRLTMLLQNKGTVSRLPDGGAKIQKQIAELTRELKDMKAAERINMPQVIDLEEDISRKMQKGLNL

SEQ ID NO: 8332 - protein, 861 aa, Arabidopsis thaliana
MSKESSPPKVPSTTMEYERRLEAAAEIILEKEAKFSNTPPDCSEFGVTATLKPHQVEGVSWLIQKYLLGVNVVLELDQMGLGKTLQAISFLSYLKFRQGLPGPFLVLCPLSVTDGWVSEINRFTPNLEVLRYVGDKYCRLDMRKSMYDHGHFLPFDVLLTTYDIALVDQDFLSQIPWQYAIIDEAQRLKNPNSVLYNVLLEQFLIPRRLLITGTPIQNNLTELWALMHFCMPLVFGTLDQFLSAFKETGDGLDVSNDKETYKSLKFILGAFMLRRTKSLLIESGNLVLPPLTELTVMVPLVSLQKKIYTSILRKELPGLLELSSGGSNHTSLQNIVIQLRKACSHPYLFPGIEPEPFEEGEHLVQASGKLLVLDQLLKRLHDSGHRVLLFSQMTSTLDILQDFMELRRYSYERLDGSVRAEERFAAIKNFSAKTERGLDSEVDGSNAFVFMISTRAGGVGLNLVAADTVIFYEQDWNPQVDKQALQRAHRIGQISHVLSINLVTEHSVEEVILRRAERKLQLSHNVVGDNMEEKEEDGGDLRSLVFGLQRFDPEEIHNEESDNLKMVEISSLAEKVVAIRQNVEPDKEERRFEINSSDTLLGNTSSASLDSELDEASYLSWVEKLKEAARSSKDEKIIELGNRKNLSEERNLRIEAARKKAEEKKLATWGAHGYQSLSVEEPILPDDVDSSSDAGSVNFVFGDCTNPSTVSHEPAIIFSCVDDSGNWGRGGMFDALSKLSNTVPTAYHRASEFKDLHLGDLHLIKIDDNDDQQNTQASKPLWVAVAVTQSYNSRRKVPRSSISIPDLESCLAKASFSASQKSASLHMPRIGYQDGSDRSQWYTVERLLRKYSSIFTVKIFV

SEQ ID NO: 8333 - protein, 2228 aa, Arabidopsis thaliana
MKQKRRKLPSILDILDQKVDSSMAFDSPEYTSSSKPSKQRLKTDSTPERNSSKRKGNDGNYFECVICDLGGDLLCCDSCPRTYHTACLNPPLKRIPNGKWICPKCSPNSEALKPVNRLDAIAKRARTKTKKRNSKAGPKCERASQIYCSSIISGEQSSEKGKSISAEESKSTGKEVYSSPMDGCSTAELGHASADDRPDSSSHGEDDLGKPVIPTADLPSDAGLTLLSCEDLSESKLSDTEKTHEAPVEKLEHASSEIVENKTVAEMETGKGKRKKRKRELNDGESLERCKTDKKRAKKSLSKVGSSSQTTKSPESSKKKKKKNRVTLKSLSKPQSKTETPEKVKKLPKEERRAVRATNKSSSCLEDTNSLPVGNLQVHRVLGCRIQGLTKTSLCSALSDDLCSDNLQATDQRDSLVQDTNAELVVAEDRIDSSSETGKSSRDSRLRDKDMDDSALGTEGMVEVKEEMLSEDISNATLSRHVDDEDMKVSETHVSVERELLEEAHQETGEKSTVADEEIEEPVAAKTSDLIGETVSYEFLVKWVDKSNIHNTWISEAELKGLAKRKLENYKAKYGTAVINICEDKWKQPQRIVALRVSKEGNQEAYVKWTGLAYDECTWESLEEPILKHSSHLIDLFHQYEQKTLERNSKGNPTRERGEVVTLTEQPQELRGGALFAHQLEALNWLRRCWHKSKNVILADEMGLGKTVSASAFLSSLYFEFGVARPCLVLVPLSTMPNWLSEFSLWAPLLNVVEYHGSAKGRAIIRDYEWHAKNSTGTTKKPTSYKFNVLLTTYEMVLADSSHLRGVPWEVLVVDEGHRLKNSESKLFSLLNTFSFQHRVLLTGTPLQNNIGEMYNLLNFLQPSSFPSLSSFEERFHDLTSAEKVEELKKLVAPHMLRRLKKDAMQNIPPKTERMVPVELTSIQAEYYRAMLTKNYQILRNIGKGVAQQSMLNIVMQLRKVCNHPYLIPGTEPESGSLEFLHDMRIKASAKLTLLHSMLKVLHKEGHRVLIFSQMTKLLDILEDYLNIEFGPKTFERVDGSVAVADRQAAIARFNQDKNRFVFLLSTRACGLGINLATADTVIIYDSDFNPHADIQAMNRAHRIGQSKRLLVYRLVVRASVEERILQLAKKKLMLDQLFVNKSGSQKEFEDILRWGTEELFNDSAGENKKDTAESNGNLDVIMDLESKSRKKGGGLGDVYQDKCTEGNGKIVWDDIAIMKLLDRSNLQSASTDAADTELDNDMLGSVKPVEWNEETAEEQVGAESPALVTDDTGEPSSERKDDDVVNFTEENEWDRLLRMRLEFPLSLSSASWLWSWQHIWEKYQSEEEAALGRGKRLRKAVSYREAYAPHTSGPVNESGGEDEKEPEPELKKEYTPAGRALKEKFTKLRERQKNLIARRNSVEESLPSGNVDQVTEVANQDEESPTSMDLDDSKASQQCDAQKRKASSSDPKPDLLSQHHHGAECLPSLPPNNLPVLGLCAPNFTQSESSRRNYSRPGSRQNRPITGPHFPFNLPQTSNLVEREANDQEPPMGKLKPQNIKEEPFQQPLSNMDGWLPHRQFPPSGDFERPRSSGAAFADFQEKFPLLNLPFDDKLLPRFPFQPRTMGTSHQDIMANLSMRKRFEGTGHSMQDLFGGTPMPFLPNMKIPPMDPPVFNQQEKDLPPLGLDQFPSALSSIPENHRKVLENIMLRTGSGIGHVQKKKTRVDAWSEDELDSLWIGIRRHGYGNWETILRDPRLKFSKFKTPEYLAARWEEEQRKFLDSLSSLPSKSSRTDKSTKSSLFPGLPQGIMNRALHGKYATPPRFQSHLTDIKLGFGDLASPLPLFEPSDHLGFRSEHFPPMANLCTDNLPGEPSAGPSERAGTSTNIPNEKPFPLNSLGMGNLGSLGLDSLSSLNTLRAEEKRDAIKRGKLPLFLDMPLPQMLDSSNNVFLGRSANPSFLHPNRGLNPSNPMGRDIMGISSSENKLPHWLRNVVTVPTVKSPEPPTLPPTVSAIAQSVRVLYGEDSTTIPPFVIPEPPPPAPRDPRHSLRKKRKRKLHSSSQKTTDIGSSSHNAVESSSQGNPQTSATPPLPPPSLAGETSGSSQPKLPPHNLNSTEPLSSEAIIIPPPEEDSVIAAAPSEAPGPSLEGITGTTKSISLESQSSEPETINQDGDLDPETDEKVESERTPLHSDEKQEEQESENALNKQCEPIEAESQNTNAEEEAEAQEEDEESMKMVTGNSLSDD

SEQ ID NO: 8334 - protein, 874 aa, Arabidopsis thaliana
MSLLHTFKETLKPCGSFPSSSSLRVSSTQELEPSRKPPKSSLSQQLLRLDDSYFLPSKHESKISKTQVEDFDHNEDDHKRNIKFDEEEVDEDDERSIEFGRPGLSRAEFDYSGPYEPLMLSSIGEIPIIHVIFLPKSLTFAHVPASINCRLLEHQREGVKFMYNLYKNNHGGILGDDMGLGKTIQTIAFLAAVYGKDGDAGESCLLESDKGPVLIICPSSIIHNWESEFSRWASFFKVSVYHGSNRDMILEKLKARGVEVLVTSFDTFRIQGPVLSGINWEIVIADEAHRLKNEKSKLYEACLEIKTKKRIGLTGTVMQNKISELFNLFEWVAPGSLGTREHFRDFYDEPLKLGQRATAPERFVQIADKRKQHLGSLLRKYMLRRTKEETIGHLMMGKEDNVVFCQMSQLQRRVYQRMIQLPEIQCLVNKDNPCACGSPLKQSECCRRIVPDGTIWSYLHRDNHDGCDSCPFCLVLPCLMKLQQISNHLELIKPNPKDEPEKQKKDAEFVSTVFGTDIDLLGGISASKSFMDLSDVKHCGKMRALEKLMASWISKGDKILLFSYSVRMLDILEKFLIRKGYSFARLDGSTPTNLRQSLVDDFNASPSKQVFLISTKAGGLGLNLVSANRVVIFDPNWNPSHDLQAQDRSFRYGQKRHVVVFRLLSAGSLEELVYTRQVYKQQLSNIAVAGKMETRYFEGVQDCKEFQGELFGISNLFRDLSDKLFTSDIVELHRDSNIDENKKRSLLETGVSEDEKEEEVMCSYKPEMEKPILKDLGIVYAHRNEDIINIGETTTSTSQRLNGDGNSADRKKKKRKGCSEEEDMSSSNREQKREKYKMLAEFKGMEILEFSRWVLSASPFDREKLLQDFLERVK

SEQ ID NO: 8335 - protein, 1738 aa, Arabidopsis thaliana
MAFFRNYSNDTVSHNVLDENEERQNAATFQSSPLNEDVDGTYSERGFDMNMDVQYQSDPEPGCSIRQPNETAVDNVADPVDSHYQSSTKRLGVTGRWGSTFWKDCQPMGQREGSDPAKDSQSGYKEAYHSEDNHSNDRSEKLDSENENDNENEEEDNEMNKHQSGQADVPADEMLSDEYYEQDEDNQSDHVHYKGYSNPTNSRSLPKAGSAVHSNSRTSRAIHKNIHYSDSNHDHNGDADMDYEEEEDEDDPEDADFEPYDAADDGGASKKHGQGWDVSDEDPESDEEIDLSDYEDDYGTKKPKVRQQSKGFRKSSAGLERKSFHVSSRQKRKTSYQDDDSEEDSENDNDEGFRSLARRGTTLRQNNGRSTNTIGQSSEVRSSTRSVRKVSYVESEDSEDIDDGKNRKNQKDDIEEEDADVIEKVLWHQLKGMGEDVQTNNKSTVPVLVSQLFDTEPDWNEMEFLIKWKGQSHLHCQWKTLSDLQNLSGFKKVLNYTKKVTEEIRYRTALSREEIEVNDVSKEMDLDIIKQNSQVERIIADRISKDGLGDVVPEYLVKWQGLSYAEATWEKDVDIAFAQVAIDEYKAREVSIAVQGKMVEQQRTKGKGENSFSNAELWLLFSVASLRKLDEQPEWLIGGTLRDYQLEGLNFLVNSWLNDTNVILADEMGLGKTVQSVSMLGFLQNTQQIPGPFLVVVPLSTLANWAKEFRKWLPGMNIIVYVGTRASREVRNKTNDVHKVGRPIKFNALLTTYEVVLKDKAVLSKIKWIYLMVDEAHRLKNSEAQLYTALLEFSTKNKLLITGTPLQNSVEELWALLHFLDPGKFKNKDEFVENYKNLSSFNESELANLHLELRPHILRRVIKDVEKSLPPKIERILRVEMSPLQKQYYKWILERNFHDLNKGVRGNQVSLLNIVVELKKCCNHPFLFESADHGYGGDINDNSKLDKIILSSGKLVILDKLLVRLRETKHRVLIFSQMVRMLDILAEYLSLRGFQFQRLDGSTKAELRQQAMDHFNAPASDDFCFLLSTRAGGLGINLATADTVVIFDSDWNPQNDLQAMSRAHRIGQQEVVNIYRFVTSKSVEEEILERAKRKMVLDHLVIQKLNAEGRLEKRETKKGSNFDKNELSAILRFGAEELFKEDKNDEESKKRLLSMDIDEILERAEQVEEKHTDETEHELLGAFKVANFCNAEDDGSFWSRWIKPDSVVTAEEALAPRAARNTKSYVDPSHPDRTSKRKKKGSEPPEHTERSQKRRKTEYFVPSTPLLEGTSAQVRGWSYGNLPKRDAQRFYRTVMKFGNHNQMACIAEEVGGVVEAAPEEAQVELFDALIDGCKESVETGNFEPKGPVLDFFGVPVKANELLKRVQGLQLLSKRISRYNDPISQFRVLSYLKPSNWSKGCGWNQIDDARLLLGILYHGFGNWEKIRLDESLGLTKKIAPVELQHHETFLPRAPNLKERATALLEMELAAAGGKNTNAKASRKNSKKVKDNLINQFKAPARDRRGKSGPANVSLLSTKDGPRKTQKAEPLVKEEGEMSDDGEVYEQFKEQKWMEWCEDVLADEIKTLGRLQRLQTTSADLPKEKVLFKIRRYLEILGRRIDAIVLEHEEDLYKQDRMTMRLWNYVSTFSNLSGDRLNQIYSKLKQEKEEEEGVGPSHLNGSRNFQRQQKFKTAGNSQGSQQVHKGIDTAKFEAWKRRRRTENDVQTERPTITNSNSLGILGPGPLDRSHRARQTGFPPR

SEQ ID NO: 8336 - protein, 1245 aa, Arabidopsis thaliana
MSNSVMSNSRYYTLAHAVNEVVVRQPSMLQAGTLRDYQLVGLQWMLSLYNNKLNGILADEMGLGKTVQVMALIAYLMEFKGNYGPHLIIVPNAVLVNWKSELHTWLPSVSCIYYVGTKDQRSKLFSQVKFEKFNVLVTTYEFIMYDRSKLSKVDWKYIIIDEAQRMKDRESVLARDLDRYRCQRRLLLTGTPLQNDLKELWSLLNLLLPDVFDNRKAFHDWFAQPFQKEGPAHNIEDDWLETEKKVIVIHRLHQILEPFMLRRRVEDVEGSLPAKVSVVLRCRMSAIQSAVYDWIKATGTLRVDPDDEKLRAQKNPIYQAKIYRTLNNRCMELRKACNHPLLNYPYFNDFSKDFLVRSCGKLWILDRILIKLQRTGHRVLLFSTMTKLLDILEEYLQWRRLVYRRIDGTTSLEDRESAIVDFNDPDTDCFIFLLSIRAAGRGLNLQTADTVVIYDPDPNPKNEEQAVARAHRIGQTREVKVIYMEAVVEKLSSHQKEDELRSGGSVDLEDDMAGKDRYIGSIEGLIRNNIQQYKIDMADEVINAGRFDQRTTHEERRMTLETLLHDEERYQETVHDVPSLHEVNRMIARSEEEVELFDQMDEEFDWTEEMTNHEQVPKWLRASTREVNATVADLSKKPSKNMLSSSNLIVQPGGPGGERKRGRPKSKKINYKEIEDDIAGYSEESSEERNIDSGNEEEGDIRQFDDDELTGALGDHQTNKGEFDGENPVCGYDYPPGSGSYKKNPPRDDAGSSGSSPESHRSKEMASPVSSQKFGSLSALDTRPGSVSKRLLDDLEEGEIAASGDSHIDLQRSGSWAHDRDEGDEEQVLQPTIKRKRSIRLRPRQTAERVDGSEMPAAQPLQVDRSYRSKLRTVVDSHSSRQDQSDSSSRLRSVPAKKVASTSKLHVSSPKSGRLNATQLTVEDNAEASRETWDGTSPISSSNAGARMSHIIQKRCKIVISKLQRRIDKEGQQIVPMLTNLWKRIQNGYAAGGVNNLLELREIDHRVERLEYAGVMELASDVQLMLRGAMQFYGFSHEVRSEAKKVHNLFFDLLKMSFPDTDFREARNALSFSGSAPTLVSTPTPRGAGISQGKRQKLVNEPETEPSSPQRSQQRENSRIRVQIPQKETKLGGTTSHTDESPILAHPGELVICKKKRKDREKSGPKTRTGGSSSPVSPPPAMIGRGLRSPVSGGVPRETRLAQQQRWPNQPTHPNNSGAAGDSVGWANPVKRLRTDSGKRRPSHL

SEQ ID NO: 8337 - protein, 1496 aa, Arabidopsis thaliana
MDPSRRPPKDSPYANLFDLEPLMKFRIPKPEDEVDYYGSSSQDESRSTQGGVVANYSNGSKSRMNASSKKRKRWTEAEDAEDDDDLYNQHVTEEHYRSMLGEHVQKFKNRSKETQGNPPHLMGFPVLKSNVGSYRGRKPGNDYHGRFYDMDNSPNFAADVTPHRRGSYHDRDITPKIAYEPSYLDIGDGVIYKIPPSYDKLVASLNLPSFSDIHVEEFYLKGTLDLRSLAELMASDKRSGVRSRNGMGEPRPQYESLQARMKALSPSNSTPNFSLKVSEAAMNSAIPEGSAGSTARTILSEGGVLQVHYVKILEKGDTYEIVKRSLPKKLKAKNDPAVIEKTERDKIRKAWINIVRRDIAKHHRIFTTFHRKLSIDAKRFADGCQREVRMKVGRSYKIPRTAPIRTRKISRDMLLFWKRYDKQMAEERKKQEKEAAEAFKREQEQRESKRQQQRLNFLIKQTELYSHFMQNKTDSNPSEALPIGDENPIDEVLPETSAAEPSEVEDPEEAELKEKVLRAAQDAVSKQKQITDAFDTEYMKLRQTSEMEGPLNDISVSGSSNIDLHNPSTMPVTSTVQTPELFKGTLKEYQMKGLQWLVNCYEQGLNGILADEMGLGKTIQAMAFLAHLAEEKNIWGPFLVVAPASVLNNWADEISRFCPDLKTLPYWGGLQERTILRKNINPKRMYRRDAGFHILITSYQLLVTDEKYFRRVKWQYMVLDEAQAIKSSSSIRWKTLLSFNCRNRLLLTGTPIQNNMAELWALLHFIMPMLFDNHDQFNEWFSKGIENHAEHGGTLNEHQLNRLHAILKPFMLRRVKKDVVSELTTKTEVTVHCKLSSRQQAFYQAIKNKISLAELFDSNRGQFTDKKVLNLMNIVIQLRKVCNHPELFERNEGSSYLYFGVTSNSLLPHPFGELEDVHYSGGQNPIIYKIPKLLHQEVLQNSETFCSSVGRGISRESFLKHFNIYSPEYILKSIFPSDSGVDQVVSGSGAFGFSRLMDLSPSEVGYLALCSVAERLLFSILRWERQFLDELVNSLMESKDGDLSDNNIERVKTKAVTRMLLMPSKVETNFQKRRLSTGPTRPSFEALVISHQDRFLSSIKLLHSAYTYIPKARAPPVSIHCSDRNSAYRVTEELHQPWLKRLLIGFARTSEANGPRKPNSFPHPLIQEIDSELPVVQPALQLTHRIFGSCPPMQSFDPAKLLTDSGKLQTLDILLKRLRAGNHRVLLFAQMTKMLNILEDYMNYRKYKYLRLDGSSTIMDRRDMVRDFQHRSDIFVFLLSTRAGGLGINLTAADTVIFYESDWNPTLDLQAMDRAHRLGQTKDETVEEKILHRASQKNTVQQLVMTGGHVQGDDFLGAADVVSLLMDDAEAAQLEQKFRELPLQDRQKKKTKRIRIDAEGDATLEELEDVDRQDNGQEPLEEPEKPKSSNKKRRAASNPKARAPQKAKEEANGEDTPQRTKRVKRQTKSINESLEPVFSASVTESNKGFDPSSSAN

SEQ ID NO: 8338 - protein, 1053 aa, Arabidopsis thaliana
MAENTASHRRKPRSLNDRHYSILQDLSAPPRQPPSSSHGEDEETKKSMIKLAGRRRLCKALPKEDEADGYDDPDLVDFYSPVKGETSLDSAGIGNKFTSWDESKEANTELAGEPNFSIITDFCSPSPQLKQKEEMQGDGGRNEIMGILDDLTSKLGTMSIQKKKDSQSNDFDACGVKSQVDKFDFEDAKSSFSLLSDLSKSSPDVVTTYNAGVNSIKDKQGKSGFAIREEQTSKEFSREWEERISNVGKQNSYSGRHFDDNSEDNRQGYNLDRGKSQCKEVDQSMKTTRHIEVSEKIRTVGRSNAAKLRDLDEDDDDDDCLILSGKKAAEMKINKPARSYNAKRHGYDERSLEDEGSITLTGLNLSYTLPGKIATMLYPHQREGLNWLWSLHTQGKGGILGDDMGLGKTMQICSFLAGLFHSKLIKRALVVAPKTLLPHWMKELATVGLSQMTREYYGTSTKAREYDLHHILQGKGILLTTYDIVRNNTKALQGDDHYTDEDDEDGNKWDYMILDEGHLIKNPNTQRAKSLLEIPSSHRIIISGTPIQNNLKALSFNRFKQNYEHYILRGTDKNATDREQRIGSTVAKNLREHIQPFFLRRLKSEVFGDDGATSKLSKKDEIVVWLRLTACQRQLYEAFLNSEIVLSAFDGSPLAALTILKKICDHPLLLTKRAAEDVLEGMDSTLTQEEAGVAERLAMHIADNVDTDDFQTKNDSISCKLSFIMSLLDSLTSNGYSFLRIDGTTKAPDRLKTVEEFQEGHVAPIFLLTSQVGGLGLTLTKADRVIVVDPAWNPSTDNQSVDRAYRIGQTKDVIVYRLMTSATVEEKIYRKQVYKGGLFKTATEHKEQIRYFSQQDLRELFSLPKGGFDVSPTQQQLYEEHYNQIKLDEKLESHVKFLETLGIAGVSHHSLLFSKTAPIQAIQKDEEEQIRRETALLLGRASASISQDTVINGADYAFKPKDVNLDKRINISPVDDKELSESVIKARLNRLTMLLQNKGTVSRLPDGGAKIQKQIAELTRELKDMKAAERINMPQVIDLEEDISRKMQKGLNL

SEQ ID NO: 8339 - protein, 2044 aa, Arabidopsis thaliana
MASKGGKSKPDIVMASKSGKSKPDNESRAKRQKTLEAPKEPRRPKTHWDHVLEEMAWLSKDFESERKWKLAQAKKVALRASKGMLDQASREERKLKEEEQRLRKVALNISKDMKKFWMKVEKLVLYKHQLVRNEKKKKAMDKQLEFLLGQTERYSTMLAENLVEPYKQGQNTPSKPLLTIESKSDEERAEQIPPEINSCLESGSPELDEDYDLKSEDETDEKHFTKRERQEELEALQNEVDLPVEELLRRYTSGRVSRETSPVKDENEDNLTSVSRVTSPVKDENQDNLASVGQDHGEDKNNLAASEETEGNPSVRRSNDSYGHLAISETHSHDLEPGMTTASVKSRKEDHTYDFNDEQEDVDFVLANGEEKDDEATLAVEEELAKADNEDHVEEIALLQKESEMPIEVLLARYKEDFGGKDISEDESESSFAVSEDSIVDSDENRQQADLDDDNVDLTECKLDPEPCSENVEGTFHEVAEDNDKDSSDKIADAAAAARSAQPTGFTYSTTKVRTKLPFLLKHSLREYQHIGLDWLVTMYEKKLNGILADEMGLGKTIMTIALLAHLACDKGIWGPHLIVVPTSVMLNWETEFLKWCPAFKILTYFGSAKERKLKRQGWMKLNSFHVCITTYRLVIQDSKMFKRKKWKYLILDEAHLIKNWKSQRWQTLLNFNSKRRILLTGTPLQNDLMELWSLMHFLMPHVFQSHQEFKDWFCNPIAGMVEGQEKINKEVIDRLHNVLRPFLLRRLKRDVEKQLPSKHEHVIFCRLSKRQRNLYEDFIASTETQATLTSGSFFGMISIIMQLRKVCNHPDLFEGRPIVSSFDMAGIDVQLSSTICSLLLESPFSKVDLEALGFLFTHLDFSMTSWEGDEIKAISTPSELIKQRVNLKDDLEAIPLSPKNRKNLQGTNIFEEIRKAVFEERIQESKDRAAAIAWWNSLRCQRKPTYSTSLRTLLTIKGPLDDLKANCSSYMYSSILADIVLSPIERFQKMIELVEAFTFAIPAARVPSPTCWCSKSDSPVFLSPSYKEKVTDLLSPLLSPIRPAIVRRQVYFPDRRLIQFDCGKLQELAMLLRKLKFGGHRALIFTQMTKMLDVLEAFINLYGYTYMRLDGSTPPEERQTLMQRFNTNPKIFLFILSTRSGGVGINLVGADTVIFYDSDWNPAMDQQAQDRCHRIGQTREVHIYRLISESTIEENILKKANQKRVLDNLVIQNGEYNTEFFKKLDPMELFSGHKALTTKDEKETSKHCGADIPLSNADVEAALKQAEDEADYMALKRVEQEEAVDNQEFTEEPVERPEDDELVNEDDIKADEPADQGLVAAGPAKEEMSLLHSDIRDERAVITTSSQEDDTDVLDDVKQMAAAAADAGQAISSFENQLRPIDRYAIRFLELWDPIIVEAAMENEAGFEEKEWELDHIEKYKEEMEAEIDDGEEPLVYEKWDADFATEAYRQQVEVLAQHQLMEDLENEAREREAAEVAEMVLTQNESAHVLKPKKKKKAKKAKYKSLKKGSLAAESKHVKSVVKIEDSTDDDNEEFGYVSSSDSDMVTPLSRMHMKGKKRDLIVDTDEEKTSKKKAKKHKKSLPNSDIKYKQTSALLDELEPSKPSDSMVVDNELKLTNRGKTVGKKFITSMPIKRVLMIKPEKLKKGNLWSRDCVPSPDSWLPQEDAILCAMVHEYGPNWNFVSGTLYGMTAGGAYRGRYRHPAYCCERYRELIQRHILSASDSAVNEKNLNTGSGKALLKVTEENIRTLLNVAAEQPDTEMLLQKHFSCLLSSIWRTSTRTGNDQMLSLNSPIFNRQFMGSVNHTQDLARKPWQGMKVTSLSRKLLESALQDSGPSQPDNTISRSRLQETQPINKLGLELTLEFPRGNDDSLNQFPPMISLSIDGSDSLNYVNEPPGEDVLKGSRVAAENRYRNAANACIEDSFGWASNTFPANDLKSRTGTKAQSLGKHKLSASDSAKSTKSKHRKLLAEQLEGAWVRPNDPNLKFDFTPGDREEEEEQEVDEKANSAEIEMISCSQWYDPFFTSGLDDCSLASDISEIE

SEQ ID NO: 8340 - protein, 2061 aa, Arabidopsis thaliana
MASKGGKSKPDIVMASKSGKSKPDNESRAKRQKTLEAPKEPRRPKTHWDHVLEEMAWLSKDFESERKWKLAQAKKVALRASKGMLDQASREERKLKEEEQRLRKVALNISKDMKKFWMKVEKLVLYKHQLVRNEKKKKAMDKQLEFLLGQTERYSTMLAENLVEPYKQGQNTPSKPLLTIESKSDEERAEQIPPEINSCLESGSPELDEDYDLKSEDETEDDEDTIEEDEKHFTKRERQEELEALQNEVDLPVEELLRRYTSGRVSRETSPVKDENEDNLTSVSRVTSPVKDENQDNLASVGQDHGEADKNNLAASEETEGNPSVRRSNDSYGHLAISETHSHDLEPGMTTASVKSRKEDHTYDFNDEQEDVDFVLANGEEKDDEATLAVEEELAKADNEDHVEEKFPLLPQIALLQKESEMPIEVLLARYKEDFGGKDISEDESESSFAVSEDSIVDSDENRQQADLDDDNVDLTECKLDPEPCSENVEGTFHEVAEDNDKDSSDKIADAAAAARSAQPTGFTYSTTKVRTKLPFLLKHSLREYQHIGLDWLVTMYEKKLNGILADEMGLGKTIMTIALLAHLACDKGIWGPHLIVVPTSVMLNWETEFLKWCPAFKILTYFGSAKERKLKRQGWMKLNSFHVCITTYRLVIQDSKMFKRKKWKYLILDEAHLIKNWKSQRWQTLLNFNSKRRILLTGTPLQNDLMELWSLMHFLMPHVFQSHQEFKDWFCNPIAGMVEGQEKINKEVIDRLHNVLRPFLLRRLKRDVEKQLPSKHEHVIFCRLSKRQRNLYEDFIASTETQATLTSGSFFGMISIIMQLRKVCNHPDLFEGRPIVSSFDMAGIDVQLSSTICSLLLESPFSKVDLEALGFLFTHLDFSMTSWEGDEIKAISTPSELIKQRVNLKDDLEAIPLSPKNRKNLQGTNIFEEIRKAVFEERIQESKDRAAAIAWWNSLRCQRKPTYSTSLRTLLTIKGPLDDLKANCSSYMYSSILADIVLSPIERFQKMIELVEAFTFAIPAARVPSPTCWCSKSDSPVFLSPSYKEKVTDLLSPLLSPIRPAIVRRQVYFPDRRLIQFDCGKLQELAMLLRKLKFGGHRALIFTQMTKMLDVLEAFINLYGYTYMRLDGSTPPEERQTLMQRFNTNPKIFLFILSTRSGGVGINLVGADTVIFYDSDWNPAMDQQAQDRCHRIGQTREVHIYRLISESTIEENILKKANQKRVLDNLVIQNGEYNTEFFKKLDPMELFSGHKALTTKDEKETSKHCGADIPLSNADVEAALKQAEDEADYMALKRVEQEEAVDNQEFTEEPVERPEDDELVNEDDIKADEPADQGLVAAGPAKEEMSLLHSDIRDERAVITTSSQEDDTDVLDDVKQMAAAAADAGQAISSFENQLRPIDRYAIRFLELWDPIIVEAAMENEAGFEEKEWELDHIEKYKEEMEAEIDDGEEPLVYEKWDADFATEAYRQQVEVLAQHQLMEDLENEAREREAAEVAEMVLTQNESAHVLKPKKKKKAKKAKYKSLKKGSLAAESKHVKSVVKIEDSTDDDNEEFGYVSSSDSDMVTPLSRMHMKGKKRDLIVDTDEEKTSKKKAKKHKKSLPNSDIKYKQTSALLDELEPSKPSDSMVVDNELKLTNRGKTVGKKFITSMPIKRVLMIKPEKLKKGNLWSRDCVPSPDSWLPQEDAILCAMVHEYGPNWNFVSGTLYGMTAGGAYRGRYRHPAYCCERYRELIQRHILSASDSAVNEKNLNTGSGKALLKVTEENIRTLLNVAAEQPDTEMLLQKHFSCLLSSIWRTSTRTGNDQMLSLNSPIFNRQFMGSVNHTQDLARKPWQGMKVTSLSRKLLESALQDSGPSQPDNTISRSRLQETQPINKLGLELTLEFPRGNDDSLNQFPPMISLSIDGSDSLNYVNEPPGEDVLKGSRVAAENRYRNAANACIEDSFGWASNTFPANDLKSRTGTKAQSLGKHKLSASDSAKSTKSKHRKLLAEQLEGAWVRPNDPNLKFDFTPGDREEEEEQEVDEKANSAEIEMISCSQWYDPFFTSGLDDCSLASDISEIE

SEQ ID NO: 8341 - protein, 959 aa, Arabidopsis thaliana
MEEEDEEILSSSDCDDSSDSYKDDSQDSEGENDNPECEDLAVVSLSSDADRKSKNVKDLLRGNLVVQRQPLLPRVLSVSDGAAVCRKPFKPPCSHGYDSTGQLSRRLSARKRFVPWGSSTPVVVALPTKLEASTNIERDEEEEVVCLPPDIEPLVLWQSEEDGMSNVTTIMVHSVLVKFLRPHQREGVQFMFDCVSGLHGSANINGCILADDMGLGKTLQSITLLYTLLCQGFDGTPMVKKAIIVTPTSLVSNWEAEIKKWVGDRIQLIALCESTRDDVLSGIDSFTRPRSALQVLIISYETFRMHSSKFCQSESCDLLICDEAHRLKNDQTLTNRALASLTCKRRVLLSGTPMQNDLEEFFAMVNFTNPGSLGDAAHFRHYYEAPIICGREPTATEEEKNLAADRSAELSSKVNQFILRRTNALLSNHLPPKIIEVVCCKMTTLQSTLYNHFISSKNLKRALADNAKQTKVLAYITALKKLCNHPKLIYDTIKSGNPGTVGFENCLEFFPAEMFSGRSGAWTGGDGAWVELSGKMHVLSRLLANLRRKTDDRIVLVSNYTQTLDLFAQLCRERRYPFLRLDGSTTISKRQKLVNRLNDPTKDEFAFLLSSKAGGCGLNLIGANRLVLFDPDWNPANDKQAAARVWRDGQKKRVYVYRFLSTGTIEEKVYQRQMSKEGLQKVIQHEQTDNSTRQGNLLSTEDLRDLFSFHGDVRYVFLLKSGNVLCPLRTSFLYPLLGTDFVPQDDTHSNGLSQSLFSGNVARSEIHEKMSCSRCQNDASGTENIEEGNENNVDDNACQIDQEDIGGFAKDAGCFNLLKNSERQVGTPLEEDLGSWGHHFTSKSVPDAILQASAGDEVTFVFTNQVDGKLVPIESNVSPKTVESEEHNRNQPVNKRAFNKPQQRPREPLQPLSLNETTKRVKLSTYKRLHGNSNIDDAQIKMSLQRPNLVSVNHDDDFV

SEQ ID NO: 8342 - protein, 852 aa, Arabidopsis thaliana
MEEEDEEILSSSDCDDSSDSYKDDSQDSEGENDNPECEDLAVVSLSSDADRKSKNVKDLLSNVTTIMVHSVLVKFLRPHQREGVQFMFDCVSGLHGSANINGCILADDMGLGKTLQSITLLYTLLCQGFDGTPMVKKAIIVTPTSLVSNWEAEIKKWVGDRIQLIALCESTRDDVLSGIDSFTRPRSALQVLIISYETFRMHSSKFCQSESCDLLICDEAHRLKNDQTLTNRALASLTCKRRVLLSGTPMQNDLEEFFAMVNFTNPGSLGDAAHFRHYYEAPIICGREPTATEEEKNLAADRSAELSSKVNQFILRRTNALLSNHLPPKIIEVVCCKMTTLQSTLYNHFISSKNLKRALADNAKQTKVLAYITALKKLCNHPKLIYDTIKSGNPGTVGFENCLEFFPAEMFSGRSGAWTGGDGAWVELSGKMHVLSRLLANLRRKTDDRIVLVSNYTQTLDLFAQLCRERRYPFLRLDGSTTISKRQKLVNRLNDPTKDEFAFLLSSKAGGCGLNLIGANRLVLFDPDWNPANDKQAAARVWRDGQKKRVYVYRFLSTGTIEEKVYQRQMSKEGLQKVIQHEQTDNSTRQVLAGMGTYFLQRIYEIYFPSMGMLGNVLCPLRTSFLYPLLGTDFVPQDDTHSNGLSQSLFSGNVARSEIHEKMSCSRCQNDASGTENIEEGNENNVDDNACQIDQEDIGGFAKDAGCFNLLKNSERQVGTPLEEDLGSWGHHFTSKSVPDAILQASAGDEVTFVFTNQVDGKLVPIESNVSPKTVESEEHNRNQPVNKRAFNKPQQRPREPLQPLSLNETTKRVKLSTYKRLHGNSNIDDAQIKMSLQRPNLVSVNHDDDFV

SEQ ID NO: 8343 - protein, 763 aa, Arabidopsis thaliana
MKRDFDEISEEEWSQHSFNASRVLKRPRTPKKTRAATNPTPSIESFAFRRPSTAMTIESNSSDGDCVEIEDLGDSDSDVKIVNGEDLLLEDEEEVEETKVVMRAARVGRRFVIEDEEASDDDDDEAESSASEDEFGGGGGGSGGRRGEDEDVVGKALQKCAKISADLRKELYGTSSGVTDRYSEVETSTVRIVTQNDIDDACKAEDSDFQPILKPYQLVGVNFLLLLYKKGIEGAILADEMGLGKTIQAITYLTLLSRLNNDPGPHLVVCPASVLENWERELRKWCPSFTVLQYHGAARAAYSRELNSLSKAGKPPPFNVLLVCYSLFERHSEQQKDDRKVLKRWRWSCVLMDEAHALKDKNSYRWKNLMSVARNANQRLMLTGTPLQNDLHELWSLLEFMLPDIFTTENVDLKKLLNAEDTELITRMKSILGPFILRRLKSDVMQQLVPKIQRVEYVLMERKQEDAYKEAIEEYRAASQARLVKLSSKSLNSLAKALPKRQISNYFTQFRKIANHPLLIRRIYSDEDVIRIARKLHPIGAFGFECSLDRVIEEVKGFNDFRIHQLLFQYGVNDTKGTLSDKHVMLSAKCRTLAELLPSMKKSGHRVLIFSQWTSMLDILEWTLDVIGVTYRRLDGSTQVTDRQTIVDTFNNDKSIFACLLSTRAGGQGLNLTGADTVIIHDMDFNPQIDRQAEDRCHRIGQTKPVTIFRLVTKSTVDENIYEIAKRKLVLDAAVLESGVHVDDNGDTPEKTMGEILASLLMG

SEQ ID NO: 8344 - protein, 627 aa, Arabidopsis thaliana
MTEDDDFDEQNAVIAEAAEQPLDLIIPLLKYQKEFLAWATIQELSAVRGGILADEMGMGKTIQAISLVLARREVDRAKSREAVGHTLVLVPPVALSQWLDEISRLTSPGSTRVLQYHGPKRDKNVQKLMNYDFVLTTSPIVENEYRKDEGVDETMSPLHSIKWNRIIVDEAHDIKNRSSRTAKAVFALEATYRWALSGTPLQNDVDELYSLIRFLRVSPYSYYFCKKCDCEVLDRSAHRKCPSCPHNANQHISWWKENVDKRRNRACIFLKQNVLKDILLRRTKLGRAADLALPSRIISLRRDALSVVEADFYESLYKVSKTTFDGYIQAGTLMNNYAHIFGLLIRLRQAVDHPYLVSYSSPSGANANLLDANKNEKECGFGHDPSKDYFVTSSEHQASKTKLKGFRASSILNRINLDDFKTSTKIEALREEIRFMVERDWSAKAIVFSQFTSFLDLISYALGKSGVSCVQLVGSMSKAAKDAALKNFKEEPDCRVLLMSLQAGGVALNLTAASHVFMMDPWWNPAVERQAQDRIHRIGQCKPVRVVRFIMEKTVEEKILTLQKKKEDLFERFLILNDTLLSTLLVSYCQLYEAYMKTYLLCYSTLGDSEEAVVQKLGEDDIKSLFA

SEQ ID NO: 8345 - protein, 678 aa, Arabidopsis thaliana
MAGLRSVHVGSETKVVSKNECAHVTLWTGTAQGDLGVAMEPHSHHKNAILPSSSQDENLKEEEVPDDDDSVGGEVQGEVNANDYIPNPAAPANTKRKWQIMKEKVQMTEDDDFDEQNAVIAEAAEQPLDLIIPLLKYQKEFLAWATIQELSAVRGGILADEMGMGKTIQAISLVLARREVDRAKSREAVGHTLVLVPPVALSQWLDEISRLTSPGSTRVLQYHGPKRDKNVQKLMNYDFVLTTSPIVENEYRKDEGVDETMSPLHSIKWNRIIVDEAHDIKNRSSRTAKAVFALEATYRWALSGTPLQNDVDELYSLVSYSFLNFFYSTYASFAFRHTHITFARNVTVKFLIGGNILPLSIPVRIENVPAVLIMQINTSLGGKRRDALSVVEADFYESLYKVSKTTFDGYIQAGTLMNNYAHIFGLLIRLRQAVDHPYLVSYSSPSGANANLLDANKNEKECGFGHDPSKDYFVTSSEHQASKTKLKGFRASSILNRINLDDFKTSTKIEALREEIRFMVERDWSAKAIVFSQFTSFLDLISYALGKSGVSCVQLVGSMSKAAKDAALKNFKEEPDCRVLLMSLQAGGVALNLTAASHVFMMDPWWNPAVERQAQDRIHRIGQCKPVRVVRFIMEKTVEEKILTLQKKKEDLFESTLGDSEEAVVQKLGEDDIKSLFA

SEQ ID NO: 8346 - protein, 1029 aa, Arabidopsis thaliana
MGTKVSDDLVSTVRSVVGSDYSDMDIIRALHMANHDPTAAINIIFDTPSFAKPDVATPTPSGSNGGKRVDSGLKGCTFGDSGSVGANHRVEEENESVNGGGEESVSGNEWWFVGCSELAGLSTCKGRKLKSGDELVFTFPHSKGLKPETTPGKRGFGRGRPALRGASDIVRFSTKDSGEIGRIPNEWARCLLPLVRDKKIRIEGSCKSAPEALSIMDTILLSVSVYINSSMFQKHSATSFKTASNTAEESMFHPLPNLFRLLGLIPFKKAEFTPEDFYSKKRPLSSKDGSAIPTSLLQLNKVKNMNQDANGDENEQCISDGDLDNIVGVGDSSGLKEMETPHTLLCELRPYQKQALHWMTQLEKGNCTDEAATMLHPCWEAYCLADKRELVVYLNSFTGDATIHFPSTLQMARGGILADAMGLGKTVMTISLLLAHSWKAASTGFLCPNYEGDKVISSSVDDLTSPPVKATKFLGFDKRLLEQKSVLQNGGNLIVCPMTLLGQWKTEIEMHAKPGSLSVYVHYGQSRPKDAKLLSQSDVVITTYGVLTSEFSQENSADHEGIYAVRWFRIVLDEAHTIKNSKSQISLAAAALVADRRWCLTGTPIQNNLEDLYSLLRFLRIEPWGTWAWWNKLVQKPFEEGDERGLKLVQSILKPIMLRRTKSSTDREGRPILVLPPADARVIYCELSESERDFYDALFKRSKVKFDQFVEQGKVLHNYASILELLLRLRQCCDHPFLVMSRGDTAEYSDLNKLSKRFLSGKSSGLEREGKDVPSEAFVQEVVEELRKGEQGECPICLEALEDAVLTPCAHRLCRECLLASWRNSTSGLCPVCRNTVSKQELITAPTESRFQVDVEKNWVESSKITALLEELEGLRSSGSKSILFSQWTAFLDLLQIPLSRNNFSFVRLDGTLSQQQREKVLKEFSEDGSILVLLMSLKAGGVGINLTAASNAFVMDPWWNPAVEEQAVMRIHRIGQTKEVKIRRFIVKGTVEERMEAVQARKQRMISGALTDQEVRSARIEELKMLFT

SEQ ID NO: 8347 - protein, 1277 aa, Arabidopsis thaliana
MAIVDDAEMRLTESEAVSSSDDRKIVADTPDFIDESSLVIRTTTGVRISALPAEQSLVDSDGSNSEVTLPAKDEVISDGFTCVNKEIVESDSFREQNLEIGEPDLDVENRKEAMIIDSIENSVVEIVSSASGDDCNVKVEVVEPELLVENLVVAKEEEEMIVDSIEDSVVEIVSTASGCDCNVKVEVVDPELCVDNLVVVKEEEMIADSIAESVVETVSRGLDYECVDVKVKEEPDLGTKLEEDSVFPNVLEKKDEVIKVLEDQPSEINKKLEQENDDLFSSGDSDGTSAKRRKMEMESYAPVGVESCILAPTPLRVVKPEKLDTPEVIDLESEKSYTHVKMEPVEEIKVEAVKMSSQVEDVKFSREQKSVYVKKEPVGARKVKVEDGDFPVEKDWYLVGRSLVTATSTSKGRKLEDNEIVNFTFSSVAKWKVPNIVRFSTKRCGEIGRLPMEWSNWAVSLLRSGKVKMLGRCVAAPPFLTMMQEIMLYVSFYIHSSIFTDVSKSTWRIGSSPNLESTLHPLLQLFKHLTIKPYQKAEFTPEELNSRKRSLNLEDDYDERAALLAIAKRRKGCQQSLEQNKDEEEAPESYMNRVVGAADSYNLEEMEAPSTLTCNLRPYQKQALYWMSESEKGIDVEKAAETLHPCWEAYRICDERAPSIYLNIFSGEATIQFPTATQMARGGILADAMGLGKTVMTIALILARPGRGNPENEDVLVADVNADKRNRKEIHMALTTVKAKGGTLIICPMALLSQWKDELETHSKPDTVSVLVYYGGDRTHDAKAIASHDVVLTTYGVLTSAYKQDMANSIFHRIDWYRIVLDEAHTIKSWKTQAAKATFELSSHCRWCLTGTPLQNKLEDLYSLLCFLHVEPWCNWAWWSKLIQKPYENGDPRGLKLIKAILRPLMLRRTKETRDKEGSLILELPPTDVQVIECEQSEAERDFYTALFKRSKVQFDQFVAQGKVLHNYANILELLLRLRQCCNHPFLVMSRADSQQYADLDSLARRFLDNNPDSVSQNAPSRAYIEEVIQDLRDGNSKECPICLESADDPVLTPCAHRMCRECLLTSWRSPSCGLCPICRTILKRTELISCPTDSIFRVDVVKNWKESSKVSELLKCLEKIKKSGSGEKSIVFSQWTSFLDLLEIPLRRRGFEFLRFDGKLAQKGREKVLKEFNETKQKTILLMSLKAGGVGLNLTAASSVFLMDPWWNPAVEEQAIMRIHRIGQKRTVFVRRFIVKDTVEERMQQVQARKQRMIAGALTDEEVRSARLEELKMLFR

SEQ ID NO: 8348 - protein, 1067 aa, Arabidopsis thaliana
MANLLQRLRRRTGPKPDYIEDKLDEYIREEQVEETGGSNQDCPLGEIEKILDREWRPTASNNPNSSDNGTPTLVVVKQYLVKWKGLSYLHCSWVPEQEFEKAYKSHPHLKLKLRVTRFNAAMDVFIAENGAHEFIAIRPEWKTVDRIIACREGDDGEEYLVKYKELSYRNSYWESESDISDFQNEIQRFKDINSSSRRDKYVENERNREEFKQFDLTPEFLTGTLHTYQLEGLNFLRYSWSKKTNVILADEMGLGKTIQSIAFLASLFEENLSPHLVVAPLSTIRNWEREFATWAPHMNVVMYTGDSEARDVIWEHEFYFSEGRKRLKKDVLKDKVPPKKELILRVDMSSQQKEVYKAVITNNYQVLTKKRDAKISNVLMKLRQVCSHPYLLPDFEPRFEDANEAFTKLLEASGKLQLLDKMMVKLKEQGHRVLIYTQFQHTLYLLEDYFTFKNWNYERIDGKISGPERQVRIDRFNAENSNRFCFLLSTRAGGIGINLATADTVIIYDSDWNPHADLQAMARVHRLGQTNKVMIYRLIHKGTVEERMMEITKNKMLLEHLVVGKQHLCQDELDDIIKYGSKELFSEENDEAGRSGKIHYDDAAIEQLLDRNHVDAVEVSLDDEEETDFLKNFKVASFEYVDDENEAAALEEAQAIENNSSVRNADRTSHWKDLLKDKYEVQQAEELSALGKRKRNGKQVMYAEDDLDGLEEISDEEDEYCLDDLKVTSDEEEEADEPEAARQRKPRTVTRPYRKRARDNSEEIPLMEGEGRYLMVLGFNETERDIFLRTFKRYGILFLKHIAENPTDNSTNFKVITAMVYADGVPKEGISSDELLVSMTFMMLVKEKCQFLDNHPTAPVFSNYVISKYNLRNGAFSKEEHDRILIPAVSKHGYGRWVAIVEDEEIGFQEVACKDLNIPFPPDTKSARKRICDHVGKRVKKMEDAIKYEYAEKILAEQAKAETKGTSFVDAEKEMLKNDPITSKKNSATAVDNKQGRVEMAQSYDQSVNEKSGESFQTYLDIQPLNRMPRESFKPLEPINEEISTRLSVGTDHDVEMDAADNIIVLD

SEQ ID NO: 8349 - protein, 1447 aa, Arabidopsis thaliana
MEANEESLKGKIEKLEGKEVIVESKEDEMDIIIEENREAEQEVMEVKARDGRGEQNDVLMEENNNQGEQKDEEMQDASSRSESSDFNSDEDEQILSRRDDELDLEKPLSEEEIDELISDLLAVESKLDEAVAAEMMTFKDEWEATLDELETESATLLEQLDGAGIELPKLYEMIESQAPNGCYTEAWKQRAHWVGTQVTKETVESLANAERFLHTHRPVRKRHGKLLEEGASGFLEKKLADGAVKESLAGTSELDWSSLNKVFSEKRDESVSFGSKQWASVYLASTPHQAAAMGLEFPGVNEVEEIEEIDASLADPFLADAIDNERELALTEEQKTNYIRVKEEDDITCDRVLQLRLKRKRRKKRSKQVIRCAAENMDDDSVYLDGNNTTPNFAKDQVKSPETSTQVHNSEVNIEENGNFSNSDVDKMTPSTHINVDAKRDDSQNPANNFRCTACNKVAVEVHSHPLLEVIVCMDCKRSIEDRVSKVDDSLERHCEWCGHIADLIDCRTCEKLFCASCIKRNIGEEYMSEAQSSGWDCCCCSPIPLQRLTLELEKAMRDKKSIELSSDSSSDSSSDNNSVDTDADVNVTISSKKKSKKKIRRIIDDAELGKDTRTKIAIEKARQERLRSLQFSARYKTISSMGDVKSIPEGAEVEVLGDAHSGYIVNVVREIGEEAVRVPRSISAKLKVHQVTGIRFMWENIIQSISRVKSGDKGLGCILAHTMGLGKTFQVIAFLYTAMRCVDLGLKTALIVTPVNVLHNWRSEFEKWMPSEVKPLRIFMLGDVSRERRFDLLTKWRKKGGVFLMGYTNFRNLSLGRGVKDLNAARGICNALRDGPDILVCDEAHIIKNTKADTTQALKQVKCQRRIALTGSPLQNNLMEYYCMVDFVREGFLGSSPEFRNRFQNPIENGQHMNSTAEDVKIMNQRSHILYEQLKGFVQRMDMNVVKKDLPPKTVFVISVKLSPLQRILYQRFLELYGFSDGRTDERMRKNFFAAYQVLAQILNHPGIPQLRSEDSKNGRRGSIVDIPDDCSSDENIDYNMVTGEKQRTMNDLQDKVDGYLQKDWWVDLLQKNNYKVSDFSGKMILLLDILSMSADVGDKALVFSQSIPTLDLIELYLSRVPRHGKQGKFWKKGKDWYRIDGKTESSERQKLVDRFNEPDNKRVKCTLISTRAGSLGINLYAANRVIIVDGSWNPTYDLQAIFRAWRYGQKKPVFAYRLMARGTIEEKIYKRQVTKEGLAARVVDRQQVHRTISKEEMLHLFEFDDDDEKSEAVTEISKQNEAGHSNLVEQAILWTKKATLSRVGGDKLMENLLQRHGPNWISSFHEHETLLQENEEERLTKEEKDMAWEVYRRALEWEEVQRVPFSESPVVPKPSPSTQTEPLPQPKGFNRSRFVNRNCTRIAHQLTLISQGLKVGSSTVCGECGRVIRWEDVIPASKLSAVIVN

SEQ ID NO: 8350 - protein, 881 aa, Arabidopsis thaliana
MRVLKYFRAPSSLRHRSSPMAQFLRRFSSSPMANEDEFQSPVEPSQQQSQDCVSESYLIGFVIANIVGLKYYSGRINGREMVGLVREPLNVYDNNAIRVLNTRSEQVGHIERTVAAVLAPMIDSHTIVVEGIVPNTRSNSNRYRIPCQIHVFAKLEASSTVKSTISRGGLVLISESDTSFGLSEAVVVKEQMGNGDKRSVDKIFKLVDENVKLMGKLVAAEPPREVIKSELFAHQKEGLGWLLHREKSGELPPFWEEKDGEFLNTLTNYRSDKRPDPLRGGVFADDMGLGKTLTLLSLIAFDRYGNASTSTPTEEPLDGEGDKIEKKGKKRGRGKSSESVTRKKLKTDDVVGMNVSQKTTLIVCPPSVISAWITQLEEHTVPGILKVYMYHGGERTDDVNELMKYDIVLTTYGTLAVEESWEDSPVKKMEWLRIILDEAHTIKNANAQQSRVVCKLKASRRWAVTGTPIQNGSFDLYSLMAFLRFEPFSIKSYWQSLIQRPLGQGNKKGLSRLQVLMATISLRRTKEKSLIGLPPKTVETCYVELSPEERQLYDHMEGEAKGVVQNLINNGSLMRNYSTVLSIILRLRQLCDDMSLCPPELRSFTTSTSVEDVTDKPELLQKLVAALQDGEDFDCPICISPPTNIIITRCAHIFCRACILQTLQRSKPLCPLCRGSLTQSDLYNAPPPPPDSSNTDGEDAKSSTKSSKVSALLSLLMASRQENPNTKSVVFSQFRKMLLLLETPLKAAGFTILRLDGAMTVKKRTQVIGEFGNPELTGPVVLLASLKASGTGINLTAASRVYLFDPWWNPAVEEQAMDRIHRIGQKQEVKMIRMIARNSIEERVLELQQKKKNLANEAFKRRQKKDEREVNVEDVVALMSL

SEQ ID NO: 8351 - protein, 862 aa, Arabidopsis thaliana
MAQFLRRFSSSPMANEDEFQSPVEPSQQQSQDCVSESYLIGFVIANIVGLKYYSGRINGREMVGLVREPLNVYDNNAIRVLNTRSEQVGHIERTVAAVLAPMIDSHTIVVEGIVPNTRSNSNRYRIPCQIHVFAKLEASSTVKSTISRGGLVLISESDTSFGLSEAVVVKEQMGNGDKRSVDKIFKLVDENVKLMGKLVAAEPPREVIKSELFAHQKEGLGWLLHREKSGELPPFWEEKDGEFLNTLTNYRSDKRPDPLRGGVFADDMGLGKTLTLLSLIAFDRYGNASTSTPTEEPLDGEGDKIEKKGKKRGRGKSSESVTRKKLKTDDVVGMNVSQKTTLIVCPPSVISAWITQLEEHTVPGILKVYMYHGGERTDDVNELMKYDIVLTTYGTLAVEESWEDSPVKKMEWLRIILDEAHTIKNANAQQSRVVCKLKASRRWAVTGTPIQNGSFDLYSLMAFLRFEPFSIKSYWQSLIQRPLGQGNKKGLSRLQVLMATISLRRTKEKSLIGLPPKTVETCYVELSPEERQLYDHMEGEAKGVVQNLINNGSLMRNYSTVLSIILRLRQLCDDMSLCPPELRSFTTSTSVEDVTDKPELLQKLVAALQDGEDFDCPICISPPTNIIITRCAHIFCRACILQTLQRSKPLCPLCRGSLTQSDLYNAPPPPPDSSNTDGEDAKSSTKSSKVSALLSLLMASRQENPNTKSVVFSQFRKMLLLLETPLKAAGFTILRLDGAMTVKKRTQVIGEFGNPELTGPVVLLASLKASGTGINLTAASRVYLFDPWWNPAVEEQAMDRIHRIGQKQEVKMIRMIARNSIEERVLELQQKKKNLANEAFKRRQKKDEREVNVEDVVALMSL

SEQ ID NO: 8352 - protein, 675 aa, Arabidopsis thaliana
MDDFWDLTVEEMDAIENEALQRINQQRNSSSSSSLPIPNEVFPQSLSLSLGDFVAVHTSSQGARILPSTLAPKPNTVLVSVPIDAGSKPQEQKVSVKILLHSSGVLAAKFPYNQVVVDAVRKIPKAIWNAKESPGYGPFLILHCLQQKIFYEKFPALKLRHRVCQPYVVPVVFLYYQMSSNLLWLPDDFCLIIGLHLSRKAIAVTTCVQESWPVLIIAPSSLRLHWATVSLRYLNSTWTLFMTLEMIHNAAFLQMIHQWLHVPPSDIVVVLPQPGGSNKCGFTIVSSNTKGTIHLDGVFNIVSYDVVTKLDKLLMALDFKVVIADESHFLKNGQAKRTSACLPVIKKAQYAILLSGTPALSRPIELFKQLEALYPDVYRNIHEYGGRYCKGVSPLHIEKLPRSSYKGFFGTYQGASNHDELHNLMKATVMIRRLKKDVLTELPSKRRQQVFLDLAAKDMKQINALFHELKVVKSKIKDCISEDDIKSLKFIEKNLINKIYTDSAVAKIPAVLDYLENVIEAGCKFLVFAHHQSMLEELHQFLKKKKVGCIRIDGSTPASSRQALVSDFQDKDEIKAAVLSIRAAGVGITLTAASTVIFAELSWTPGDLIQAEDRAHRIGQVSSVNIHYLLANDTVDDIIWDVVQSKLDNLGQVYSFSMSLHMERKSLGVKYTSII

SEQ ID NO: 8353 - protein, 1465 aa, Arabidopsis thaliana
MVWLCHHAFFMPFSLSLSAHLSLFHFLKPVKIKNFSKNSRTSSSSSQTRIFVFALMECIGKRVKSRSWQRLQAVNKRKKMETVAPVTSPPKKRRQKKPKNYDSDIEDITPTCNDSVPPPQVSNMYSVPNNSVKESFSRIMRDLNVEKKSGPSSSRLTDGSEQNPCLKERSFRVSDLGVEKKCSPEITDLDVGIPVPRFSKLKDVSEQKNTCLMQKSSPEIADLDLVISVPSSSVLKDVSEEIRFLKDKCSPEIRGLVLEKSVPGEIEILSDSESETEARRRASAKKKLFEESSRIVESISDGEDSSSETDEEEEENQDSEDNNTKDNVTVESLSSEDPSSSSSSSSSSSSSSSSSSSDDESYVKEVVGDNRDDDDLRKASSPIKRVSLVERKALVRYKRSGSSLTKPRERDNKIQKLNHREEEKKERQREVVRVVTKQPSNVVYTCAHCGKENTGNPESHSSFIRPHSIRDEIEDVNNFASTNVSKYEDSVSINSGKTTGAPSRPEVENPETGKELNTPEKPSISRPEIFTTEKAIDVQVPEEPSRPEIYSSEKAKEVQAPEMPSRPEVFSSEKAKEIQVPEMPSIPEIQNSEKAKEVQANNRMGLTTPAVAEGLNKSVVTNEHIEDDSDSSISSGDGYESDPTLKDKEVKINNHSDWRILNGNNKEVDLFRLLVNSVWEKGQLGEEDEADELVSSAEDQSQEQAREDHRKYDDAGLLIIRPPPLIEKFGVEEPQSPPVVSEIDSEEDRLWEELAFFTKSNDIGGNELFSNVEKNISANETPAAQCKKGKHDLCIDLEVGLKCMHCGFVEREIRSMDVSEWGEKTTRERRKFDRFEEEEGSSFIGKLGFDAPNNSLNEGCVSSEGTVWDKIPGVKSQMYPHQQEGFEFIWKNLAGTIMLNELKDFENSDETGGCIMSHAPGTGKTRLTIIFLQAYLQCFPDCKPVIIAPASLLLTWAEEFKKWNISIPFHNLSSLDFTGKENSAALGLLMQKNATARSNNEIRMVKIYSWIKSKSILGISYNLYEKLAGVKDEDKKTKMVREVKPDKELDDIREILMGRPGLLVLDEAHTPRNQRSCIWKTLSKVETQKRILLSGTPFQNNFLELCNVLGLARPKYLERLTSTLKKSGMTVTKRGKKNLGNEINNRGIEELKAVMLPFVHVHKGSILQSSLPGLRECVVVLNPPELQRRVLESIEVTHNRKTKNVFETEHKLSLVSVHPSLVSRCKISEKERLSIDEALLAQLKKVRLDPNQSVKTRFLMEFVELCEVIKEKVLVFSQYIDPLKLIMKHLVSRFKWNPGEEVLYMHGKLEQKQRQTLINEFNDPKSKAKVFLASTKACSEGISLVGASRVILLDVVWNPAVERQAISRAYRIGQKRIVYTYHLVAKGTPEGPKYCKQAQKDRISELVFACSSRHDKGKEKIAEAVTEDKVLDTMVEHSKLGDMFDNLIVQPKEADLVEGFSILMP

SEQ ID NO: 8354 - protein, 588 aa, Arabidopsis thaliana
MYPHQQEGFEFIWKNLAGTIMLNELKDFENSDETGGCIMSHAPGTGKTRLTIIFLQAYLQCFPDCKPVIIAPASLLLTWAEEFKKWNISIPFHNLSSLDFTGKENSAALGLLMQKNATARSNNEIRMVKIYSWIKSKSILGISYNLYEKLAGVKDEDKKTKMVREVKPDKELDDIREILMGRPGLLVLDEAHTPRNQRSCIWKTLSKVETQKRILLSGTPFQNNFLELCNVLGLARPKYLERLTSTLKKSGMTVTKRGKKNLGNEINNRGIEELKAVMLPFVHVHKGSILQSSLPGLRECVVVLNPPELQRRVLESIEVTHNRKTKNVFETEHKLSLVSVHPSLVSRCKISEKERLSIDEALLAQLKKVRLDPNQSVKTRFLMEFVELCEVIKEKVLVFSQYIDPLKLIMKHLVSRFKWNPGEEVLYMHGKLEQKQRQTLINEFNDPKSKAKVFLASTKACSEGISLVGASRVILLDVVWNPAVERQAISRAYRIGQKRIVYTYHLVAKGTPEGPKYCKQAQKDRISELVFACSSRHDKGKEKIAEAVTEDKVLDTMVEHSKLGDMFDNLIVQPKEADLVEGFSILMP

SEQ ID NO: 8355 - protein, 1227 aa, Arabidopsis thaliana
MSKKDSVFQSQADDFSGGFEFGADDEDFMIDIEAIYRILDESPVSMEVSQEIMSPVGSSVVESGEFRNTLMQSGSQATGWFPYRDLYGLGASQSEIAEPSSFSDPENGRLGLSATCYSDYGGNVVSFPVNCEDGTVSILDDMRIESKFTPCSPTTMTTYLNNMPGNDSGIGATQNSSLMSHFSPNSSSIVDCASSEPYGHHTMDAPLSEVSPNLVPGYAFQFFPKKEELLNDLKNEFIHCQSDGASRMVFDRHVGFDNGTSERNSGPDVSSERELSLKCEIIPSVSPVCVKPYNSSDGHQVEKELEQPDNCSSSFQENRAVHMKVKPELALENTVYSSIPGNYSRCSDVHTVGGTTLPWSGVSNCAISYQTDVGKEYPFIPPQTAFPGQDIDGRSFYSCFDSDDCFQNVTDPDPETSRTESLDYLVGDEDHEYIKRTCFNLSSFSSGTVESLSSKRIPEREDDSEIHKIESYGEFVNPHQYLPVQRPVFSSEHSTGSQTLNNCGGLKFESNKGNMNFHADLQDLSQHSSEASPPDGVLAVSLLRHQRIALSWMSQKETSGNPCFGGILADDQGLGKTVSTIALILTERSTPYLPCEEDSKNGGCNQSDHSQVVFNENKVVEDSLCKMRGRPAAGTLIVCPTSLMRQWADELRKKVTLEAHLSVLVYHGCSRTKDPHELAKYDVVITTYSLVSKRKHMDCEPVEFLSGPLAQVSWFRVVLDEAQSIKNYKTQASIACSGLHAKRRWCLSGTPIQNSIADLYSYFRFLKYDPYSSYQTFCETIKNPISSYPGEGYKTLQAILKKVMLRRTKDTLLDGKPVISLPPKSIELRRVDFTKEERDFYSKLECDSRDQFKEYAEAGTVKQNYVNILLMLLRLRQACGHPLLVSSLSWSSSAEMVKKLPYEKLTFLLHRLEASLAICGICNVRLSTHAVVSLCGHVFCNQCICECLTRDNNQCPLSYCKVGLEISSLFSRETLENAMLDLHKLDAPCDRTTSDPVGSGEPCENLPCGSSKIKAALDILQSLSRPQSPATVMNDVNQSSENGENNQQLDKSFSLPATPAKSSVGGVVNVAGEKAIVFTQWTKMLDLLEAGLKSSGIQYRRFDGKMTVPARDAAVQDFNTLPDVSVMIMSLKAASLGLNMVAACHVIMLDLWWNPTTEDQAIDRAHRIGQTRPVKVVRFTVKDTVEDRILALQQKKRKMVASAFGEHENGSRESHLSVEDLNYLFMA

SEQ ID NO: 8356 - protein, 1471 aa, Arabidopsis thaliana
MEANEESLKGKIEKLEGKEVIVESKEDEMDIIIEENREAEQEVMEVKARDGRGEQNDVLMEENNNQGEQKDEEMQDASSRSESSDFNSDEDEQILSRRDDELDLEKPLSEEEIDELISDLLAVESKAAEAQEALEKESLSKVESEVREELAQALRGDELDEAVAAEMMTFKDEWEATLDELETESATLLEQLDGAGIELPKLYEMIESQAPNGCYTEAWKQRAHWVGTQVTKETVESLANAERFLHTHRPVRKRHGKLLEEGASGFLEKKLADGAVKESLAGTSELDWSSLNKVFSEKRDESVSFGSKQWASVYLASTPHQAAAMGLEFPGVNEVEEIEEIDASLADPFLADAIDNERELALTEEQKTNYIRVKEEDDITCDRVLQLRLKRKRRKKRSKQVIRCAAENMDDDSVYLDGNNTTPNFAKDQVKSPETSTQVHNSEVNIEENGNFSNSDVDKMTPSTHINVDAKRDDSQNPANNFRCTACNKVAVEVHSHPLLEVIVCMDCKRSIEDRVSKVDDSLERHCEWCGHIADLIDCRTCEKLFCASCIKRNIGEEYMSEAQSSGWDCCCCSPIPLQRLTLELEKAMRDKKSIELSSDSSSDSSSDNNSVDTDADVNVTISSKKKSKKKIRRIIDDAELGKDTRTKIAIEKARQERLRSLQFSARYKTISSMGDVKSIPEGAEVEVLGDAHSGYIVNVVREIGEEAVRVPRSISAKLKVHQVTGIRFMWENIIQSISRVKSGDKGLGCILAHTMGLGKTFQVIAFLYTAMRCVDLGLKTALIVTPVNVLHNWRSEFEKWMPSEVKPLRIFMLGDVSRERRFDLLTKWRKKGGVFLMGYTNFRNLSLGRGVKDLNAARGICNALRDGPDILVCDEAHIIKNTKADTTQALKQVKCQRRIALTGSPLQNNLMEYYCMVDFVREGFLGSSPDFQNPIENGQHMNSTAEDVKIMNQRSHILYEQLKGFVQRMDMNVVKKDLPPKTVFVISVKLSPLQRILYQRFLELYGFSDGRTDERMRKNFFAAYQVLAQILNHPGIPQLRSEDSKNGRRGSIVDIPDDCSSDENIDYNMVTGEKQRTMNDLQDKVDGYLQKDWWVDLLQKNNYKVSDFSGKMILLLDILSMSADVGDKALVFSQSIPTLDLIELYLSRVPRHGKQGKFWKKGKDWYRIDGKTESSERQKLVDRFNEPDNKRVKCTLISTRAGSLGINLYAANRVIIVDGSWNPTYDLQAIFRAWRYGQKKPVFAYRLMARGTIEEKIYKRQVTKEGLAARVVDRQQVHRTISKEEMLHLFEFDDDDEKSEAVTEISKQNEAGHSNLVEQAILWTKKATLSRVGGDKLMENLLQRHGPNFHEHETLLQENEEERLTKEEKDMAWEVYRRALEWEEVQRVPFSESPVVPKPSPSTQTEPLPQPKGFNRSRFVNRNCTRIAHQLTLISQGLKVGSSTVCGECGRVIRWEDVIPASKLSAVIVN

SEQ ID NO: 8357 - protein, 833 aa, Arabidopsis thaliana
MELRSRNKAIRPSTEVVDLEEGTGINPDEEPYAISSDDDSIGSEFQGDEEEEEELEEVVANDDLPNPVPVLAIVNLPRASKKRKKPDARKEKVVLLWETWEKEQNSWIDEHMSEDVDLDQHNAVIAETAEPPSDLIMPLLRYQKEFLAWATKQEQSVAGGILADEMGMGKTIQAISLVLARREVDRAQFGEAAGCTLVLCPLVAVSQWLNEIARFTSPGSTKVLVYHGAKRAKNIKEFMNYDFVLTTYSTVESEYRRNIMPSKVQCAYCSKSFYPKKLVIHLRYFCGPSAVKTAKQSKQKRKKTSDSSSQQGKEADAGEDKKLKKSKKKTKQTVEKDQLGSDDKEKSLLHSVKWNRIILDEAHYIKERRSNTARAVFALEATYRWALSGTPLQNRVGELYSLIRFLQIRPYSYYFCKDCDCRILDYVAHQSCPHCPHNAVRHFCWWNKYVAKPITVYGSFGLGKRAMILLKHKVLKDILLRRTKLGRAADLALPPRIITLRRDTLDVKEFDYYESLYKNSQAEFNTYIEAGTLMNNYAHIFDLLTRLRQAVDHPYLVVYSNSSGANANLVDENKSEQECGLCHDPAEDYVVTSCAHVFCKACLIGFSASLGKVTCPTCSKLLTVDWTTKADTEHKASKTTLKGFRASSILNRIKLDDFQTSTKIEALREEIRFMVERDGSAKAIVFSQFTSFLDLINYTLGKCGVSCVQLVGSMTMAARDTAINKFKEDPDCRVFLMSLKAGGVALNLTVASHVFMMDPWWNPAVERQAQDRIHRIGQYKPIRVVRFIIENTVEERILRLQKKKELVFEGTVGGSQEAIGKLTEEDMRFLFTT

SEQ ID NO: 8358 - protein, 653 aa, Arabidopsis thaliana
MDDTMDMSSGSDEEVQEEKTTVNERVIYQAALQDLKQPKTEKDLPPGVLTVPLMRHQKIALNWMRKKEKRSRHCLGGILADDQGLGKTISTISLILLQKLKSQSKQRKRKGQNSGGTLIVCPASVVKQWAREVKEKVSDEHKLSVLVHHGSHRTKDPTEIAIYDVVMTTYAIVTNEVPQNPMLNRYDSMRGRESLDGSSLIQPHVGALGRVRWLRVVLDEAHTIKNHRTLIAKACFSLRAKRRWCLTGTPIKNKVDDLYSYFRFLRYHPYAMCNSFHQRIKAPIDKKPLHGYKKLQAILRGIMLRRTKEWSFYRKLELNSRWKFEEYAADGTLHEHMAYLLVMLLRLRQACNHPQLVNGYSHSDTTRKMSDGVRVAPRENLIMFLDLLKLSSTTCSVCSDPPKDPVVTLCGHVFCYECVSVNINGDNNTCPALNCHSQLKHDVVFTESAVRSCINDYDDPEDKNALVASRRVYFIENPSCDRDSSVACRARQSRHSTNKDNSISGLNLIFTFLKDKCNDYETGAMLMSLKAGNLGLNMVAASHVILLDLWWNPTTEDQAIDRAHRIGQTRAVTVTRIAIKNTVEERILTLHERKRNIVASALGEKNWQKFCDSTNTRRSRISVFWCVEYPRVFIDKRNKTFSYLISHKCECNE

SEQ ID NO: 8359 - protein, 638 aa, Arabidopsis thaliana
MDDTMDMSSGSDEEVQEEKTTVNERVIYQAALQDLKQPKTEKDLPPGVLTVPLMRHQKIALNWMRKKEKRSRHCLGGILADDQGLGKTISTISLILLQKLKSQSKQRKRKGQNSGGTLIVCPASVVKQWAREVKEKVSDEHKLSVLVHHGSHRTKDPTEIAIYDVVMTTYAIVTNEVPQNPMLNRYDSMRGRESLDGSSLIQPHVGALGRVRWLRVVLDEAHTIKNHRTLIAKACFSLRAKRRWCLTGTPIKNKVDDLYSYFRFLRYHPYAMCNSFHQRIKAPIDKKPLHGYKKLQAILRGIMLRRTKEWSFYRKLELNSRWKFEEYAADGTLHEHMAYLLVMLLRLRQACNHPQLVNGYSHSDTTRKMSDGVRVAPRENLIMFLDLLKLSSTTCSVCSDPPKDPVVTLCGHVFCYECVSVNINGDNNTCPALNCHSQLKHDVVFTESAVRSCINDYDDPEDKNALVASRRVYFIENPSCDRDSSVACRARQSRHSTNKDNSISGLVCAMLMSLKAGNLGLNMVAASHVILLDLWWNPTTEDQAIDRAHRIGQTRAVTVTRIAIKNTVEERILTLHERKRNIVASALGEKNWQKFCDSTNTRRSRISVFWCVEYPRVFIDKRNKTFSYLISHKCECNE

SEQ ID NO: 8360 - protein, 888 aa, Arabidopsis thaliana
MGFVYIVMTGYYKNVHKRKQNQVDDGPEAKRVKSSAKVIDYSNPFAVSNMLEALDSGKFGSVSKELEEIADMRMDLVKRSIWLYPSLAYTVFEAEKTMDNQQVVEGVINLDDDDDDDTDVEKKALCVVPSSSEIVLLDSDDEDNERQRPMYQFQSTLVQHQKNQGDVTPLIPQCSFEEVDLGRGKEMPSAIKAIVEGQTSRGKVLPIENGVVNEKGVYVGVEEDDSDNESEAADEDLGNIWNEMALSIECSKDVARETSHKEKADVVEDCEHSFILKDDMGYVCRVCGVIEKSILEIIDVQFTKAKRNTRTYASETRTKRFGESDNELKFSEEGLMIGGLAAHPTHAAEMKPHQIEGFQFLCSNLVADDPGGCIMAHAPGSGKTFMIISFMQSFLAKYPQAKPLVVLPKGILPTWKKEFVRWQVEDIPLLDFYSAKAENRAQQLSILKQWMEKKSILFLGYQQFSTIVCDDTTDSLSCQEILLKVPSILILDEGHTPRNEDTNLLQSLAQVQTPRKVVLSGTLYQNHVKEVFNILNLVRPKFLKLDTSKSAVKRILAYTPCDVRGRLTGSNSDMASMFNETVEHTLQKSEDFTVKIKVIQDLREMTKKVLHYYKGDFLDELPGLADFTVVLNLSPKQLNEVKKLRREKRKFKVSAVGSAIYLHPKLKVFSDKSDDVSDTTMDEMVEKLDLNEGVKAKFFLNLINLCDSAGEKLLVFSQYLIPLKFLERLAALAKGWKLGKEVFVLTGNTSSEQREWSMETFNSSPDAKIFFGSIKACGEGISLVGASRILILDVPLNPSVTRQAIGRAFRPGQKKMVHAYRLIAGSSPEEEDHNTCFKKEVISKMWFEWNEYCGYQNFEVETIDVDEAGDTFLESPALREDIRVLYKR

SEQ ID NO: 8361 - protein, 1616 aa, Arabidopsis thaliana
MEANEESLKGKIEKLEGKEVIVESKEDEMDIIIEENREAEQEVMEVKARDGRGEQNDVLMEENNNQGEQKDEEMQDASSRSESSDFNSDEDEQILSRRDDELDLEVCIMDISCLLGGGIVYVYLIFLFSIIGQKPLSEEEIDELISDLLAVESKAAEAQEALEKESLSKVESEVREELAQALRGDELDEAVAAEMMTFKDEWEATLDELETESATLLEQLDGAGIELPKLYEMIESQAPNGCYTEAWKQRAHWVGTQVTKETVESLANAERFLHTHRPVRKRHGKLLEEGASGFLEKKLADGAVKESLAGTSELDWSSLNKVFSEKRDESVSFGSKQWASVYLASTPHQAAAMGLEFPGVNEVIFSIMPLYFLTVLMLMMICICLHLLIFVAPRKKALNVTSPFLDRLLAVRHLKKACVEEIEEIDASLADPFLADAIDNERELALTEEQKTNYIRISGIKRSTFEIITFSGCSLCSCFCGVGSKSIYMKYHLRLLTTPALPFMSFSMTLNHLQVKEEDDITCDRVLQLRLKRKRRKKRSKQVIRCAAENMDDDSVYLDGNNTTPNFAKDQVKSPETSTQVHNSEVNIEENGNFSNSDVDKMTPSTHINVDAKRDDSQNPANNFRCTACNKVAVEVHSHPLLEVIVCMDCKRSIEDRVSKVDDSLERHCEWCGHIADLIDCRTCEKLFCASCIKRNIGEEYMSEAQSSGWDCCCCSPIPLQRLTLELEKAMRDKKSIELSSDSSSDSSSDNNSVDTDADVNVTISSKKKSKKKIRRIIDDAELGKDTRTKIAIEKARQERLRSLQFSARYKTISSMGDVKSIPEGAEVEVLGDAHSGYIVNVVREIGEEAVRVPRSISAKLKVHQVTGIRFMWENIIQSISRVKSGDKGLGCILAHTMGLGKTFQVIAFLYTAMRCVDLGLKTALIVTPVNVLHNWRSEFEKWMPSEVKPLRIFMLGDVSRERRFDLLTKWRKKGGVFLMGYTNFRNLSLGRGVKDLNAARGICNALRDGPDILVCDEAHIIKNTKADTTQALKQVKCQRRIALTGSPLQNNLMEYYCMVDFVREGFLGSSPEFRNRQSFNCGSPYLQLPKSNRKRTAYEFNCGGCFVQRMDMNVVKKDLPPKTVFVISVKLSPLQRILYQRFLELYGFSDGRTDERMRKNFFAAYQVLAQILNHPGIPQLRSEDSKNGRRGSIVDIPDDCSSDENIDYNMVTGEKQRTMNDLQDKVDGYLQKDWWVDLLQKNNYKVSDFSGKMILLLDILSMSADVGDKALVFSQSIPTLDLIELYLSRVPRHGKQGKFWKKGKDWYRIDGKTESSERQKLVDRFNEPDNKRVKCTLISTRAGSLGINLYAANRVIIVDGSWNPTYDLQAIFRAWRYGQKKPVFAYRLMARGTIEEKIYKRQVTKEGLAARVVDRQQVHRTISKEEMLHLFEFDDDDEKSEAVTEISKQNEAGHSNLVEQAILWTKKATLSRVGGDKLMENLLQRHGPNWISSFHEHETLLQENEEERLTKEEKDMAWEVYRRALEWEEVQRVPFSESPVVPKPSPSTQTEPLPQPKGFNRSRFVNRNCTRIAHQLTLISQGLKVGSSTVCGECGRVIRWEDVIPASKLSAVIVN

SEQ ID NO: 8362 - protein, 816 aa, Arabidopsis thaliana
MFTAWNLRSRSRSITQEELAKRPDPFCLPNLLDGLEDGLYGRLADDVKRLCKLRQEYLNGSISLEDIEARQDNKRAKSSHNLIIDSDDELPQESVTQINPLEKRLKKLKEVIVVKNGDSSGSDSSPQGYDEEDSSRNSTDIDNQSLYVDAEEEEELWRKMAFAQESIKVTVEDSQSNDHKQIEDCDHSFICKDDIGEVCRVCGLIKKPIESMIEVVFNKQKRSRRTYMREKENGETSRDFSGIQSSHTNILGEKMFIHPWHDQEMRPHQTEGFRFLCNNLAADEPGGCILAHAPGSGKTFLLISFLQSFMAMDPQARPLVVLPKGIIESWKREFTLWEVEKIPLLDFYSVKAESRKQQLKVLGQWIKERSILFLGYQQFTRIICDDNFEAASEDCKLILLEKPTLLILDEGHTSRNKETYMLSSLARVKTRRKVVLTGTLFQNNVEEVFNILDLVRPKFLKRPGTREIVSRIMSKAEIPRGKQVNQSSSSIEGTFFAAVELTLQRSTNFSAKASLIKDLREMTRNILHYHKADFSGLLPGLSEFTVMLNLSSIQRDEVKGLRKMELFKQISLGAALYIHPKLKSFLEENPSNGEKGFSDNNTTVMKLDKMLKKINVRDGVKMKFFLNLLALCESTGEKLLVFSQYIVPIKTLERLMSSMKGWRLGKEMFTITGDSSNEQREWSMERFNNSLEAKVFFGSIKACGEGISLVGASRVLILDVHLNPSVTQQAVARAYRPGQKRKVYAYKLVAADSPEEENYETCTRKEMMSKMWFEWNVGSGREDFGFRAIDADHSGDAFLETTKMKEDIKCLYTKVN

SEQ ID NO: 8363 - protein, 744 aa, Arabidopsis thaliana
HFIMPMLFDNHDQFNEWFSKGIENHAEHGGTLNEHQLNRLHAILKPFMLRRVKKDVVSELTTKTEVTVHCKLSSRQQAFYQAIKNKISLAELFDSNRGQFTDKKVLNLMNIVIQLRKVCNHPELFERNEGSSYLYFGVTSNSLLPHPFGELEDVHYSGGQNPIIYKIPKLLHQEVLQNSETFCSSVGRGISRESFLKHFNIYSPEYILKSIFPSDSGVDQVVSGSGAFGFSRLMDLSPSEVGYLALCSVAERLLFSILRWERQFLDELVNSLMESKDGDLSDNNIERVKTKAVTRMLLMPSKVETNFQKRRLSTGPTRPSFEALVISHQDRFLSSIKLLHSAYTYIPKARAPPVSIHCSDRNSAYRVTEELHQPWLKRLLIGFARTSEANGPRKPNSFPHPLIQEIDSELPVVQPALQLTHRIFGSCPPMQSFDPAKLLTDSGKLQTLDILLKRLRAGNHRVLLFAQMTKMLNILEDYMNYRKYKYLRLDGSSTIMDRRDMVRDFQHRSDIFVFLLSTRAGGLGINLTAADTVIFYESDWNPTLDLQAMDRAHRLGQTKDVTVYRLICKETVEEKILHRASQKNTVQQLVMTGGHVQGDDFLGAADVVSLLMDDAEAAQLEQKFRELPLQVKDRQKKKTKRIRIDAEGDATLEELEDVDRQDNGQEPLEEPEKPKSSNKKRRAASNPKARAPQKAKEEANGEDTPQRTKRVKRQTKSINESLEPVFSASVTESNKGFDPSSSAN

SEQ ID NO: 8364 - protein, 981 aa, Arabidopsis thaliana
MDSAIDISSDSDVEIQETRTRPQHPPRIAEGSHRRDLSTLRPHFLSGSSSGANGHTKTGLTNLDSRNGFESKPLPRAEHHTHIPGNGSIVTSRIPNISVGDYEKFSSQQAFKRTHPPTFSRPPFPPRPDIGTSNGNASHFRGGAHDDLGMGRVTNGTRILPPSVAHGTSASPSHFNGLSDPMHRNGIGEERNSENDERLIYQAALQELNQPKSEVDLPAGLLSVPLMKHQKIALAWMFQKETNSLHCMGGILADDQGLGKTVSTIALILKQMHEAKLKSKNSGNQEAEALDLDADDESENAFEKPESKASNGSGVNGDSGIKKAKGEEASTSTRKFNRKRPAAGTLIVCPASVVRQWARELDEKVTDEAKLSVLIYHGGNRTKDPIELAKYDVVMTTYAIVSNEVPKQPLVDDDENDEKNSEKYGLASGFSINKKRKNVVGTTKKSKKKKGNNNAGDSSDPDSGTLAKVGWFRVVLDEAQTIKNHRTQVARACCGLRAKRRWCLSGTPIQNTIDDLYSYFRFLKYDPYAVYKSFCHQIKGPISRNSLQGYKKLQAVLRAIMLRRTKGTLLDGQPIINLPPKTINLSQVDFSVEERSFYVKLESDSRSQFKAYAAAGTLNQNYANILLMLLRLRQACDHPQLVKRYNSDSVGKVSEEAVKKLPKEDLVSLLSRLESSPICCVCHDPPEDPVVTLCGHIFCYQCVSDYITGDEDTCPAPRCREQLAHDVVFSKSTLRSCVADDLGCSSSEDNSHDKSVFQNGEFSSSKIKAVLDILQSLSNQGTSNSTQNGQMASSSQQPNDDDDDDDDDVTIVEKTSLKSTPSNGGPIKTIIFSQWTGMLDLVELSLIENSIEFRRLDGTMSLIARDRAVKEFSNDPDVKVMIMSLKAGNLGLNMIAACHVILLDLWWNPTTEDQAIDRAHRIGQTRPVTVTRITIKNTVEDRILALQEEKRKMVASAFGEDHGGSSATRLTVDDLKYLFMV

SEQ ID NO: 8365 - protein, 1062 aa, Arabidopsis thaliana
MDSAIDISSDSDVEIQETRTRPQHPPRIAEVVDLGAGSHRRDLSTLRPHFLSGSSSGANGHTKTGLTNLDSRNGFESKPLPRAEHHTHIPGNGSIVTSRIPNISVGDYEKFSSQQAFKRTHPPTFSRPPFPPRPDIGTSNGNASHFRGGAHDDLGMGRVTNGTRILPPSVAHGTSASPSHFNGLSDPMHRNGIGEERNSENDERLIYQAALQTMCMEALLFFLFDKREGIGTFTIVAFVSYFALLHQGYDFHLKSLVFLHNSPGTESTQVRGRFTCWSSFGSPYEASGIQVYIIFQYLSEWSCVLNTVVSQKIALAWMFQKETNSLHCMGGILADDQGLGKTVSTIALILKQMHEAKLKSKNSGNQEAEALDLDADDESENAFEKPESKASNGSGVNGDSGIKKAKGEEASTSTRKFNRKRPAAGTLIVCPASVVRQWARELDEKVTDEAKLSVLIYHGGNRTKDPIELAKYDVVMTTYAIVSNEVPKQPLVDDDENDEKNSEKYGLASGFSINKKRKNVVGTTKKSKKKKGNNNAGDSSDPDSGTLAKVGWFRVVLDEAQTIKNHRTQVARACCGLRAKRRWCLSGTPIQNTIDDLYSYFRFLKYDPYAVYKSFCHQIKGPISRNSLQGYKKLQAVLRAIMLRRTKGTLLDGQPIINLPPKTINLSQVDFSVEERSFYVKLESDSRSQFKAYAAAGTLNQNYANILLMLLRLRQACDHPQLVKRYNSDSVGKVSEEAVKKLPKEDLVSLLSRLESSPICCVCHDPPEDPVVTLCGHIFCYQCVSDYITGDEDTCPAPRCREQLAHDVVFSKSTLRSCVADDLGCSSSEDNSHDKSVFQNGEFSSSKIKAVLDILQSLSNQGTSNSTQNGQMASSSQQPNDDDDDDDDDVTIVEKTSLKSTPSNGGPIKTIIFSQWTGMLDLVELSLIENSIEFRRLDGTMSLIARDRAVKEFSNDPDVKVMIMSLKAGNLGLNMIAACHVILLDLWWNPTTEDQAIDRAHRIGQTRPVTVTRITIKNTVEDRILALQEEKRKMVASAFGEDHGGSSATRLTVDDLKYLFMV

SEQ ID NO: 8366 - protein, 95 aa, Arabidopsis thaliana
LKAGGVALNLTVASHVFMMDPWWNPAVERQAQDRIHRIGQYKPIRVVRFIIENTVEERILRLQKKKELVFEGTVGGSQEAIGKLTEEDMRFLFTT

SEQ ID NO: 8367 - protein, 1256 aa, Arabidopsis thaliana
MKRKHYFEFNHPFNPCPFEVFCWGTWKAVEYLRIENGTMTMRLLENGQVLDDIKPFQRLRIRSRKATLIDCTSFLRPGIDVCVLYQRDEETPEPVWVDARVLSIERKPHESECLCTFHVSVYIDQGCIGLEKHRMNKVPVLVGLNEIAILQKFCKEQSLDRYYRWRYSEDCSSLVKTRLNLGKFLPDLTWLLVTSVLKNIVFQIRTVHEKMVYQIVTDEDCEGSSSSLSAMNITVEDGVVMSKVVLFNPAEDTCQDSDVKEEIEEEVMELRRSKRRSGRPERYGDSEIQPDSKDGWVRMMPYRYNIWNVSSDDDDEEEDCEDDKDTDDDLYLPLSHLLRKKGSKKGFSKDKQREIVLVDKTERKKRKKTEGFSRSCELSVIPFTPVFEPIPLEQFGLNANSLCGGVSGNLMDEIDKYRSKAAKYGKKKKKKIEMEEMESDLGWNGPIGNVVHKRNGPHSRIRSVSRETGVSEEPQIYKKRTLSAGAYNKLIDSYMSRIDSTIAAKDKATNVVEQWQGLKNPASFSIEAEERLSEEEEDDGETSENEILWREMELCLASSYILDDHEVRVDNEAFHKATCDCEHDYELNEEIGMCCRLCGHVGTEIKHVSAPFARHKKWTTETKQINEDDINTTIVNQDGVESHTFTIPVASSDMPSAEESDNVWSLIPQLKRKLHLHQKKAFEFLWKNLAGSVVPAMMDPSSDKIGGCVVSHTPGAGKTFLIIAFLASYLKIFPGKRPLVLAPKTTLYTWYKEFIKWEIPVPVHLLHGRRTYCMSKEKTIQFEGIPKPSQDVMHVLDCLDKIQKWHAQPSVLVMGYTSFLTLMREDSKFAHRKYMAKVLRESPGLLVLDEGHNPRSTKSRLRKALMKVDTDLRILLSGTLFQNNFCEYFNTLCLARPKFVHEVLVELDKKFQTNQAEQKAPHLLENRARKFFLDIIAKKIDTKVGDERLQGLNMLRNMTSGFIDNYEGSGSGSGDVLPGLQIYTLLMNSTDVQHKSLTKLQNIMSTYHGYPLELELLITLAAIHPWLVKTTTCCAKFFNPQELLEIEKLKHDAKKGSKVMFVLNLVFRVVKREKILIFCHNIAPIRLFLELFENVFRWKRGRELLTLTGDLELFERGRVIDKFEEPGGQSRVLLASITACAEGISLTAASRVIMLDSEWNPSKTKQAIARAFRPGQQKVVYVYQLLSRGTLEEDKYRRTTWKEWVSSMIFSEEFVEDPSQWQAEKIEDDVLREIVEEDKVKSFHMIMKNEKASTGG

SEQ ID NO: 8368 - protein, 1132 aa, Arabidopsis thaliana
MDMTSCVARRTRSRTESYLNSILNKSKGISGEEEDQSLGCVNSRTEKRRVNMRDACSPSPRKKKRRRRKDDDDDVVFVRTEYPEGKRDDENVGSTSGNLQSKSFDFGDRVCDFDADDRNLGCEEKASNFNPIDDDDDVVFVGTVQRENDHVEDDDNVGSASVISPRVCDFDEDDAKVSGKENPLSPDDDDDVVFLGTIAGENQHVEDVNAGSEVCDILLDDANLRGEEKTYVSDEVVSLSSSSDDEEDPLEELGTDSREEVSGEDRDSGESDMDEDANDSDSSDYVGESSDSSDVESSDSDFVCSEDEEGGTRDDATCEKNPSEKVYHHKKSRTFRRKHNFDVINLLAKSMLESKDVFKEDIFSWDKIAEVDSREDPVVRESSSEKVNEHGKPRERRSFHRVREKNHLNGESFYGGEKLCDGEETINYSTEDSPPLNLRFGCEEPVLIEKTEEEKELDSLWEDMNVALTLEGMHSSTPDKNGDMLCSKGTHDFVLDDEIGLKCVHCAYVAVEIKDISPAMDKYRPSVNDNKKCSDRKGDPLPNRLEFDASDPSSFVAPLDNIEGTVWQYVPGIKDTLYPHQQEGFEFIWKNLAGTTKINELNSVGVKGSGGCIISHKAGTGKTRLTVVFLQSYLKRFPNSHPMVIAPATLMRTWEDEVRKWNVNIPFYNMNSLQLSGYEDAEAVSRLEGNRHHNSIRMVKLVSWWKQKSILGISYPLYEKLAANKNTEGMQVFRRMLVELPGLLVLDEGHTPRNQSSLIWKVLTEVRTEKRIFLSGTLFQNNFKELSNVLCLARPADKDTISSRIHELSKCSQEGEHGRVNEENRIVDLKAMIAHFVHVHEGTILQESLPGLRDCVVVLNPPFQQKKILDRIDTSQNTFEFEHKLSAVSVHPSLYLCCNPTKKEDLVIGPATLGTLKRLRLKYEEGVKTKFLIDFIRISGTVKEKVLVYSQYIDTLKLIMEQLIAECDWTEGEQILLMHGKVEQRDRQHMIDNFNKPDSGSKVLLASTKACSEGISLVGASRVVILDVVWNPSVESQAISRAFRIGQKRAVFIYHLMVKDTSEWNKYCKQSEKHRISELVFSSTNEKDKPINNEVVSKDRILDEMVRHEKLKHIFEKILYHPKKSDMNTSFF

SEQ ID NO: 8369 - protein, 953 aa, Arabidopsis thaliana
MDSAIDISSDSDVEIQETRTRPQHPPRIAEVVDLGAGSHRRDLSTLRPHFLSGSSSGANGHTKTGLTNLDSRNGFESKPLPRAEHHTHIPGNGSIVTSRIPNISVGDYEKFSSQQAFKRTHPPTFSRPPFPPRPDIGTSNGNASHFRGGAHDDLGMGRVTNGTRILPPSVAHGTSASPSHFNGLSDPMHRNGIGEERNSENDERLIYQAALQTMCMEALLFFLFDKREGIGTFTIVAFVSYFALLHQGYDFHLKSLVFLHNSPGTESTQVRGRFTCWSSFGSPYEASGIQVYIIFQYLSEWSCVLNTVVSQKIALAWMFQKETNSLHCMGGILADDQGLGKTVSTIALILKQMHEAKLKSKNSGNQEAEALDLDADDESENAFEKPESKASNGSGVNGDSGIKKAKGEEASTSTRKFNRKRPAAGTLIVCPASVVRQWARELDEKVTDEAKLSVLIYHGGNRTKDPIELAKYDVVMTTYAIVSNEVPKQPLVDDDENDEKNSEKYGLASGFSINKKRKNVVGTTKKSKKKKGNNNAGDSSDPDSGTLAKVGWFRVVLDEAQTIKNHRTQVARACCGLRAKRRWCLSGTPIQNTIDDLYSYFRFLKYDPYAVYKSFCHQIKGPISRNSLQGYKKLQAVLRAIMLRRTKGTLLDGQPIINLPPKTINLSQVDFSVEERSFYVKLESDSRSQFKAYAAAGTLNQNYANILLMLLRLRQACDHPQLVKRYNSDSVGKVSEEAVKKLPKEDLVSLLSRLESSPICCVCHDPPEDPVVTLCGHIFCYQCVSDYITGDEDTCPAPRCREQLAHDVVFSKSTLRSCVADDLGCSSSEDNSHDKSVFQNGEFSSSKIKAVLDILQSLSNQGTSNSTQNGQMASSSQQPNDDDDDDDDDVTIVEKTSLKSTPSNGGPIKTIIFSQWTGMLDLVELSLIENSIEFRRLDGTMSLIARDRAVKEF

SEQ ID NO: 8370 - protein, 1287 aa, Arabidopsis thaliana
MGEEGSMFGLGGEFPVDDCDGGFEFEDDDETIDIETLYRILDEKPDSAEVVFSAFVGSQENLSPVGSSADELKDSQLLNGSFDEHVKMEAGLSPSPAHTCSASLKDWFSLSQGEQPVETCGVSQSEMTSCSISSSFSDPDGNMMAFNPVNCDVDTVSKQDDKIIDSKSMLTPYFDNVTGYGVGLGANHNSSAMSVFFNNSNSLSDSADNYVSSAQDCYNTSGTSLSDHTPNSVQNFAFEFFPNKEEAVNDVESGVSESQSDGASRMIFDRHGRVDNGSLERKPPIDFSSARGISFKFESNPSVSPACVKPYNSFDSHLADSDLDRPNNYSCSFQDNKTVHVKVKPEAESEKVVYSSVPGEFSVRDDAYLSGETNRWWSGASSSAVSYQTDIEKGYSYMAPQTALPSQDSGKISSNHFYDSDTCLQYVVEDPSPVTQNNEYKDFQIQQGDREYIQPRGIDSQFSNASFESVQSHSSECISDSDDDSDVCIIEPYGQSAIPHRPLAMKMPVVSSEYSTVSHNFNQSGGLKLQSNKENMIFQAALQDLTQPNSEAILPDGVLTVPLLRHQRIALSWMAQKETSGFPCSGGILADDQGLGKTVSTIALILKERSKPAQACEESTKKEIFDLESETGECAPLKPSGRSKHFEHSQLLSNENKVGGDSVGKVTGRPAAGTLVVCPTSVMRQWADELHKKVTSEANLSVLVYHGSSRTKDPHELAKYDVVVTTFSIVSMEVPKQPLVDDEDEEKDGVHDGGTAATGFCSNKKRKYPPDSKKKGSKKKKVEFLSGPLAKVSWFRVVLDEAQSIKNYKTQVARACWGLRAKRRWCLSGTPIQNSIDDLYSYFRFLKYDPYSSYVLFCSTIKNPITRNPVKGYQKLQAILKTVMLRRTKGSLLDGKPIISLPPKSIELRKVDFTVEERDFYSKLEAESRTQFREYAEAGTVKQNYVNILLMLLRLRQACDHPLLVNGEYSFTWESSVGLAKKQIQSDASLAICGICNDAPEDAVASVCGHVFCKQCIYERLTGDSNHCPFANCNVRLTISSLSSKTRLDDAMPDMQERATSNSLSPCSDEDLPYGSSKIKAALEILQSLPKAHDLTDSNQISENREYSGLSITPVKNEGMSVDVPIKVAGEKAIVFSQWTKMLNLLEASLVSSHIQYRRLDGTMSVAARDKAVQDFNTLPEVTVMIMSLKAASLGLNMVAACHVLMLDLWWNPTTEDQAIDRAHRIGQTRPVTVVRFTVKDTVEDRILALQQKKRMMVASAFGEDEKGSRQSHLTVEDLSYLFMADS

SEQ ID NO: 8371 - protein, 1047 aa, Arabidopsis thaliana
MDSAIEISSGSDSDDEVPPQPVWPQTRTRMDPTWLSRRPLPTVDSHARAEHTNQAPPNGASSDTSRPGVSKPFTGNGNTVNSRISSGSGADYVRLSSEQALKRTLPPSFNSPPLPARSGTNNISNASGSRVGVDYERPLSQQALKRTLPPSFNPPPLPSRSGTNNIRNAGGSRFGADYSHPAVSAVGNKSTFGDHYSGAHAEIGIQRGVNGVRILPPSLTHGTSASVLHHAGSSDPMHRFGGGEDRNPDNDERLVYQAALQVLNQPMTESDLPPGTLSVPLMRHQKIALAWMFQKETSSFNCPGGILADDQGLGKTVSTIALILKQKIVSQLKSESSCKQETEALVLDADDESDNAKHESGSHVKPELKVSSNSETSVLSACGNDENDSSDMEKAEDEEANSSTRAFQWKRPAAGTLIVCPASVVRQWARELDEKVSEESKLSVLVYHGSNRTKDPNELAEYDVVVTTYAIVTNEAPNKFLVDEDENDEKNTDRYGLASGFSNNKKRKVVVGASKKSKRRGRKSTNDTSSEPDCGPLGKVGWFRIVLDEAQTIKNYRTQMARSCCTLRAKRRWCLSGTPIQNTIDDLYSYFRFLRYDPYAVYKSFYSTIKVPISRNSCQGYKKLQAVLRAIMLRRTKGTLLDGKPIINLPPKVVNLSQVDFSVAERSFYKKLEADSRSQFKAYADAGTLSQNYANILLLLLRLRQACDHPQLVKRYNSDPVGKVSEAAVRRLPREARSRLINRLESSSAICYECNEPPEKPVVTLCGHIFCYECVLEYITGDENTCPVPRCKQQLARDVVFSESSLRNCTSDDSGCSSSHDNGLDRSVFQKRDFCSSKIKAVLDILQSLSQPDSPNSAQHGQMPSSSRPYDDDDVTIVEPMRLHSSSPSQGAVKTIIFSQWTGMLDLVELRILESGIEFRRLDGTMSLAARDRAVKEFSKKPDVKVMLMSLKAGNLGLNMVAACHVILLDLWWNPTTEDQAIDRAHRIGQTRPVTVTRITIKDTVEDRILKLQEEKRTMVASAFGEEHGGSSATRLTVDDLKYLFMV

SEQ ID NO: 8372 - protein, 1272 aa, Arabidopsis thaliana
MGEEGSMFGLGGEFPVDDCDGGFEFEDDDETIDIETLYRILDEKPDSAEVVFSAFVGSQENLSPVGSSADELKDSQLLNGSFDEHVKMEAGLSPSPAHTCSASLKDWFSLSQGEQPVETCGVSQSEMTSCSISSSFSDPDGNMMAFNPVNCDVDTVSKQDDKIIDSKSMLTPYFDNVTGYGVGLGANHNSSAMSVFFNNSNSLSDSADNYVSSAQDCYNTSGTSLSDHTPNSVQNFAFEFFPNKEEAVNDVESGVSESQSDGASRMIFDRHGRVDNGSLERKPPIDFSSARGISFKFESNPSVSPACVKPYNSFDSHLADSDLDRPNNYSCSFQDNKTVHVKVKPEAESEKVVYSSVPGEFSVRDDAYLSGETNRWWSGASSSAVSYQTDIEKGYSYMAPQTALPSQDSGKISSNHFYDSDTCLQYVVEDPSPVTQNNEYKDFQIQQGDREYIQPRGIDSQFSNASFESVQSHSSECISDSDDDSDVCIIEPYGQSAIPHRPLAMKMPVVSSEYSTVSHNFNQSGGLKLQSNKENMIFQAALQDLTQPNSEAILPDGVLTVPLLRHQRIALSWMAQKETSGFPCSGGILADDQGLGKTVSTIALILKERSKPAQACEESTKKEIFDLESETGECAPLKPSGRSKHFEHSQLLSNENKVGGDSVGKVTGRPAAGTLVVCPTSVMRQWADELHKKVTSEANLSVLVYHGSSRTKDPHELAKYDVVVTTFSIVSMEVPKQPLVDDEDEEKDGVHDGGTAATGFCSNKKRKYPPDSKKKGSKKKKVEFLSGPLAKVSWFRVVLDEAQSIKNYKTQVARACWGLRAKRRWCLSGTPIQNSIDDLYSYFRFLKYDPYSSYVLFCSTIKNPITRNPVKGYQKLQAILKTVMLRRTKGSLLDGKPIISLPPKSIELRKVDFTVEERDFYSKLEAESRTQFREYAEAGTVKQNYVNILLMLLRLRQACDHPLLVNGEYSFTWESSVGLAKKQIQSDASLAICGICNDAPEDAVASVCGHVFCKQCIYERLTGDSNHCPFANCNVRLTISSLSSKTRLDDAMPDMQERATSNSLSPCSDEDLPYGSSKIKAALEILQSLPKAHDLTDSNQISENREYSGLSITPVKNEGMSVDVPIKVAGEKAIVFSQWTKMLNLLEASLVSSHIQYRRLDGTMSVAARDKAVQDFNTLPEVTVMIMSLKAASLGLNMVAACHVLMLDLWWNPTTEDQAIDRAHRIGQTRPVTVVRFTVKDTVEDRILALQVCELVDLVLFNFSISFKPFHF

SEQ ID NO: 8373 - protein, 1261 aa, Arabidopsis thaliana
MKKRGFYNLKHPFDPCPFEFFCSGTWKPVEYMRIEDGMMTIRLLENGYVLEDIRPFQRLRLRSRKAALSDCICFLRPDIDVCVLYRIHEDDLEPVWVDARIVSIERKPHESECSCKINVRIYIDQGCIGSEKQRINRDSVVIGLNQISILQKFYKEQSTDQFYRWRFSEDCTSLMKTRLSLGKFLPDLSWLTVTSTLKSIVFQIRTVQTKMVYQIVTDEEGSSSTLSSMNITLEDGVSLSKVVKFNPADILDDSQDLEIKQETDYYQEEDEVVELRRSKRRNVRPDIYTGCDYEPDTIDGWVRMMPYQFGKCAVNVESDEDEDDNNEDGDTNDDLYIPLSRLFIKKKKTNSREAKPKSRKGEIVVIDKRRVHGFGRKERKSELSVIPFTPVFEPIPLEQFGLNANSFGGGGSFSRSQYFDETEKYRSKGMKYGKKMTEMEEMMEADLCWKGPNQVKSFQKRTSRSSRSVAPKTEDSDEPRVYKKVTLSAGAYNKLIDTYMNNIESTIAAKDEPTSVVDQWEELKKTNFAFKLHGDMEKNLSEDGEGETSENEMLWREMELCLASSYILDDNEVRVDNEAFEKARSGCEHDYRLEEEIGMCCRLCGHVGSEIKDVSAPFAEHKKWTIETKHIEEDDIKTKLSHKEAQTKDFSMISDSSEMLAAEESDNVWALIPKLKRKLHVHQRRAFEFLWRNVAGSVEPSLMDPTSGNIGGCVISHSPGAGKTFLIIAFLTSYLKLFPGKRPLVLAPKTTLYTWYKEFIKWEIPVPVHLIHGRRTYCTFKQNKTVQFNGVPKPSRDVMHVLDCLEKIQKWHAHPSVLVMGYTSFTTLMREDSKFAHRKYMAKVLRESPGLLVLDEGHNPRSTKSRLRKALMKVGTDLRILLSGTLFQNNFCEYFNTLCLARPKFIHEVLMELDQKFKTNHGVNKAPHLLENRARKLFLDIIAKKIDASVGDERLQGLNMLKNMTNGFIDNYEGSGSGSGDALPGLQIYTLVMNSTDIQHKILTKLQDVIKTYFGYPLEVELQITLAAIHPWLVTSSNCCTKFFNPQELSEIGKLKHDAKKGSKVMFVLNLIFRVVKREKILIFCHNIAPIRMFTELFENIFRWQRGREILTLTGDLELFERGRVIDKFEEPGNPSRVLLASITACAEGISLTAASRVIMLDSEWNPSKTKQAIARAFRPGQQKVVYVYQLLSRGTLEEDKYRRTTWKEWVSCMIFSEEFVADPSLWQAEKIEDDILREIVGEDKVKSFHMIMKNEKASTG

SEQ ID NO: 8374 - protein, 538 aa, Arabidopsis thaliana
MYRGYQYCRIDGNTGGDERDASIEAYNKPGSEKFVFLLSTRAGGLGINLATADVVILYDSDWNPQVDLQAQDRAHRIGQKKEVQVFRFCTENAIEAKVIERAYKKLALDALVIQQGRLAEQKTVNKDELLQMVRYGAEMVFSSKDSTITDEDIDRIIAKGEEATAELDAKMKKFTEDAIQFKMDDSADFYDFDDDNKDESKVDFKKIVSENWNDPPKRERKRNYSEVEYFKQTLRQGAPAKPKEPRIPRMPQLHDFQFFNIQRLTELYEKEVRYLMQAHQKTQMKDTIEVDEPEEVGDPLTAEEVEEKELLLEEGFSTWSRRDFNAFIRACEKYGRNDIKSIASEMEGKTEEEVERYAQVFQVRYKELNDYDRIIKNIERGEARISRKDEIMKAIGKKLDRYRNPWLELKIQYGQNKGKLYNEECDRFMICMVHKLGYGNWDELKAAFRTSPLFRFDWFVKSRTTQELARRCDTLIRLIEKENQEFDERERQARKEKKLSKSATPSKRPSGRQANESPSSLLKKRKQLSMDDYGKRRK

SEQ ID NO: 8375 - protein, 1648 aa, Arabidopsis thaliana
MGRRKQSKPQRAVGLITPTGSESDRNQLPGDEAEGSGDKNVEDIDKPYYVNICLSSRVSEQQQNFDLAEVVLTNFSVRERVGSSSTFTKPIEVDHDLDCSLRFRLCNVTNFVDRIKLGHWPVLSSSDITLELVDNKVSDDEVGSVIWSASFDGPGEGVSGLAHLASIKFLTLRLMPGNEGLLSPRVRVEMLQQAFDACDSLLENTRQIWKKSMIHVMSWLRPEVMTSEARYGTRFNVKDIESSVVTEDETLDSSKQSSFDAAAFYEAIKPSKTDAMLGDDIADLLPELRPYQRRAAYWMVQRERGDPITLGDKEDNQFISPLSISVGFLDSATKMFLNPFSTNAADEMGLGKTVELLACIFSHRKPAEDEISVSNGSSVTDVLNAGLRRLKRERVECICGAVSESHKYKGVWVQCDLCDAWQHADCVGYSPKGKGKKDSQHIDEKASQKKSKKDATEIIVREGEYICQMCSELLQVTASPISTGATLIVCPAPILPQWHSEITRHTRLGSLITCIYEGVRNASLSEEPMIDITELLNADIVLTTYDVLKEDLTHDFDRHDGDRHCLRFQKRYPVIPTPLTRIFWWRICLDEAQMVESNAAAATEMALRLYTKHRWCITGTPIQRKLDDLFGLLKFLKANPFDVSRWWIEVIRDPYERRDTKAMEFTHKFFKQVMWRSSKVHVADELQLPPQEECVSWLKFSAIEEHFYSRQHDTCVSYAREVIETLKRDILKRGHTSSDNPLVTHAEAAKLLNSLLKLRQACCHPQVGSSGLRSLQQSPMTMEEILMVLVKKTQSEGEEALRVLIVALNGIAAIAMLKQEFSEAVSLYKEALSITEEHAEDFRLDPLLNIHILHNLAEILPMAKSYGGKLSASGRPETKIDVKDDDHHRASKRQRINELESLTHDSSETVHQREAIAPDNGLKKDGECHEECKTLDIVCDTLKVKYLSAFNSKLSAAQHEFKKSYNQVSESLSNMGKQRSVWWLDALQLTEQNKDFSSELTRKIEEALHGNLNNSSSSRESSRFRTIHGMKLHLQTCMDMLERSRKKVIDRILEIDQTMEKPKLEDIERISNCKYCNKNSDGPPCIHCELDELFQEYEARLFRLNKSRRGVMEIAAAEETVHLQKKRDARNLFLFGLSSRSKDLNASRGDDEEPTKRNAGDIVVLSKSPSETEIVLGVIRNHCKTHLDRESKLAATKHLHTLEVMRKEYVHARVLARDQAQLLRAYDEINMSTMRLQLRESEDDTSIYALGRDELDVASVLNTNDKFMAQSSLLSIKGKLRYLKGLMKSKQKQESESPDLSSPIHETVDASDPAEQESENLLKRDEACPICHEILRNQKMVFQCGHSTCCNCFFAMTERKSVQETLQKWVMCPICRQHTDVRNIAYADDRRNSSSSDQDHKDSEASLVVQGSYGTKIEAVTRRILWIKSSDPQTKVLVFSSWNDVLDVLEHAFAANSITCIRMKGGRKSQTAISKFKGSEKETQKTNSHQKEEKSIQVLLLLVQHGANGLNLLEAQHVILVEPLLNPAAEAQAVGRVHRIGQEKPTLVHRFLVSGTVEESIYKLNRNKNTNLSSFSSRNTKNQDQQFLTLKDLESLFASPTAETAEMEQNPGERQENLRDLPPSVAAALAAERRMKESNASSSTTNAS

SEQ ID NO: 8376 - protein, 844 aa, Glycine max
  unsure (1)..(844): unsure at all Xaa locations
GRVRAWRXMQRPRATRAEKLRYHTXKADDPEAYMRMVKESKNERLTLFLVETNLLLVNLGATVQAXKDSKQSDGIEPLEDSETDLPESDGLKNGISKESPLEEDVDLIDSDRNGGDTSDLLEGQRQYNSAIHSIQEKVSEQPSILQGGELRPYQLEGLQWMLSLFNNNLNGILADEMGLGKTIQTISLIAYLMEHKGVTGPHLIVAPKAVLPNWINEFSTWAPSITTILYDGRLDERKAMKEELSGEGKFNVLITHYDLIMRDKAFLKKIHWLYLIVDEGHRLKNHECALARTLDSGYHIQRRLLLTGTPIQNSLQELWSLLNFLLPNIFNSVQNFEDWFNAPFADRVDVSLTDEEQLLIIRRLHQVIRPFILRRKKDEVEKFLPSKSQVILKCDLSAWQKVYYQQVTDVGRVGLDNGSGKSKSLQNLTMQLRKCCNHPYLFVGDYDIHKHKEEIFRASGKFELLDRLLPKLRRAGHRVLLFSQMTRLMDILEIYLRLNDFKFLRLDGSTKTEERGSLLRKFNAPDSAYFMFLLSTRAGGLGLNLQTADTVIIFDSDWNPQMDQQAEDRAHRIGQKKEVRVFVLVSVGSIEEVILERAKQKMGIDAKVIQAGLFNTTSTAQDRREMLQEIMRRGTSSLGTDVPSEREINRLAARSDEEFWLFEKMDEERRQKENYRSRLMEEHELPDWVYSPLNKDDKVXXIFDSGSVTGKRKRNEVVYADTLSDLQWMKAVENGQDISKLSVKGKRRXXTSLLTTMHKLVXDMGTEERLFRSEDTFDVTPASKRLKPEEINSQKHENEDVSVGGLNEHIFSWNTRRKKRSGYLGQGSFSDSRGQNSNGRANWN

SEQ ID NO: 8377 - protein, 957 aa, Glycine max
  unsure (1)..(957): unsure at all Xaa locations
IDADMNNRGKGRLKYLLQQTELFAHFAKGDQSSSQKKSRGRGRHASNFTEEEEDEEYLKGEEDGLANTRLVTQPSCIQGKMRDYQLAGLNWLIRLYENGINGILADEMGLGKTLQTISLLGYLHEFRGIKGPHMVVAPKSTLGNWMNEIRRFCPVLRAIKFLGNPDERRHIRDELLVAGKFDVCVTSFEMAIKEKSALRRFSWRYIIIDEAHRIKNENSLLSKTMRLYSTNYRLLITGTPLQNNLHELWSLLNFLLPEIFSSAETFDEWFQISGENDQQEVVQQLHKVLRPFLLRRLKSDVEKGLPPKKETILKVGMSQMQKQYYRALLQKDLEVVNAGGERKRLLNIAMQLRKCCNHPYLFQGAEPGPPFTTGDHLIENAGKMVLLDKLLPKLKERDSRVLIFSQMTRLLDILEDYLMFRGYQYCRIDGNTGGDDRDASIDAFNKPGSEKFVFLLSTRAGGLGINLATADVVILYDSDWNPQVDLQAQDRAHRIGQKKEVQVFRFCTEYTIEEKVIERAYKKLALDALVIQQGRLAEQKTVNKDELLQMVRFGAEMVFSSKDSTITDEDIDRIIAKGEEATAELDAKMKKFTEDAIKFKMDDTAELYDFDDXXKDESRFDIKKIVSENWIEPPKRERKRNYSESEYFKQTMRQGGPTKPKEPRIPRMPQLHDFQFFNTQRLSELYEKEVRYLMQTHQKNQIKDSIDVDEPEEVGDPLTAEELEEKERLLEEGFSSWSRRDFNTFIRACEKYGRNDIKGIASEMEGKTEEEVERYAKVFKERYKELNDYDRIIKNIERGEARISRKDEIMKAIGKKLDRYKNPWLELKIQYGQNKGKLYNEECDRFMICMVHKLGYGNWDELKAAFRTSPLFRFDWFVKSRTTQELARRCDTLIRLVEKENQEYDERERQARKEKKLAAKSMTPSKRSMPRQTESPSLKKRKQLTMDDYLSSGKKKK

SEQ ID NO: 8378 - protein, 946 aa, Glycine max
  unsure (1)..(946): unsure at all Xaa locations
XLMVSIKREQEEILEMKPAEALAELMYHCVARKPCPNDKLIKNICRLTCMDPSETPQAKSLCSMESIDDQGFLSCRTPVSKQKLKVHVLAGEDRSKVEGFLSTRRSELALRHLSEKLGVSLFDKLPKLWDCLTEVLKPSCLESLLGTNEKPVTMSIESVNDPQTLINNIQVVRSVAPVLNEELKPKLLTLLPCIFKCVQHSHVAVRLAASRCITSMAQSMTVKVMGAVVENAIPMLEDASSVYARQGAGMLISFLVQGLGVELVPYAPLLVVPLLRCMSDCDQSVRQSVTHSFAALVPLLPLARGLPQPIGLGEGVSRNAEDLQFLEQLLDNSHIEDYKLCTELKVTLRRYQQEGINWLAFLKRFKLHGILCDDMGLGKTLQASAIVASDIAEHRTSIGNEDXLLPSLIICPSTLVGHWAFEIEKYIDVSVISSLQYVGSAQERMLLRDHFCKHNVIITSYDVVRKDIDFLGQLLWNHCILDEGHIIKNAYAKVTLAVKQLKAQHRLILSGTPIQNNIMDLWSLFDFLMPGFLGTERQFQATYGKPLLAARDPKCSARDAEAGALAMEALHKQVMPFLLRRTKDEVLSDLPEKIIQDRYCDLSPVQFKLYEQFSGSRAKQEMSSVVTSNESAAAEGSSSSTKASSHVFQALQYLLKLCSHPLLVIGEKIPESLSTILSELFPAGSDVISELHKLYHSPKLVALHEILEECGIGVDNSGSEGAVNVGQHRVLIFAQHKAFLDIIERDLFHTHMKSVTYLRLDGSVEPEKRFEIVKAFNSDPTIDVLLLTTHVGGLGLNLTSADTLVFVEHDWNPMRDXXQAMDRAHRLGQKKVVNVHRLIMRGTLEEKVMSLQRFKVSVANAVINSENASMKTMNTDQLLDLFASAETSKKGASVLKSSENNSYGDAKLVGCRKGLKSILGGLEELWDQSQYTEEYNLRQFLARLND

SEQ ID NO: 8379 - protein, 774 aa, Glycine max
  unsure (1)..(774): unsure at all Xaa locations
MARPSKLHSSSDEALSNASSSSDEEEQVNDNEEEDXEEELEAVARPASSADDDDEFAGDNPPDSDEDPAADDADDDQDGDNVDPEISKREKARLKEMQKMKKQKIQEILDVQNAAIDADMNNRGKGRLKYLLQQTELFAHFAKGDQSSSQKKSRGRGRHASNFTEEEEDEEYLKGEEDGLANTRLVTQPSCIQGKMRDYQLAGLNWLIRLYENGINGILADEMGLGKTLQTISLLGYLHEFRGIKGPHMVVAPKSTLGNWMNEIRRFCPVLRAIKFLGNPDERRHIRDELLVAGKFDVCVTSFEMAIKEKSALRRFSWRYIIIDEAHRIKNENSLLSKTMRLYSTNYRLLITGTPLQNNLHELWSLLNFLLPEIFRSAXTFDEWFKISSXFDQXEVVQQLHXLRRLKSDVKKGLRSKKGTTSKEXATILKVGMTQMQKQYYRALLQKDLEVVNAGGERKRLLNIAMQLRKCCNHPYLFQGAEPGPPFTTGDHLIENAGKMVLLDKLLPKLKERDSRVLIFSQMTRLLDILEDYLMFRGYQYCRIDGNTGGDDRDASIDAFNKPGSEKFVFLLSTRAGGLGINLATADVVILYDSDWNPQVDLQAQDRAHRIGQKKEVQVFRFCTEYTIEEKVIERAYKKLALDALVIQQGRLAEQKTVNKDELLQMVRFGAEMVFSSKDSTITDEDIDRIIAKGEEATAELDAKMKKFTEDAIKFKMDDTAELYDFDDXXKDENRFDIKKIVSENWIEPPKRERKRNYSESEYFKQTMRXGGPT

SEQ ID NO: 8380 - protein, 560 aa, Glycine max
  unsure (1)..(560): unsure at all Xaa locations
XEDSGFKPLLKPYQLVGVNFLLLLYRKGIGGAILADEMGLGKTVQAITYLTLLKHLHNDSGPHLIVCPASVLENWERELKRWCPSFSVLQYHGAGRAAYCKELNSLSKAGLPPPFNVLLVCYSLFERHSAQQKDDRKILKRWRWSCVLMDEAHALKDKNSFRWKNLMSVARNANQRLMLTGTPLQNDLHELWSLLEFMLPDIFATEDVDLKKLLNAEDGDLIGRMKSILGPFILRRLKSDVMQQLVPKIQQVEYVIMEKQQETAYKEAIEEYRAVSQARMEKCSNLNSKSVLEVLPRRQINNYFVQFRKIANHPLLIRRIYNDEDVIRFARKLHPIGAFGFECTLDRVIEELKNYNDFCIHRLLLHYGVNDRKGILPDKHVMLSAKCRALAELLPSLKEGGHRALIFSQWTSMLDILEWTLDVIGLTYKRLDGSTQVAERQTIVDTFNNDTSIFACLLSTRAGGQGLNLTGADTVVIHDMDFNPQIDRQAEDRCHRIGQTKPVTIYRLVTKGTVDENVYEIAKRKLVLDAAVLESMEEINXXGDMPEKTMGEILSAILLS

SEQ ID NO: 8381 - protein, 560 aa, Glycine max
  unsure (1)..(560): unsure at all Xaa locations
XEDSGFKPLLKPYQLVGVNFLLLLYRKGIGGAILADEMGLGKTVQAITYLTLLKHLHNDSGPHLIVCPASVLENWERELKRWCPSFSVLQYHGAGRAAYCKELNSLSKAGLPPPFNVLLVCYSLFERHSAQQKDDRKILKRWRWSCVLMDEAHALKDKNSFRWKNLMSVARNANQRLMLTGTPLQNDLHELWSLLEFMLPDIFATEDVDLKKLLNAEDGDLIGRMKSILGPFILRRLKSDVMQQLVPKIQQVEYVIMEKQQETAYKEAIEEYRAVSQARMEKCSNLNSKSVLEVLPRRQINNYFVQFRKIANHPLLIRRIYNDEDVIRFAPYGEKTTEGGFECTLDRVIEELKNYNDFCIHRLLLHYGVNDRKGILPDKHVMLSAKCRALAELLPSLKEGGHRALIFSQWTSMLDILEWTLDVIGLTYKRLDGSTQVAERQTIVDTFNNDTSIFACLLSTRAGGQGLNLTGADTVVIHDMDFNPQIDRQAEDRCHRIGQTKPVTIYRLVTKGTVDENVYEIAKRKLVLDAAVLESMEEINXXGDMPEKTMGEILSAILLS

SEQ ID NO: 8382 - protein, 1211 aa, Glycine max
  unsure (1)..(1211): unsure at all Xaa locations
PRVRLVGLQWMLSLYNNKLNGILADEMGLGKTVQVMALIAYLMEFKGNYGPHLIIVPNAVMVNWKSELHTWLPSVSCIFYAGGKDYRSKLYSQVMAMKFNVLVTTYEFIMYDRARLSKIDWKYIIIDEAQRMKDRDSVLARDLDRYRCQRRLLLTGTPLQNDLKELWSLLNLLLPEVFDNKKAFNDWFSKPFQKEGPTQNTEDDWLETEKKVIIIHRLHQILEPFMLRRRVEDVEGSLPPKVSIVLRCKMSAVQSAIYDWVKSTGTLRLDPEGENSKIQKNPHYQAKEYKTLNNRCMELRKTCNHPSLNYPLLGELSTNSIVKSCGKLWILDRILIKLQRTGHRVLLFSTMTKLLDLLEDYLNWRRLVYRRIDGTTSLDDRESAIMDFNSPDSDCFIFLLSIRAAGRGLNLQSADTVVIYDPDPNPKNEEQAVARAHRIGQKREVRVIYMEAVVDKISSHQKEDEVRSGGTVDMEDELVGKDRYIGSIESLIRNNIQQYKIDMADEVINAGRFDQRTTHEERRLTLETLLHDEERYQETVHDVPSLQEVNRMIARSKEEIELFDQMDDELDWIEEMTRYDDVPKWLRANTREVNAAIGALSKRPSKNTLLGGSIGMESSEFGSERKRGRPKGKKHPNYKELDDEILEYSEASSDERNEYAHEGENGXXFDDDGYSVADGNQLEDGLLCDAYEFLLLXENARNNYLVEQXRSSISSSNIQXARGQFYHQFFPASLCYVGPPPSALDARPGSISKIMGDELEEGEIVVSGDSHMDHQQSGSWIHDRDEGEDEQVLQKPKIKRKRSLRVRPRHAMERPDGSEMISLQQYQIQKRIDPESKSFGDSNASKHDKNEASLKNKQIPSRKIANSSKLHGSPKSNRLNCTSAPSEDGNEHPTESWEGNNPNGSSAHGTKTTEIIQRGCKNVISKLQRRIDKEGHQIVPLLTDLWKRMENSGHAGGSGNNLLDLHKIDQRIDRMDYSGVMELVFDVQFMLRGAMHFYGYSYEVRTEARKVHDLFFDILKIAFPDTDFVEARGALSFSSQVPAGTAASSPRQVTVGPSKRHRVTNDAETDPCPSQKPSQSGSTTNGENTRFKGHLPQKNSRTGSGSAREQPQQDNPPLLAHPGQLVVCKKKRNDRDKSLGKGRTGSTGPISPPSAIRSPGSGSTPKDARLAQQGRGSQPSQHSNGSGGSVGWANPVKRLRTDSGKRRPSHM

SEQ ID NO: 8383 - protein, 977 aa, Glycine max
  unsure (1)..(977): unsure at all Xaa locations
PRVRLVGLQWMLSLYNNKLNGILADEMGLGKTVQGMALIAYLMEFKGNYAPHLIIVPHAVLVNWKSELHTWLPSVACIFYAGGKDHRSKLFSQVVAMKFNVLVTTYEFIMYDRARLSKIDWKYIIIDEAQRMKDRDSVLARDLDRYRCQRRLLLTGTPLQNDLKELWSLLNLLLPEVFDNKKAFNDWFSKPFQKEGPTQNTEDDWLETEKKVIIIHRLHQILEPFMLRRRVEDVEGSLPPKVSIVLRCKMSAVQSAIYDWVKSTGTLRLDPEGENSKIQKNPHYQAKEYKTLNNRCMELRKTCNHPSLNYPLLGELSTNSIVKSCGKLWILDRILIKLQRTGHRVLLFSTMTKLLDLLEDYLNWRRLVYRRIDGTTSLDDRESAIMDFNSPDSDCFIFLLSIRAAGRGLNLQSADTVVIYDPDPNPKNEEQAVARAHRIGQKSEVRVIYMEAVVDKISSHQKEDEVRSGGTVDMEDELVGKDRYIGSIESLIRNNIQQYKIDMADEVINAGRFDQRTTHEERRLTLETLLHDEERYQENVHDVPSLQEVNRMIARSKEEIELFDQMDDELDWIEEMTRYDHVPKWLRANTREVNAAIGALSKRPSKNTLLGGSIGMESSEFGSERKRGRPKGKKHPNYKELDDENLEYSEVSSDERNEYAHEGEIGEFDDDGYSVADGAQTIDKDQLEDGLLCDAGYEFPQSLESARNNQMVEEAGTSGSSSDSQRVRQIVSPSVSSQKFGSLSALDARPSSISKRMTDELEEGEIAVSGDSHMDHQQSGSWIHDRDEGEDEQVLQKPKIKRKRSLRVRPRHATERPDGSEMASHLAVQADHKYQAQLRTVGDSNASRHEQNTPALKNKRTLPSRRVANTSKLHGSPKSSRLNCMSVPSQDAGDHSRESWEGKPINSSGSSAHGTKMTEIIQRRCKNVISKLQRRIDKEGHEIVPLLTDLRKXRIENSXGLETALLDLRKXIDQRID

SEQ ID NO: 8384 - protein, 532 aa, Glycine max
  unsure (1)..(532): unsure at all Xaa locations
XDVLPRRSSDSLGPYGARKGLGKTVQAITYLTLLKHLHNDSGPHLIVCPASVLENWERELKRWCPSFSVLQYHGAGRAAYCKELNSLSKAGLPPPFNVLLVCYSLFERHSAQQKDDRKILKRWRWSCVIMDEAHALKDKNSFRWKNLMSVARNANQRLMLTGTPLQNDLHELWSLLEFMLPDIFASEDVDLKKLLNAEDRDLIGRMKSILGPFILRRLKSDVMQQLVPKIQQVEYVIMEKQQETAYKEAIEEYRAVSQARMEKCSNLNSKSVLEVLPRRQINNYFVQFRKIANHPLLIRRIYNDEDVIRFARKLHPIGAFGFECTLDRVIEELKNYNDFCIHRRWHDYMLXIELLHGXCRXLAELLPSLKEGGHRALIFSQWTSMLDILEWTLDVIGLTYKRLDGSTQVAERQTIVDTFNNDTSIFACLLSTRAGGQGLNLTGADTVVIHDMDFNPQIDRQAEDRCHRIGQTKPVTIYRLVTKGTVDENVYEIAKRKLVLDAAVLESMEEINXXGDMPEKTMGEILSAILLS

SEQ ID NO: 8385 - protein, 360 aa, Glycine max
  unsure (1)..(360): unsure at all Xaa locations
XPRPLGNWMNEIRRFCPILRAIKFLGNPDERRHIRDELLVAGKFDVCVTSFEMAIKEKSALRRFSWRYIIIDEAHRIKNENSLLSKTMRLYSTNYRLLITGTPLQNNLHELWSLLNFLLPEIFSSAETFDEWFQISGENDQQEVVQQLHKVLRPFLLRRLKSDVEKGLPPKKETILKVGMSQMQKQYYKALLQKDLEVVNAGGERKRLLNIAMQLRKCCNHPYLFQGAEPGPPFTTGDHLIENAGKMVLLDKLLPKLKERDSRVLIFSQMTRLLDILEDYLVFRGYHYCRIDGNTGCDDRDASIDAFNKPGSEKFVFLLSTRAGGLGINLATADVVILYDSDWSVFLVVLNTAMLFISVP

SEQ ID NO: 8386 - protein, 474 aa, Glycine max
  unsure (1)..(474): unsure at all Xaa locations
XSYVGPPPPXXTGTPLQNNLEELWALLNFLLPNIFNSSEDFSQWFNKPFESAGDSSPDEALLSEEENLLIINRLHQVLRPFVLRRLKHKVENELPEKIERLIRCEASSYQKLLMKRVEENLGSIGNSKARSVHNSVMELRNICNHPYLSQLHAEEVDNFIPKHYLPPIIRLCGKLEMLDRLLPKLKATDHRVLFFSTMTRLLDVMEEYLTSKQYRYLRLDGHTSGGDRGALIELFNQPGSPYFIFLLSIRAGGVGVNLQAADTVILFDTDWNPQVDLQAQARAHRIGQKRDVLVLRFETVQTVEEQVRASAEHKLGVANQSITAGFFDNNTSAEDRREYLESLLRECKKEEVAPVLDDDALNDLLARSETELDIFEAVDKERKEDELATWKKLVLGQAADGYSDIPPLPARLVTDEDLKQFYEAMKISDVPKAEVESSGVKRKGGYIGGLDTQHYGRGKRAREVRSYEEQWTEX

SEQ ID NO: 8387 - protein, 264 aa, Glycine max
  unsure (1)..(264): unsure at all Xaa locations
XHASAXXRKAKKAVAAMLTRSKESEKTEDMNMTEEERVEKEQKELMPLLTGGKLKNYQLKGVKWLISLWQNGLNGILADQMGLGKTIQTIGFLSHLKAKGLDGPYMIIAPLSTLSNWVNEISRFAPSLPAVIYHGDKKQRDDIRRKHMPTRTIGPQFPIVITSYEIALNDAKKYFRSYNWKYLVVDEGHRLKNSQCKLVKALKFINVENKLLLTGTPLQNNLAELWSLLNFILPDXXASLEEFESWLVSFAYLLFKIMLFFSAG

SEQ ID NO: 8388 - protein, 436 aa, Glycine max
  unsure (1)..(436): unsure at all Xaa locations
LQKIDXKYIIIDEAQRMKDRDSVLARDXDRYRCQRRXLLTGTXLQNDLKELWSLLNLLLPEVFDNKKAFNDWFSKPFQKEGXPPQNVEDDWLETEKKVIIIHRLHQILEPFMLRRRVEDVEGSLPPKVSIVLKCKMSAVQSAIYDWVKSTGTLRLDPEDEKHKLHRNPAYQVKQYKTLNNRCMELRKTCNHPLLNYPFFSDLSKEFIVKSCGKLWILDRILIKLQRTGHRVLLFSTMTKLLDILEEYLQWRRLVYRRIDGTTSLEDRESAIVDFNSPDSDCFIFLLSIRAAGRGLNLQSADTVVIYDPDPNPKNEEQAVARAHRIGQTREVKVIYMEAVVDKIASHQKEDELRSGGTVDMEDELAGKDRYMGSIESLIRNNIQQYKIDMADEVINAGRFDQRTTHEERRLTLETLLHDEERYQETVHDVPSLXXVX

SEQ ID NO: 8389 - protein, 546 aa, Glycine max
  unsure (1)..(546): unsure at all Xaa locations
XDXDIFKHNSQVERVIADRISKDNSGNVIPEYLVKWQGLSYAEATWEKDIDIAFAQHTIDEYKAREAAMAVQGKMVDSQRKKSKGWXXSSAFLWAVLXFFNKTWNISTDSVYALDMVAGXGKLVLLLLLSTXXNIXXLSSWNXITKKKTNSRTPSIDYXXYYMYNKLISIMCVVWYFVCFGFLVCLTIPLPSPSLFCRALLHFLDPDKFRSKDEFVQNYKNLSSFNENELANLHMELRPHILRRVIKDVEKLLPPKIERILRVEMAPLQKQYYKWILERNFHNLNKGVRGNQVSLLNIVVELKKCCNHPFLFESADHGYGGDCSDNSKLERIVFSSGKLVILDKLLVKLHETKHRVLIFSQMVRMLDILGEYMSLRGFQFQRLDGSTKAELRQQAMDHFNAPGSDDFCFLLSTRAGGLGINLATADTVIIFDSDWNPQNDLQAMSRAHRIGQQEVVNIYRFVTSKSVEEDILERAKKKMVLDHLVIQKLNAEGRLEGQEAKSISQHTRPPGAVNIYRFVTSKSVEEDILERAKKKMVLDHLVIQKX

SEQ ID NO: 8390 - protein, 234 aa, Glycine max
  unsure (1)..(234): unsure at all Xaa locations
XPRPPKAVLPNWVNEFTTWAPSITAILYDGRLDERKAMKEELSGEGKFNALXSHYKIIVRXXXDKAFLKKIQWKYLIVDEGHRLKNHESALARTLDNGYRIQRRLLLTGTPIQNSLQELWSLLNFLLPNIFNSVQNFEDWFNAPFADRVDVSLTDEEQLLIIRRLHQVIRPFILRRKKXDEVEKFLPGKSQVILKCDMSAWQKVYYQQVTDVGRVGLDNGSGKSKSLQNLTMQL

SEQ ID NO: 8391 - protein, 424 aa, Glycine max
IRLELIVLSQNGGSNRGGFNIVSSSAKSSIHLDGLFNIISYDLVPKLQNMLMTCNFKVVIADESHFLKNAQAKRTTASLPVIKKAQYALLLSGTPALSRPIELFKQLEALYPDVYRNVHEYGNRYCKGGFFGVYQGASNHEELHNLIKATVMIRRLKKDVLSQLPVKRRQQVFLDLAGKDMKQINALFRELEMVKAKIKAAKSQEEAESLKFAQKNLINKIYTDSAEAKIPSVLDYVGTVIEAGCKFLIFAHHQPMIDSIHEFLLKKKVGCIRIDGSTPAASRQQLVTDFQEKDSIKAAVLSIKAGGVGLTLTAASTVIFSELSWTPGDLIQAEDRAHRIGQVSSVNIYYLLANDTVDDIIWDVVQNKLENLGQMLDGHENALEVSASLPVNSPSKQKTLDQFVRRCDNTDGLEYEPNPKRPRN

SEQ ID NO: 8392 - protein, 835 aa, Glycine max
  unsure (1)..(835): unsure at all Xaa locations
MELRSRRRLSNPSVSGKEQPPGDGSNNKDKGVAVISSNSDIVSGPDSDSDYEDEEFGVGSLPDLNQELSVPSVSKGTKRRKYSRKGRKGDSKSVLLWNAWEEEQEKWIDRHMLEDVDLDNHSEVMNETADIPSDLTMPLLRYQKEWLAWALKQESSASKGGILADEMGMGKTVQAIALVLAKREFELASLKPAIKGTLVICPVVAVTQWVSEVDRFTLKGSTKVLIYHGANRGRSGNRFADYDFVITTYSVVESEYRKHMLPPKERCPYCGKLFLPNKLMYHQIYFCGPDAVRTEKQSKQAKKKKREVTKGKTKKSDSKISKSSNTKKEEEMWMDEEDLDAPVRSDRSILHAVKWQRIILDEAHYIKSRHCNTAKAVLALESTYKWALSGTPLQNRVGELYSLIRFLQITPYSYYLCKDCDCRILDHSTKECSVCTHSSVRHFCWWNKYVATPIQSYGNGDAGKRAMILLKHKVLKNIVLRRTKIGRAADLALPPRIVSLRRDCLDIKEQDYYESLYNESQAQFNTYIEANTLMNNYAXHIFDLLTRLRQAVDHPYLVVYSQSAASRSGVLSNNVTVEQVCGICHEPVEDVVVTSCEHAFCKACLIDFSSSLGRVSCPTCSKFLAVGSTSNKDVGDQANKTTIKGFRSSSILNRIRLENFQTSTKIGALREEIRFMVERDGSAKGIVFSQFTSFLDLINYSLHKSGVSCVQLNGSMSLAARDAAIKRFTEDPDCKIFLMSLKAGGVALNLTVASHVFLMDPWWNPAVERQAQDRIHRIGQYKPIRIVRFVIENTIEERILKLQEKKELVFEGTIGGSSDALGKLTEADLRFLFVT

SEQ ID NO: 8393 - protein, 750 aa, Glycine max
IRLEGDSKSVLLWNAWEEEQEKWIDRHMLEDVDLDNHSEVMNETADIPSDLTMPLLRYQKEWLAWALKQESSASKGGILADEMGMGKTVQAIALVLAKREFELASLKPAIKGTLVICPVVAVTQWVSEVDRFTLKGSTKVLIYHGANRGRSGNRFADYDFVITTYSVVESEYRKHMLPPKERCPYCGKLFLPNKLMYHQIYFCGPDAVRTEKQSKQAKKKKREVTKGKTKKSDSKISKSSNTKKEEEMWMDEEDLDAPVRSDRSILHAVKWQRIILDEAHYIKSRHCNTAKAVLALESTYKWALSGTPLQNRVGELYSLIRFLQITPYSYYLCKDCDCRILDHSTKECSVCTHSSVRHFCWWNKYVATPIQSYGNGDAGKRAMILLKHKVLKNIVLRRTKIGRAADLALPPRIVSLRRDCLDIKEQDYYESLYNESQAQFNTYIEANTLMNNYAHIFDLLTRLRQAVDHPYLVVYSQSAASRSGVLSNNVTVEQVCGICHEPVEDVVVTSCEHAFCKACLIDFSSSLGRVSCPTCSKLLTVDLTSNKDVGDQANKTTIKGFRSSSILNRIRLENFQTSTKIEALREEIRFMVERDGSAKGIVFSQFTSFLDLINYSLHKSGVSCVQLNGSMSLAARDAAIKRFTEDPDCKIFLMSLKAGGVALNLTVASHVFLMDPWWNPAVERQAQDRIHRIGQYKPIRIVRFVIENTIEERILKLQEKKELVFEGTIGGSSDALGKLTEADLRFLFVT

SEQ ID NO: 8394 - protein, 331 aa, Glycine max
IMLPRKKEIIIYANMTEHQKNLQDHLVNKTLGNYLKENMSSGLSVPAIMIRNLAIQLRKVCNHPDLLESAFDDSYLYPPLEEIVGQCGKFHLLDRLLQRLFSRNHKVLIFSQWTKVLDIMDYYFSEKGFAVCRIDGSVKLDERKQQIQDFNDVNSNCRVFLLSTRAGGLGINLTVADTCILYDSDWNPQMDLQAMDRCHRIGQTKPVHVYRLSTAQSIEGRMLKRAFSKLKLEHVVIEKGQFHQERTKPASMDEIEEDDVLALLRDEETAEDKMIHTDISDEDLEKLLDRSDLIVNDFNDDNSVSVFPLKGPGWEVVIPTATGGMLSTLNS

SEQ ID NO: 8395 - protein, 223 aa, Glycine max
  unsure (1)..(223): unsure at all Xaa locations
XYGLYKNNHGGILGDDMGLGKTIQAIAFLAAVFAKEGHSTLNENHVEKRDPALIICPTSVIHNWESEFSKWSNFSVSIYHGANRNLIYDKLEANEVEILITSFDTYRIHGSSLLDINWNIVIIDEAHRLKNEKSKLYKACLEIKTLRRYGLTGTAMQNKIMELFNLFDWVAPGSLGTREHFREFYDEPLKHGPRSTASDRFXQIANKRKHHLGXVLYXKYLLR

SEQ ID NO: 8396 - protein, 350 aa, Glycine max
  unsure (1)..(350): unsure at all Xaa locations
XTRPEQSESERDFYEALFERSKVQFDQYVAQGKVLHHYANILDLLMQLRRCCNHPFLVMCGSDTQKRADLSRLARKFFQTNTEFPDESNQNDPRQAYIAEVLENIQKGDIIECSICMESPEDPVFTPCAHKFCRECLFSCWGTSVGGKCPICRQLLQKDDLITYSSESPFKVDIKNNVTESSKVSKLFEFLQRILNTSSEKSIVFSQWTSFFDLLENPLRRRGIGFXLRYDGKLTQKQREKVLDEFNETREKRVLLMSLKAGGVGLNLTAASNVFIMDPWWNPAVEEQAIMRIHRIGQNRRVVVRRFIVKDTVEDRLQQVQARKQRMISGTLTDDEVRTARIQDLKMLFT

SEQ ID NO: 8397 - protein, 849 aa, Glycine max
  unsure (1)..(849): unsure at all Xaa locations
IDIAFAQHPRVRYKAREAAMAVQGKMVDSQRKKSKASLRKLEEQPEWLKGGELRDYQLEGLNFLVNSWRNDPNVILADEMGLGKTVQSVSMLGFLQNAQQIHGPFLVVVPLSTLSNWAKEFRKWLPDMNIIIYVGTSCXVERVVSTMDXLVAYHSALPLQXTVWKNLWXALLXXSLIRXXVQESKDEXFVQNXXKNXELFFNEXNELANLHLXELRPHILRXRVIKDVEKSLPPKIERILXXEMSPLQKQYYKWILERNFHNLNKGVRGNQVSLLNIVVELKKCCNHPFLFESADHGYGGDCSDNSKLERIVFSSGKLVILDKLLVKLHETKHRVLIFSQTTXVRMLDILGEYMSLRGFQFQRLDGSTKAELRQQAMDHFNAPGSDDFCFLLSTRAGGLGINLATADTVIIFDSDWNPQNDLQAMSRAHRIGQQEVVNIYRFVTSKSVEEDILERAKKKMVLDHLVIQKLNAEGRLEKKEAKKGGNFDKNELSAILRFGAEELFKEERNDEESKKQLLSMNIDEILERAEKVEEKEADGEQGNALLGAFKVANFCNDEDDGSFWSRWIKPDAVFQAEEALVPRSARNIKSFAEVDPSERKXXKKKEGTAXELDRVSKRRKAEYSAPAVPMIEGASVQVRNWSYGNLSKRDALRFSRSVMKYGNESQVDLIVAEVGGAVGAAPPGVQIELFNALIDGCTEAVELGNLDAKGPLLDFFGVPVKANDLLTRVQQLQLLAKRIGRYEDPIAQFRVLSYLKPSNWSKGCGWNQIDDARLLLGIHYHGFGNWETIRLDERLGLTKKIAPVELQHHETFLPRAPNLKDRANALLEQELAVLGVKNANSRVGRKPSK

SEQ ID NO: 8398 - protein, 203 aa, Glycine max
  unsure (1)..(203): unsure at all Xaa locations
XEIVRASGKFELLDRLLPKLRRAGHRVLLFSQMTRLMDTLEVYLRLHDFKYLRLDGSTKTEERGNLLRKFNAPDSPYFMFLLSTRAGGLGLNLQTADTVIIFDSDWNPQMDQQAEDRAHRIGQKKEVRVFVLVSVGSIEEVILERAKQKMGIDAKVIQAGLFNTTFTAQDRREMLEEIMRRGTSSLGTDVPSEREXNXLAARX

SEQ ID NO: 8399 - protein, 177 aa, Glycine max
  unsure (1)..(177): unsure at all Xaa locations
SAYLFPVAAMEAPXMPNGMYDGSALIKGAGKLFLLQKMLRKLKDDGHRVLIFSQMTKMLDLLEDFMEHEGYKYERIDGGITGNMRQEAIDRFNAPGAQQFCFLLSTRAGGLGINLATADTVVIYDSDWNPHNDIQAFSRAHRIGQNRKVMIYRFVTRASVEERITQVAKKEMMLTHL

SEQ ID NO: 8400 - protein, 1246 aa, Glycine max
  unsure (1)..(1246): unsure at all Xaa locations
HRKSHLRQRKHPFHACPFEAYLSRSWRAVELIKFESGTTTLYFVDNHHMTIKKGSFSDVRVRSRKATLSDCSFLRTGIDICVLYNSDESSANHVWLDAKINSIQRKPHNPECSCQYYVNFYVNQGSLGTELRTLRKEVKVVGINEIAILQKLERNTCQHKYYRWESSEDCSKVPHTKLLGKFISDLSWLVVASAIRKVSFCARSVENNIVYQILGSDATTSSLYMDSEISVVNFKVNEDGMQMPVIHLVDLFETDTNTSGDKHDSHYDVEGLRRSKRRNIQPERYSDCGNVSEIKVGNVRTWPYKLNXXRKDDDGGGEXXSLPLAXXENSDNSQKVNELSSCREIIVYHGRNETLELKSGEANQTQLASVPLLQEGDSLALEHHHLNDNXLLEEVXXAYYSTPKLKRKRLVDLEADVDFDPGREGINSNKGVSEKRHGSSWYSRSRSHAAEHSYKDRSLNATAYKEMIDSYLKDVNRTPTTEEXXPVMDQRKEIGNFGQKKEAEIPEREDEEQISEIDMLWREMEMALASSYLEETEGSNSANFAKTTEECTCPHDYRLSEEIGIYCYKCGFVKTEIKYITPPFVRQIEMQRSVRHQEEKQCNGKDTKEKASKDDDFHLPHAPTDEHNSMEHDNVWKLIPQFREKLHDHQKKAFEFLWQNIGGSMEPKLMDAESKRRGGCVISHAPGAGKTFLIIAFLVSYLKLFPGKKPLILAPKGTLYTWCKEFNKWEISMPVYLIHGRGGTQKDTEQNSIVLPGFPNPNKDVKHVLDCLQKIKLWQEKPSVLVMSYTAFLALMREGPEFSHRKYMAXALREGPGILILDEGHNPRSTKSRLRKGLMKLKTDLRILLSGTLFQNNFCEYFNTLCLARPKFISEVLDTLDPITRRNKTVEKAGHLLESRARKLFLDKIAKKIDSGIGNERMQGLNMLRETTNGFVDVYESENFDSAPGLQIYTLLMNTTDKQREILPKLHTRVDECNGYPLELELLVTLGSIHPWLVKTTSCANKFFTADQLKQLDKYKYDMKAGSKVKFVLSLVFRVMQREKVLIFCHNLAPVKLLIELFEMFFKWKKDREILLLSGELDLFERGKVIDKFEEHGGASKVLLASITACAEGISLTAASRVIFLDSEWNPSKTKQAIARAFRPGQEKMVYVYQLLVTGTLEEDKYKRTTWKEWVSSMIFSEAFEQNPSHSRAVNIEDDILREMVEEDKSKTIHMILKNEKASTNXREELARYLKQEQGQWKIKEP

SEQ ID NO: 8401 - protein, 205 aa, Glycine max
  unsure (1)..(205): unsure at all Xaa locations
PTXCAHASAQVLNVWKEQGHRVLLFTQTQQMLNIFENFLTTSGHIYRRMDGLTPVKQRMALIDEFNDSSEIFIFILTTKVGGLGTNLTGANRVIIFDPDWNPSTDMQARERAWRIGQKRDVTVYRLITRGTIEEKVYHRQIYKHFLTNKILKNPQHKRFFKARDMKDLFTLNVDGETGSTETSNIFSQISEEVNVIGTYKENKDK

SEQ ID NO: 8402 - protein, 192 aa, Glycine max
  unsure (1)..(192): unsure at all Xaa locations
XASADDEDALVDSSDVMPDEEVDPEEAELKKEALKAAQEAVSKQRMLTSAFDTECLRLRQAGETDSLPPDVAGASNIDLQTPSTMPVASTVRTPELFKGVLKEYQLKGLQWLVNCYEQGLNGILADEMGLGKTIHAMAFLAHLAEEENIWGPFLVVAPASVLNNWNEELERFWPALKRLPYWGGLSDRTGLW

SEQ ID NO: 8403 - protein, 189 aa, Glycine max
  unsure (1)..(189): unsure at all Xaa locations
XQPEDLKGGSLFPHQLEALNWLRKCWYKSXXVILADEMGLGKTVSAXXSLPCLVLVPLSTMPNWLAEFELWAPNVNVVEYHGCAKARAIIRQYEWHANNPSGLNKKTEAYKFNVLLTTYEMVLADSSHLRGVPWEVLVVDEGHRLKNSESKLFSLLNTFSFQHRVLLTGTPLQNNLGEMYNLLNFLQPX

SEQ ID NO: 8404 - protein, 497 aa, Glycine max
  unsure (1)..(497): unsure at all Xaa locations
XFGSSCSLRAKRRWCLSGTPIQNTIDDLYSYFRFLKYDPYAVYKSFYNTIKVPISKSTIQGYKKLQAVLRAIMLRRTKGTLLDGKPIINLPPKTIELSKVDFSIEERAFYTKLESDSRLQFKAYAAAGTVSQNYANILLMLLRLRQACDHPLLVKDFDSDPVGKDSVEMAKNLPRDMLINLFNCLEATFAICLVCNDPPEEPVITMCGHVFCYQCVSEYLTGDDNMYPSVNCKELIGDDLVFSKATLRSCISDDGGSLSSANSHRDYSLVQQRDYTSSKIKAVLEVLQSNCKLKISSSDLLNSSGGCRDSPSSDNLYVEDCDSDVRVTKHTIKYSESTTEGPIKAIVFSQWTSMLDLVETSLRQFSIQYRRLDGRMTLGARDKAVKDFNTEPEIAVMLMSLKAGNLGLNMVAACHVILLDLWWNPTTEDQAIDRAHRIGQTRPVTVTRITIKDTVEDRILALQEDKRKMVASAFGEDHAGGTGTRLTVDDLKYLFMV

SEQ ID NO: 8405 - protein, 190 aa, Glycine max
  unsure (1)..(190): unsure at all Xaa locations
XSARDLRLDGSVEPEKRFEIVKAFNSDPTIDVLLLTTHVGGLGLNLTSADTLVFVEHDWNPMRDHQAMDRAHRLGQKKVVNVHRLIMRGTLEEKVMSLQRFKVSVANAVINSENASMKTMNTDQLLDLFASAETSKKGASVVKSPENNSDELVGSGKGLKSILGGLEELWDQSQYTEEYNLSLFLARLNG

SEQ ID NO: 8406 - protein, 481 aa, Glycine max
IRLEAKRRWCLSGTPIQNAIDDLYSYFRFLRYDPYSDHASFCTRIKNPISRNPANGYRKLQAVLKTIMLRRTKGTLLDGEPIISLPPKYIELKKVDFSMEERDFYSKLEADSRAQFQEYADAGTVKQNYVNILLMLLRLRQACDHPLLVKRYNSNSLWRSSVEMAKKLPQEKQISLLKCLEVSLALCSICNDPPEDAVVSVCGHVFCNQCICEHLSGDDNQCPAANCKSQLSTSMVFSKATLNSCLSDQGCDNSPSCSGPEAEEAEPWSESKPYDSSKIKAALEVLKSLCKPQCYTSKSTSEHSTFREDKLSDENRSSNASVTVVGEKAIVFSQWTRMLDLLEACLKNSSINYRRLDGTMSVVARDKAVKDFNNCPEVTVIIMSLKAASLGLNLVVACHVLMLDLWWNPTTEDQAIDRAHRIGQTRPVTVLRLTVRDTVEDRILALQQKKRMMVASAFGEDGTGDRQTRLTVDDLKYLFMM

SEQ ID NO: 8407 - protein, 207 aa, Glycine max
  unsure (1)..(207): unsure at all Xaa locations
QKSKDXNRLRFRSSKFSSGKQKNSVKDDAXLKKQQKEFQHYTQSPVFLSEGTLHPYQLEGLNFLRFSWSKQTHVILADEMGLGKTIQSIAFLASLFKEGVSPHLVVAPLSTLRNWEREFATWAPHMNVLMYVGSAQARSVIREYEFYFPKKQKKIKKKKSGHLISESKQDRIKFDVLLTSYEMINFDTASLKPIKWECMIVDEGHRL

SEQ ID NO: 8408 - protein, 544 aa, Glycine max
  unsure (1)..(544): unsure at all Xaa locations
XYDDHAVSRRNRKCHSSAQSGKMELNSAMLDAVLRPSVKVAWFRVVLDXDQSIKNLRTHVARARWGLRSAGVXQMDRESYKMSINQXCYVVRMANFVTWDVIISLPSKTVKSKKVEFSQEERDLYSKLEAVTLGQFQEXPVDGTVKQYYVHISLMFKRLKXAWDDPLFFKSHNADSLSQSQEYADAGTVKQNYVNILLMLLRLRQACDHPLLVKRYNSNSLWKSSVEMAKKLPQEKRLCLLKCLEASLALCGICKDFPEVAVISVFGDEFCNNYSVDFGDEAEEYSHCSKAQPXLCTKSKASLDTLKRSFSHQPCDSXNNSCQSTLEESAVCSRGXSYDSSKIXAALEVLQSLSKPQCFASQNNSVQSTSGESTDGLGSSSSNNSVGVGEKAIVFSQWTRMLDILEACLKNSSIQYRRLDGTMSVTARDKAVKDFNTLPEVSVMIMSLKAASLGLNMVAACHVLMLDLWWNPTTEDQAIDRAHRIGQTRPVTVLRLTVRDTVEDRILALQQKKRKMVASAFGEDGTGGCQSRLTVDDLKYLFMM

SEQ ID NO: 8409 - protein, 548 aa, Glycine max
  unsure (1)..(548): unsure at all Xaa locations
XSARAYDDHAVSSKKRKCPPSSKSGKKGLDSAMLEAVARPLAKVAWFRVVLDEAQSIKNHRTQVARACWGLRAKRRWCLSGTPIQNAIDDLYSYFRFLRYDPYAVYTSFCSTIKIPISRSPSKGYRKLQAVLKTIMLRRTKATLLDGEPIISLPPKSVELKKVEFSPEERDFYSRLEADSRAQFQEYADAGTVKQNYVNILLMLLRLRQACDHPLLVKRYNSNSLWKSSVEMAKKLPQEKRLCLLKCLEASLALCGICNDPPEDAVVSVCGHVFCNQCICEYLTGDDNQCPAPNCKTRLSTPSVFSKVTLNSSFSDQPCDNLPDYSGCEVEESEFCSQAQPYDSSKIKAALEVLQSLSKPQCFASQNNSVQSTSGESTDGLGSSSSNNSVGVGEKAIVFSQWTRMLDILEACLKNSSIQYRRLDGTMSVTARDKAVKDFNTLPEVSVMIMSLKAASLGLNMVAACHVLMLDLWWNPTTEDQAIDRAHRIGQTRPVTVLRLTVRDTVEDRILALQQKKRKMVASAFGEDGTGGCQSRLTVDDLKYLFMM

SEQ ID NO: 8410 - protein, 219 aa, Glycine max
  unsure (1)..(219): unsure at all Xaa locations
GSLEEFQEEFKDINQEEQISRLHKMLAPHLLRRVKKDVMKELPPKKELILRIELSSKQKEYYKAILTRNYQILTRRGGAQISLINVVMELRKLCCHPYMLEGVEPDIDDAKEAFKQLLESSGKLQLLDKMMVKLREQGHRVLIYSQFQHMLDLLEDYCAYKNWQYERIDGKVGGAERQVRIDRFNAKNSSRFCFLLSTRAXGGLEINLATADTAIIYDX

SEQ ID NO: 8411 - protein, 194 aa, Glycine max
  unsure (1)..(194): unsure at all Xaa locations
XLEXRMHSSKFSSTDSCDLLICDEAHRLKNDQTITNRAFAGIVCKRRILLSGTPLQNDLEEFFAMVNFTNPGILGDIAHFRRYYEAPIICGREPAATAEEKKLGAEQSAELSVNVNRFILRRTNALLSNHLPPKIVEVVCCKLTPLQSELYKHFIQSKNVKRAITVELKQSKILVYITALKXLCNHSKLIXFDX

SEQ ID NO: 8412 - protein, 258 aa, Glycine max
  unsure (1)..(258): unsure at all Xaa locations
XLDGSSTIQDRRDMVRDFQHRSDIFVFLLSTRAGGLGINLTAADTVIFYESDWNPTLDLQAMDRAHRLGQTKDVTVYRLICKETVEEKILLRASQKSTVQNLVMTGGSVGGDLLAPEDVVSLLLDDVQLEQKLKEIPLQVKDKQKKKQPMRGIRVNEDGDASMEDLTSSVAQGTSDNDLSMDPEGSKSSNKKRKAFSDKPTSRPMNSQKMSEFSTTPMKPKRPKRIKKNVNEKFEDAFTGIAAXDPRADPISTSTKRF

SEQ ID NO: 8413 - protein, 490 aa, Glycine max
  unsure (1)..(490): unsure at all Xaa locations
XKNHRTQVARACWGLRAKRRWCLSGTPIQNAIDDLYSYFRFLRYDPYAVYTSFCSTIKIPISRSPSKGYRKLQAVLKTIMLRRTKGSLLDGEPIISLPPKSVELKKVEFSQEERDFYSKLEADSRAQFQEYADAGTVKQNYVNILLMLLRLRQACDHPLLVKRYNSTSRPKSSVEMAKKLPQEKRLCLLKCLEASLALCGICNDPPEDAVVSVCGHVFCNQCICEYLTGDDNQCPAPNCKTRLSTPSVFSKVTLNSSFSDQPCDNLPDYSGCEVEESEFCSQAQPYDSSKIKAALEVLQSLSKPQCFASQNNSVQSTSGESTDGLGSSSSNNSVGVGEKAIVFSQWTRMLDILEACLKNSSIQYRRLDGTMSVTARDKAVKDFNTLPEVSVMIMSLKAASLGLNMVAACHVLMLDLWWNPTTEDQAIDRAHRIGQTRPVTVLRLTVRDTVEDRILALQVSVGCSFWWKQKKQGAENFVAWPLLTLDMKII

SEQ ID NO: 8414 - protein, 217 aa, Glycine max
  unsure (1)..(217): unsure at all Xaa locations
NYFVQFRKIANHPLLIRRIYSDEDVIRFARKLHPMGAFGFECTLDRVIEELKNYNDFSIHRRQXHDYVLGMLRLSFSMDNXXALAELLPSLKEGGHRALIFSQWTSMLDILEWTLDVIGLTYKRLDGSTQVAERQTIVDTFNNDTSIFACLLSTRAGGQGLNLTGADTVVIHDMDFNPQIDRQAEDRCHRIGQTKPVTIHRDLSIILXLSHXHXKXV

SEQ ID NO: 8415 - protein, 456 aa, Glycine max
  unsure (1)..(456): unsure at all Xaa locations
VQIASQISRYRQSNSVEGLCALVSXLDKLNCLRREYFVQKYNNLSXLXYHVFENHHRYLRVQRLXRRGNSDEFRLVHTFSVNIFMVXMSPLWIYKYXSILDPKXCSFNTYVIKRLIFLLMSVLVVKXSCSKPYLQKRRKHERNXXKINNRYRQSIAFSIKKIVLLKILLDKLHESKHRVLIFRNLISKLDILXEYMSLXGFQSQWLDGSIKDELRQQAMDHFNAPGSDDFCFLLSTRAGGLGINLATADTVIIFDSDWNPQNDLQAMSRAHRIGQQEVVNIYRFVTSKSVEEDILERAKKKMVLDHLVIQKLNAEGRLEKKEAKKGGNFDKNELSAILRFGAEELFKEERNDEESKKQLLSMNIDEILERAENVEEKETDEXXNALLGAFKVANFCNDEDDGSXSCWIKPDAVLQAEEALAPRSARNIKSYQRLIHMKTNNNPNTTRPPGTGTACX

SEQ ID NO: 8416 - protein, 149 aa, Glycine max
  unsure (1)..(149): unsure at all Xaa locations
XKRQKLVNCFNDPSKDEFVFLLSSKAGGCGLNLIGGNRLVLFDPDWNPANDKQAAARVWRDGQKKRVYIYRFLSAGTIEEKVYQRQMSKEGLQKVIQQEQTDSLVAQGNLLSTENLRDLFTFHENIKSEXXMKTCNAVGVKQLMALEAX

SEQ ID NO: 8417 - protein, 138 aa, Glycine max
  unsure (1)..(138): unsure at all Xaa locations
XIGRPRGRLDGSTQVAERQTIVDTFNNDTSIFACLLSTRAGGQGLNLTGADTVVIHDMDFNPQIDRQAEDRCHRIGQTKPVTIHRLVTKGTVDENVYEIAKRKLVLDAAVLESMEEINXXGELPEKTMGEILSAILLS

SEQ ID NO: 8418 - protein, 206 aa, Glycine max
  unsure (1)..(206): unsure at all Xaa locations
XSSRIGSRAARRRQKGMTIALILSXPGRGNSENNDVENGDDNFITNKRKNANTLHKFEGGTLIVCPMALLSQWKDELETHSKEGSISIFVHYGGARTTDPWMISGHDVVLTTYGVLQAAYKNDGENSIYNKVKWYRVVLDEAHNIKAHRNQTAQSAFVLSSHSRWCLTGTPLQNSLEDLYSLLRFMRVEPWCNLAWWQKLIQRPYX

SEQ ID NO: 8419 - protein, 148 aa, Glycine max
  unsure (1)..(148): unsure at all Xaa locations
ARKGARVGTSTKLREYELQYILQDNGVLLTTYDIVRNNSKSLQGNNYFDDEDNEEGATWDYMILDEGHLIKNPSTQRAKSLLEIPSAHRIIISGTPLQNNLKELWALFXNFCCPELLGDHKWFKERFENPILRGNDKHASDREKRVGS

SEQ ID NO: 8420 - protein, 179 aa, Glycine max
  unsure (1)..(179): unsure at all Xaa locations
XREAAMAVQGKMVDSQRKKSKASLRKLEKQPEWLKGGELRDYQLEGLNFLVNSWRNDTNVILADEMGLGKTVQSVSMLGFLQNAQQIHGPFLVVVPLSTLSNWAKEFRKWLPDMNIIIYVGTRASREVCQQYEFYNEKKPGKPIKFNALLTTYEVVLXDKAVLSKIKWNYLMVDEAHRX

SEQ ID NO: 8421 - protein, 240 aa, Glycine max
  unsure (1)..(240): unsure at all Xaa locations
XHASGSIHPWLVKSAVCAEKFFTQAQLMELEKCKFDLRIGSKVKFVLSLIYRVVKKEKVLIFCHNIAPVKLFVEYFEKYFGWTKGREVLVLTGELELFERGRVMDKFEEPGGVAKILLASITACAEGISLTAAPRVIMLDSEWNPSKTKQAIARAFRPGQQKVVYVYQLLVTGSLEEDKYKRTTWKEWVSSMIFSEAFVEDPSQWQAEKIEDDILREMVAEDRSKSFHMIMKNEKASTNK

SEQ ID NO: 8422 - protein, 206 aa, Glycine max
  unsure (1)..(206): unsure at all Xaa locations
QLLKETEKYLQKLGSKLQEAKTAAGRFGQDVDETGNVSFLENSETENVDESDQAKHYMESNEKYYKMAHSIKESIAEQPSSLLGGKLREYQMNGLRWLVSLYNNHLNGILADEMGLGKTVQVISLICYLMEAKNDRGPFLVVVPSSVLPGWDSEINFWAPGSSXNVYAGPPEERRRLFKERIVHQKFNVLLTTYEYLMNKHDRPKX

SEQ ID NO: 8423 - protein, 132 aa, Glycine max
  unsure (1)..(132): unsure at all Xaa locations
XLSTRSGGVGINLVGADTVIFYDSDWNPAMDQQAQDRCHRIGQTREVHIYRLISESTIEENILKKANQKRALDNLVIQSGGYNTEVXLKRLDPMELFSGHRTLSIKNIVKEKDQNNGEGSVTNDDGEAALKX

SEQ ID NO: 8424 - protein, 242 aa, Glycine max
SYSDENSDYNVLAGEKMRYGNDLLQRKDDNGFFLKGWWNDLLHGKIYKEIDHSGKMVLLMEILTMSSDVGDKVLVFSQSIPTLDLIELYLSRIPRRSKRGKFWKKGKDWYRLDGRTESSERQKLVERFNEPLNKRVKCTLISTRAGSLGINLHAANRVVIVDGSWNPTYDLQAIYRSWRIGVDGSILLRGSLSQDGLYVFSNLLSSPLLEKLLPLFICLPFLICLLIGIMSVLVHSILVILG

SEQ ID NO: 8425 - protein, 173 aa, Glycine max
  unsure (1)..(173): unsure at all Xaa locations
XAREAAMAVQGKMVDSQRKKSKASLRKLEKQPEWLKGGELRDYQLEGLNFLVNSWRNDTNVILADEMGLGKTVQSVSMLGFLQNAQQIHGPFLVVVPLSTLSNWAKEFRKWLPDMNIIIYVGTRASREVHQQYEFYNEKKPGKPIKFNALLTTYEVVLKDKAVLSKIKWNYLM

SEQ ID NO: 8426 - protein, 205 aa, Glycine max
  unsure (1)..(205): unsure at all Xaa locations
XYXFFFFFAENTNGCLDSSSCENLEEQDVXXLDDQESSYVTLEGGLKIPDNIFEALFDYQKVGVQWLWELHCQRAGGIIGDEMGLGKTVQVLSFLGALHFSGMYKPSIIVCPVTLLRQWKREAKKWYPKFHVELLHDSAQDSAPRKKRAKSEETDYESNSKSDSDYEKRSKSTRKWESLINRVMRSESGLLITTYEQLRILGEQG

SEQ ID NO: 8427 - protein, 1187 aa, Oryza sativa (japonica cultivar-group)
MEDDDDDQRLLHSLGVTSADIHDIERRIISQATTDPADSSGPTINGGHQPDDALAKLHHKLRSVQIEIDAVASTIKGAKLKQPSGNKPHEHKGKDQPDHHGAGHLQQALAADRLTSLRKAKAQIQKEILQSHPSPSASNRKDKMLAMLVQDEPRHKKPPVGPKNIVKRPMKTVTYDDDNNFDAVLDGASAGFMETEREELIRKGLLTPFHKLKGFEKRVELPEPSHRQDDSAGQTEEAMEASRIARVAQSLKQIAQNRPATKLLDSESLPKLDAPAAPFQRLGKPLKRPVSPSSDEQEKKRPRNKTKRPLPGKKWRKANSIKESSLDDNDVGEAAVSVSDDDEDQVTEGSDELTDVTLEGGLRIPGTLYTQLFDYQKVGVQWLWELHCQRAGGIIGDEMGLGKTVQVLSFLGSLHNSGLYKPSIVVCPVTLLQQWRREASRWYPKFKVEILHDSANSSSKKSKRSSDSDSEASWDSDQEEAVTCSKPAKKWDDLISRVVSSGSGLLLTTYEQLRILGEKLLDIEWGYAVLDEGHRIRNPNAEITLVCKQLQTVHRIIMTGAPIQNKLSELWSLFDFVFPGKLGVLPVFEAEFSVPITVGGYANATPLQVSTAYRCAVVLRDLVMPYLLRRMKADVNAQLPKKTEHVLFCSLTTEQRATYRAFLASSEVEQIFDGNRNSLYGIDVLRKICNHPDLLEREHAAQNPDYGNPERSGKMKVVEQVLKVWKEQGHRVLLFTQTQQMLDIMENFLTACEYQYRRMDGLTPAKQRMALIDEFNNTDEIFIFILTTKVGGLGTNLTGANRIIIYDPDWNPSTDMQARERAWRIGQTRDVTVYRLITRGTIEEKVYHRQIYKHFLTNKVLKDPQQRRFFKARDMKDLFTLQDDDNNGSTETSNIFSQLSEDVNIGVPSDKQQDQLYAASATPTTSGTEPSSSRHGQGKEDHCPDQADEECNILKSLFDAQGIHSAINHDAIMNANDDQKLRLEAEATQVAQRAAEALRQSRMLRSHESFSVPTWTGRAGAAGAPSSVRRKFGSTLNTQLVNSSQPSETSNGRGQSLQVGALNGKALSSAELLARIRGTREGAASDALEHQLNLGSASNHTSSSSGNGRASSSSTRSMIVQPEVLIRQLCTFIQQHGGSASSTSITEHFKNRILSKDMLLFKNLLKEIATLQRGANGATWVLKPDYQ

SEQ ID NO: 8428 - protein, 894 aa, Oryza sativa (japonica cultivar-group)
MAPPQMYERRLLAAASLLLSADAQGQPPHAAAQLGVGVTAELKPHQVDGVAWLIRRYQLGVNVLLGDEMGLGKTLQAISLLSYLKIHSISPGPFLVLCPLSVTDGWLSEFNKFCPSLRVIQYVGDKLHRRDLRRMMFQDVQKSSSSSHSTELPFDVMMTTYDIALMDQEFLSQIPWHYVVIDEAQRLKNPSSVLYNVLEQRFIMPRRLLLTGTPIQNNLSELWALMHFCMPSIFGTLDQFLSTFKQSGDSLTGGETNKTDKQFKILKHVLRAFMLRRTKALLIQSGILALPSLTELTVMVPLTPLQKKLYLSVLRKELQTLLTFTGGLSRHQSLQNIVIQLRKASSHPYLFSGIEPEPYVEGEHLVQASGKLVMLDLILKKLHEVGHRVLLFAQMTQTLDILQDFLELRQYTYERLDGSVRAEERFAAIKSFSSQPTKGVVRDDNQSGAFVFMISTRAGGVGLNLIGADTVIFYEQDWNPQADKQALQRAHRIGQLNNVLSINLVSQRTIEEVIMRRAERKLKLSHSVIGEEDATYGKGKYVENEASDMRSIIFGLHLFDTSDTTAETMNDDTASETIKEETMLKLKSMSEKVVLMRSHEPSEKDERAFEINPNMTDNSGAVVTRVSDSVNVDPDFNEAAYLSWLEKFKESSHSKENTRAELERQRIAPEEKFLKREAIKKKVEEKRLAKWESLGYQTLKIKDPDILPNQNIPDSGSVQLVYGDCTNPSVVCPAKPAIIFSCVDNSGTWGHGGMFDALANLSTCIPDAYNRASEFDDLHLADLHLIQLDEAKCNRSLDAPLWVALAVVQSYNPRRKVPRSEISIPDLELCLSRVAFSAAQHSASIHMPRIGLQGGGGGGSQRSEWYTIERLLRKYSSLHGVDIFVYYYRRGNKH

SEQ ID NO: 8429 - protein, 2215 aa, Oryza sativa (japonica cultivar-group)
MKHLNDVRVGSKVARMYLVQANCVGGYKGRYFYECVECDLGGNLLCCDSCPRTYHLECLNPPLKRAPPGNWQCPRCRTKKVSLKLLDNADADTSKRERTRRMRTSTTSDSPSPSPQNKASFNTSRGAAFRDDEPGAKDNEVEKRKPLILHLKKRSTKELSTDTTSSKSGLLGKSSEEKQEKHGSALKVKKHLHPMELSPKKYKNKKQHNHRDSKRSEAKKVQYLASDVDSDSSMEPSTSLEHSESPPPKRKSLDGRTPASSTKKGKKKVKFVDKKHPENAVHITEKEHGGAGDKITTQGDLQVDRILGCRLQTSQIISPAHASSEQIDMAPPSASGAPEPSQALLKGLHEEIQSSNSDTNVTEDACADELANDGGENNLDCSDAQKESNVRSHGHKESLNAKEIMNTASACSADQIVTVKDAGAVQTYVTASVNGEYETVTDIPEEKNDTKHPVSKADTEVHTKQEHTPDSKLHGKIQETELKEHDGTTYEFLVKWVGKSNIHNSWISESELKALAKRKLENYKAKYGTGLINICKEQWCQPQRVIALRTSLDEIEEALIKWCALPYDECTWERLDEPTMVKYAHLVTQFKKFESQALDKDKGGSHAKPREHQEFNMLVEQPKELQGGMLFPHQLEALNWLRKCWYKSKNVILADEMGLGKTVSACAFLSSLCCEYKINLPCLVLVPLSTMPNWMAEFASWAPHLNVVEYHGSARARSIIRQYEWHEGDASQMGKIKKSHKFNVLLTTYEMVLVDAAYLRSVSWEVLIVDEGHRLKNSSSKLFSLLNTLSFQHRVLLTGTPLQNNIGEMYNLLNFLQPASFPSLASFEEKFNDLTTTEKVEELKNLVAPHMLRRLKKDAMQNIPPKTERMVPVELTSIQAEYYRAMLTKNYQVLRNIGKGGAHQSLLNIVMQLRKVCNHPYLIPGTEPESGSPEFLHEMRIKASAKLTLLHSMLKILHKDGHRVLIFSQMTKLLDILEDYLTWEFGPKTFERVDGSVSVAERQAAIARFNQDKSRFVFLLSTRSCGLGINLATADTVIIYDSDFNPHADIQAMNRAHRIGQSNRLLVYRLVVRASVEERILHLAKKKLMLDQLFVNKSESQKEVEDIIRWGTEELFRNSDVAVKDNNEASGAKNDVAEVEFKHKRKTGGLGDVYEDRCADGSAKFIWDENAITKLLDRSNVPSTVAESTDGDLDNDMLGTVKSIDWNDELNDDPGATEDIPNIDNDGCEQASEAKQDAANRVEENEWDKLLRVRWEQYQTEEEASLGRGKRLRKAVSYRETFATIPNEALSEDSDEEDEPKREYTAAGLALKEKYEKLRARQKERIAQRHVIKNYADDRLEEFMKLYDSSANPLRIVEDPNPVQPSGAKRLGESTAEMKQSSKKTKRYPEIPQELYAKLTGNAASSKHHPKAADISNSGTPHHLLPVLGLCAPNADQMNSYKGSVCGPSTKEQKRASGELANKPLLTPAVDHSSEQKHDGQPTPCKPMFPGSSEETLRRLNNIIPDSYFPFQPIPPISGKGIGDHVENPVSSIPSFQGKLGLPNFSLEDSIPLKHLKSVPDLFPNLSLGTSNEYLRNCVPELPNSSFLPSFMADIAGTSKQKNKFMADMSGLLPGLAINPVQQIHSSMPENHKKVLDKLMMRAQYSSSKFLKNASNKFLKKSLKPDYWSEDELDALWIGVRRHGRGNWEAMLRDPKLKFLSHRSHEELASRWILEEQKIIEEPMPTATRSSNSTSFPGISDAMMSRALNGSSFSKLRMEPPKLQSHLTDIQLGCNDIPTRFSHVEPTNYMNLSEGGPSLTPWQDFKNRSGHSGDFPGPLDKWEKPDMGLIPPFMPNPFMKESIGSLPINRHSSNSIQQNEVGSSSHESILHGFSDGQAKLFHEMQRRVKLGKLPIEMNLNHTKLSDPLAENSGDFESSKPNKLPHWLQEAVRAPPSKPPECELPATVSAIAQSVCLLLGEQKPAIPPFPIPGPRLSLPKDPRSAPKKRRVHKVQQASSLVDHSKTTVGQGDHNSTPSAPLSMEAAPASPAVIKSSDTPSLNLNSPSSSSAGSRGQDASTPSTFEEPERTMEVSEPASVAAATCPSRPEPPETGTHRIEFSAVDDMDTGSCRSPVRDTPDPDNQKSELSGSGNTPTELSVLPLVDAPGTSSEPAVVPVSSDEESTQEGVPGKAVSTGDQEKRTPPDESENSGAANPVSAAQTADEDKVDEMITDEH

SEQ ID NO: 8430 - protein, 1141 aa, Oryza sativa (japonica cultivar-group)
MPPARGGRRGRGRGRRGGRGGAASRARGENVVDVEPIKLGDDDAKVDPQTKSPNEEITSAEVCEVETSEASPLGAPEEDEGKPGSTRNLKRLRKTITIDSAAAEEHGAESDDEEFDVLATASCQELAPCRRSKRLRCKPTRKRSKPTGKRDLGGKESEDDVFANSSSSSQDDAGKLASRRSKRLRERLTSDYFDGDVDENCSAPRRGSKRLRNRLGPRNISYADDDSDTDDNRKKIVPCRRTSKRLQEKRKAHDVSEESYTEASSCMLSTSSSSDDELLHNSIKPGRRNSGGPSCSICKIGIACSFLIKCKNSTCSRSFHTFCLDPPLQEIIGTWECSWCKSNAAPAVKVTEVLTSKKIQRLVGHRRILQEADFQYQFLVKWQSLSHHHDCWVPLEWLHVSDPLRVQSYLNKNCLPKEVYSEDQRKLEWFEVDHAIACRRKFHHEGLCDVLATFQDNQDFDGYEFLVKWKGLDYCEATWEPCCTDGVQQAVSMLVRRHKNASKRVNISQTCLDGSKIEEVHCGALYDYQLQGLQWLIDNFKTRRSVILADEMGLGKTVQVVCFLYHIIKESLTASPALILAPKSILLQWEKEFCQWASDLNVIVYQGDRDSRKCIQVHEMYSSDGKPLFDALVTSYEFVQIDKAVLQKFKWSTIVIDEAHRMKKLDCNLAACLKRYCSEFRLLLTGTPLQNNIMELFSLLHYIDPDEFSDPKADGLFSPIESGRDLTMDEKVARIHNILKPRMLRRMKSDVLTDSMPVKKWVEVPCALADSQRELYINILERNYSKLNSAIRNGRKLSLNNILMELRKCCNHPVGLEVGQQATEDVFLSLIASSGKLQLLHKLLPRLKERGNRVLIFSQMTRMLDILEDFLCSLGYKYARIDGQTSLSARQESIEEYKNIDSETFIFLMSTRAGGMGVDLPGADRVIIYDPDFNPFMDLQAQSRAHRIGQTRPVVVYQLITKCSVEEKILQKSKQKLAIENMLMNSSKKPSADELQSILLHGAKTIVDRKISATSIHYDNEAIENLLKLDPSTGEKCSSDDNGYLGSIVSFAHGVEDEAPSSPKVEDLKVLKPATPKVDLGRGKRQRKVVNYADEVENEDSDDMYAPEGSSTSEFSSSSSDDETDSALQLQIVTVPDIDAD

SEQ ID NO: 8431 - protein, 1692 aa, Oryza sativa (japonica cultivar-group)
MAFFSNSGSRADSGGYNLNEKAEDEAAYESVGDRDVDLNSRQWNLNEKAEDAYHSDEEQYDGGRSGPNSSENKSVQNARKINGPSGPWGTNFLKDCGPTQTAKEEQLTSNRGMEYGSAASSHDDMDASGEDDELNRGHGEVPAEEMLSDDYYEQDGEEQSDSLLRGGMRRPSCSTSGAAAESVSSRQKKKPTKYNAYEDEDDDEYNDENDDEDDDDADDDPDDVDFEPESDTEKAADKDKFVDSENSDEEEDDELELSDDDEDDFVENKRQCKRLKVGGTKTSKGRKLPVQVQRKRGVSFTDEDSSGKDSDAPSDTDISHRAKKPDKLHQKTVGRKDVFSNVDSHEVRTSGRRRTARNISYAESEESDDSEEKLAKQQKVLKEDPEEEEGETIERILWHQPKGVAEEALRNGQSTQPTVISFTSDVDQSWDDVEFYIKWKGQSFLHCQWKTLSELQNVSGFKKVLNYMKRVTDELRYKRSLSREEVEVHDVGKEMELDLIKQYSQVERIFADRVSKVDGDDLVPEYLVKWQGLPYAESTEKDTDIEFAQDAIDEYKAREAATSILGKTVDFQRKKSKSLRRLDDQPEWLKGGKLRDYQLEGLNFLVNWRNDTNVILADEMGLGKTIQSVSMLGFLHNAQEINGPFLVVVPLSTLSNWAKEFRKWLPDMNVVVYVGNRASREICQQHEFFTNKKGGRHVKFHTLITTYEVILKDKAALSKIKWNYLMVDEAHRLKNCEASLYTTLLEFSTKNKLLITGTPLQNSVEELALLHFLDPSKFNSKDIFVERYKNLSSFNETELANLHKELRPHILRRVIKDVEKSLPPKIERILRVDMSPLQKYYKWILERNFQNLNKGVRGNQVSLLNIVVELKKCCNHPFLFESADHGYGGDSIGDRNKVERIVMSSGKLVLLDKLLMVRMLDILAEYLSLRGFQFQRLDGSTRADLRHQAMEHFNAPGSDDFCFLLSTRAGGLGINLATADTVIIFDSDWNPQNDLQVLDHLVIQKLNAEGRLEKKESKKGGSMFDKNELSAILRFGAEELFKEDKTDEETKKKLESMDIDEILERAEKVETKGGEGEEGNELLSAFKACSVHYHMTCDSDIMLKFYTSVANFSSGEDDATFWSRLIQPDASDMVEETLAPRAARNKKSYVEDHQLDKNSNRKRRGIDAQEKPRRRSSRTMDTAVSLPLIDGSAHQVREWSFGNLSKKDATRFVRAVKKFGNPSQIGLIVDDVGGAIAKSSVDQQLELFTLLIEGCQDAVKNNMDAKGTVLDFFGVAVKAHELIARVEELQFLARRIARYKDPVRQYRIQAPYKKPQWSASCGWTEDDARLMVGIHWYGYGNWEKIRLDPKLSLTAKIAPATLGERETFLPRAPNLDNRASALLQKEFANLRGKSSKAKGGPRQAIDNESNGGARSLRGRQKDTKIKEDNNSIKDDFKKRKVVEPEAREEGEISESEAETKYRQDKEEKWLEWCSEVLDDEQEILKRLDRLQNTSVNLPKEKVLSRIRKYLQIIGNKIGEIVDQHSESYKQSMAMRLWNYVANFSSMSGEQLHDLYLKLSQDQMEAGVGPSHGGNFASVPPNRGPKSNQLHPSRNQRSTRSVQYVSESFNNGENTGNSEAWKRRRRSEPDNQFDNQPLYQAPPIMTNGNRLQESSSSAGILGWAPVEMRRYGNERPKRGVHPSRFPPGHGPLL

SEQ ID NO: 8432 - protein, 821 aa, Oryza sativa (japonica cultivar-group)
MASTSRRGGGEDDDDEPYLLGFIVANAVGLQYYQGGRAITRRESVGLVREPHNPHDANAIRVDNARGEKIGHIGRRAAAALAPLLDAGHVAAAHGIVPKPASKRLYSLPCQVHLFARPPHAALVAAALAASGIDLIHVDHPEFALSESAIVQEQQTKRSRGDVDRLFSHVGKGGRARIAPMEAPRDVVVSELFEHQKAALGWLVHREESCDLPPFWEEDNDGGFKNVLTNQKTNERPPPLKGGIFADDMGLGKTLTLLSLIGRSKARNVGGKKARGAKRRKVEEAVEEESRTTLVVCPPSVFSSWVTQLEEHTKTGSLKVYLYHGERTKEKKELLKYDIVITTYSTLGQELEQEGSPVKEIEWFRVILDEAHVIKNSAARQTKAVIALNAERRWVVTGTPIQNSSFDLYPLMAFLRFQPFSIKSYWQSLIQLPLERKNNGIGLARLQSLLGAISLRRTKETESGSKSLVSIPPKTVLACYIELSAEEREYYDQMELEGKNKLREFGDRDSILRNYSTVLYFILRLRQLCNDIALCPLDLKSWLPGSGSSLEDVSKNPELLKKLASLVDDGDDFECPICLAPPAKTVITSCTHIYCQTCIMKILKSSSSRCPICRRSLCKEDLFIAPEIKHPDEDSSVNLDRPLSSKVQALLKLLRRSQSEDPLSKSVIFSQFRKMLILLEGPLKAAGFNILRLDGSMTAKKRSEVIRQFGCVGPDSPTVLLASLKAAGAGVNLTAASTVYLFDPWWNPGVEEQAMDRVHRIGQTKEVKVVRLIVKDSIEERMLELQERKKKLISGAFGRKKGGKEHKEIRVEELQMMMGMK

SEQ ID NO: 8433 - protein, 1492 aa, Oryza sativa (japonica cultivar-group)
MDENRKLSDDMSKKMEPIHSNGEAGEDKTIIIEPESDANKLEVETDARHGICEAHKAHEYGTMENDLHEEASTTDDDSENDSYEYLLRESDNEQTSESDAGEGDNEAPLTDEEVETLITEFLDAESKAAQAQESLEKESLEKIESEVRLELSESLQGNELESAVSTEMKQYKKEWESELDDLETHIAVLLEQLDAAGVELPSLYKSIESQVPNVCETEAWKNRAHWAGYQVPEEANKSIRKADEYLQSCRPVRRKHGRLLEEGASGFLAGKIPVGDDGSAQCHEKSWNAFNELTKSKEYAESSFGSSNWASVYLASTPQEAAALGLQFPGVDEVEEIAEVEGAVSDIKGVDEIELSEVQRRKYRKVPEEDDAKMTKRLQRHLKERRTRHLHKENIGLASSSNGCCELPPKKLKTYENGVSVELAKRTREDDVEFDNKRSKTVIIESDDDMQTDSKPDSAPSENADEIIDLDIFPSQSPKLGDKVRPKPFKCTICTEMLNVPEVHRHPVLDVIICGSCRFLVIEKNRLEDPVSGGYCTWCVKSEQLQSCSSCKLLFCRNCLSKNFGEEGLSEARVAGWQCCCCLPSQLEHLISDCDKALGGVESSDPENDFAELSVLESNGPFSKHKMKKRIRRIMDDEELGEETKLKIAMEKARQEHLKSMQEQSASKLKSNNIGISLEAPSEVSEYVGDGHIVNLAREEDEAPVRIPSSISAKLKPHQVSGIRFMWENVIQSVKKVKSGDKGFGCILAHNMGLGKTFQVITFLYTVMRCIQLGLRTALIVTPVNVLHNWKKEFIKWCPAELKPLRVYMLEDVPRCRANIQYLLKKWRIKGGVLLIGYSSFRNLSLGRSARDKTVANEITNALQMWVLIQSIYICHNQCGPDILVCDEAHIIKNRRADTTQALKQVRTQRRIALTGSPLQNNLMEYYCMVDFVREGYLGSSHEFRNRFQNPIENGQHTNSTSDDVKIMNQRSHILYEQLKGFVQRMDMNVVKNDLPEKKVFVVTVKLSQLQRKLYRRFLDVNGFSSSAASEKSFQRSGFFAKYQTLALIWNHPGLLQMAKQKGNLRQEDVESFLMDESSSDDNIENYLPNGEKLRSRNDQLSKKSSDVVNEESNWWENLLDENAYKEADYSGKMVLLLDILSSCSELGDKALVFSQSLSTLDLVEFYLSKLQVNGKEGKYWKQGKDWYRIDGSTPSSERQNLVERFNDPENIRVKCTLISTRAGSLGINLHSANRVILLDGSWNPTHDLQAIYRVWRYGQTKPVYAYRLMAHATMEEKIYKRQVTKEGLAARVVDRQQVSRTISKEEMLHLFEFGDEELLEQSGSTMNGHSKVGTEKPPTPNSSETTEHLPLDRLMVNLLHDHSRWIASYHEHETLLQENEEERLTKEEQDMAWLSYNKLLEVAPRKATHDAERKPSTVPTESSLIQPPKATSRSRQPQQPKITSNNQKKCNNLSHLLTLRSQGTKPGCSTSCKECGQDISWETLNRDGRSR

SEQ ID NO: 8434 - protein, 719 aa, Oryza sativa (japonica cultivar-group)
MAGLGGGWGGGYDDDDDWGLSAEQLDQLERDAYRKLAERKASSSAASTATSPLPSAAYSPVKNSHHHPASRVSQESCFGKGNMSKVSVHLFLHSTGVIAAKFQYHQKLVDAVHKIPKASWNGKERVWMFPHSSLSVAEEVLSTVPGIAVEVQKLDPLVKRALTASLYAGDLRDLYGKIPTDVESKLMPFQREGVRNVMLQILMAQTGYGARGLRFALQHGARTLIADEMGLGKTLQHDISGHSSTLPPSLGHGDMALLDSSVIVWYAGAIAVASCLHDAWPVLVISPSSLRLHWASVVLPQTGGSNKAGYRLVYSNTKGDFNLDGVFNVISYDVVPKIKDMLLDLDFKIVIADESHFLKNAQAKRTMHSLPVLQLSGVWSLATPPVNDNWAQKAKYVVLLSGTPALSRPIELFTQLQALYPTVYKNVNEYGNRYCKGASNHEELHNLMKATVMIRRLKKDVLSQLPVKRRQQLETVKIKIQSCDSQETMDSLKFAQKNLINKIYNDSAEAKIPAVLDYLGTIIEAECKFLIFAHHQSMLEAIHQHLLKKKVKCIRIDGQTPVPVRQTLVTDFQNKDDIKAAVLSIKAGGVGLTLTAASTVIFAELSWTPGDLIQAEDRAHRIGQVSSVNIYYLLANDTVDDIIWDVVQGKLENLGQMLDGQEKTLDVSQSDTRPSPSKQKTLDAYLKRCSNSTEADQPKLKNPSHAVFCITQLNARALQ

SEQ ID NO: 8435 - protein, 1272 aa, Oryza sativa (japonica cultivar-group)
MSIVYNIAMIKQEMSSCKIMVGNMQDQLRIYPLLAAFEVLLRHDARLITIKKNHQEDKCLCLFVVILYKNQCPGNAEKVITDRRAEVVTINDIFLLQKLQPEVHEGSMKWSFSKDRLSLNKGRLISARFSSEITHLIVLSILRGMEFNIKLVEGQIVYQIIKGDQAQWNLDSMAIPPGFGNTMEIISFQLRDEALRPTITNIPITHVKKNNITEDMRFTVKSEMDSELDRALDVEILYEHVDLRRSKRLKTQPDRFTSYDTPRFLSGYKKKEASSSPTKHVRGAVHCDSPVDDSKKEVESCCVEIPGNVTQKQTGVHSPMVDEKSNSPEGQHKNTTKRTTCSLVKEKASSPEGQHEKTTKRTTCALPVKEKASSPEGQHKNTIKRTTCSLPVKEEPSSVEIEEKSSKEQSAPEFHIPRTPAQNKEKHNRPPFSCKPKLFTSSGTLGVNCEPAFCQKVGGKRKRHMCEREYKQMIDQCIGNIESEMERDSMFNFDANMMNYVQHSYREEDFTWPPSADNQEVEEDELEELWKEMDYSLTTLALLEQKQVMAQSRINMLVDNFDGLRLDCLTLTDDYRCYYQKKEKFAESGSVNESTDYFGKVGGIPCHHECILDEELGLACRLCNVVCTEAKDIFPEMFNGNDYKDRPGCSNICLDDDILDPSLLANLAPELSELKNSGSVWSAISDLDPKLLPHQRKALDFLWKNLAGSIQVEGMDNSNVSTGGCVIAHTPGSGKTLLLISFLVSYMKAHPRSRPLVLTPKAAIHTWKREFEKWGISLPLHVFHHANRSGKPLGAMDSKLRSLLNNFHRPTWTNMRLMDSLDKLFKWHAHPSVLLMTYSSFLGMTKQDSKVRNRYREFIAEVLMNNPGLLILDEGHNPRSNKSKLRKLLMKVKTEFRILLSGTAFQNNFEEYFNTLCLARPRFIGDIMSELVPERKRETVGRRAKHQEAVARRAFVEKVGQKIESDNKHIRSDGISLLNKLTRGFIDSFEGAKLINLPGIHVYTVFMKPTDIQEEMLAKVTMPKLGSSRFPLEVELLITIGSIHPWLIKTTKAVSTFFSPAEVKKVERYKRDFAAGCKAKFVIDLLHKSSFRGERVLIFCHNVSPITFLVKLIEMVFGWRLGEEVLVLQGDQELPVRSDVMDKFNGDSAGKRKVLIASTTACAEGISLTGASRLVMLDSEWNHSKTRQAIARAFRRGQERTVYVYLLVASGTWEEEKYNSNRRKAWMSKMVFLGRYVDDSSQNRVTDIDDEVLKELADEDHTGTFHMIVKQD

SEQ ID NO: 8436 - protein, 1082 aa, Oryza sativa (japonica cultivar-group)
MEEAAAAAADFDGGFGGAGEDNLSMPLGDFMAFLDNEDWKEQQHEWRWAINGHQAVGIGEGQTGSSLVGNQGLEMPVDSTSSENAFQNHEDFLENSRNGNPEMHLPMDALNHAKTVDEEIVPPYEDYTNGLYYDSGCDMFAEQSGLSEVKCEGTGPMLGNSEQEGNHFTSVPMFDHSAVIPDIPYTELNIGDVPGSMQNGNGSCLTVQGEYLQGEYQEYPQPDYGSFDMANEIVLHDLPQNNQSYELEQLPQNICESSSMQVGSPDQYCDDTSLSDYYMDDVSSIESMSSEQNRSEDICFRRLQHNFQQSVCANPNLPRFGGRYRPHEERMTLRLALQPLLDAPLASSLLKIALSWMVQKERNGSSCSGGILADDQGLGKTVSTISLILTERSPVPSSAVKQEPCEAVTLDDDDEDDDAEPHLKKPALAHLADTCKPEATSSTIKTENPIANVKARPAAGTLVVCPTSVLRQWADELRNKVTSKANLTFLVYHGSNRTKDPNDLTKYDVVLTTYSIVSMEVPKQSSPDSDDEEKGKPDRYGAPVGSSGSKKRKTSSSKKNKSGSTPESKLPEKPLAKVAWFRVILDEAQSIKNYRTQVARACWGLRAKRRWCLSGTPIQNAVEDLYSYFRFLRYDPYAEYKKFCFMIKTPISRNPITGYKKLQVVLKTVMLRRTKATMLDGKPIISLPPKTVSLKTVDFTSEERAFYNTLEAESREQFKEYAAAGTVKQNYVNILLMLLRLRQACDHPHLVRGHESTSSWMSSLEMAKKLPVERQQSLLVCLQSCSAICALCNDAPEDAVVTICGHVFCNQCILEQLTGDDSVCPVSNCRVRLNSTSLFSRGTLECALSRSTCEFLSDDSCEDMVQGKQPRFDSSYASSKVRAALDILLSLPKLDLTHMSDDKNKIVHPDKINGNSTPSEYAGTKITEKAIVFSQWTRMLDLVEVHLKSSHLSYRRLDGTMSVAARDRAVKDFNTNPEVSVMIMSLKAASLGLNMVAACHVLLLDLWWNPTTEDQAVDRAHRIGQTRPVTVSRLTIKDTVEDRILALQEKKREMVASAFGEDKSGAHQTRLTVEDLNYLFMV

SEQ ID NO: 8437 - protein, 570 aa, uncultured crenarchaeote 4B7
MEKFGTLEFVLDRYSGTWCWKISGNRAVNMVSKLIPRGWYGDKPDEVIVSDNDGNIKKLKMINDRYTFELLSKSVWNRKIAPLIIKKIKIPKIEKLSQAVPSKQFRGTLLDFQREGLDFLIKSSGNALLADEMGLGKTVQTLAYLSKEKNSFPALIIAPLVTLTNWQREIQKFLKKKGKNGKIIEDGVPSSTMIRNGKLADIDEYDFYIINYELLNKRLPDLLNLGIRSLVCDEVQHLRSKTTQKYAAVKELAAAESVKYRVGLSGTPIYNRGSEIWPIVDILKPGLLGSFKEFCEYFCYVNEKGKAIVLENKRDTLRNQLTKHVMLRRKKSDVLKELKDKVRYPEMIHADEKFYKAELSKIWKKLEEEQKYAESAFDKSASYHRAIESERQAAGLAKLSHVTNFVTNIMEIEESVVVFCHHKAIHSLLHHSLSDYDPASIIGGQTDVVRQREIDRFQKGQTKLMIAGLRAGNVGINLTTAKYVIFAELDWSPAIHRQAEDRLHRIGQKNTVFAYYLVGKGTLDEHVAEILVDKSYEIDTILDKQGESFENKEKAKMILAQIHDKLGTKL

SEQ ID NO: 8438 - protein, 1400 aa, Dictyostelium discoideum
MSTIITTTNTSTANSNNSNNNNNNNNNNVNNNSKVSKLKCPTHFGYCRRIQPSSGKDKDRIYFKCKVLDCQFSKWFNTESDVELYNHQNKQTVPATPPQEHQQQQQQQQQNNLFSFNDDDIFASADKFYNPNKYNVNTNNGSNININNINNNNSIGKRRLSNSFDIMNEFNIDDSSIFEDDPIDTDYSTAPSSSKKRLVFDSSDNNNNSNNNNYNSNNNNLKSVSSNANGGNSLNVANIAPSANSMATTTTTFTSSNNNSPIKKLFNNSTLNKPIVNNVNNNNNNNNNNNNNNNNNNNNNNNNNNIINQQQHNVKNNNISPSKPQSKSSPILQSKQPEISFKPKVKPSEPTSPTSPTSPTSPTSPTSPTSPTSPTSPTAPTKITTPTKTTTPSSTNNMSIDFNDDIITDSYDEIFEKSKNERELRIQQQQHQQQQQQQQQQKQQQQKKQETQQQQQQQQQQEQPQFQPQQQPQPQQQRQKQKQNNDRIKCIPIEIEDEEDKVDIIDSKISNKQKPINKQKTRLAFDSDIIEIPDVTNEFNDTIKNNEDSNQINKRSYRVESIDTDLKWNNPNNKPMSKIKPKRNQAHQIIIDFQLYDLDIIGTTYPVPPIVGETEEILQQFKQSKGTRFEKEEIWKFPKSEYQNLVTMLQRLQSRTSSRFQLNTIPTEIFRYLHDPWYLEKQKLTKKQQLQHQQERAFQCKLPFDCTRIPVELFSTLLPFQMKSLSFCTQQLSGKCLIGDEMGLGKTIQALAISSYYRSEWPLLIICPSSLRLSWSKEVEKWFPSVDINVIMTGEDKANAMVNICSYDLVGRLLEKELLPRAFKAIICDESHYMKNSEAKRTKNVLKLVHTAKIRILLTGTPALSRPVELFPQMLALGASIYPTLNDFGLRYCNAFKGIYGWDYTGNSHLQELYVLIRGVMIRRLKNDVLKDLPPKVRIKVVVDTPTPKDVQNEVGSVFSKSNKLSMIQQFQKQPNANSIGGGGGGGQKDKIMHLYVETGRAKLKASSDYIINLIKKNEKFLVFAHHADIMNGLEEAIKSTGAGYIRIDGSTPAVQRQAFVTKFQNNASCKVALLSITAAGTGLTLTASNLVVFVELYWTPGVLRQAEDRIHRIGQTKTCYIHYLIGKNTLDDRIWPTICNKLEVLGETLDGQEEVLHTQNLDMRGRVNTINKYFIGKDGTIDLEKEDTDELVFSIIGDDPSVLQQQQFQQQLDDEDDEEESSNSKKSKNKSKKDQQQEKKNYQSLQFSQPPPPPIFKNQTTFRNINPNFKDYLNNKNNNNINNNNNNNNNNNNNNNNKNSNNYRNLKFHQYQNNFGTLNSHGNPNFNLHYNNNNNINNNINNNINNNNNNNNINNNKNNTNNPNNNDNNPNVITQYFQSNQGYDNNNNFNNISQYFSKK
